United States Patent Application Publication US 2018/0126003 A1 - sequence listing, part 13

SEQ ID NO: 18630 - DNA, 1829 bp, Artificial Sequence
  derived and/or modified sequence
gcgccctggagaacgcgtcggggctgagccggggtccagcagccgccgctatggacatcccgccgctggccggcaagatcgcggcgctgtcgctgagcgccctcccggtgtcctacgcgctcaaccacgtctcggcgctctcgcaccccctgtgggtggcattgatgagcgccctaatcctgggtctgcttttcgtggcggtctacagcttgtcccatggcgaggtctcctatgacccactctatgctgtcttcgctgtcttcgccttcacctcggttgtggacctcatcatcgctcttcaggaagacagctatgtggtgggcttcatggagttctacaccaaggaggtacttgggggacgaccagggagccccctaccgcactgcccgtctgagtctcccacctgcccccacagggagagccatacctgcgcacagcgcacggagtcttcatctgctactgggatggcactgttcactacctcctctacctggccatggccggcgccatctgcagaaggtgcaggaggcagggagagggtggcccctgaccctgggagagaagttgcatcctcagatggggtcccagggcagggtggagccagaagtgtctgtaggagaaatcaggacgcctctctagggctccagccaggggtggccaggagaaggttccagggaacgtctcaggtgtaggtggtggcctagcattgcttacatccaccctgtgcctgggcagccacttctgttcttggacagagggtctcactgttatttccccgttcaactccctgttgtcccttccatcctgggcaaaactgaaagggacccggagctgggaaacccacggtggtctccaggccctggctggggctctgagattacggagtgactacctgctggtcacccctccatcccctgctcaggaagagataccggaattttggactctactggctgggttccttcgccatgagcatcctggtgttccttacaggaaacattcttggtgcaagaggaacaaagaaagggactcctgcagcgtccggctgacctggcccttgtcatatatctcatccttgctggcttcttcactctgttccggggcctggtggtgcttgattgccccacagatgcctgctttgtctatatctaccagtatgagccatacctgcgggaccctgtggcctaccctaaggtgcagatgctgatgtacatgttttatgtcctgcctttctgcggcctggctgcctatgctctcaccttccctggttgctcctggcttccagactgggccttggtgtttgctggaggcatcggccaggcacagttctcgcacatgggggcttccatgcacctgcgcacacccttcacctaccgtgtgcctgaggacacctggggctgcttcttcgtgtgcaatctgctgtatgcgctgggcccccacctgctggcctaccgttgccttcagtggcccgcattcttccaccagccaccaccctccgaccccctagccctccacaagaagcagcattgagagagctgtggactcaggacccaggactctgtttacgtgcccagtcagccctacctggggaagcgggggttgggtgttttagagacaggagggacatctccgggtgtctttagtcttggctatggtagtttcagtccagtgggtgggatggagaccaacgaccaagtgttcctgcaaggagagcctcccacagctgtcaccatgctccaactcccacacaaacgcttctaccccttccagaacttacccatcatccccccatggatcctttcagtaaaaaccctttcaatttccaaaat

SEQ ID NO: 18631 - protein, 472 aa, Artificial Sequence
  derived and/or modified sequence
MGCDRNCGLIAGAVIGAVLAVFGGILMPVGDLLIQKTIKKQVVLEEGTIAFKNWVKTGTEVYRQFWIFDVQNPQEVMMNSSNIQVKQRGPYTYRVRFLAKENVTQDAEDNTVSFLQPNGAIFEPSLSVGTEADNFTVLNLAVAAASHIYQNQFVQMILNSLINKSKSSMFQVRTLRELLWGYRDPFLSLVPYPVTTTVGLFYPYNNTADGVYKVFNGKDNISKVAIIDTYKGKRNLSYWESHCDMINGTDAASFPPFVEKSQVLQFFSSDICRSIYAVFESDVNLKGIPVYRFVLPSKAFASPVENPDNYCFCTEKIISKNCTSYGVLDISKCKEGRPVYISLPHFLYASPDVSEPIDGLNPNEEEHRTYLDIEPITGFTLQFAKRLQVNLLVKPSEKIQVLKNLKRNYIVPILWLNETGTIGDEKANMFRSQVTGKINLLGLIEMILLSVGVVMFVAFMISYCACRSKTIK

SEQ ID NO: 18632 - protein, 463 aa, Artificial Sequence
  derived and/or modified sequence
MGCDRNCGLIAGAVIGAVLAVFGGILMPVGDLLIQKTIKKQVVLEEGTIAFKNWVKTGTEVYRQFWIFDVQNPQEVMMNSSNIQVKQRGPYTYRVRFLAKENVTQDAEDNTVSFLQPNGAIFEPSLSVGTEADNFTVLNLAVAAASHIYQNQFVQMILNSLINKSKSSMFQVRTLRELLWGYRDPFLSLVPYPVTTTVGLFYPYNNTADGVYKVFNGKDNISKVAIIDTYKGKRNLSYWESHCDMINGTDAASFPPFVEKSQVLQFFSSDICRSIYAVFESDVNLKGIPVYRFVLPSKAFASPVENPDNYCFCTEKIISKNCTSYGVLDISKCKEGRPVYISLPHFLYASPDVSEPIDGLNPNEEEHRTYLDIEPITGFTLQFAKRLQVNLLVKPSEKIQVLKNLKRNYIVPILWLNETGTIGDEKANMFRSQVTGKINLLGLIEMILLSVGVVMFVAFMISY

SEQ ID NO: 18633 - protein, 65 aa, Artificial Sequence
  derived and/or modified sequence
MGCDRNCGLIAGAVIGAVLAVFGGILMPVGDLLIQKTIKKQVVLEEGTIAFKNWVKTGTEVYRQF

SEQ ID NO: 18634 - protein, 288 aa, Artificial Sequence
  derived and/or modified sequence
MGCDRNCGLIAGAVIGAVLAVFGGILMPVGDLLIQKTIKKQVVLEEGTIAFKNWVKTGTEVYRQFWIFDVQNPQEVMMNSSNIQVKQRGPYTYRVRFLAKENVTQDAEDNTVSFLQPNGAIFEPSLSVGTEADNFTVLNLAVAAASHIYQNQFVQMILNSLINKSKSSMFQVRTLRELLWGYRDPFLSLVPYPVTTTVGLFYPYNNTADGVYKVFNGKDNISKVAIIDTYKGKRNLSYWESHCDMINGTDAASFPPFVEKSQVLQFFSSDICRETCVHFTSSFSVCKS

SEQ ID NO: 18635 - DNA, 1419 bp, Artificial Sequence
  derived and/or modified sequence
atgggctgcgataggaactgtgggctcatcgcaggtgctgttattggggcagtactagccgttttcggaggcattctaatgcccgttggcgatcttctgattcagaagacaattaaaaaacaagtcgtgctggaggagggcactatcgcctttaaaaattgggttaagactgggaccgaggtttatagacagttttggatcttcgatgttcagaacccgcaggaagtgatgatgaactctagcaacatccaagtcaagcagcggggaccatatacttatcgggtgaggtttctggctaaagaaaacgttacgcaggatgccgaagataacaccgtcagctttttgcaaccaaacggagctatatttgagccatctttaagcgtgggaaccgaagctgacaattttacagtgctgaatcttgccgtagccgcagcttctcatatctaccagaaccagtttgttcaaatgatcctgaactcacttataaataaaagcaaatccagtatgttccaggtgcgaactctgagggagctattgtgggggtaccgagatcctttcctcagtctggtgccctatcccgtcacaaccactgtgggactattctacccatacaataacaccgctgacggcgtgtacaaagttttcaatgggaaggacaacatttccaaggtcgctataatcgatacttataaggggaagagaaatcttagttactgggaatcacattgcgacatgatcaacggcacagatgccgcctcctttccgccatttgtggagaaatcacaagtgctgcagtttttcagctccgacatatgccgctctatatatgcggtgtttgagtccgacgtgaacttgaaaggcattcctgtctaccgatttgtgctgccctctaaagcgtttgctagtcctgtcgagaaccccgataactactgtttttgcacggaaaaaattatctcaaaaaactgtacaagttatggggtcctggacatttcaaaatgtaaagagggaagaccagtctacatcagtcttccacacttcctatacgcatcacctgacgttagcgagccgatcgacgggctgaatccaaacgaagaggagcatagaacctatttggatattgagcctattaccgggttcacgctgcaattcgctaaacggctgcaggtgaatctgctggtgaaacctagcgagaaaatccaggtgctgaaaaatctgaaacgtaattacatagtgcccatcctttggcttaatgaaaccgggaccatcggagatgagaaggccaatatgttcagaagtcaggtgacagggaagataaatcttctaggcctcatagagatgattcttctctctgtgggcgtggtgatgtttgttgctttcatgataagctattgtgcctgtcgcagtaaaacgatcaagtag

SEQ ID NO: 18636 - DNA, 1419 bp, Artificial Sequence
  derived and/or modified sequence
atgggatgcgacagaaattgcgggttgatcgcaggcgccgttattggcgccgtgctggctgtgtttggaggcattctgatgcctgttggggacctgctgatacagaaaaccatcaagaagcaggtggtcttagaagaggggaccatagcatttaagaactgggtgaaaaccggaactgaagtgtataggcagttttggatttttgacgtgcagaatccccaggaggtgatgatgaatagttccaatatccaagtcaagcagagaggcccatacacttaccgggtccggttcttagccaaagaaaacgtgacacaggacgcagaggacaatactgttagctttctgcaacccaacggcgctatctttgagccctctctgagtgtgggaacggaagccgataacttcactgtactcaatctcgctgtggctgctgcatctcacatttaccagaaccagttcgtgcagatgatcctaaacagcctgattaataagagcaaatcatctatgttccaggtgcgaacactgagggagctgttatggggatatagggatcctttcctgagcttagttccgtatcctgtcactactactgtggggctcttctacccatacaataataccgctgacggcgtttataaggtctttaacggaaaggacaatattagcaaggtggctatcatcgacacctacaaagggaaacgaaatttgtcctactgggaatcacactgtgacatgatcaatgggacggatgccgcctcttttcccccattcgtcgaaaagagtcaggtacttcagttcttctcatcagatatttgccgatcaatttacgcagtgttcgagagtgacgtgaacttgaaaggcattccagtgtaccgattcgtgctcccttcaaaggccttcgccagtcccgtggaaaacccggacaactattgcttttgcactgagaagattataagtaaaaactgcacgtcatatggagtcttagatatttccaaatgcaaggagggacggcctgtctatatcagcttgccacattttctctatgcgtctcccgacgtttccgagccgatcgacgggctgaatccaaatgaagaggagcatcgaacctacctcgacatcgaaccgatcactggatttactttgcaatttgctaaacggttgcaggtcaacctgttagtcaaaccaagtgagaagatccaggtgctaaagaatctgaaacggaattacatcgttccaatactatggcttaatgagactggcaccatcggcgacgaaaaggcaaatatgttcagatcgcaggtgacaggcaaaataaatttgctgggccttatcgaaatgattcttctgagcgtgggagttgtcatgtttgtggccttcatgatttcatattgcgcttgccgctcaaagaccatcaagtag

SEQ ID NO: 18637 - DNA, 1392 bp, Artificial Sequence
  derived and/or modified sequence
atggggtgtgaccgaaactgcggtctgattgcaggggccgtcatcggagctgttttagcagtgtttgggggaattctaatgcccgtgggtgacctgctgatccagaagacaataaagaagcaagtagtgctggaagaggggactattgcctttaagaactgggtaaagacgggcaccgaagtatacaggcaattctggatcttcgatgttcagaatcctcaggaagtcatgatgaacagctccaacatccaggtgaagcagcgcggcccctacacctaccgagtgaggttcctagccaaagagaatgtgacacaggatgccgaggacaatactgtttcgtttctgcagcctaacggagctatattcgagcccagcctatctgtcgggaccgaggccgataacttcacggtcttaaaccttgcagtggctgcagcaagtcatatctatcagaaccagtttgtacagatgattcttaatagcctgattaacaaatctaagagctcaatgttccaggtgcgtaccctaagggaactgctctggggttacagagacccattcttaagcttggtgccctaccccgtcactactactgtggggctcttctatccttacaacaataccgccgacggggtgtacaaggtgtttaatggcaaggataatataagcaaagtggctatcattgatacatacaagggtaagcgaaacttgagctactgggagtcacactgcgacatgatcaacggaactgatgctgcgtccttcccccccttcgtagagaagagccaggtcttgcaattttttagttccgatatctgtcgctccatctatgccgtgttcgaaagtgacgtgaacctcaaggggatcccagtgtaccggttcgttttaccatcaaaggcctttgcttcacctgtagagaatcctgataactactgcttttgtacggagaaaatcatcagcaagaactgcacctcctacggcgtgctggatatcagtaaatgcaaagagggccgacccgtgtacataagcctgccccatttcttgtacgctagtcccgacgtcagcgagcccatagacgggctgaatccaaacgaagaagaacataggacatacctcgatatcgagcctataactggtttcactcttcagttcgctaaacgcctccaggtgaatctcctggtgaagccctcggagaagatccaggtcctgaagaatttgaagcgaaactacatcgtacctattctgtggctaaatgagacgggaactattggcgatgagaaagccaacatgttcaggtcacaggtgaccggaaagattaacctgttaggcctgatagagatgatcctcctgtccgtgggcgtcgttatgtttgtcgcctttatgataagctattag

SEQ ID NO: 18638 - DNA, 1419 bp, Artificial Sequence
  derived and/or modified sequence
atgggatgcgaccggaactgtgggctaattgccggcgctgtgataggagctgtccttgcggtgttcgggggaattttaatgcctgtcggtgacctactgattcaaaagacaatcaaaaaacaggtcgttcttgaggaaggtactattgcttttaaaaattgggttaagaccggcacggaagtgtatagacagttttggatcttcgacgttcagaaccctcaagaggtcatgatgaacagctcaaacatacaggtcaagcagcgtggtccatacacctacagagtccgctttctggccaaggaaaacgtgacacaagacgctgaggataacacggtctcctttcttcagcccaatggagcaatttttgagccatccctgagcgtcggaaccgaggcagacaattttacggtgctgaacctggccgtggctgccgctagccatatttatcagaatcagtttgtgcagatgatcctaaattcactgattaacaagtccaagtcgagcatgttccaagtgcgaaccctccgagagctcctgtggggctacagagatcctttcctcagccttgtaccatacccggtgacaactaccgttggtctgttttacccctacaataacacagctgacggggtctacaaagtcttcaatgggaaagacaacatttccaaggttgctattattgatacttacaaaggaaagagaaatctgtcctactgggagagccactgtgatatgatcaacggaaccgatgccgcatcatttcccccatttgtcgagaaaagtcaggtgttacagtttttttcgtcagacatttgcaggtccatctacgccgtgttcgagtcggatgttaacctgaaaggaattcctgtgtataggttcgttttgccctctaaggcattcgccagcccagttgagaatcctgacaactactgcttttgtactgagaaaattatctctaaaaattgcacatcctacggcgtattagacatcagtaagtgtaaggaaggccgacccgtgtatatctccttaccgcacttcttatacgcttcccctgacgtgagcgaaccaatcgacggcctcaatccaaatgaggaagagcatagaacatacctggacattgaaccgattacaggttttaccctgcagtttgcgaagcgactccaggtcaatcttttggtgaaaccaagcgagaagatacaggtgctgaaaaatcttaaacggaactacatagtgcccattctctggctgaacgagaccgggacaataggagacgagaaggccaacatgtttcggtcccaggtgactggcaagattaacttattgggattaattgagatgattctgcttagtgttggtgtggttatgtttgttgccttcatgatcagctattgcgcctgtcgcagcaagacaataaagtag

SEQ ID NO: 18639 - DNA, 1419 bp, Artificial Sequence
  derived and/or modified sequence
atgggatgcgatcggaattgcggtttaatcgctggcgccgtaatcggagcagttctggccgtcttcggaggcatactgatgccagtaggcgatctcctcatccagaaaacaattaaaaaacaggtagtcctggaagaaggtacgatcgctttcaagaactgggtgaagacaggcaccgaggtgtatcgacaattttggatttttgatgtacaaaatccacaagaggtcatgatgaatagttctaacattcaggtgaagcagaggggcccttacacataccgcgtgagatttctggcaaaggagaacgtgacccaagacgcagaagacaataccgtcagcttcctccagccaaatggagcaatctttgagccttctttgagtgtgggaacagaggccgataacttcaccgtgctcaacttagctgttgctgcagcaagccacatctaccagaaccagttcgttcagatgatcttgaatagcctgatcaacaaaagcaagtccagcatgttccaagtgagaacattgagagagttactgtggggatacagagacccatttctgtccctggtgccataccccgtgacgacgacagtgggactcttttacccatataataatacagccgatggcgtttacaaggtcttcaacggcaaggataacatcagtaaagtagcgattattgacacttataagggcaagagaaatttaagctattgggagtcccattgcgacatgataaatggtaccgacgcggcctcttttcctcccttcgttgagaagtcacaggtgttgcagtttttctctagtgatatatgtaggagcatttacgctgtgttcgaatctgatgttaaccttaagggcattccagtgtatcgcttcgtgttacctagtaaagcgttcgccagcccagttgagaatccagataattactgtttctgtacggagaaaatcatatccaagaactgcacttcatatggggtcctggatatttctaagtgtaaagagggccgaccagtgtacatcagcctcccacacttcttatatgcctctccggacgtgtcagagcctatcgacggactcaacccaaacgaagaggagcaccggacttatctggatatcgagcccattacaggctttactctgcagttcgccaaaaggctgcaggtgaatctcctcgtaaaacccagcgagaaaatccaggtgctgaaaaatctgaagagaaactatatcgttcctattctgtggctgaatgaaacaggaacaatcggggatgaaaaggccaatatgttcagatcccaggtgacagggaagattaatctcctcggactcatcgagatgattctgctgagcgttggggtggtcatgtttgtggccttcatgataagttactgtgcctgccggagcaagactatcaagtag

SEQ ID NO: 18640 - DNA, 1419 bp, Artificial Sequence
  derived and/or modified sequence
atgggatgtgaccgtaactgcggcctcatcgcaggcgcagtgattggagccgtgctcgcagtgttcggtgggattctgatgcctgtgggagatctattgatccaaaaaacaataaagaaacaggtcgtactcgaggaaggaactatcgcctttaagaactgggttaaaaccggcaccgaggtatatagacaattttggatcttcgacgttcagaatcctcaagaagtcatgatgaattcatccaatatacaggtcaaacagagaggaccatatacatatcgggttagattcctggcaaaggaaaatgtcactcaggatgccgaggacaatactgtatcatttctgcagcccaatggggctattttcgagcccagcctctccgtgggaacagaagccgataattttactgtgcttaacctggccgttgccgctgctagccacatctatcagaaccagtttgtccagatgatcctcaattccctgatcaataagtctaagtccagcatgttccaggttcgcactttgcgggaattgctgtggggctacagggatcctttcctgtcattggtgccatacccagtgacgactacagttggcctattctacccatacaataataccgcagatggcgtttataaagtcttcaacggaaaagataatatctccaaagtggccataatcgatacttacaagggtaagcggaacctgtcctactgggagtctcactgtgacatgattaatgggacggacgccgcttcattcccaccattcgttgagaaatcccaggtgctacagttctttagttcggatatatgtagaagtatttacgccgtgtttgagtccgatgtcaacctgaaaggaattcccgtttaccgcttcgtactgccttccaaggcttttgcaagtccggtcgagaaccccgataattattgtttttgtactgagaagattatctcaaagaactgcactagttacggtgttctcgacatttctaagtgtaaggagggacggcccgtgtatataagccttcctcactttctttatgcctctccagatgtcagcgaacccattgatggattgaacccaaacgaggaggaacaccgcacatacctggacattgagcccatcacaggcttcaccctgcagttcgctaaacgtctccaggttaatctcctcgttaaaccttccgagaaaatccaagtgttgaaaaaccttaagcgcaattacattgtccccatactttggctgaatgagactggaacaataggggacgaaaaggccaatatgttcaggtctcaggtgacaggcaagattaacctcctgggcctcatcgagatgatcctactctctgtgggtgtggtgatgtttgtggcctttatgatatcttattgtgcatgccggagtaaaactattaaatag

SEQ ID NO: 18641 - DNA, 867 bp, Artificial Sequence
  derived and/or modified sequence
atgggatgcgaccgcaactgcggcctcatagccggtgctgtcatcggtgctgtgctcgcagtttttggcgggatcctgatgccagtgggtgatctgctgatccagaaaaccattaaaaagcaagttgtgctggaggagggtacaattgcctttaaaaactgggttaagactggaacggaggtttaccgccaattttggattttcgacgtgcagaatccccaggaggtaatgatgaactcttccaatatccaggtaaaacagcgcggcccctacacctaccgggtaagatttctggccaaggaaaacgtcacacaggatgccgaggacaacaccgtctcctttctccagccgaatggagctatattcgagcccagtttgtcagtaggcacggaggcagacaatttcacagtactgaatttagctgtcgccgcggcttcacatatataccagaatcagtttgtgcagatgatactgaatagcctgataaacaagtcaaagtccagcatgtttcaggtccggaccctacgtgaactactgtggggatatagagacccctttctttcactggtgccctatcctgttacaacgacggtggggcttttctacccctacaacaacaccgccgacggggtgtataaggttttcaatgggaaagacaacattagtaaagtggccattatcgatacatataaaggcaaaagaaacctcagttattgggagagtcactgcgacatgatcaatggcacggacgcggctagctttccaccattcgtcgagaagagtcaggtcctccagttcttctcaagtgacatttgccgcgaaacctgtgtccacttcacctctagcttttccgtgtgtaagagctag

SEQ ID NO: 18642 - DNA, 1419 bp, Artificial Sequence
  derived and/or modified sequence
atgggctgtgacaggaactgtggcctgattgctggagctgtgattggagctgtgctggccgtgtttggaggcatcctgatgcctgtgggggacctgctgatccagaagaccatcaagaagcaggtggtgctggaggagggcaccatcgccttcaagaactgggtgaagacaggaacagaggtgtaccggcagttctggatctttgatgtgcagaacccccaggaggtgatgatgaacagcagcaacatccaggtgaagcagaggggcccctacacctacagagtgcgcttcctggccaaggaaaatgtgacccaggatgctgaggacaacacagtgtccttcctgcagcccaacggggccatctttgagcccagcctgtctgtgggcacagaggccgacaacttcaccgtgctgaacctggccgtggccgccgccagccacatctaccagaaccagtttgtgcagatgatcctgaacagcctcatcaacaagagcaagagctccatgttccaggtgaggaccctgcgggagctgctgtggggctacagagaccccttcctgagcctggtgccctaccctgtgaccaccaccgtgggcctcttctacccctacaacaacacagcagatggagtgtacaaggtgttcaacgggaaggacaacatcagcaaggtggccatcatcgacacctacaagggcaagaggaacctgagctactgggagagccactgtgacatgatcaatggaacagatgctgccagcttccccccatttgtggagaagagccaggtgctgcagttcttcagcagtgacatctgccgcagcatctatgctgtgtttgaaagtgatgtgaacctgaagggcatccctgtgtacagatttgtgctgcccagcaaggcctttgccagccctgtggagaacccagacaactactgcttctgcacagagaagatcatcagcaagaactgcaccagctatggagtgctggacatcagcaagtgcaaggagggccggcctgtgtacatcagcctgccccacttcctgtatgccagcccagatgtgtctgagcccattgatggcctgaaccccaatgaggaggagcacaggacctacctggacatcgagcccatcaccggcttcaccctgcagtttgccaagaggctgcaggtgaacctgctggtgaagcccagcgagaagatccaggtgctgaagaacctgaagaggaactacatcgtgcccatcctgtggctgaatgaaacaggcaccatcggagatgagaaggccaacatgttccgcagccaggtgacaggcaagatcaacctgctgggcctcatcgagatgatcctgctgtctgtgggcgtggtgatgtttgtggccttcatgatctcctactgtgcctgccgcagcaagaccatcaagtag

SEQ ID NO: 18643 - DNA, 1392 bp, Artificial Sequence
  derived and/or modified sequence
atgggctgtgacaggaactgtggcctgattgctggagctgtgattggagctgtgctggccgtgtttggaggcatcctgatgcctgtgggggacctgctgatccagaagaccatcaagaagcaggtggtgctggaggagggcaccatcgccttcaagaactgggtgaagacaggaacagaggtgtaccggcagttctggatctttgatgtgcagaacccccaggaggtgatgatgaacagcagcaacatccaggtgaagcagaggggcccctacacctacagagtgcgcttcctggccaaggaaaatgtgacccaggatgctgaggacaacacagtgtccttcctgcagcccaacggggccatctttgagcccagcctgtctgtgggcacagaggccgacaacttcaccgtgctgaacctggccgtggccgccgccagccacatctaccagaaccagtttgtgcagatgatcctgaacagcctcatcaacaagagcaagagctccatgttccaggtgaggaccctgcgggagctgctgtggggctacagagaccccttcctgagcctggtgccctaccctgtgaccaccaccgtgggcctcttctacccctacaacaacacagcagatggagtgtacaaggtgttcaacgggaaggacaacatcagcaaggtggccatcatcgacacctacaagggcaagaggaacctgagctactgggagagccactgtgacatgatcaatggaacagatgctgccagcttccccccatttgtggagaagagccaggtgctgcagttcttcagcagtgacatctgccgcagcatctatgctgtgtttgaaagtgatgtgaacctgaagggcatccctgtgtacagatttgtgctgcccagcaaggcctttgccagccctgtggagaacccagacaactactgcttctgcacagagaagatcatcagcaagaactgcaccagctatggagtgctggacatcagcaagtgcaaggagggccggcctgtgtacatcagcctgccccacttcctgtatgccagcccagatgtgtctgagcccattgatggcctgaaccccaatgaggaggagcacaggacctacctggacatcgagcccatcaccggcttcaccctgcagtttgccaagaggctgcaggtgaacctgctggtgaagcccagcgagaagatccaggtgctgaagaacctgaagaggaactacatcgtgcccatcctgtggctgaatgaaacaggcaccatcggagatgagaaggccaacatgttccgcagccaggtgacaggcaagatcaacctgctgggcctcatcgagatgatcctgctgtctgtgggcgtggtgatgtttgtggccttcatgatctcctactag

SEQ ID NO: 18644 - DNA, 867 bp, Artificial Sequence
  derived and/or modified sequence
atgggctgtgacaggaactgtggcctgattgctggagctgtgattggagctgtgctggccgtgtttggaggcatcctgatgcctgtgggggacctgctgatccagaagaccatcaagaagcaggtggtgctggaggagggcaccatcgccttcaagaactgggtgaagacaggaacagaggtgtaccggcagttctggatctttgatgtgcagaacccccaggaggtgatgatgaacagcagcaacatccaggtgaagcagaggggcccctacacctacagagtgcgcttcctggccaaggaaaatgtgacccaggatgctgaggacaacacagtgtccttcctgcagcccaacggggccatctttgagcccagcctgtctgtgggcacagaggccgacaacttcaccgtgctgaacctggccgtggccgccgccagccacatctaccagaaccagtttgtgcagatgatcctgaacagcctcatcaacaagagcaagagctccatgttccaggtgaggaccctgcgggagctgctgtggggctacagagaccccttcctgagcctggtgccctaccctgtgaccaccaccgtgggcctcttctacccctacaacaacacagcagatggagtgtacaaggtgttcaacgggaaggacaacatcagcaaggtggccatcatcgacacctacaagggcaagaggaacctgagctactgggagagccactgtgacatgatcaatggaacagatgctgccagcttccccccatttgtggagaagagccaggtgctgcagttcttcagcagtgacatctgccgggagacctgtgtgcacttcaccagcagcttctctgtgtgcaagagctag

SEQ ID NO: 18645 - DNA, 1419 bp, Artificial Sequence
  derived and/or modified sequence
atgggctgcgaccggaactgcggcctgatcgccggcgccgtgatcggagctgtcctggcagtgttcggcgggattctgatgccagtcggtgatctgctgattcagaagacaatcaagaaacaggtagtgctggaggagggcaccattgctttcaaaaactgggttaagacaggtacggaagtctataggcagttttggatcttcgatgtgcagaatccacaagaggtcatgatgaacagctccaacatccaagtgaaacaaagaggcccttatacgtacagggtaagattcttggccaaggaaaatgtgacacaggatgccgaagataacaccgtatcatttctccagcctaacggcgccatcttcgagccatcattgagtgttggcaccgaagccgacaactttacagtgctgaatctggctgtcgccgccgctagccacatctatcagaatcagttcgtgcagatgatattgaattcgctgattaataagtcgaagagcagtatgtttcaggtgaggaccctgcgggaactgctgtggggataccgagaccccttcctctccctcgtcccctatcctgtgactacaacagtgggactcttttacccgtataataacactgccgacggggtgtataaggttttcaacgggaaagacaatatcagcaaggttgccattatagatacttataaaggtaaaagaaacctgtcttattgggagagccactgcgatatgataaatgggacagatgctgccagcttccccccttttgttgagaagagccaagttctgcaattcttttcctcagatatctgccggagcatctacgccgtgttcgaatccgacgtgaatctgaaggggattcccgtgtaccgcttcgtcttgccatcaaaggcgttcgcttcgccggtagagaacccggataactactgtttctgtaccgagaagatcatatctaagaactgtaccagctatggagttctggacataagtaagtgcaaggagggtagaccggtttacatctcacttccacacttcctttacgcctcgccagatgtgagtgagcccattgacgggcttaaccctaatgaggaagaacaccgaacctaccttgatatcgaaccaataaccgggttcacactgcagttcgctaaacggctacaggtgaacctattggttaagccttcggaaaagattcaggttctgaaaaatttaaagcgcaattatattgtcccaatcctgtggcttaacgagacaggcactataggggacgaaaaggcaaatatgttccgaagccaggtgacaggcaagatcaatcttctgggtctcattgagatgatcctgctgagtgtgggggtagttatgttcgtagccttcatgatttcttattgcgcatgtcgctccaaaacaataaagtag

SEQ ID NO: 18646 - DNA, 1419 bp, Artificial Sequence
  derived and/or modified sequence
atgggctgcgaccggaactgcggcctgatcgccggcgccgtgatcggcgctgttttagctgtgtttggaggaatcctgatgcccgtgggagacctcctgatccaaaaaacgataaaaaagcaggtcgttctcgaggagggcactatcgcatttaagaactgggttaagacggggactgaagtgtacagacagttctggattttcgacgtgcagaacccgcaggaggtaatgatgaactccagcaacattcaggttaagcagcgaggcccttatacatatagagtgaggttccttgctaaggagaatgttacacaggatgcagaggataatacagtcagctttctccagccaaacggcgctatctttgagcctagtctcagcgtgggcaccgaagctgataacttcaccgtcctcaatttagctgtcgctgccgctagtcatatctatcagaatcaattcgttcaaatgattcttaatagtttaatcaacaagtctaaaagtagcatgtttcaggtacgtacactgcgcgaacttctctggggatatcgggatccattcttaagcctggtgccctatcctgtcacaacgacagtagggctcttttacccttacaacaatactgctgacggtgtgtataaagtgtttaacggcaaggataacatctccaaagttgccatcatcgatacatacaagggaaagagaaatctctcatattgggaaagtcactgcgatatgatcaatggaaccgacgcagcttcattcccaccgttcgttgagaagtcccaggtgcttcagttttttagcagcgacatctgtaggtctatctatgctgtgttcgagtccgacgtcaacttgaaaggaatcccagtgtatcggttcgttcttccctcgaaagcatttgccagccccgtggagaacccagataattactgcttttgcactgagaaaattatctcgaagaactgcacctcctatggtgtcctggacatcagcaaatgtaaggaaggaaggcccgtgtatatcagtcttccccattttctttatgccagtcctgacgtgagcgaacctatcgacgggctgaacccgaacgaggaagaacatagaacctacctggatatcgaaccgatcaccggctttacactgcagtttgcaaaaagacttcaggtcaatttgctggtcaagcccagcgaaaagatccaagtattaaaaaacctgaagcgaaattatatcgtgccaattctctggctcaacgagacagggaccattggggatgagaaggcgaatatgtttcggagccaggttaccggaaagatcaatttgttggggctgatcgaaatgatcttgctgtcagtaggcgtggtaatgttcgtagcctttatgattagctactgcgcttgtcgcagtaagaccattaagtag

SEQ ID NO: 18647 - DNA, 1392 bp, Artificial Sequence
  derived and/or modified sequence
atgggctgcgaccggaactgcggcctgatcgccggcgccgtgatcggagccgtgttggcagtgtttggtggcatcttgatgccagtcggggatctgctgattcagaagactattaaaaagcaagtcgttctagaagaaggtaccattgcattcaagaattgggtaaagaccggtaccgaagtgtatcgccagttctggatctttgacgtgcaaaaccctcaggaagtcatgatgaactccagcaatattcaggtaaagcagcgcggtccctatacctatagggtgaggtttcttgccaaggagaatgtcacacaagacgccgaagataataccgtctcttttctgcaacctaacggcgcaatcttcgagccatccttatcagtcggaacagaggctgacaactttaccgtgttaaacctggcagtcgcagcggcctcgcacatctatcagaatcagttcgtgcaaatgatcctaaactccttaattaacaagtcaaagtcaagcatgtttcaggtgcggactctgagggagctcttatggggctaccgtgacccctttctgtctctcgtcccatatcctgtcacaacaaccgtggggctcttttacccctataacaacacagccgacggcgtttataaggtgtttaacggaaaagacaacattagtaaagtcgcaatcattgacacttacaagggtaagcggaatctttcttattgggagtctcactgcgacatgattaacggtaccgacgctgctagttttcctcctttcgttgaaaaaagtcaagtcctccagttcttctccagcgatatttgccgttccatctacgcagtctttgagagcgacgtgaacctgaaggggataccagtctatcgattcgtgctccctagcaaggcatttgcatcacctgttgaaaatcctgacaattactgcttttgcactgagaagatcatctctaagaactgcacttcatacggggtcctggacatcagtaagtgcaaggaaggtaggccggtgtacatcagcctcccccacttcctctacgcgtcacctgacgtgagcgagcccattgacggactgaaccctaacgaagaggaacatcggacatacttagacatcgaacccatcacgggattcaccctgcagttcgcaaagagactgcaggtgaacctgcttgtgaaacctagcgaaaaaatccaagtgctcaaaaacctcaaaagaaactacatcgtccctatactgtggctgaatgaaactgggacgattggagatgagaaagcaaatatgtttaggtcgcaggtgacaggtaagattaacctgctaggtttgattgagatgattctcctctccgtgggggtcgtgatgtttgtcgcctttatgatcagttactag

SEQ ID NO: 18648 - DNA, 1419 bp, Artificial Sequence
  derived and/or modified sequence
atgggctgcgaccggaactgcggcctgatcgccggcgccgtgatcggcgctgtgctggcagtgttcggaggcatcctgatgcctgtgggcgacctcctgatccagaagacaatcaaaaaacaggtcgtactggaggagggcactatcgcgttcaaaaactgggtgaagaccggcactgaggtgtatcgtcagttttggattttcgacgtccagaatccacaggaagtcatgatgaacagtagcaatatccaggttaaacaacgaggtccctacacctacagggttcgcttcctggctaaggagaatgtgacacaggatgcggaggataacactgtcagcttcttacaacccaacggggctatattcgaaccctccttatccgttggtaccgaggcagataacttcacagtccttaatctcgccgttgccgcagcatctcacatctatcagaatcaatttgttcaaatgattctaaattctctcattaacaaaagtaagagctcgatgtttcaggttcggacgcttcgagaactgttgtgggggtaccgggatccattcctatcgctcgttccttaccctgtgaccaccacagtgggcctattctacccctacaacaacaccgcagatggtgtgtacaaagtgtttaacggcaaggataatatcagcaaggtcgcaattattgacacctataaaggaaagcgcaacctgtcatattgggagtctcactgcgacatgatcaacggaacagatgcagcatcctttcccccatttgtcgaaaagtctcaggtactacagttcttcagcagtgatatttgcagaagtatctatgccgtcttcgaatccgacgtgaatttaaaggggatccctgtataccgctttgtactccctagcaaggcctttgcttctcctgtagagaacccagataattattgtttctgcaccgagaagataatttccaaaaattgtactagctacggggtccttgacataagcaagtgcaaggaaggccgaccggtttacataagcttgccccactttctgtatgcaagtcccgacgtgtccgagcctatcgacggtctgaatccaaatgaggaggaacatcggacctatctcgacatagagcctatcaccggttttaccctgcagttcgctaaacggttacaagtgaacctgctcgtgaaacctagcgaaaagatccaggtgctgaagaatctgaagcgcaattatatcgtacccattctctggttgaacgaaacgggcacaattggcgatgagaaagcaaacatgtttaggagccaggtgactggcaaaatcaacctcctcggacttattgagatgattttactgtctgtgggagtggtgatgtttgtggcctttatgatttcatattgtgcatgcagaagtaaaactatcaaatag

SEQ ID NO: 18649 - DNA, 1419 bp, Artificial Sequence
  derived and/or modified sequence
atgggctgcgaccggaactgcggcctgatcgccggcgccgtgatcggtgctgtgctcgctgtgtttggtggtatcctcatgccggtgggggacttgctgattcagaagacaataaagaagcaggtagtgctcgaagaaggaaccattgccttcaaaaattgggtcaaaactggtaccgaagtttaccggcagttttggatcttcgacgttcagaatcctcaggaggtaatgatgaactcatcaaacatccaagtcaagcagcgggggccctacacttaccgggtgcgctttctcgcaaaggagaatgttacccaggacgcagaagacaataccgttagcttcttgcaaccaaacggcgccatctttgaaccctcgttaagtgttggcaccgaagccgataattttacagtattgaatctagcggtcgccgccgcgtcacacatctatcaaaatcaatttgtccagatgatccttaacagtttaatcaacaaaagcaagtcttctatgttccaagtgagaactcttcgggaactgctatggggataccgggacccgtttctgtcacttgtgccctaccccgtaaccaccacggtggggttattctacccatataacaatacagccgatggagtgtacaaggtgtttaacggcaaagacaacatctcaaaggtggccattattgatacttataaagggaaacgaaacttatcttactgggaaagccactgcgatatgattaacggtacagacgccgcatcatttcccccatttgtcgaaaaaagccaagtgctgcagttcttctcctctgacatctgccggagtatttacgccgtgttcgagtcagacgtgaatctgaagggcatacctgtatatcgcttcgtcctgccgagcaaggcgttcgcttcacccgtcgaaaatcctgacaactattgcttttgtactgagaaaatcatctcgaagaattgcacaagctacggagtacttgacatctctaaatgtaaagagggacggcccgtctatatttcactgccccacttcctgtatgccagtcctgatgtcagcgagcctatagacggacttaacccaaacgaagaggaacatcgtacctacctcgacatcgagccaatcactgggtttactctgcaattcgccaagcgcctgcaggtgaatctgctggtcaagccctccgagaagattcaggtcctgaaaaatctgaaacggaattacattgtgcctattttatggctcaacgagactggtactatcggcgacgaaaaagccaatatgtttcggagtcaggtgaccggaaaaatcaatttactagggctcatagaaatgatcctgctcagcgtcggtgtggtgatgtttgtcgccttcatgatctcatattgtgcctgccgcagcaagaccattaaatag

SEQ ID NO: 18650 - DNA, 1419 bp, Artificial Sequence
  derived and/or modified sequence
atgggctgcgaccggaactgcggcctgatcgccggcgccgtgatcggcgctgttctcgcagtctttggcgggatattgatgccagtaggtgaccttctcatccaaaagaccattaaaaaacaggtcgtacttgaagaggggaccatcgcgtttaagaactgggtaaagaccggcactgaggtataccgacagttctggatcttcgatgtgcagaacccacaggaggtcatgatgaattcatctaatattcaggtcaaacagagaggaccctacacttatcgggtacggtttctcgcgaaggaaaatgtcacccaggacgccgaggataataccgtctcatttcttcagccaaacggggccatttttgagccttctctgtcagtaggcacagaggctgataattttaccgtccttaatcttgccgtggcagccgccagccatatctatcaaaaccagttcgtgcagatgattcttaatagtctgatcaataaaagcaagagctcgatgtttcaggtccggactcttcgtgagctgttatggggctatagagacccctttctctccctcgtaccatatcctgtgactacaactgtgggattattctatccgtataataacacagcagacggtgtgtacaaggtgttcaatgggaaagataacatcagtaaggtagcaataatcgatacctacaaaggaaagcggaacctgtcatactgggagagtcactgcgacatgatcaatggaacggatgcagcttcctttcctccctttgttgaaaaaagccaggtgttgcaattttttagttccgacatctgtaggagcatttacgcagtttttgagagcgacgttaatctgaaaggcattccggtctatcgcttcgtgttgccatcaaaggcattcgcttctcccgtggaaaaccccgacaactactgcttctgcaccgagaaaatcatttccaaaaactgcacaagttacggcgttcttgacatctctaagtgcaaagaggggcggcccgtctacataagcttgcctcactttctgtacgcctcccctgacgtctcagaacccatcgacggcctcaaccctaatgaggaagagcaccgcacttacctcgacatcgagccaatcacagggttcactctgcagttcgctaaaagactgcaggtaaacctgctcgttaagccctccgaaaagatccaggttctgaaaaatctcaaacggaattacatcgtgcctattctctggctcaacgagaccggtaccattggggacgaaaaggctaacatgtttaggagccaggttaccggtaagataaaccttttaggcctgattgagatgattctactgtctgtgggcgtcgtgatgtttgttgcattcatgataagctattgcgcctgtagaagcaaaaccataaagtag

SEQ ID NO: 18651 - DNA, 867 bp, Artificial Sequence
  derived and/or modified sequence
atgggctgcgaccggaactgcggcctgatcgccggcgccgtgatcggggctgtactggcagtctttggaggtatcctgatgccagtgggggacttactcattcagaaaaccatcaagaagcaggtcgtcctcgaggagggaaccattgcgtttaaaaactgggtcaaaactggcactgaggtctatagacagttctggatcttcgatgttcagaaccctcaggaggtcatgatgaacagtagtaatatccaagtcaagcagagagggccatatacctatagagtgcggtttctcgccaaagagaatgtgacgcaggatgctgaagacaataccgtctcttttctgcaaccaaatggagctatcttcgaacccagccttagtgtgggcaccgaggccgataactttacagtcttgaatcttgccgttgctgcggcatcccatatttaccagaatcagttcgtacagatgatcttaaatagcctaataaacaaaagcaagtcaagtatgttccaggtcagaacgctacgggagctgctttggggttatcgggatcccttcctgtcccttgtgccctacccggttaccacaaccgtagggctcttttacccttataacaacaccgccgacggggtgtacaaagtgttcaacggaaaggacaatataagcaaggttgccatcatcgatacatacaaaggaaagagaaacctctcctactgggaatcacattgcgacatgataaacggcactgacgccgcttcctttcccccttttgtcgagaagagccaggtccttcagtttttttcttccgacatatgcagagagacctgcgtgcacttcacatccagctttagcgtgtgtaaaagctag

SEQ ID NO: 18652 - DNA, 1419 bp, Artificial Sequence
  derived and/or modified sequence
atgggatgtgaccgcaattgcgggcttatcgcaggcgctgttatcggggctgtgctggccgtctttggtggcatcctgatgcccgtcggcgaccttctgattcagaaaaccattaaaaaacaggtggtgctcgaagaggggacaatcgctttcaagaattgggtgaagacaggaactgaggtctaccgccaattttggatattcgatgttcaaaacccacaagaggtgatgatgaactcttctaacatacaagttaaacagcgtgggccatatacatatagagtccgcttcttggccaaggaaaatgtgactcaggatgccgaagataatacggtttcctttttacagccaaatggtgccatcttcgaaccgtcactgtctgtaggcacagaagcagataatttcacagtcctgaacttagccgtggccgcagctagtcatatttaccagaatcagtttgtgcagatgatcctgaattctcttattaataaaagtaagtccagcatgtttcaggtacgcactctgcgggaactgctctggggctaccgagatcccttcctgtcacttgtcccatacccagtgactaccaccgtggggctgttttacccttataacaacaccgctgacggagtctataaagtgttcaatggcaaagataacattagcaaggtggcaatcatcgatacttacaaggggaaaaggaacctgagctactgggaatcccattgcgatatgatcaacgggacagatgcggctagtttcccccctttcgtagaaaaaagtcaggtcctacagtttttcagtagcgatatctgtcggtctatctacgctgtattcgagtcagacgtcaatctgaagggtattccggtctaccgctttgttctcccctccaaggctttcgcatcacctgtagagaacccagataactactgtttctgcactgagaaaatcattagtaagaactgcacgtcctacggcgtgctggacatttccaaatgtaaagaaggccgtccggtctatatttctcttccacatttcttatatgctagcccggacgtgtctgagcctatcgacgggctgaacccaaacgaggaagaacatcgcacctatttggacatcgagcccatcacggggtttacactgcagtttgccaagagacttcaggtgaacctgctcgttaagccaagcgaaaagatccaggtgctgaaaaatctgaagcgcaactacatcgtccctattctatggctgaacgagacaggtacaattggagatgaaaaggcgaatatgttccgcagccaggtgacaggaaaaatcaaccttctcggcttaatcgagatgatcctgctgtccgtgggtgtggtaatgttcgtggcctttatgatatcttactgtgcatgtagatccaaaactattaagtag

SEQ ID NO: 18653 - DNA, 1419 bp, Artificial Sequence
  derived and/or modified sequence
atgggttgcgaccggaactgcggcctgatcgctggggctgtcattggtgccgtgctggccgtcttcggtggcatcctgatgccagtgggggatttactcattcagaaaaccataaagaaacaggtggtcctggaggagggtaccatcgccttcaagaattgggttaaaacaggaaccgaggtgtacaggcaattttggatatttgacgtccagaatccccaggaagttatgatgaactcctccaatatccaggtgaagcaacgcggaccctatacatatagggtcagattcctggccaaggaaaatgtgacacaggatgccgaggacaacactgttagcttcctgcagccgaacggggcaatattcgaaccgtcactgtcggtggggaccgaggcggataacttcacagtgctgaacctggctgtggccgctgcatctcacatctaccagaaccagttcgtccagatgatcctgaactctctgataaacaaatctaagtcgtccatgttccaggtgcgtaccctgagggaactgttatggggctatcgcgatccctttctatctttggtcccttaccctgtcacaactaccgtcgggttattctatccatacaacaacacagccgacggcgtgtacaaggtcttcaacggcaaggacaacatttctaaagtcgctattattgatacatataagggcaagaggaacctgtcatattgggaatcccactgcgacatgattaatggtacagacgcagctagtttccccccttttgtggaaaagagtcaggtgctacagttttttagctccgatatctgcagaagtatatacgccgtgtttgagagcgacgtgaatctgaaggggatccccgtgtacaggtttgtgttgccttcaaaggcattcgcctcaccagtggagaaccctgacaactactgcttttgcacagagaagataattagtaagaactgcaccagctacggggtgctagatattagcaagtgtaaggagggcaggccagtttacatctctcttcctcattttctgtatgcctctcctgacgtctcagaacccattgatggattgaaccctaatgaagaagagcacaggacgtacctcgacatcgagcccataactgggttcaccttgcagtttgctaaacggctgcaggtaaatctgttggtcaaaccaagtgaaaagatacaggtcttgaagaacctgaaacgcaactatatcgtgccaattctatggctcaacgagacagggaccatcggggacgagaaagcgaacatgttccggtcacaggtcactgggaaaattaacctgctgggacttatagagatgatcttattgtcagttggggttgtcatgttcgttgcctttatgatttcttattgtgcttgtcgcagtaaaaccatcaagtag

SEQ ID NO: 18654 - DNA, 1392 bp, Artificial Sequence
  derived and/or modified sequence
atggggtgcgaccggaattgcggtctcatcgcgggtgccgtgattggcgctgttctcgctgtttttggcggtatcctcatgcccgtaggcgaccttcttattcagaaaaccataaagaagcaggtcgtgttggaggagggaacaattgcctttaagaactgggttaagacaggaacagaagtctaccggcaattttggatatttgatgttcagaaccctcaggaggtgatgatgaattcctccaacatacaggtgaagcaaagaggcccatatacataccgagtgcggtttctggcaaaggagaatgtaactcaggatgccgaggataacactgtgtcctttttacagcctaatggtgcgatcttcgagccaagcctctcagtcggaaccgaagcagacaactttacagtgttgaaccttgccgtagcagccgctagtcacatctaccagaaccagttcgtgcaaatgatcctgaatagtttgatcaataagtccaagagtagtatgttccaggttaggaccttacgcgaacttttgtgggggtacagggatccctttctgtcactggtcccctaccccgtgaccactactgtcggcctgttctacccttacaataataccgctgacggcgtctataaggttttcaacggcaaggataatatatctaaagtggccattatcgacacgtataagggcaagaggaacttgtcctattgggaaagccactgcgatatgatcaacgggacagacgccgcatcttttccgcctttcgtcgaaaaatctcaggtcctccaattcttttcgtcagatatttgccgatcaatatacgcagtatttgagagcgatgttaacctgaagggcatccctgtgtaccgattcgtgctgccctctaaagctttcgcgagtccagtggaaaatcctgataattactgtttttgcacagagaaaattatttctaagaactgcactagttatggggtgctggatatttctaagtgtaaagagggcagacccgtgtacatctcactcccacatttcctgtatgcttctccggacgtgtctgagcccatcgatggacttaatcctaatgaggaggaacaccgtacgtacctagatatcgagcccattacaggatttaccctgcagttcgccaagaggctccaggtcaatctcctggttaagccgagtgagaaaatccaggtgttaaagaatctcaaaagaaactacatcgtccccatcctctggctgaacgaaaccggtaccatcggtgatgagaaggctaacatgttcaggtcccaagtgacaggcaaaattaacttgctgggactgatagagatgatcctgctgagcgtcggagtggttatgttcgtggcgtttatgattagctattag

SEQ ID NO: 18655 - DNA, 1419 bp, Artificial Sequence
  derived and/or modified sequence
atgggatgcgatcggaattgtggactcatagctggtgcagtgatcggcgctgtgctcgctgtattcggaggaattttgatgcccgtgggtgacctgctgatacagaagacaattaagaagcaggtggtcctggaggaaggtaccatagcttttaagaattgggttaagacaggaacggaagtgtacagacagttttggatctttgacgtgcagaatccacaggaggtcatgatgaactcttctaatatacaggtcaaacaacggggtccatatacctatagggtgaggttcctggctaaggagaacgtcactcaagacgcggaggataatactgtctcctttctccaacccaacggcgcaatatttgaaccctccctgtcagtggggaccgaggccgacaacttcacagtcctcaacttggcagtggctgccgcttctcacatctaccagaaccagttcgtgcagatgattctcaactctcttattaacaagagcaagtcttccatgtttcaagtgaggactttacgagaactcctgtggggatatcgcgacccctttctgagcctggtgccttaccccgtgaccacaactgttggccttttctatccatacaacaacacagccgacggcgtctataaagtgtttaacggtaaagataacatatctaaggtcgctatcatagacacatacaaggggaaacgaaaccttagttactgggagagtcactgtgacatgattaacgggaccgatgcagccagcttccccccttttgtcgagaagagccaggtcctccagtttttcagctctgatatatgcagatccatttacgccgtctttgagtcagatgtgaacctcaagggtatcccggtgtacaggttcgtactgccctcaaaagccttcgcaagccctgttgagaacccagataactactgcttttgtacagaaaaaattatcagcaagaactgcacctcctatggcgttctggatatctccaagtgcaaggaaggtcgccctgtctacattagcttgccccacttcttgtatgcctcccctgacgtgagcgaacctatcgacggactgaatccaaacgaggaagaacatcgaacgtatcttgacatcgaaccgattaccggcttcacgctccagttcgccaaaagactgcaggtcaacttgctggtgaaaccctccgaaaagatccaggtgctcaaaaacctgaagagaaactacatagttccaatcctgtggctcaatgagactggcactataggggatgaaaaagcaaatatgtttcgctctcaggtgacagggaaaatcaacttactgggcctcatcgagatgatcctcctttccgttggggtcgtaatgttcgtggctttcatgatttcttactgcgcatgcaggagcaagacaattaagtag

SEQ ID NO: 18656 - DNA, 1419 bp, Artificial Sequence
  derived and/or modified sequence
atggggtgcgatcgaaactgcgggctgatcgcgggagcggtcattggcgctgtcctggcagtgttcggcggaatcctcatgcccgtgggcgacctgctcatccagaagacgatcaagaaacaggtagtactggaggaaggcacaatcgcctttaagaactgggtgaagaccggtacggaagtttaccgccagttttggatctttgatgtgcagaatccccaagaagtgatgatgaactcatcaaatattcaggtgaaacagaggggtccctacacttaccgcgtgcgcttcctggccaaggaaaatgttacccaagatgccgaggacaacactgttagttttttacagcccaatggcgctatttttgagccctctttatctgtcgggacagaggctgacaattttacagtgctcaatctcgccgttgctgcggctagccatatataccaaaaccagtttgttcagatgattctgaacagtctgatcaacaagtctaaatcgagtatgttccaggtgaggacactgagagagcttctgtggggttaccgggatccattcctctccctggtcccttaccctgtgaccaccacagtggggttgttctatccatataataacaccgccgatggcgtgtataaggtctttaatggaaaagataacatctctaaagtggccatcatcgacacttataagggcaaaagaaacctgtcttactgggaatctcactgcgacatgatcaatggaactgacgcagccagtttccctcctttcgtggagaaatcacaggttttgcagtttttctcatctgacatttgcagatctatttacgctgtgtttgaatccgatgtgaatctcaagggtatcccagtatataggttcgttctgcctagcaaagcatttgcttcacccgtggagaaccctgacaattattgtttttgcactgagaagattatttctaagaattgcacatcctacggggttcttgatatctccaagtgtaaagagggaagacctgtatacatcagcttgccgcactttctctatgctagccctgacgtgtcggagcctatcgatggtcttaacccaaacgaagaggagcatcgcacatacttggacattgaacctatcactggattcacactccaatttgctaaacgccttcaggtgaatctcctcgttaagcccagcgagaaaatccaggtcttgaagaatctgaaaaggaactacatcgtgccgatcttgtggttgaacgaaactggaactattggcgatgaaaaggccaacatgtttaggagccaggtgactgggaaaataaatttattgggtctgatcgagatgatactgctgtcagttggggtcgtgatgttcgtggcatttatgatctcttactgtgcctgccggagcaagacaattaagtag

SEQ ID NO: 18657 - DNA, 1419 bp, Artificial Sequence
  derived and/or modified sequence
atgggttgtgaccgcaattgcggactcattgccggagccgtcatcggcgctgttctggctgttttcgggggtattttgatgcctgtgggcgacttactgattcagaaaacgataaagaaacaggtggtcctcgaagagggcactattgcctttaaaaactgggtgaagaccggtacagaagtgtatcggcagttctggatctttgatgtgcagaacccacaggaggtgatgatgaactcctctaacatccaagtcaagcagcggggaccatatacatatagagtgaggttcttggccaaggaaaacgtgacccaggacgcggaagacaatacagtgtcttttttgcaacccaatggagccatattcgagccatcactcagcgtcggaacagaagccgacaatttcaccgtcctgaacctcgccgtcgcggctgcttcccatatttaccagaaccagtttgttcagatgatcctgaactctctcattaacaagagtaagtcctccatgttccaggtgcgcactctccgtgaactcctttggggctacagggaccctttcctgtctctggtgccgtacccagtcactacgacggtcggccttttttatccctacaacaacacagctgacggcgtgtacaaggtgttcaatggcaaggataacatctcaaaggtggccattatcgacacctataagggcaagcgcaacttatcttactgggagtctcattgtgatatgatcaacggtactgacgcagcatctttccctccttttgtggagaagagccaggttctgcagttctttagtagtgacatttgccgttcaatctacgctgtgttcgagtctgatgtgaacctgaaaggtatacccgtgtacaggtttgtgctgccaagcaaggcatttgcaagtccagttgaaaacccagataattattgcttctgtactgaaaaaatcattagtaagaattgtaccagctacggggtgttagacatcagcaaatgtaaagaggggaggcccgtgtatatttcgttgcctcatttcctgtatgcctctcccgacgtcagtgagcccatcgatggactgaacccaaatgaagaagaacataggacatatctcgatattgagcccatcaccggattcaccctccaattcgccaaaagactgcaggttaatctattggtgaaaccaagcgagaagattcaggtgctaaagaatctgaaacgtaattatatagttcccattctttggctgaacgagactggcacaattggcgacgagaaagccaatatgttccgcagccaggtgacaggcaaaataaacctccttggcttgatagagatgatccttttaagcgtaggcgtggtgatgttcgtggcattcatgataagctactgtgcctgcaggagtaaaacaatcaaatag

SEQ ID NO: 18658 - DNA, 867 bp, Artificial Sequence
  derived and/or modified sequence
atgggttgtgaccgtaactgcggactgatagccggagcagtgattggggctgtcttggccgtctttggtgggatcctgatgcctgtgggggacctcttaattcagaagactattaagaaacaggtggttctcgaagagggtactatcgcttttaagaattgggtcaagaccggaactgaagtttacaggcagttctggatttttgatgtgcagaacccccaggaggtcatgatgaatagttccaacattcaagtgaagcaacgcggtccctatacctacagagttcggttcttagctaaggaaaacgtgacccaggatgccgaggacaatactgtgagctttctgcaacctaacggagccatatttgaaccctcgctgtccgtcggaaccgaggccgataattttacagtgctgaatctggctgttgcggcagcctcacatatttaccagaaccagtttgttcagatgatcctcaactcactgattaataaatcaaaatcatcaatgtttcaggttcgcactcttagggagcttctctggggctacagagacccttttctgtctcttgtgccatatcccgtgacgacaaccgtgggcctattctacccatataataatactgccgatggagtgtacaaggtgtttaatggaaaagacaatatctctaaagttgctattatcgatacctacaaaggcaagcggaacctctcctactgggagagtcattgcgatatgattaatgggaccgacgccgctagctttcctccattcgtggagaagagccaagtgctgcagttcttctcctctgacatatgcagagagacatgtgtgcatttcacctcctccttttccgtgtgcaaatcttag

SEQ ID NO: 18659 - DNA, 2094 bp, Artificial Sequence
  derived and/or modified sequence
aacttgtgttaggcatgcgtccgaagagctggaaggctgaggatgtcaatggctttcagatgtcaggataaccttaaggatagatgaagggttgagagcctgtgcctcatttctgagttctcagctgctatgccgtggaaatcctgtttactttctgcatctgctcctgcaagactctggagccagtcttgaggtcctacatctccgaaagcaagctcttctagaagttgatagctttccaatgattagacgaattgattctttctgtgactcatcagttcatttcctgtaaaattcatgtcttgctgttgatttgtgaataagaaccagagcttgtagaaaccactttaatcatatccaggagtttgcaagaaacaggtgcttaacactaattcacctcctgaacaagaaaaatgggctgtgaccggaactgtgggctcatcgctggggctgtcattggtgctgtcctggctgtgtttggaggtattctaatgccagttggagacctgcttatccagaagacaattaaaaagcaagttgtcctcgaagaaggtacaattgcttttaaaaattgggttaaaacaggcacagaagtttacagacagttttggatctttgatgtgcaaaatccacaggaagtgatgatgaacagcagcaacattcaagttaagcaaagaggtccttatacgtacagagttcgttttctagccaaggaaaatgtaacccaggacgctgaggacaacacagtctctttcctgcagcccaatggtgccatcttcgaaccttcactatcagttggaacagaggctgacaacttcacagttctcaatctggctgtggcagctgcatcccatatctatcaaaatcaatttgttcaaatgatcctcaattcacttattaacaagtcaaaatcttctatgttccaagtcagaactttgagagaactgttatggggctatagggatccatttttgagtttggttccgtaccctgttactaccacagttggtctgttttatccttacaacaatactgcagatggagtttataaagttttcaatggaaaagataacataagtaaagttgccataatcgacacatataaaggtaaaaggaatctgtcctattgggaaagtcactgcgacatgattaatggtacagatgcagcctcatttccaccttttgttgagaaaagccaggtattgcagttcttttcttctgatatttgcaggtcaatctatgctgtatttgaatccgacgttaatctgaaaggaatccctgtgtatagatttgttcttccatccaaggcctttgcctctccagttgaaaacccagacaactattgtttctgcacagaaaaaattatctcaaaaaattgtacatcatatggtgtgctagacatcagcaaatgcaaagaagggagacctgtgtacatttcacttcctcattttctgtatgcaagtcctgatgtttcagaacctattgatggattaaacccaaatgaagaagaacataggacatacttggatattgaacctataactggattcactttacaatttgcaaaacggctgcaggtcaacctattggtcaagccatcagaaaaaattcaagtattaaagaatctgaagaggaactatattgtgcctattctttggcttaatgagactgggaccattggtgatgagaaggcaaacatgttcagaagtcaagtaactggaaaaataaacctccttggcctgatagaaatgatcttactcagtgttggtgtggtgatgtttgttgcttttatgatttcatattgtgcatgcagatcgaaaacaataaaataagtaagtatgtaccaaaaaatattgcttcaataatattagcttatatattacttgttttcactttatcaaagagaagttacatattaggccatatatatttctagacatgtctagccactgatcatttttaaatataggtaaataaacctataaatattatcacgcagatcactaaagtatatctttaattctgggagaaatgagataaaagatgtacttgtgaccattgtaacaatagcacaaataaagcacttgtgccaaa

SEQ ID NO: 18660 - DNA, 1942 bp, Artificial Sequence
  derived and/or modified sequence
atttgatcctattaagaattgtccaaatgttggagcatttgattgaaaaatccttcttagccattttaaagatagctttccaatgattagacgaattgattctttctgtgactcatcagttcatttcctgtaaaattcatgtcttgctgttgatttgtgaataagaaccagagcttgtagaaaccactttaatcatatccaggagtttgcaagaaacaggtgcttaacactaattcacctcctgaacaagaaaaatgggctgtgaccggaactgtgggctcatcgctggggctgtcattggtgctgtcctggctgtgtttggaggtattctaatgccagttggagacctgcttatccagaagacaattaaaaagcaagttgtcctcgaagaaggtacaattgcttttaaaaattgggttaaaacaggcacagaagtttacagacagttttggatctttgatgtgcaaaatccacaggaagtgatgatgaacagcagcaacattcaagttaagcaaagaggtccttatacgtacagagttcgttttctagccaaggaaaatgtaacccaggacgctgaggacaacacagtctctttcctgcagcccaatggtgccatcttcgaaccttcactatcagttggaacagaggctgacaacttcacagttctcaatctggctgtggcagctgcatcccatatctatcaaaatcaatttgttcaaatgatcctcaattcacttattaacaagtcaaaatcttctatgttccaagtcagaactttgagagaactgttatggggctatagggatccatttttgagtttggttccgtaccctgttactaccacagttggtctgttttatccttacaacaatactgcagatggagtttataaagttttcaatggaaaagataacataagtaaagttgccataatcgacacatataaaggtaaaaggaatctgtcctattgggaaagtcactgcgacatgattaatggtacagatgcagcctcatttccaccttttgttgagaaaagccaggtattgcagttcttttcttctgatatttgcaggtcaatctatgctgtatttgaatccgacgttaatctgaaaggaatccctgtgtatagatttgttcttccatccaaggcctttgcctctccagttgaaaacccagacaactattgtttctgcacagaaaaaattatctcaaaaaattgtacatcatatggtgtgctagacatcagcaaatgcaaagaagggagacctgtgtacatttcacttcctcattttctgtatgcaagtcctgatgtttcagaacctattgatggattaaacccaaatgaagaagaacataggacatacttggatattgaacctataactggattcactttacaatttgcaaaacggctgcaggtcaacctattggtcaagccatcagaaaaaattcaagtattaaagaatctgaagaggaactatattgtgcctattctttggcttaatgagactgggaccattggtgatgagaaggcaaacatgttcagaagtcaagtaactggaaaaataaacctccttggcctgatagaaatgatcttactcagtgttggtgtggtgatgtttgttgcttttatgatttcatattgtgcatgcagatcgaaaacaataaaataagtaagtatgtaccaaaaaatattgcttcaataatattagcttatatattacttgttttcactttatcaaagagaagttacatattaggccatatatatttctagacatgtctagccactgatcatttttaaatataggtaaataaacctataaatattatcacgcagatcactaaagtatatctttaattctgggagaaatgagataaaagatgtacttgtgaccattgtaacaatagcacaaataaagcacttgtgccaaagttgtcc

SEQ ID NO: 18661 - DNA, 1686 bp, Artificial Sequence
  derived and/or modified sequence
atgacattattagttctgccactggtaggcattagaagcaagaaaagggagacggaccgaggaagccactttggtgaaacaaaaagaaaagcatttgtttatttagaacgggcaaaatgatacgtttcagtgggtgttttctttgtactttgatctttttgtactgatatttaagcttctgttttatgatctctttctaatgatagaaccagagcttgtagaaaccactttaatcatatccaggagtttgcaagaaacaggtgcttaacactaattcacctcctgaacaagaaaaatgggctgtgaccggaactgtgggctcatcgctggggctgtcattggtgctgtcctggctgtgtttggaggtattctaatgccagttggagacctgcttatccagaagacaattaaaaagcaagttgtcctcgaagaaggtacaattgcttttaaaaattgggttaaaacaggcacagaagtttacagacagttttggatctttgatgtgcaaaatccacaggaagtgatgatgaacagcagcaacattcaagttaagcaaagaggtccttatacgtacagagttcgttttctagccaaggaaaatgtaacccaggacgctgaggacaacacagtctctttcctgcagcccaatggtgccatcttcgaaccttcactatcagttggaacagaggctgacaacttcacagttctcaatctggctgtggcagctgcatcccatatctatcaaaatcaatttgttcaaatgatcctcaattcacttattaacaagtcaaaatcttctatgttccaagtcagaactttgagagaactgttatggggctatagggatccatttttgagtttggttccgtaccctgttactaccacagttggtctgttttatccttacaacaatactgcagatggagtttataaagttttcaatggaaaagataacataagtaaagttgccataatcgacacatataaaggtaaaaggaatctgtcctattgggaaagtcactgcgacatgattaatggtacagatgcagcctcatttccaccttttgttgagaaaagccaggtattgcagttcttttcttctgatatttgcaggtcaatctatgctgtatttgaatccgacgttaatctgaaaggaatccctgtgtatagatttgttcttccatccaaggcctttgcctctccagttgaaaacccagacaactattgtttctgcacagaaaaaattatctcaaaaaattgtacatcatatggtgtgctagacatcagcaaatgcaaagaagggagacctgtgtacatttcacttcctcattttctgtatgcaagtcctgatgtttcagaacctattgatggattaaacccaaatgaagaagaacataggacatacttggatattgaacctataactggattcactttacaatttgcaaaacggctgcaggtcaacctattggtcaagccatcagaaaaaattcaagtattaaagaatctgaagaggaactatattgtgcctattctttggcttaatgagactgggaccattggtgatgagaaggcaaacatgttcagaagtcaagtaactggaaaaataaacctccttggcctgatagaaatgatcttactcagtgttggtgtggtgatgtttgttgcttttatgatttcatattg

SEQ ID NO: 18662 - DNA, 1808 bp, Artificial Sequence
  derived and/or modified sequence
aagttgctgagacaagggaagagagatgaggaaccagagcttgtagaaaccactttaatcatatccaggagtttgcaagaaacaggtgcttaacactaattcacctcctgaacaagaaaaatgggctgtgaccggaactgtgggctcatcgctggggctgtcattggtgctgtcctggctgtgtttggaggtattctaatgccagttggagacctgcttatccagaagacaattaaaaagcaagttgtcctcgaagaaggtacaattgcttttaaaaattgggttaaaacaggcacagaagtttacagacagttttggatctttgatgtgcaaaatccacaggaagtgatgatgaacagcagcaacattcaagttaagcaaagaggtccttatacgtacagagttcgttttctagccaaggaaaatgtaacccaggacgctgaggacaacacagtctctttcctgcagcccaatggtgccatcttcgaaccttcactatcagttggaacagaggctgacaacttcacagttctcaatctggctgtggcagctgcatcccatatctatcaaaatcaatttgttcaaatgatcctcaattcacttattaacaagtcaaaatcttctatgttccaagtcagaactttgagagaactgttatggggctatagggatccatttttgagtttggttccgtaccctgttactaccacagttggtctgttttatccttacaacaatactgcagatggagtttataaagttttcaatggaaaagataacataagtaaagttgccataatcgacacatataaaggtaaaaggaatctgtcctattgggaaagtcactgcgacatgattaatggtacagatgcagcctcatttccaccttttgttgagaaaagccaggtattgcagttcttttcttctgatatttgcaggtcaatctatgctgtatttgaatccgacgttaatctgaaaggaatccctgtgtatagatttgttcttccatccaaggcctttgcctctccagttgaaaacccagacaactattgtttctgcacagaaaaaattatctcaaaaaattgtacatcatatggtgtgctagacatcagcaaatgcaaagaagggagacctgtgtacatttcacttcctcattttctgtatgcaagtcctgatgtttcagaacctattgatggattaaacccaaatgaagaagaacataggacatacttggatattgaacctataactggattcactttacaatttgcaaaacggctgcaggtcaacctattggtcaagccatcagaaaaaattcaagtattaaagaatctgaagaggaactatattgtgcctattctttggcttaatgagactgggaccattggtgatgagaaggcaaacatgttcagaagtcaagtaactggaaaaataaacctccttggcctgatagaaatgatcttactcagtgttggtgtggtgatgtttgttgcttttatgatttcatattgtgcatgcagatcgaaaacaataaaataagtaagtatgtaccaaaaaatattgcttcaataatattagcttatatattacttgttttcactttatcaaagagaagttacatattaggccatatatatttctagacatgtctagccactgatcatttttaaatataggtaaataaacctataaatattatcacgcagatcactaaagtatatctttaattctgggagaaatgagataaaagatgtacttgtgaccattgtaacaatagcacaaataaagcacttgtgccaaagttgtcc

SEQ ID NO: 18663 - DNA, 2365 bp, Artificial Sequence
  derived and/or modified sequence
gattgcatggagacactcaggagcacaaattgcaccacggggttagtccatcacggggttagtccatccaaaagcaaggaggcagcctttggtacccctgtgccagtcaatattcattaaagggcagttttttcaaggaagtcggagctagctgctggacactaacagtcaaatctcaaaggagctgggagagaaatgcacaagcagacagggtcttgctctgttgcccaggctggagtgcagtggcgccatcacagctgctgcaacctcaacctcccaagctcaagtgaatctcccacctcagcctcccaagtagctgggactacagcaaggtttccaagaattacgttggtaggcattcaactggcatcctctggaggtaaccagatgcccagctgctcctggaggggacatatggaagtgggctcataggcggaagggacttgccttgtctcatatgaaactttggactgtggacttttgagttaacgctgaaatgagatagctttccaatgattagacgaattgattctttctgtgactcatcagttcatttcctgtaaaattcatgtcttgctgttgatttgtgaataagaaccagagcttgtagaaaccactttaatcatatccaggagtttgcaagaaacaggtgcttaacactaattcacctcctgaacaagaaaaatgggctgtgaccggaactgtgggctcatcgctggggctgtcattggtgctgtcctggctgtgtttggaggtattctaatgccagttggagacctgcttatccagaagacaattaaaaagcaagttgtcctcgaagaaggtacaattgcttttaaaaattgggttaaaacaggcacagaagtttacagacagttttggatctttgatgtgcaaaatccacaggaagtgatgatgaacagcagcaacattcaagttaagcaaagaggtccttatacgtacagagttcgttttctagccaaggaaaatgtaacccaggacgctgaggacaacacagtctctttcctgcagcccaatggtgccatcttcgaaccttcactatcagttggaacagaggctgacaacttcacagttctcaatctggctgtggcagctgcatcccatatctatcaaaatcaatttgttcaaatgatcctcaattcacttattaacaagtcaaaatcttctatgttccaagtcagaactttgagagaactgttatggggctatagggatccatttttgagtttggttccgtaccctgttactaccacagttggtctgttttatccttacaacaatactgcagatggagtttataaagttttcaatggaaaagataacataagtaaagttgccataatcgacacatataaaggtaaaaggaatctgtcctattgggaaagtcactgcgacatgattaatggtacagatgcagcctcatttccaccttttgttgagaaaagccaggtattgcagttcttttcttctgatatttgcaggtcaatctatgctgtatttgaatccgacgttaatctgaaaggaatccctgtgtatagatttgttcttccatccaaggcctttgcctctccagttgaaaacccagacaactattgtttctgcacagaaaaaattatctcaaaaaattgtacatcatatggtgtgctagacatcagcaaatgcaaagaagggagacctgtgtacatttcacttcctcattttctgtatgcaagtcctgatgtttcagaacctattgatggattaaacccaaatgaagaagaacataggacatacttggatattgaacctataactggattcactttacaatttgcaaaacggctgcaggtcaacctattggtcaagccatcagaaaaaattcaagtattaaagaatctgaagaggaactatattgtgcctattctttggcttaatgagactgggaccattggtgatgagaaggcaaacatgttcagaagtcaagtaactggaaaaataaacctccttggcctgatagaaatgatcttactcagtgttggtgtggtgatgtttgttgcttttatgatttcatattgtgcatgcagatcgaaaacaataaaataagtaagtatgtaccaaaaaatattgcttcaataatattagcttatatattacttgttttcactttatcaaagagaagttacatattaggccatatatatttctagacatgtctagccactgatcatttttaaatataggtaaataaacctataaatattatcacgcagatcactaaagtatatctttaattctgggagaaatgagataaaagatgtacttgtgaccattgtaacaatagcacaaataaagcacttgtgccaaa

SEQ ID NO: 18664 - DNA, 2298 bp, Artificial Sequence
  derived and/or modified sequence
atttgatcctattaagaattgtccaaatgttggagcatttgattgaaaaatccttcttagccattttaaagatagctttccaatgattagacgaattgattctttctgtgactcatcagttcatttcctgtaaaattcatgtcttgctgttgatttgtgaataagaaccagagcttgtagaaaccactttaatcatatccaggagtttgcaagaaacaggtgcttaacactaattcacctcctgaacaagaaaaatgggctgtgaccggaactgtgggctcatcgctggggctgtcattggtgctgtcctggctgtgtttggaggtattctaatgccagttggagacctgcttatccagaagacaattaaaaagcaagttgtcctcgaagaaggtacaattgcttttaaaaattgggttaaaacaggcacagaagtttacagacagttttggatctttgatgtgcaaaatccacaggaagtgatgatgaacagcagcaacattcaagttaagcaaagaggtccttatacgtacagagttcgttttctagccaaggaaaatgtaacccaggacgctgaggacaacacagtctctttcctgcagcccaatggtgccatcttcgaaccttcactatcagttggaacagaggctgacaacttcacagttctcaatctggctgtggcagctgcatcccatatctatcaaaatcaatttgttcaaatgatcctcaattcacttattaacaagtcaaaatcttctatgttccaagtcagaactttgagagaactgttatggggctatagggatccatttttgagtttggttccgtaccctgttactaccacagttggtctgttttatccttacaacaatactgcagatggagtttataaagttttcaatggaaaagataacataagtaaagttgccataatcgacacatataaaggtaaaaggaatctgtcctattgggaaagtcactgcgacatgattaatggtacagatgcagcctcatttccaccttttgttgagaaaagccaggtattgcagttcttttcttctgatatttgcaggtcaatctatgctgtatttgaatccgacgttaatctgaaaggaatccctgtgtatagatttgttcttccatccaaggcctttgcctctccagttgaaaacccagacaactattgtttctgcacagaaaaaattatctcaaaaaattgtacatcatatggtgtgctagacatcagcaaatgcaaagaagggagacctgtgtacatttcacttcctcattttctgtatgcaagtcctgatgtttcagaacctattgatggattaaacccaaatgaagaagaacataggacatacttggatattgaacctataactggattcactttacaatttgcaaaacggctgcaggtcaacctattggtcaagccatcagaaaaaattcaagtattaaagaatctgaagaggaactatattgtgcctattctttggcttaatgagactgggaccattggtgatgagaaggcaaacatgttcagaagtcaagtaactggaaaaataaacctccttggcctgatagaaatgatcttactcagtgttggtgtggtgatgtttgttgcttttatgatttcatattgtgcatgcagatcgaaaacaataaaataaacctggctcaagcacaaaccaatttgtgttgttctgattcaataattggtttctgggtggccaattcagaagaagagtgtacatgctcaacaaatcctaggccctgcattcctgtcatcctcatccgggggaaacaccatcatcccagtagctgccctattcaactgcaacagtctccaggaccatcagtatactgcatttcatgtgcaccaaatattttgaaagacatttataaataattggcttatgactcatatttctctatgaataccttcatacagcaggtataactcttttctttatgggcttaaatattttgtcactgatcctgcaaatggacatcattttagcacactagcggtttatattttaaggaccttcattctctgttctgcacctcttctggaaattgagtaaattttgcttttttttttttactcagttgcaacttacgcttggcatcttcagaatgcttttctagcattaagagatgtaaatgataaaggaattattgtatgaaatattacaaagcgtagactatgcattgttattcattataatattttttgctgtcataatcgcctcataaagacaggtttcaaccattaaaatatgttcttcctta

SEQ ID NO: 18665 - DNA, 1741 bp, Artificial Sequence
  derived and/or modified sequence
agatgtcaggataaccttaaggatagatgaagggttgagagcctgtgcctcatttctgagttctcagctgctatgccgtggaaatcctgtttactttctgcatctgctcctgcaagactctggagccagtcttgaggtcctacatctccgaaagcaagctcttctagaagttgcaagttgtcctcgaagaaggtacaattgcttttaaaaattgggttaaaacaggcacagaagtttacagacagttttggatctttgatgtgcaaaatccacaggaagtgatgatgaacagcagcaacattcaagttaagcaaagaggtccttatacgtacagagttcgttttctagccaaggaaaatgtaacccaggacgctgaggacaacacagtctctttcctgcagcccaatggtgccatcttcgaaccttcactatcagttggaacagaggctgacaacttcacagttctcaatctggctgtggcagctgcatcccatatctatcaaaatcaatttgttcaaatgatcctcaattcacttattaacaagtcaaaatcttctatgttccaagtcagaactttgagagaactgttatggggctatagggatccatttttgagtttggttccgtaccctgttactaccacagttggtctgttttatccttacaacaatactgcagatggagtttataaagttttcaatggaaaagataacataagtaaagttgccataatcgacacatataaaggtaaaaggaatctgtcctattgggaaagtcactgcgacatgattaatggtacagatgcagcctcatttccaccttttgttgagaaaagccaggtattgcagttcttttcttctgatatttgcaggtcaatctatgctgtatttgaatccgacgttaatctgaaaggaatccctgtgtatagatttgttcttccatccaaggcctttgcctctccagttgaaaacccagacaactattgtttctgcacagaaaaaattatctcaaaaaattgtacatcatatggtgtgctagacatcagcaaatgcaaagaagggagacctgtgtacatttcacttcctcattttctgtatgcaagtcctgatgtttcagaacctattgatggattaaacccaaatgaagaagaacataggacatacttggatattgaacctataactggattcactttacaatttgcaaaacggctgcaggtcaacctattggtcaagccatcagaaaaaattcaagtattaaagaatctgaagaggaactatattgtgcctattctttggcttaatgagactgggaccattggtgatgagaaggcaaacatgttcagaagtcaagtaactggaaaaataaacctccttggcctgatagaaatgatcttactcagtgttggtgtggtgatgtttgttgcttttatgatttcatattgtgcatgcagatcgaaaacaataaaataagtaagtatgtaccaaaaaatattgcttcaataatattagcttatatattacttgttttcactttatcaaagagaagttacatattaggccatatatatttctagacatgtctagccactgatcatttttaaatataggtaaataaacctataaatattatcacgcagatcactaaagtatatctttaattctgggagaaatgagataaaagatgtacttgtgaccattgtaacaatagcacaaataaagcacttgtgccaaagttgtcc

SEQ ID NO: 18666 - DNA, 1353 bp, Artificial Sequence
  derived and/or modified sequence
agaaccagagcttgtagaaaccactttaatcatatccaggagtttgcaagaaacaggtgcttaacactaattcacctcctgaacaagaaaaatgggctgtgaccggaactgtgggctcatcgctggggctgtcattggtgctgtcctggctgtgtttggaggtattctaatgccagttggagacctgcttatccagaagacaattaaaaagcaagttgtcctcgaagaaggtacaattgcttttaaaaattgggttaaaacaggcacagaagtttacagacagttttggatctttgatgtgcaaaatccacaggaagtgatgatgaacagcagcaacattcaagttaagcaaagaggtccttatacgtacagagttcgttttctagccaaggaaaatgtaacccaggacgctgaggacaacacagtctctttcctgcagcccaatggtgccatcttcgaaccttcactatcagttggaacagaggctgacaacttcacagttctcaatctggctgtggcagctgcatcccatatctatcaaaatcaatttgttcaaatgatcctcaattcacttattaacaagtcaaaatcttctatgttccaagtcagaactttgagagaactgttatggggctatagggatccatttttgagtttggttccgtaccctgttactaccacagttggtctgttttatccttacaacaatactgcagatggagtttataaagttttcaatggaaaagataacataagtaaagttgccataatcgacacatataaaggtaaaaggaatctgtcctattgggaaagtcactgcgacatgattaatggtacagatgcagcctcatttccaccttttgttgagaaaagccaggtattgcagttcttttcttctgatatttgcagggagacctgtgtacatttcacttcctcattttctgtatgcaagtcctgatgtttcagaacctattgatggattaaacccaaatgaagaagaacataggacatacttggatattgaacctataactggattcactttacaatttgcaaaacggctgcaggtcaacctattggtcaagccatcagaaaaaattcaagtattaaagaatctgaagaggaactatattgtgcctattctttggcttaatgagactgggaccattggtgatgagaaggcaaacatgttcagaagtcaagtaactggaaaaataaacctccttggcctgatagaaatgatcttactcagtgttggtgtggtgatgtttgttgcttttatgatttcatattgtgcatgcagatcgaaaacaataaaataagtaagtatgtaccaaaaaatattgcttcaat

SEQ ID NO: 18667 - DNA, 1419 bp, Artificial Sequence
  derived and/or modified sequence
atgggctgcgacagaaactgcggcctgatcgccggcgccgtgatcggcgccgtgctggccgtgttcggcggcatcctgatgcccgtgggcgacctgctgatccagaagaccatcaagaagcaggtggtgctggaggagggcaccatcgccttcaagaactgggtgaagaccggcaccgaggtgtacagacagttctggatcttcgacgtgcagaacccccaggaggtgatgatgaacagcagcaacatccaggtgaagcagagaggcccctacacctacagagtgagattcctggccaaggagaacgtgacccaggacgccgaggacaacaccgtgagcttcctgcagcccaacggcgccatcttcgagcccagcctgagcgtgggcaccgaggccgacaacttcaccgtgctgaacctggccgtggccgccgccagccacatctaccagaaccagttcgtgcagatgatcctgaacagcctgatcaacaagagcaagagcagcatgttccaggtgagaaccctgagagagctgctgtggggctacagagaccccttcctgagcctggtgccctaccccgtgaccaccaccgtgggcctgttctacccctacaacaacaccgccgacggcgtgtacaaggtgttcaacggcaaggacaacatcagcaaggtggccatcatcgacacctacaagggcaagagaaacctgagctactgggagagccactgcgacatgatcaacggcaccgacgccgccagcttcccccccttcgtggagaagagccaggtgctgcagttcttcagcagcgacatctgcagaagcatctacgccgtgttcgagagcgacgtgaacctgaagggcatccccgtgtacagattcgtgctgcccagcaaggccttcgccagccccgtggagaaccccgacaactactgcttctgcaccgagaagatcatcagcaagaactgcaccagctacggcgtgctggacatcagcaagtgcaaggagggcagacccgtgtacatcagcctgccccacttcctgtacgccagccccgacgtgagcgagcccatcgacggcctgaaccccaacgaggaggagcacagaacctacctggacatcgagcccatcaccggcttcaccctgcagttcgccaagagactgcaggtgaacctgctggtgaagcccagcgagaagatccaggtgctgaagaacctgaagagaaactacatcgtgcccatcctgtggctgaacgagaccggcaccatcggcgacgagaaggccaacatgttcagaagccaggtgaccggcaagatcaacctgctgggcctgatcgagatgatcctgctgagcgtgggcgtggtgatgttcgtggccttcatgatcagctactgcgcctgcagaagcaagaccatcaagtag

SEQ ID NO: 18668 - DNA, 1392 bp, Artificial Sequence
  derived and/or modified sequence
atgggctgcgacagaaactgcggcctgatcgccggcgccgtgatcggcgccgtgctggccgtgttcggcggcatcctgatgcccgtgggcgacctgctgatccagaagaccatcaagaagcaggtggtgctggaggagggcaccatcgccttcaagaactgggtgaagaccggcaccgaggtgtacagacagttctggatcttcgacgtgcagaacccccaggaggtgatgatgaacagcagcaacatccaggtgaagcagagaggcccctacacctacagagtgagattcctggccaaggagaacgtgacccaggacgccgaggacaacaccgtgagcttcctgcagcccaacggcgccatcttcgagcccagcctgagcgtgggcaccgaggccgacaacttcaccgtgctgaacctggccgtggccgccgccagccacatctaccagaaccagttcgtgcagatgatcctgaacagcctgatcaacaagagcaagagcagcatgttccaggtgagaaccctgagagagctgctgtggggctacagagaccccttcctgagcctggtgccctaccccgtgaccaccaccgtgggcctgttctacccctacaacaacaccgccgacggcgtgtacaaggtgttcaacggcaaggacaacatcagcaaggtggccatcatcgacacctacaagggcaagagaaacctgagctactgggagagccactgcgacatgatcaacggcaccgacgccgccagcttcccccccttcgtggagaagagccaggtgctgcagttcttcagcagcgacatctgcagaagcatctacgccgtgttcgagagcgacgtgaacctgaagggcatccccgtgtacagattcgtgctgcccagcaaggccttcgccagccccgtggagaaccccgacaactactgcttctgcaccgagaagatcatcagcaagaactgcaccagctacggcgtgctggacatcagcaagtgcaaggagggcagacccgtgtacatcagcctgccccacttcctgtacgccagccccgacgtgagcgagcccatcgacggcctgaaccccaacgaggaggagcacagaacctacctggacatcgagcccatcaccggcttcaccctgcagttcgccaagagactgcaggtgaacctgctggtgaagcccagcgagaagatccaggtgctgaagaacctgaagagaaactacatcgtgcccatcctgtggctgaacgagaccggcaccatcggcgacgagaaggccaacatgttcagaagccaggtgaccggcaagatcaacctgctgggcctgatcgagatgatcctgctgagcgtgggcgtggtgatgttcgtggccttcatgatcagctactag

SEQ ID NO: 18669 - DNA, 867 bp, Artificial Sequence
  derived and/or modified sequence
atgggctgcgacagaaactgcggcctgatcgccggcgccgtgatcggcgccgtgctggccgtgttcggcggcatcctgatgcccgtgggcgacctgctgatccagaagaccatcaagaagcaggtggtgctggaggagggcaccatcgccttcaagaactgggtgaagaccggcaccgaggtgtacagacagttctggatcttcgacgtgcagaacccccaggaggtgatgatgaacagcagcaacatccaggtgaagcagagaggcccctacacctacagagtgagattcctggccaaggagaacgtgacccaggacgccgaggacaacaccgtgagcttcctgcagcccaacggcgccatcttcgagcccagcctgagcgtgggcaccgaggccgacaacttcaccgtgctgaacctggccgtggccgccgccagccacatctaccagaaccagttcgtgcagatgatcctgaacagcctgatcaacaagagcaagagcagcatgttccaggtgagaaccctgagagagctgctgtggggctacagagaccccttcctgagcctggtgccctaccccgtgaccaccaccgtgggcctgttctacccctacaacaacaccgccgacggcgtgtacaaggtgttcaacggcaaggacaacatcagcaaggtggccatcatcgacacctacaagggcaagagaaacctgagctactgggagagccactgcgacatgatcaacggcaccgacgccgccagcttcccccccttcgtggagaagagccaggtgctgcagttcttcagcagcgacatctgcagagagacctgcgtgcacttcaccagcagcttcagcgtgtgcaagagctag

SEQ ID NO: 18670 - protein, 548 aa, Artificial Sequence
  derived and/or modified sequence
MALAGCPDSFLHHPYYQDKVEQTPRSQQDPAGPGLPAQSDRLANHQEDDVDLEALVNDMNASLESLYSACSMQSDTVPLLQNGQHARSQPRASGPPRSIQPQVSPRQRVQRSQPVHILAVRRLQEEDQQFRTSSLPAIPNPFPELCGPGSPPVLTPGSLPPSQAAAKQDVKVFSEDGTSKVVEILADMTARDLCQLLVYKSHCVDDNSWTLVEHHPHLGLERCLEDHELVVQVESTMASESKFLFRKNYAKYEFFKNPMNFFPEQMVTWCQQSNGSQTQLLQEPRHLQLLADLEDSNIFSLIAGRKQYNAPTDHGLCIKPNKVRNETKELRLLCAEDEQTRTCWMTAFRLLKYGMLLYQNYRIPQQRKALLSPFSTPVRSVSENSLVAMDFSGQTGRVIENPAEAQSAALEEGHAWRKRSTRMNILGSQSPLHPSTLSTVIHRTQHWFHGRISREESHRIIKQQGLVDGLFLLRDSQSNPKAFVLTLCHHQKIKNFQILPCEDDGQTFFSLDDGNTKFSDLIQLVDFYQLNKGVLPCKLKHHCIRVAL

SEQ ID NO: 18671 - DNA, 1647 bp, Artificial Sequence
  derived and/or modified sequence
atggccctggccggctgccccgacagcttcctgcaccacccctactaccaggacaaggtggagcagacccccagaagccagcaggaccccgccggccccggcctgcccgcccagagcgacagactggccaaccaccaggaggacgacgtggacctggaggccctggtgaacgacatgaacgccagcctggagagcctgtacagcgcctgcagcatgcagagcgacaccgtgcccctgctgcagaacggccagcacgccagaagccagcccagagccagcggcccccccagaagcatccagccccaggtgagccccagacagagagtgcagagaagccagcccgtgcacatcctggccgtgagaagactgcaggaggaggaccagcagttcagaaccagcagcctgcccgccatccccaaccccttccccgagctgtgcggccccggcagcccccccgtgctgacccccggcagcctgccccccagccaggccgccgccaagcaggacgtgaaggtgttcagcgaggacggcaccagcaaggtggtggagatcctggccgacatgaccgccagagacctgtgccagctgctggtgtacaagagccactgcgtggacgacaacagctggaccctggtggagcaccacccccacctgggcctggagagatgcctggaggaccacgagctggtggtgcaggtggagagcaccatggccagcgagagcaagttcctgttcagaaagaactacgccaagtacgagttcttcaagaaccccatgaacttcttccccgagcagatggtgacctggtgccagcagagcaacggcagccagacccagctgctgcaggagcccagacacctgcagctgctggccgacctggaggacagcaacatcttcagcctgatcgccggcagaaagcagtacaacgcccccaccgaccacggcctgtgcatcaagcccaacaaggtgagaaacgagaccaaggagctgagactgctgtgcgccgaggacgagcagaccagaacctgctggatgaccgccttcagactgctgaagtacggcatgctgctgtaccagaactacagaatcccccagcagagaaaggccctgctgagccccttcagcacccccgtgagaagcgtgagcgagaacagcctggtggccatggacttcagcggccagaccggcagagtgatcgagaaccccgccgaggcccagagcgccgccctggaggagggccacgcctggagaaagagaagcaccagaatgaacatcctgggcagccagagccccctgcaccccagcaccctgagcaccgtgatccacagaacccagcactggttccacggcagaatcagcagagaggagagccacagaatcatcaagcagcagggcctggtggacggcctgttcctgctgagagacagccagagcaaccccaaggccttcgtgctgaccctgtgccaccaccagaagatcaagaacttccagatcctgccctgcgaggacgacggccagaccttcttcagcctggacgacggcaacaccaagttcagcgacctgatccagctggtggacttctaccagctgaacaagggcgtgctgccctgcaagctgaagcaccactgcatcagagtggccctgtag

SEQ ID NO: 18672 - DNA, 1647 bp, Artificial Sequence
  derived and/or modified sequence
atggcgttggcaggatgtccggactcattcctgcaccacccatattaccaggacaaggtagagcagactcctcggagtcagcaggatcccgcaggtccaggacttcctgcgcagtctgacagattggcaaatcaccaggaagacgatgtcgacctggaagctctcgtgaacgacatgaacgccagtctggaaagtctctacagtgcatgcagtatgcaatccgacaccgttcccctcttgcagaatggtcagcacgccagatcacaaccaagagcaagcggacctccaagatccattcagccccaggtgagcccccgccagagggtgcagaggtcccaacctgtgcatatcctggcagtgagacggctgcaggaggaagaccagcagtttaggacctcgagcctgcctgccattccaaatccttttccggagttgtgcgggcctgggagtccccctgtcctgacgcccggcagcttgccccccagccaagccgccgctaaacaggacgtgaaagtgtttagcgaagatgggacgtccaaagtcgtcgagattctcgcagacatgactgctagggacctctgtcagctgctggtgtacaaatctcactgtgtggacgataattcttggacacttgtggaacatcacccacatttaggattagaaaggtgcctagaagatcacgagctggttgtccaggtagagagtaccatggccagtgaaagtaaatttctgtttcgcaagaactatgcaaaatatgagttcttcaagaaccccatgaacttttttccagagcaaatggtgacctggtgccagcagtctaacggcagtcaaactcaattgcttcaggagcccaggcatctgcaactgctggcagacctggaggactcaaacatcttctccctgatcgccgggaggaagcagtataacgcccctactgatcacggcctctgtatcaagcccaacaaagtcaggaatgagactaaggagctacgcctgctctgcgccgaagacgaacagacgcgcacctgctggatgacagcatttagattactgaagtacggtatgctgctctaccagaattaccgaataccacagcagcgtaaggcactgctcagcccctttagtactcctgtcaggagtgtgtctgagaacagtctcgtggctatggacttcagcgggcagaccggacgcgttatcgagaacccagctgaggctcaaagtgccgcactagaggaggggcacgcatggaggaagcgctccacccgaatgaacatactggggtcacagtctcctttacacccttcgacactcagtacagtgattcatagaacccagcattggttccacggcagaataagtagagaagagtcccatcggatcatcaaacagcagggactcgtggacgggctctttttactgcgggattctcagagcaacccaaaggctttcgtgttaaccctctgccatcatcagaagatcaaaaacttccagatactgccctgtgaggatgatggacagactttctttagtctcgacgatgggaacactaagttttccgacttgattcagctcgtcgatttttatcagctaaacaagggggtgttgccatgcaagctgaagcaccactgtatcagggtcgcactctag

SEQ ID NO: 18673 - DNA, 2050 bp, Artificial Sequence
  derived and/or modified sequence
aaatgtaatttgaagaaggcagaaggaacccatggctttagccggctgcccagattcctttttgcaccatccgtactaccaggacaaggtggagcagacacctcgcagtcaacaagacccggcaggaccaggactccccgcacagtctgaccgacttgcgaatcaccaggaggatgatgtggacctggaagccctggtgaacgatatgaatgcatccctggagagcctgtactcggcctgcagcatgcagtcagacacggtgcccctcctgcagaatggccagcatgcccgcagccagcctcgggcttcaggccctcctcggtccatccagccacaggtgtccccgaggcagagggtgcagcgctcccagcctgtgcacatcctcgctgtcaggcgccttcaggaggaagaccagcagtttagaacctcatctctgccggccatccccaatccttttcctgaactctgtggccctgggagcccccctgtgctcacgccgggttctttacctccgagccaggccgccgcaaagcaggatgttaaagtctttagtgaagatgggacaagcaaagtggtggagattctagcagacatgacagccagagacctgtgccaattgctggtttacaaaagtcactgtgtggatgacaacagctggacactagtggagcaccacccgcacctaggattagagaggtgcttggaagaccatgagctggtggtccaggtggagagtaccatggccagtgagagtaaatttctattcaggaagaattacgcaaaatacgagttctttaaaaatcccatgaatttcttcccagaacagatggttacttggtgccagcagtcaaatggcagtcaaacccagcttttgcaggaacccagacacctgcagctgctggccgacctggaggacagcaacatcttctccctgatcgctggcaggaagcagtacaacgcccctacagaccacgggctctgcataaagccaaacaaagtcaggaatgaaactaaagagctgaggttgctctgtgcagaggacgagcaaaccaggacgtgctggatgacagcgttcagactcctcaagtatggaatgctcctttaccagaattaccgaatccctcagcagaggaaggccttgctgtccccgttctcgacgccagtgcgcagtgtctccgagaactccctcgtggcaatggatttttctgggcaaacaggacgcgtgatagagaatccggcagaggcccagagcgcagccctggaggagggccacgcctggaggaagcgaagcacacggatgaacatcctaggtagccaaagtcccctccacccttctaccctaagtacagtgattcacaggacacagcactggtttcacgggaggatctccagggaggaatcccacaggatcattaaacagcaagggctcgtggatgggctttttctcctccgtgacagccagagtaatccaaaggcatttgtactcacactgtgtcatcaccagaaaattaaaaatttccagatcttaccttgcgaggacgacgggcagacgttcttcagcctagatgacgggaacaccaaattctctgacctgatccagctggttgacttttaccagctgaacaaaggagtcctgccttgcaaactcaagcaccactgcatccgagtggccttatgaccgcagatgtcctctcggctgaagactggaggaagtgaacactggagtgaagaagcggtctgtgcgttggtgaagaacacacatcgattctgcacctggggacccagagcgagatgggtttgttcggtgccagccgaccaagattgactagtttgttggacttaaacgacgatttgctgctgtgaacccagcagggtcgcctccctctgcatcggccaaattggggagggcatggaagatccagcggaaagttgaaaataaactggaatgatcatcttggcttgggccgcttaggaacaagaaccggagagaagtgattggaaatgaactcttgccctggaataatcttgacaattaaaactgatatgttta

SEQ ID NO: 18674 - DNA, 1647 bp, Artificial Sequence
  derived and/or modified sequence
atggccctggccggctgcccagacagcttcctgcaccacccctactaccaggacaaggtggagcagacccccaggagccagcaggaccctgctggccctggcctgcctgcccagagcgaccggctggccaaccaccaggaggatgatgtggacctggaggccctggtgaatgacatgaatgccagcctggagagcctgtacagcgcctgcagcatgcagagcgacacagtgcccctgctgcagaatggccagcacgcccggagccagccccgggccagcggccccccaagaagcatccagccccaggtgagcccccggcagagggtgcagaggagccagcctgtgcacatcctggccgtgcggcggctgcaggaggaggaccagcagttccgcaccagcagcctgcctgccatccccaaccccttccctgagctgtgtggccctggcagcccccctgtgctgaccccaggcagcctgccccccagccaggccgccgccaagcaggatgtgaaggtgttttctgaagatggcaccagcaaggtggtggagatcctggccgacatgacagcccgggacctgtgccagctgctggtgtacaagagccactgtgtggatgacaacagctggaccctggtggagcaccacccccacctgggcctggagcgctgcctggaggaccacgagctggtggtgcaggtggagagcaccatggccagcgagagcaagttcctgttcaggaagaactatgccaagtatgagttcttcaagaaccccatgaacttcttccctgagcagatggtgacctggtgccagcagagcaatggcagccagacccagctgctgcaggagcccaggcacctgcagctgctggccgacctggaggacagcaacatcttcagcctgattgctggcaggaagcagtacaatgcccccacagaccacggcctgtgcatcaagcccaacaaggtgagaaatgagaccaaggagctgcggctgctgtgtgccgaggatgagcagaccaggacctgctggatgacagccttccggctgctgaagtatggcatgctgctgtaccagaactaccgcatcccccagcagaggaaggccctgctgagccccttcagcacccctgtgcgctctgtgtctgagaacagcctggtggccatggacttcagcggccagacaggccgggtgattgagaacccagctgaggcccagagcgctgccctggaggagggccacgcctggaggaagaggagcaccaggatgaacatcctgggcagccagagccccctgcaccccagcaccctgagcaccgtcatccacaggacccagcactggttccacggccgcatcagccgggaggagagccaccgcatcatcaagcagcagggcctggtggatggcctcttcctgctgcgggacagccagagcaaccccaaggcctttgtgctgaccctgtgccaccaccagaagatcaagaacttccagatcctgccctgtgaagatgatggccagaccttcttcagcctggatgatggcaacaccaagttcagtgacctgatccagctggtggacttctaccagctgaacaagggcgtgctgccctgcaagctgaagcaccactgcatccgggtggccctgtag

SEQ ID NO: 18675 - DNA, 1647 bp, Artificial Sequence
  derived and/or modified sequence
atggccctggccggctgccccgacagcttcctgcaccacccctactaccaagataaagtggaacagacccccaggtcacagcaggatccagctggcccaggactccccgcgcagagcgatcgtttggcgaaccaccaggaagacgatgtcgaccttgaagccctggtaaacgatatgaacgcctctctggagagcctgtacagcgcttgttccatgcagtccgataccgttcctctgctgcagaatggtcagcatgcaaggtcccagcctcgggccagtggaccaccacgctctattcagccgcaggtcagcccccggcagcgagttcaacgcagccagcccgtgcatatattagcagtccggcgcctccaggaagaggatcagcagtttcgcacatcttctctgccagctataccaaacccctttccagagctctgtgggcccggctctccccctgttctgacacccggttcattgcccccgagtcaagccgcagccaagcaagacgttaaggtcttttctgaagacggaacttccaaagttgttgagattctggcggacatgacggcaagagacttgtgtcagctgctcgtgtacaaaagccactgtgttgacgataatagctggacgttggtggagcatcaccctcacctgggcctggaaagatgtttagaggatcacgaactggtggtgcaggtggaatcaactatggcttcagaatcaaaattcttgtttcggaagaattatgcaaaatacgagtttttcaagaacccaatgaatttcttccctgagcagatggtgacctggtgccagcagtccaatgggtcccagacgcagctccttcaggagcctcgtcatctgcagctgctggctgatttagaggattctaacatcttttctctaattgccgggaggaaacagtataatgctcccacggaccacgggttgtgcatcaagccaaacaaggtcagaaatgagacaaaggagcttcggctcctgtgcgccgaggacgaacagactaggacttgttggatgaccgccttccgcctgctgaaatatggaatgctgttataccagaactacaggattccacagcagagaaaggccctgctatcaccctttagcactcctgtgaggagtgtgtccgagaatagtttggtagcaatggacttttctggacaaacaggcagggttatcgagaacccagccgaggcccagtctgctgctttagaagagggccacgcatggagaaagcgcagtactaggatgaacattctgggtagtcagtctccactgcatccttccactctcagcaccgtgatccatcgcacccagcactggttccatggacgcatatccagagaggagtctcaccgcataattaaacaacagggattggtggacggtctgttcctcctgcgcgattctcagagtaatcccaaagcatttgttttaacgctgtgtcaccatcagaagataaaaaatttccaaattctgccatgcgaagatgacggccagactttcttctctttggatgatgggaatacaaaattcagcgacttgatccagctggtggacttctatcaactcaacaaaggcgtccttccatgtaaactcaaacatcactgtatcagagtggctttgtag

SEQ ID NO: 18676 - DNA, 1647 bp, Artificial Sequence
  derived and/or modified sequence
atggctctggccggatgtcccgactcctttctccaccacccatactatcaggacaaggtggaacagacaccaaggtcccaacaagatccagcaggccctggtttacctgctcaaagtgacagactggctaaccaccaggaggacgacgtcgacctggaagctctggtcaacgatatgaacgccagcctggagagcctttacagcgcatgctcgatgcagagcgatacagttccactgctccagaatgggcagcacgccaggtctcagccaagggcttccggcccacccagatccatccagccacaggtgtccccccgacagagagtgcagaggtcccaacccgtccatatcctggccgtgagacggctgcaggaggaagatcagcagtttagaaccagtagtctccctgcaatacctaatcccttccccgagctatgcggccctgggtctcctcctgtgcttactcctggtagcctgcctcctagccaagccgctgccaaacaggacgtcaaagtgttttcggaggacggaacttctaaggtggtggagattcttgcagatatgacagctagagatctatgtcaactgctagtatacaaaagtcactgcgtcgacgataattcatggacattggtcgaacatcatccacacttaggcctcgaacgatgtctggaagaccatgaactggtggtacaggttgaaagcaccatggcgtccgagagtaagtttctgtttagaaaaaactacgctaagtatgaattttttaagaaccctatgaacttcttccctgagcagatggtgacgtggtgccagcaatctaacggcagccagacacagcttcttcaggaaccaaggcacctgcaacttctcgccgatctcgaggacagtaatattttctcattaatcgcaggcaggaaacaatataacgccccaaccgatcatgggttatgtatcaagccaaacaaagtccgaaatgagacaaaagagttacggctactctgtgccgaagacgaacagacccgaacatgctggatgactgcgttccgcctgctgaagtatggaatgttgctgtaccagaactatcgaatcccccagcaaagaaaagcattgttgtcacccttctcaacccctgttcgctccgtcagcgagaactccctggtagccatggatttctctgggcaaactggtagagtgatcgaaaacccggcagaggcccagtctgcagccctcgaggagggtcatgcgtggcggaagcgcagtaccagaatgaacatactgggtagccagagtcccctccatccttctaccctatctaccgtgatccaccgcacccagcactggtttcacggcagaatctcccgggaagagtctcatcgcataatcaagcagcaggggctggtcgacgggctctttctgctccgggatagtcaatccaacccaaaggctttcgtgctaaccctgtgtcaccatcagaagatcaagaactttcagatcctgccatgcgaagacgatggccaaacattcttcagtctagacgatggtaacaccaagtttagcgacctcatccagttagtggacttctatcagctgaacaaaggggtgttgccatgcaagctgaaacatcattgcattagggtggcactgtag

SEQ ID NO: 18677 - protein, 141 aa, Artificial Sequence
  derived and/or modified sequence
MGKGIPLNDQDRIPWLCNLHDILLRDVASGQRVVLACSALKKTYRDILTQGKDGVALKCEESGKEAKQAEMQLLVVHLSGSFEVISGRLLKREGHFMPPELLQSQFETLEPPAAPENFIQISVDKNVSEIIATIMETLKMK

SEQ ID NO: 18678 - protein, 187 aa, Artificial Sequence
  derived and/or modified sequence
MAAPGALLVMGVSGSGKSTVGALLASELGWKFYDADDYHPEENRRKMGKGIPLNDQDRIPWLCNLHDILLRDVASGQRVVLACSALKKTYRDILTQGKDGVALKCEESGKEAKQAEMQLLVVHLSGSFEVISGRLLKREGHFMPPELLQSQFETLEPPAAPENFIQISVDKNVSEIIATIMETLKMK

SEQ ID NO: 18679 - protein, 59 aa, Artificial Sequence
  derived and/or modified sequence
MAAPGALLVMGVSGSGNWDGNSMMLMIITRRKIEGRWEKAYRSMTRTGFHGSVTCMTFY

SEQ ID NO: 18680 - DNA, 564 bp, Artificial Sequence
  derived and/or modified sequence
atggccgcccccggcgccctgctggtgatgggcgtgagcggcagcggcaagagcaccgtgggcgccctgctggccagcgagctgggctggaagttctacgacgccgacgactaccaccccgaggagaacagaagaaagatgggcaagggcatccccctgaacgaccaggacagaatcccctggctgtgcaacctgcacgacatcctgctgagagacgtggccagcggccagagagtggtgctggcctgcagcgccctgaagaagacctacagagacatcctgacccagggcaaggacggcgtggccctgaagtgcgaggagagcggcaaggaggccaagcaggccgagatgcagctgctggtggtgcacctgagcggcagcttcgaggtgatcagcggcagactgctgaagagagagggccacttcatgccccccgagctgctgcagagccagttcgagaccctggagccccccgccgcccccgagaacttcatccagatcagcgtggacaagaacgtgagcgagatcatcgccaccatcatggagaccctgaagatgaagtag

SEQ ID NO: 18681 - DNA, 180 bp, Artificial Sequence
  derived and/or modified sequence
atggccgcccccggcgccctgctggtgatgggcgtgagcggcagcggcaactgggacggcaacagcatgatgctgatgatcatcaccagaagaaagatcgagggcagatgggagaaggcctacagaagcatgaccagaaccggcttccacggcagcgtgacctgcatgaccttctactag

SEQ ID NO: 18682 - DNA, 564 bp, Artificial Sequence
  derived and/or modified sequence
atggctgccccgggagctctgctcgtcatgggtgtcagtgggtctggaaagagcacagtgggtgctctcctagcttcagaactcggctggaagttttacgacgccgatgattaccacccggaagagaatcgccgtaaaatggggaagggaatcccgttgaatgaccaagaccgaattccatggctgtgcaatctgcacgacatactcctaagggatgtggcgtctggacagagggtggtcctagcgtgtagcgcgctgaaaaagacctaccgagatatactaactcagggcaaggatggcgtggctctcaagtgtgaggaaagtggaaaagaggctaaacaagccgagatgcaacttctggtggtgcacctgtctgggtcctttgaagtgatatctggccgcttgctgaagcgtgagggacactttatgcctcctgaactcctgcaaagtcagttcgaaacattggaacccccagcagcaccggagaatttcattcagatcagtgttgacaagaacgtcagcgagatcatcgctaccataatggaaaccctgaagatgaagtag

SEQ ID NO: 18683 - DNA, 180 bp, Artificial Sequence
  derived and/or modified sequence
atggcagcacctggcgcccttcttgtgatgggcgtttctggctctgggaactgggatggaaactcgatgatgttgatgattatcaccagaaggaagatcgagggaaggtgggagaaggcctaccgatccatgacacgtaccggttttcacgggagtgtaacttgtatgacgttctattag

SEQ ID NO: 18684 - DNA, 692 bp, Artificial Sequence
  derived and/or modified sequence
ggttatggcggcgccgggcgcgctgctggtgatgggcgtgagcggctcggggaaatccaccgtgggcgccctgctggcatctgagctgggatggaaattctatgatgctgatgattatcacccggaggaaaatcgaaggaagatgggaaaaggcataccgctcaatgaccaggaccggattccatggctctgtaacttgcatgacattttactaagagatgtagcctcgggacagcgtgtggttctagcctgttcagccctgaagaaaacgtacagagacatattaacacaaggaaaagatggtgtagctctgaagtgtgaggagtcgggaaaggaagcaaagcaggctgagatgcagctcctggtggtccatctgagcgggtcgtttgaggtcatctctggacgcttactcaaaagagagggacattttatgccccctgaattattgcagtcccagtttgagactctggagcccccagcagctccagaaaactttatccaaataagtgtggacaaaaatgtttcagagataattgctacaattatggaaaccctaaaaatgaaatgacaatgattttgtatcagtggtccaaacagaactaagcataaatcattgtgccatcccaaacctcgttccagccgccttgcccatactagattctaaatgtttctaaaggcaaaccccaatgtgt

SEQ ID NO: 18685 - DNA, 564 bp, Artificial Sequence
  derived and/or modified sequence
atggccgcccctggggccctgctggtgatgggcgtgtctggcagcggcaagagcacagtgggcgccctgctggccagcgagctgggctggaagttctatgatgctgatgactaccaccctgaggagaacagaaggaagatgggcaagggcatccccctgaatgaccaggaccgcatcccctggctgtgcaacctgcatgacatcctgctgagagatgtggccagcggccagagggtggtgctggcctgcagcgccctgaagaagacctacagagacatcctgacccagggcaaggatggagtggccctgaagtgtgaggagagcggcaaggaggccaagcaggccgagatgcagctgctggtggtgcacctgagcggcagctttgaggtgatcagcggccgcctgctgaagcgggagggccacttcatgcctcctgagctgctgcagagccagtttgagaccctggagcccccagctgcccctgagaacttcatccagatctctgtggacaagaatgtgtctgagatcatcgccaccatcatggagaccctgaagatgaagtag

SEQ ID NO: 18686 - DNA, 180 bp, Artificial Sequence
  derived and/or modified sequence
atggccgcccctggggccctgctggtgatgggcgtgtctggcagcggcaactgggatggcaacagcatgatgctgatgatcatcaccaggaggaagattgagggccgctgggagaaggcctaccgctccatgaccaggacaggcttccacggctctgtgacctgcatgaccttctactag

SEQ ID NO: 18687 - DNA, 564 bp, Artificial Sequence
  derived and/or modified sequence
atggccgcccccggcgccctgctggtgatgggcgtgagcggcagcgggaagagcaccgttggtgccttgctagcttctgagctgggctggaagttttatgacgcagacgactatcatccagaggaaaaccggcgtaaaatggggaagggtattcccctcaatgatcaggatcgcattccctggctttgtaaccttcacgatattctgctccgcgatgtggcgagcggccaaagagtcgtcttggcctgttcggcgttaaagaaaacctatcgggacattctaacccagggcaaggatggagtagcccttaaatgcgaagaaagtgggaaggaagccaagcaggccgagatgcagctcctggtggttcacctgtctggaagttttgaggtcattagcggcagactgctgaaaagggaggggcacttcatgcctcctgaattactgcagagccagttcgaaactctagaaccccctgccgcaccagaaaacttcattcagatatccgttgataagaacgtgagcgaaattatcgctactataatggagaccctcaaaatgaaatag

SEQ ID NO: 18688 - DNA, 180 bp, Artificial Sequence
  derived and/or modified sequence
atggccgcccccggcgccctgctggtgatgggcgtgagcggcagcggtaattgggacggcaacagtatgatgctgatgatcatcactcgtcgcaagattgagggcaggtgggagaaggcttatcgatctatgacccggaccggtttccacgggtcagtgacatgtatgacattctactag

SEQ ID NO: 18689 - DNA, 936 bp, Artificial Sequence
  derived and/or modified sequence
taggccggggccggcggggcccggaaggcgacgggaaggagccgagcttgggttatggcggcgccgggcgcgctgctggtgatgggcgtgagcggctcggggaactgggatggaaattctatgatgctgatgattatcacccggaggaaaatcgaaggaagatgggaaaaggcataccgctcaatgaccaggaccggattccatggctctgtaacttgcatgacattttactaagagatgtagcctcgggacagcgtgtggttctagcctgttcagccctgaagaaaacgtacagagacatattaacacaaggaaaagatggtgtagctctgaagtgtgaggagtcgggaaaggaagcaaagcaggctgagatgcagctcctggtggtccatctgagcgggtcgtttgaggtcatctctggacgcttactcaaaagagagggacattttatgccccctgaattattgcagtcccagtttgagactctggagcccccagcagctccagaaaactttatccaaataagtgtggacaaaaatgtttcagagataattgctacaattatggaaaccctaaaaatgaaatgacaatgattttgtatcagtggtccaaacagaactaagcataaatcattgtgccatcccaaacctcgttccagccgccttgcccatactagattctaaatgtttctaaaggcaaaccccaatgtgtcaagacagacttgtttaggtgtaattttaggaattatgctggttcatcaggaagcagagggggagttttaaaagtcaagcttaaattgaagtttaaattcatctataaccaaatcaaatgatcagaggaaattctgtaatcaatgctggaaatcgttacattgtttagaacattcttgctcatgcctgtatttgcacaaataaatgaaacttcgctgtccttggc

SEQ ID NO: 18690 - DNA, 564 bp, Artificial Sequence
  derived and/or modified sequence
atggccgctcccggagcccttctggtcatgggagtgtccgggtctggcaagagtactgtgggggctctgctggctagcgagctcgggtggaagttttacgatgctgatgattaccatcccgaggagaatcgccgaaaaatgggtaagggcatccctctcaacgatcaggaccgcatcccatggctctgcaatttacatgacatactgttacgcgacgttgcatctggacagcgggttgtgctggcctgctctgcacttaaaaaaacataccgggacattctcacccaggggaaggacggggtagcgctcaaatgtgaggaaagtggaaaagaggccaagcaagcggagatgcagctcctggtcgtccaccttagtggtagcttcgaggttatttccggcaggctcctgaaacgtgaaggccacttcatgccccctgaactgctgcaatcccaattcgaaacactcgagcccccagccgcaccagagaattttatccagatatcagtggataaaaatgtgtcagagatcatagccactatcatggagaccttaaagatgaaatag

SEQ ID NO: 18691 - DNA, 180 bp, Artificial Sequence
  derived and/or modified sequence
atggctgctccgggtgccttgctcgtaatgggcgtgtcagggtccgggaattgggatggcaattccatgatgttaatgattattactagaagaaagattgagggccgatgggaaaaggcctatcgatctatgacccggaccggctttcatgggtcggttacttgtatgactttctactag

SEQ ID NO: 18692 - DNA, 1611 bp, Artificial Sequence
  derived and/or modified sequence
atgaacgccagcctggagagcctgtacagcgcctgcagcatgcagagcgacaccgtgcccctgctgcagaacggccagcacgccagaagccagcccagagccagcggcccccccagaagcatccagccccaggtgagccccagacagagagtgcagagaagccagcccgtgcacatcctggccgtgagaagactgcaggaggaggaccagcagttcagaaccagcagcctgcccgccatccccaaccccttccccgagctgtgcggccccggcagcccccccgtgctgacccccggcagcctgccccccagccaggccgccgccaagcaggacgtgaaggtgttcagcgaggacggcaccagcaaggtggtggagatcctggccgacatgaccgccagagacctgtgccagctgctggtgtacaagagccactgcgtggacgacaacagctggaccctggtggagcaccacccccacctgggcctggagagatgcctggaggaccacgagctggtggtgcaggtggagagcaccatggccagcgagagcaagttcctgttcagaaagaactacgccaagtacgagttcttcaagaaccccatgaacttcttccccgagcagatggtgacctggtgccagcagagcaacggcagccagacccagctgctgcagaacttcctgaacagcagcagctgccccgagatccagggcttcctgcacgtgaaggagctgggcaagaagagctggaagaagctgtacgtgtgcctgagaagaagcggcctgtactgcagcaccaagggcaccagcaaggagcccagacacctgcagctgctggccgacctggaggacagcaacatcttcagcctgatcgccggcagaaagcagtacaacgcccccaccgaccacggcctgtgcatcaagcccaacaaggtgagaaacgagaccaaggagctgagactgctgtgcgccgaggacgagcagaccagaacctgctggatgaccgccttcagactgctgaagtacggcatgctgctgtaccagaactacagaatcccccagcagagaaaggccctgctgagccccttcagcacccccgtgagaagcgtgagcgagaacagcctggtggccatggacttcagcggccagaccggcagagtgatcgagaaccccgccgaggcccagagcgccgccctggaggagggccacgcctggagaaagagaagcaccagaatgaacatcctgggcagccagagccccctgcaccccagcaccctgagcaccgtgatccacagaacccagcactggttccacggcagaatcagcagagaggagagccacagaatcatcaagcagcagggcctggtggacggcctgttcctgctgagagacagccagagcaaccccaaggccttcgtgctgaccctgtgccaccaccagaagatcaagaacttccagatcctgccctgcgaggacgacggccagaccttcttcagcctggacgacggcaacaccaagttcagcgacctgatccagctggtggacttctaccagctgaacaagggcgtgctgccctgcaagctgaagcaccactgcatcagagtggccctgtag

SEQ ID NO: 18693 - DNA, 1611 bp, Artificial Sequence
  derived and/or modified sequence
atgaatgcaagcctggaaagcttgtattccgcctgctctatgcagtccgacaccgtgccattgctgcagaatggtcagcacgcccggtctcagccacgcgcatcaggtcctcctcgcagtatccagccacaggtcagtccacgccagcgggtgcagaggtctcagccggtccacattctggctgtgcgtcgcctgcaggaggaagatcagcaattccgcacatccagcttacctgcgatcccgaaccctttcccagagctgtgtggacctggctcccccccagttctcacccctgggtctcttccccccagccaggctgccgcgaagcaggatgtgaaggtgttttccgaggacggaacaagcaaagttgtagagatcctggccgatatgacggcccgagacctgtgccaactgctggtttacaagtcacactgcgttgatgacaactcatggacactggtggagcaccacccacacctggggctcgagaggtgcttagaggaccatgaactggttgtgcaggtggagagcaccatggcctccgagtctaagtttttattccggaagaactatgccaagtatgagttttttaagaaccccatgaacttcttccctgagcagatggtaacttggtgccagcaatcaaacggcagtcaaactcagctccttcagaatttcttgaactctagttcttgtccagagatacagggtttcctgcacgttaaggaactcggaaagaagtcttggaagaagttgtatgtttgtctccgcaggtctggtctgtattgtagtaccaaagggactagtaaagagcctaggcacctgcagctcctggccgacctggaggacagcaatatcttctcgctgatcgcaggtcggaaacaatataacgccccaacagaccacggtttatgtatcaagcctaacaaagtcaggaacgaaaccaaggagctgcgactgctgtgcgcagaggacgaacagactcgcacttgctggatgactgcctttaggctcctgaagtacggaatgttgctttaccaaaattatcgaataccccaacagcggaaagctctgcttagccccttcagtacacccgtgcggtctgtatctgaaaactcattggtcgccatggacttcagcggacagaccggccgggtaatcgagaatcctgctgaagcccaatcagcggccctcgaagaaggacatgcctggagaaagagatccacccgcatgaacatccttgggtcccagtcccccttgcaccccagcaccttgagcaccgtcattcatcgaacacaacattggtttcacggcagaatcagtagagaggagagccacaggatcattaaacaacagggcctggtggacggcctctttctgctgcgtgactcccagagcaacccgaaggcctttgtgctgaccctctgtcatcaccagaaaatcaagaacttccagattcttccatgcgaagacgacgggcagaccttcttttctcttgatgacgggaacaccaaattctccgatttaattcaattggtggatttctaccagctgaacaaaggagtgctgccttgcaaacttaaacatcactgcatccgcgtggctctttag

SEQ ID NO: 18694 - DNA, 1611 bp, Artificial Sequence
  derived and/or modified sequence
atgaatgcctcattagagtcactctatagtgcctgtagtatgcaatcagatactgtgcctctactgcagaacggtcaacacgctaggtctcagccaagggcaagtgggccaccaagaagcattcagccccaggttagcccacggcaacgcgtccagcggtcccagccggtccatatcctagccgtgagacgcctacaggaggaagatcagcagtttagaaccagcagtctgcctgcgattccaaaccccttcccagaactatgcgggccaggatcccctcctgttctcactccagggagtcttccccctagccaagccgccgctaaacaagatgtcaaggtgttttcggaggatgggacaagcaaggtagtggagatcctagccgatatgaccgcaagggacttatgtcagttactcgtatataaatcgcactgtgtggatgacaattcctggactctggtagaacaccatcctcacctgggactggaaagatgcctggaggaccacgagctcgtggttcaggtcgaaagcacaatggcttctgagtccaaatttctctttagaaaaaactatgccaagtatgaattttttaagaatcctatgaattttttcccagagcagatggtaacctggtgtcagcaaagcaacggatcacagacccaacttctgcaaaacttcctgaattcatcttcgtgccctgagatccagggcttcctgcatgttaaggaactcggcaagaagtcatggaaaaaactctatgtctgtctcaggcggtccggattgtattgttctaccaagggtacctctaaggagccacggcacttgcaactgctggctgatttagaggatagcaacatcttttcgctgatagcaggcagaaagcagtataacgcacccaccgaccatggcctctgcataaaacctaataaagtgagaaatgagaccaaagaactccgcctcctatgcgccgaagacgaacagacaaggacttgctggatgactgcttttaggctgctcaagtatggcatgctgctttaccagaactataggatccctcagcagcgcaaagctttactgtcccctttcagcactccggtccgttccgtgtccgagaacagtttggttgcaatggatttttctggccaaactgggcgggtcatcgagaacccagctgaagcacagagtgccgcccttgaagaggggcacgcatggcgcaagaggtccactcggatgaacatcctgggttcacaatccccactacacccatcgactctgtcaaccgttattcacaggacccagcactggtttcatgggcgtatttctcgcgaggaaagccaccgtatcataaagcagcaggggcttgtggatggcctttttctgcttcgggacagtcaaagcaaccctaaagcattcgtgcttacattgtgtcatcaccagaaaattaaaaattttcaaatccttccctgtgaggacgatggccaaacctttttcagcctcgacgacggaaacacaaagttcagtgacctgatccagctcgtggatttttaccagctgaataaaggcgttctgccgtgtaagctgaagcatcactgtattcgggtggcgctgtag

SEQ ID NO: 18695 - DNA, 1611 bp, Artificial Sequence
  derived and/or modified sequence
atgaacgccagccttgagtctctctattccgcgtgctctatgcagagcgatactgtgccactgctccagaacggacagcatgcccgatcccaaccacgcgcaagtgggcccccacgctcgatccaaccacaggtgagccccagacagcgtgtgcagcggagtcagcccgtccacatcctggccgtcaggcgcttgcaggaagaggatcagcagtttaggacctcctccctgcctgccatcccaaatccatttcctgaactttgtggccccggaagtcctcctgtgctcactccgggctcactacccccctctcaggctgccgctaaacaggatgtcaaagtgtttagcgaggatggtactagcaaagtggtggagattctggcggacatgaccgcgcgggacctgtgtcagctcctcgtatacaagtctcattgcgtagacgacaattcatggactctggttgaacaccatccccatctggggctcgagagatgcttggaagaccacgaattggtcgtgcaagtcgaaagtacaatggcttccgaatccaaattcctgttccggaagaactacgctaagtacgagttctttaagaatccaatgaactttttcccagaacagatggtaacatggtgccagcagtcgaacgggagtcagactcaacttcttcaaaattttctcaactctagtagctgcccagaaatccagggctttctacacgtgaaagagcttggcaagaagtcatggaaaaagctgtacgtctgcctcagaagaagtggcctctattgcagcaccaaaggcacctctaaggagccccgccatcttcagcttttagcggatctggaggactctaacatatttagtctgatcgctggaaggaagcagtataacgcccctaccgatcatggcctctgcatcaagcccaacaaggtgaggaacgaaacaaaagaacttagactcctgtgtgctgaggacgagcagacccgaacgtgctggatgacagcatttcggctgttaaagtatggcatgctcttgtaccaaaactataggatccctcaacaaagaaaggccctcctgagccctttctcaacgccagtcagaagcgtgagcgagaactccttagtagctatggacttcagcggacagacaggacgcgtgattgagaatccagccgaggcccagtccgcagctctggaagaggggcacgcctggcggaagcgatctacccgtatgaacattcttggatcccagtcccccctgcatccttccacactgagcaccgtgattcatagaactcagcattggttccacggacgcatctcaagggaagaaagtcatcgcatcataaagcaacaaggactggtcgatggactgttcctactccgggactctcagagcaatcccaaggcgtttgtgctcacactatgtcaccaccagaagattaagaattttcagatattgccatgcgaggacgatggacaaacatttttcagcttggacgacggcaacacaaagttctcagatctgatccagttagtcgatttttaccaactgaacaaaggagttctgccatgcaagctgaagcatcattgcatccgcgtggccctctag

SEQ ID NO: 18696 - DNA, 1611 bp, Artificial Sequence
  derived and/or modified sequence
atgaacgcttctctggagtcgctgtactcagcttgctctatgcagagcgatactgtgcccctgctccagaatggccaacacgccagatcccaaccacgtgcctccggtccgcctagatccatccagccccaggttagtcctagacagagggtgcaacggagccagccggtgcacattctggctgtacggcgcctccaggaggaggaccaacagttccgaaccagtagtcttcccgcaatccccaatcctttccctgaactgtgtggccctggcagccccccagtgctgacccctgggagccttccaccatcccaggctgcagccaagcaggacgtcaaagtgttctctgaagacgggaccagtaaggtcgtggaaattctggcagacatgaccgccagggacctttgccaattgcttgtgtataagtcgcattgtgtggacgataatagttggacactcgtggaacaccatccacatcttggcttggaaaggtgtctggaggatcacgaattggtggtccaggtagagagcacaatggcaagcgagtctaaattcttattccgcaagaattacgctaagtacgaatttttcaagaaccctatgaatttctttcctgagcagatggtcacctggtgtcagcagtctaacggatcccaaactcagcttctgcagaattttcttaatagcagcagttgtcctgaaatccagggctttttgcatgtcaaggaactgggcaagaagtcctggaagaagttatatgtatgcctgcggcgatctgggctgtactgttccaccaagggaacgtccaaggaacccagacacctgcagttgctggccgacctcgaggattctaatatatttagccttatagcagggcgcaaacaatataacgcacccactgatcacgggctctgcattaagccgaacaaggtgcgcaacgaaacaaaggaactcagattgctatgtgcggaagacgaacagacgcgcacatgctggatgacggccttcaggctgctaaaatatggaatgttgctgtatcagaactacaggatcccacagcaacgcaaagctctcctgtctccattctccacccccgtgagatctgtcagtgagaactcgctcgtggcgatggactttagcggacagactggaagggttatcgaaaacccagcagaagcccagagtgctgccctcgaggagggacacgcttggcgtaaacgctccactaggatgaatatactgggatcacagagcccactgcacccatctacgctgtctacagtgattcacagaacacaacattggttccacggtagaatatcacgggaggagtcacacagaatcatcaagcagcagggactcgtggacggacttttcctcttgagggatagccagagtaatcccaaagctttcgtgctaacgctctgtcatcatcagaaaattaaaaactttcagattctgccctgcgaggatgatggccagacgttcttttctttggacgacggtaatacaaagttctccgatctcattcagctcgttgatttctaccagttgaacaaaggtgtgttaccctgcaagctgaaacatcattgtatcagagtagccctgtag

SEQ ID NO: 18697 - DNA, 1611 bp, Artificial Sequence
  derived and/or modified sequence
atgaatgcaagtttagagtccttgtacagtgcttgttctatgcagagcgacacagttccgttgctgcagaatggacagcatgctcggtcccaaccacgtgcctctgggcctcctcggagcatccaacctcaggtcagcccccgccaaagagtgcagcgatcacagccagtccatatcctggccgtacggagactgcaagaggaggaccaacagttcaggacctcctctctgccagccatccccaatccctttcctgaactgtgtggaccgggatcccctcctgtgctcacaccgggatccttgcccccaagccaagccgccgccaagcaggacgtaaaggtcttttctgaagacggaacaagcaaagtggtagaaatcctcgccgatatgaccgcccgagacctgtgtcagctattggtctataaaagccactgtgtggatgataatagctggaccctggtagaacaccacccacacttgggcctggagcggtgcctggaagatcacgaacttgtcgtgcaggttgagtccacaatggcaagcgagtctaaatttctcttcagaaaaaattacgccaaatacgagtttttcaaaaacccaatgaacttctttcccgagcagatggtgacctggtgccagcagagtaatggcagtcagacacagcttcttcagaacttcctgaatagcagctcatgcccggaaatacagggctttctccacgtcaaagagcttgggaaaaaatcatggaaaaaactctacgtgtgtctgcggagaagtggactatactgttcaacgaaaggaacttccaaagaaccgcggcacctccagctgcttgccgaccttgaggacagtaatatcttttcgctgattgccggaagaaaacagtacaacgccccaaccgatcatggactgtgcataaagcccaataaagttcgaaacgagaccaaagagctgagactcctgtgcgctgaggacgagcaaacccgcacatgttggatgactgccttccggctccttaagtatggcatgctcctgtaccagaattataggatcccacagcagagaaaagccctgctcagtccattctcgacccccgttcggagcgtgagtgagaattctttagtcgccatggacttctcagggcaaaccggccgggtcattgaaaatcctgcagaagcccagtcggcagccctggaagaggggcatgcctggagaaagcgctcaacgcgcatgaacatcctcgggagccagtcccccctgcatccgtcaactctgtccactgtgatacaccggacacagcactggttccatggccgaatcagcagggaagagagtcataggattatcaagcagcagggcctcgtggatggcctgtttctgttgcgggattcccagtcgaatcctaaggcttttgtgctgactctgtgtcaccaccagaaaatcaaaaatttccagatactaccttgcgaggatgacggtcagacatttttctccttagatgatgggaacaccaagtttagcgatctgatacagcttgttgatttctatcagctcaataagggggtcctcccttgcaaactgaaacatcactgtatccgggtggccctatag

SEQ ID NO: 18698 - DNA, 1611 bp, Artificial Sequence
  derived and/or modified sequence
atgaatgcgtcactggagtccttatacagtgcatgctccatgcaaagtgatacagtaccattgctgcagaatgggcagcatgctcgctctcagccacgcgcatccggccctcctcgcagcatccagcctcaggtctctccccgccagcgcgtgcagcgtagccaacccgtccacattctcgccgtgcggagacttcaggaggaggaccaacagttccgaacctctagccttccggccatcccaaaccctttccccgagctgtgtggcccagggtcaccccccgtgctcactccagggtcactgccgccctcacaggctgcagctaagcaggatgtgaaggtcttttctgaggatggcacatcaaaagtggtcgagatcctggccgacatgactgcgcgtgacctttgtcagttgctcgtctataaatcacactgcgtagatgacaactcctggaccctggtggaacatcacccccatctgggacttgagcgctgccttgaggatcacgaacttgtggtgcaggtggagtctactatggccagcgagtccaagttcctgttccggaaaaactatgccaaatacgaattctttaagaaccccatgaacttctttccagagcagatggtgacgtggtgtcagcagtccaacggctcacagacccagctgctccagaattttctgaatagctcctcctgtcccgagatccaaggcttcttacacgtaaaggagcttgggaaaaagtcctggaagaagctttacgtgtgcttaaggcggagtggcctctactgctctacaaaaggcacttccaaagaaccaaggcacctccagttgttggccgacctcgaggacagcaacatattctccctgatcgccggtagaaaacagtataacgcccctacagaccatgggctgtgcattaagcctaacaaagtgcgaaatgagaccaaagagcttaggctgctgtgcgctgaagatgaacagacccggacatgttggatgactgcctttcgtctcttaaagtacggtatgcttctgtatcagaattaccggattcctcagcagagaaaagccttgctcagcccattcagtacccctgtgaggagcgtgagcgaaaactcactagttgcgatggacttttctggacagaccgggcgcgtcattgagaacccggccgaggcccagtcagcagctctcgaggagggacacgcttggaggaagagatctacacggatgaacattcttggctctcagtcgccactgcaccccagcactctcagcacagttatacatcggacccagcactggttccacggccggatcagtagagaggagtcgcacagaattatcaaacaacaggggctcgtggacggactctttttgctgcgagatagccaatccaatccaaaggcttttgtcctcactctgtgccaccaccagaagattaaaaattttcagattctcccatgcgaggacgatggacagacatttttcagcctcgatgacggcaatactaaattctccgatctcatccagctggtggacttctatcaactcaacaaaggagtccttccctgtaagctcaaacaccactgtattcgggtggctttatag

SEQ ID NO: 18699 - DNA, 1611 bp, Artificial Sequence
  derived and/or modified sequence
atgaatgccagcctggagagcctgtacagcgcctgcagcatgcagagcgacacagtgcccctgctgcagaatggccagcacgcccggagccagccccgggccagcggccccccaagaagcatccagccccaggtgagcccccggcagagggtgcagaggagccagcctgtgcacatcctggccgtgcggcggctgcaggaggaggaccagcagttccgcaccagcagcctgcctgccatccccaaccccttccctgagctgtgtggccctggcagcccccctgtgctgaccccaggcagcctgccccccagccaggccgccgccaagcaggatgtgaaggtgttttctgaagatggcaccagcaaggtggtggagatcctggccgacatgacagcccgggacctgtgccagctgctggtgtacaagagccactgtgtggatgacaacagctggaccctggtggagcaccacccccacctgggcctggagcgctgcctggaggaccacgagctggtggtgcaggtggagagcaccatggccagcgagagcaagttcctgttcaggaagaactatgccaagtatgagttcttcaagaaccccatgaacttcttccctgagcagatggtgacctggtgccagcagagcaatggcagccagacccagctgctgcagaacttcctgaacagcagcagctgcccagagatccagggcttcctgcacgtgaaggagctgggcaagaagtcctggaagaagctgtatgtgtgcctgcggcgcagcggcctgtactgcagcaccaagggcaccagcaaggagcccaggcacctgcagctgctggccgacctggaggacagcaacatcttcagcctgattgctggcaggaagcagtacaatgcccccacagaccacggcctgtgcatcaagcccaacaaggtgagaaatgagaccaaggagctgcggctgctgtgtgccgaggatgagcagaccaggacctgctggatgacagccttccggctgctgaagtatggcatgctgctgtaccagaactaccgcatcccccagcagaggaaggccctgctgagccccttcagcacccctgtgcgctctgtgtctgagaacagcctggtggccatggacttcagcggccagacaggccgggtgattgagaacccagctgaggcccagagcgctgccctggaggagggccacgcctggaggaagaggagcaccaggatgaacatcctgggcagccagagccccctgcaccccagcaccctgagcaccgtcatccacaggacccagcactggttccacggccgcatcagccgggaggagagccaccgcatcatcaagcagcagggcctggtggatggcctcttcctgctgcgggacagccagagcaaccccaaggcctttgtgctgaccctgtgccaccaccagaagatcaagaacttccagatcctgccctgtgaagatgatggccagaccttcttcagcctggatgatggcaacaccaagttcagtgacctgatccagctggtggacttctaccagctgaacaagggcgtgctgccctgcaagctgaagcaccactgcatccgggtggccctgtag

SEQ ID NO: 18700 - DNA, 1611 bp, Artificial Sequence
  derived and/or modified sequence
atgaacgccagcctggagagcctgtacagcgcctgcagcatgcagtcagatactgtgcccctgctccagaatggccagcatgcacgcagccagccacgggcctccggtcctccccgatcaatccagccccaggttagccccagacagcgcgtgcagagaagccagcctgtgcacatcctggcagtacgtagactgcaggaggaagaccagcagttccgtacaagcagtctgccagctattccaaacccttttcctgagctttgtggccctggatcacctccagtgctgactcccgggagcctaccgccctcgcaagccgcagctaaacaagacgttaaagtctttagcgaggatggaacctcgaaggttgttgaaattctagctgatatgaccgcacgagacctgtgtcaactattggtgtataaatctcactgcgtggatgataacagctggaccctagtggagcaccacccccatctgggactcgagcggtgtctagaggaccacgaacttgtcgtccaggtggaatcgactatggcttctgaatccaagttcctgtttcggaagaactacgcaaagtatgagttctttaagaatccaatgaacttctttccggagcagatggtcacctggtgtcagcagagtaatgggagccagactcagttactgcagaattttctaaattccagttcatgccccgaaatccagggctttttgcatgtcaaggagctcggtaagaagtcatggaagaaactttacgtctgccttcgcaggtcaggcctgtattgctcaacaaaaggaacttccaaggagccacgtcatcttcagttgctggccgaccttgaggatagcaacatcttctccttgattgccggccgcaaacagtacaacgcaccaacagatcacgggttgtgcatcaaacctaacaaagtgaggaatgaaaccaaggaactccggcttctctgcgctgaggacgaacagacccgaacctgctggatgactgctttcagactgctgaaatatggaatgctgctataccaaaattacagaattccccagcagcggaaagcccttctgtctccattctccaccccggtgaggtctgtctcggagaacagtctggtagctatggacttctcaggccagactggcagagtgatcgagaacccagccgaggcccagtctgcagccctggaagagggtcatgcatggagaaagcgtagcactcgaatgaacattttgggtagccagtctcccttgcacccctccaccttgagcactgtcatacaccgcacgcagcattggttccatgggaggatttcacgcgaagaaagccacaggattattaagcagcaggggttggtggacggcctgttcctgctgcgagactctcagagtaaccctaaagcatttgtgctgacactgtgtcatcaccaaaagataaagaacttccagatcctcccctgcgaagatgatggccagactttcttctccctggatgatggaaataccaaattcagtgatctgatacagctggtagacttttatcagctaaacaaaggcgtcctgccttgcaagcttaaacaccattgcatcagagtggcactttag

SEQ ID NO: 18701 - DNA, 1611 bp, Artificial Sequence
  derived and/or modified sequence
atgaacgccagcctggagagcctgtacagcgcctgcagcatgcagagcgataccgttcctctgctgcaaaacggccagcatgcccggtcacagcctagagccagcggcccccctcggtccattcaaccacaagtgtctccacgacagcgagtccagaggagccaacctgtgcacatcctggcagtgcgacgactccaggaagaagaccagcagtttcggaccagctccctgcccgccatcccaaaccccttcccagagctgtgcggcccaggatcgcctcctgtcctcacccctggtagcctccctccctcgcaggccgccgccaagcaagatgtaaaggtgttctccgaagatggcaccagcaaagttgtggagattttggctgacatgaccgcccgcgacctgtgccagctgctggtgtataaatcacattgtgtggacgacaattcttggacattggtggaacaccacccgcatctcgggctggaaagatgtctcgaggatcatgagctggtcgtccaggttgaatccaccatggcctcagagagtaaattcctatttcggaaaaattatgcgaagtatgaattctttaagaacccaatgaatttctttcctgagcaaatggtcacctggtgtcagcagtcaaacggttcacaaacgcagcttttgcaaaattttctcaactcttcctcctgtccagaaatccagggattcttgcacgtgaaggaactagggaaaaagagttggaagaagctgtacgtctgcctacggcgttcaggactgtactgtagcacaaaggggacaagcaaagaacccagacatttgcagctcctagccgatcttgaagactctaacatattctccctgatcgctggccgtaagcagtacaatgcccctacggatcacggattgtgtatcaagcctaacaaggttagaaatgaaacaaaggaactacgattgttgtgcgctgaagacgagcagacccgcacatgctggatgacagcttttagattgctgaagtatggcatgctcctgtaccagaactatcgcattccccaacagaggaaggctcttctgagcccgttttctactccagtgcgatctgtcagtgaaaactcactggtggccatggatttctccggtcaaacaggcagggttatagaaaatcctgccgaagcacagagcgccgcgcttgaggaaggccacgcgtggcgaaaaagaagtactcgaatgaacatcctcgggtcacagagccccctgcacccttccaccctcagcactgtcatacatcgtactcaacactggttccacggaaggattagcagggaagaaagccatagaattatcaaacagcaggggctggttgacggtctctttcttctgagggattcccagtcaaatcccaaagcctttgtcttgacattatgccatcaccaaaagattaaaaacttccaaattctgccttgcgaggacgatgggcagaccttcttttctctggacgacggtaataccaagtttagtgatctcatacagctggtggatttctatcagttgaacaagggggtgctcccttgcaagttgaaacaccattgcatcagggtcgccttatag

SEQ ID NO: 18702 - DNA, 1611 bp, Artificial Sequence
  derived and/or modified sequence
atgaacgccagcctggagagcctgtacagcgcctgcagcatgcagtctgatacggtcccactcttacagaacggccagcacgcccggagccagcctcgcgctagtggtcctccacgttccattcagccgcaggtcagtcccaggcagcgagttcagcggtcacagccagtgcatattctcgccgtccgccgactacaggaggaagatcagcagtttcggactagtagccttccagcgatcccgaatcctttccctgaactctgtgggcccggaagtcccccggtactcactccggggtccttacctccatcacaagccgccgccaagcaggacgttaaggtcttttccgaggacgggacttcaaaggtggtggagatcctggccgatatgaccgccagagatctatgccaactgcttgtgtacaagagccactgtgtggacgataacagttggacattggtggaacatcacccacacctggggctggagcggtgtctcgaagaccacgagctggtcgtgcaggttgaatcaaccatggctagcgaaagtaagttcttgttcaggaaaaactacgctaagtacgagttttttaaaaaccccatgaacttcttccccgaacagatggtgacctggtgccagcaaagcaacggcagccagactcagctgctgcagaattttttgaattcatcttcttgtcctgagatccaaggattcctgcacgtgaaggaactcgggaaaaagagttggaagaagttgtatgtgtgtctacggcgatcagggctatattgttccacgaaaggcacaagcaaggagcccaggcatctgcagcttctggccgacctcgaggatagcaacattttttctttgatagcagggagaaagcagtacaatgctcctacagatcacggtctgtgcattaagcccaataaggttcgcaacgaaaccaaggaacttagattgctctgcgcagaggatgagcaaacaaggacctgttggatgaccgcattcagattacttaagtacgggatgctgctgtaccagaattaccgcatccctcagcagagaaaggccctcctttctccttttagcactcccgtgcgttccgtgtcggaaaactcacttgtggccatggattttagtggccaaacaggacgggttatcgaaaatccagctgaggctcaatccgctgctctggaggaagggcacgcttggagaaaacgttccactagaatgaatattttggggtcccagtcccctctgcacccaagtacactgagtaccgtgatccatcggacacaacactggttccacggtcggatcagtcgcgaggaaagtcatcgaataataaaacagcagggacttgtggatggactattcctgctccgagactcacagagcaacccaaaggcattcgtgctgactctgtgtcaccatcagaaaataaaaaacttccaaatactgccttgtgaagacgacgggcaaacttttttcagtcttgatgacgggaacacaaaattttctgacctcatacagctcgtagacttctaccagctgaataagggagtactgccatgtaagcttaaacaccactgcataagggtagcgctgtag

SEQ ID NO: 18703 - DNA, 1611 bp, Artificial Sequence
  derived and/or modified sequence
atgaacgccagcctggagagcctgtacagcgcctgcagcatgcagtctgacaccgtccccctgcttcagaatgggcaacatgctcggtctcaaccgcgcgctagcgggccccctaggagcattcagcctcaggtttcgcctcgtcaacgggttcagagaagtcaaccagtccacatcctggccgttcgtcggttgcaagaggaagaccagcaatttaggacctcctcactccctgccattcccaaccccttccctgaactctgtggacctgggtctcctcccgtgctcacaccgggatccctgcctccctcacaggcggccgccaagcaggatgtgaaagtcttttccgaggatggcacttccaaagtagtggaaatattggcagatatgactgccagagatctctgtcagctgctagtctacaaaagtcattgcgtggacgacaacagctggacacttgtcgaacaccacccccaccttgggctggaacgatgccttgaggaccacgaacttgtggtgcaagtggagagcaccatggcatctgagtctaaatttctcttcagaaaaaactacgccaaatacgaattttttaaaaaccctatgaattttttccccgagcagatggtgacctggtgccagcagtccaatgggtcccagacgcagttgctgcagaattttcttaattcttcctcatgccctgaaattcaaggcttccttcacgtgaaggagctgggcaagaagtcttggaagaagctgtatgtgtgcctgcgcaggagtggactatactgttctacaaaggggacctcgaaggagccacggcatttacaactgctggctgaccttgaagatagcaatattttttcactgatcgcaggcagaaagcagtacaatgccccaaccgaccacggattgtgtattaaaccaaacaaagttcgaaacgaaaccaaggagcttaggttactgtgcgccgaggacgagcagaccaggacctgctggatgacggcttttcgcttgctgaaatatggaatgctgctgtaccagaactaccgtatcccccagcagcggaaggcacttctgtcacctttttctaccccggtcaggtcggtctctgagaactcactggttgctatggacttctctggtcaaaccggtcgagtgattgagaatccagccgaggcacagtcagccgccttggaggagggccacgcttggcgtaagcgctctactagaatgaacatcctcggctctcagtctccactgcaccctagcactttaagcacggttatccaccgaacacagcactggttccatggaaggatcagtagagaagaatcccaccgaattattaaacaacaagggttggtggatggtcttttccttttgcgcgatagccagtcaaaccctaaagccttcgtcctgacactctgtcatcaccagaaaataaagaacttccagatcctgccctgtgaggatgacggccaaactttttttagtctggacgacggtaataccaagttcagcgatctcattcagctggtggacttttaccagcttaataagggcgtgctcccctgcaagctgaaacatcattgcattagggttgcactgtag

SEQ ID NO: 18704 - DNA, 1611 bp, Artificial Sequence
  derived and/or modified sequence
atgaacgccagcctggagagcctgtacagcgcctgcagcatgcagagtgataccgtccccctactgcagaacggtcaacatgccaggtctcaaccacgtgcctcggggccgcctcgcagcatccagccccaggtaagccctcggcagcgggttcaaagatctcaaccagtgcatattctggctgtgaggaggttacaggaagaagaccagcaatttcggacaagtagcctgcctgctattccaaacccttttcccgagctgtgtggaccgggctcaccccccgtcctcactccagggagcctccctccctctcaagccgcagcaaagcaagatgtgaaggtcttctccgaggacgggacttcaaaggttgtggaaatactggcagatatgacggctcgggatctgtgccagttgctagtgtacaagtcccattgcgtcgacgacaatagctggacactggtagagcatcacccacacttaggcctagagcgctgtctggaagatcacgagctagtcgtgcaggtggagagcaccatggcctccgagagcaaattcttgtttcgtaaaaactacgctaagtacgaattttttaagaatccaatgaatttcttcccagaacaaatggtcacgtggtgccagcaatcaaatgggtcccaaacgcagctgctacagaatttcctgaattcttccagttgcccagaaattcagggcttcctgcatgtcaaggagctaggtaagaaatcctggaagaaactatatgtgtgcctgaggcggagcggattgtactgtagtaccaaaggtacaagcaaggaaccccggcatttgcagctcctcgctgacctggaagattcaaacatttttagcctcatcgctggaagaaagcaatataacgcccccactgaccacggactgtgtataaaaccgaacaaagtgaggaacgagaccaaagagctccgtctgttgtgcgccgaggatgagcagactaggacctgctggatgacagccttccgattactcaaatatggcatgctgctgtatcagaattatcgtatccctcagcagcgaaaggcgctccttagcccctttagcacgccagtccgcagcgtgtctgaaaacagcctggtggccatggatttctcaggtcagaccgggcgggttattgagaatcctgccgaggcccagagtgctgccctcgaagaaggccacgcctggcgaaagcgatccactcgcatgaacatactcggatctcagtcgcctctgcacccctcaaccttatcaactgtcatccacagaacccagcattggtttcatgggcggatttctcgcgaagaaagccaccgaattataaaacaacagggtttagtggatggtctttttctgctcagagactcgcagtccaacccaaaggctttcgtgctgaccctgtgtcaccaccaaaaaattaagaattttcagattctgccttgtgaagatgacggccagacctttttctcccttgatgatggcaacacaaaatttagcgatctcatccagcttgtagatttttaccagcttaataagggagtgcttccctgcaaactgaaacatcactgcattcgagtggccttatag

SEQ ID NO: 18705 - DNA, 1611 bp, Artificial Sequence
  derived and/or modified sequence
atgaacgccagcctggagagcctgtacagcgcctgcagcatgcagagcgacactgtgcccctactccaaaatggccagcatgctaggagccagccgagggcttctggaccgcctcggagtatccagcctcaggtcagccctcggcagcgagtacagaggagccaaccagtacatatactggctgtgagacgattgcaggaggaagatcaacagttccgaaccagctctctgcccgcgattccaaatcctttccccgagctgtgtggccctggcagtcctcctgtcctgacaccgggaagcctgcccccttcacaggcggcggcaaagcaagatgtcaaagtattttctgaggatggaacctcaaaggtggtcgaaatcttagctgacatgaccgcaagagacctgtgtcagctactcgtgtataaaagccactgcgtggatgacaactcttggacactcgtggagcaccacccgcacctgggactcgagcgctgccttgaagaccatgagctcgtggtccaagtggaatctaccatggcctctgaatcaaagttcttgttccgtaaaaactatgcaaagtacgagttttttaaaaaccctatgaattttttccccgaacagatggtgacctggtgccagcagtctaatggctcccagacccagcttctgcagaatttccttaactcctcttcttgccccgaaattcaggggtttctacatgtgaaggagctaggaaagaaatcctggaaaaaactgtatgtgtgcctccggagatcaggactctactgctccaccaagggcacttcgaaagagcctcgccatttgcaattactcgccgaccttgaggattcgaatatattcagtttaattgccgggcgtaaacagtataacgcccctaccgaccacggtctgtgtatcaagcctaataaagttaggaacgagacaaaggagctgaggctgctgtgcgccgaggatgagcagactcggacgtgctggatgaccgcgtttcggctgctaaagtacgggatgctgctgtaccagaattataggattcctcaacaaaggaaagccctgctatcaccattcagcacccccgtgaggagcgtttcggaaaattcgttagtcgctatggacttcagcggccaaacgggccgcgtaatcgagaacccagctgaagcccaatccgctgctctggaggaggggcacgcttggcgaaaacggtctacgcgcatgaacatcctaggctcccagagccccctgcacccttccaccttaagtactgtgatccatcgaacgcagcactggttccacggccggatatccagagaggaatcgcatcggatcattaaacaacaggggctagtggacggactctttctgctgcgagattcacagtccaacccaaaagcgttcgtgttgacactgtgtcatcatcagaagatcaagaacttccagattcttccctgcgaagatgatggccagacctttttctcactggatgacggtaatacaaagttctcagacctgatccagctcgttgacttctaccaactgaacaaaggggtactgccatgtaaactgaaacatcattgtatccgggtggctctttag

SEQ ID NO: 18706 - DNA, 1611 bp, Artificial Sequence
  derived and/or modified sequence
atgaacgcgtctctggagtccctatacagtgcctgtagcatgcaaagcgatacagtacctctgctgcagaatggccaacatgctcgttctcaaccgagggcgagtggcccaccacgtagtattcagccacaggtaagtccacggcagcgagtacagaggtctcagcccgtgcatattctcgccgtccgcagactgcaggaagaagatcagcagttccgtacatccagtttgccagctattcccaatccgtttcctgagctgtgtggacccggaagcccacccgtgcttaccccaggttcccttccaccttctcaagccgcagccaaacaggacgtcaaggtgttttccgaggatggaacctcaaaggtagtggagattctcgctgacatgacagcaagagatctgtgtcagctgttagtttataagtcacactgcgttgatgacaatagttggacgctggtggaacaccaccctcacctgggccttgagcgctgtttggaagatcatgaacttgtggtgcaagtagagtcaactatggctagcgagtctaaatttctgttcaggaagaactacgccaagtatgagttcttcaagaaccccatgaacttcttccccgaacagatggtgacttggtgtcagcagtctaacgggtcacagacccagctgctccaaaacttcctgaattcttcatcttgtccagagatccagggcttcctgcacgttaaggagctggggaaaaaatcttggaagaaattatacgtctgcctacgtcgctctggattatattgttctactaaggggaccagcaaagaaccacggcatctgcaactgctcgctgacctggaggattcgaatatcttcagtttgatcgccggacgcaagcagtataacgcccctacagatcatggcctatgtataaaacctaacaaagtaagaaacgagacgaaggaactcagactgttgtgcgctgaggatgaacagactcgcacctgctggatgacagccttccgcctgctgaagtatgggatgcttctctatcaaaactaccgaattccacagcaaagaaaagctctgctgagcccattctccacccccgttcggtctgtctccgaaaattcgcttgttgccatggacttttccggacaaaccggtagagtgatagaaaaccccgctgaagcacaatccgctgccttagaggaaggccatgcatggcgtaagaggtccacccgcatgaatattcttggttctcagagcccactccacccctcaacgttaagcacagtgatacacagaacccaacactggttccatggaagaatatcgcgagaggagtctcacaggatcatcaagcagcagggcctagtggacgggctgtttctactgcgtgattctcaatcaaaccctaaggcttttgtactaaccctgtgccatcaccaaaagatcaaaaactttcagattctaccttgcgaggatgatggccagacctttttctctctggatgatggcaatacaaaattttctgacctgatccaactggtggatttttaccagctcaacaagggtgtcttaccttgcaagctgaaacaccactgcatccgagtcgctctctag

SEQ ID NO: 18707 - DNA, 1611 bp, Artificial Sequence
  derived and/or modified sequence
atgaacgcaagcctagaatcactgtattccgcatgttcaatgcagtcggacactgtgcccctcctgcagaacggccagcacgcaaggagccagcctcgcgctagcgggcctcctaggagcatccagccgcaggtgtcccctaggcagagggttcaacgctcccaaccggtacacattctggccgtccggcgactgcaggaggaggatcagcaatttagaacttcaagccttccggcaattccaaatccatttccagagctatgtggtcccggaagtccacctgtcttaactccgggaagcctgccgccttcacaggccgctgccaagcaggatgtgaaagtgttttctgaagatggcaccagcaaggtcgtggagatcttagcagatatgactgcccgtgacctgtgtcagttattggtttacaagtcccattgcgtggacgacaacagttggactcttgttgaacatcaccctcacctcggcctcgagcgttgcttagaggaccacgagcttgtcgtgcaggtagagtctacaatggcaagcgagtctaagtttctgtttcggaagaactatgcaaagtacgagttctttaaaaacccaatgaatttctttcccgagcagatggtcacctggtgtcagcagagcaacggaagccaaacccagctgctgcaaaactttctcaactcaagcagttgcccagaaatccaggggttcctgcacgtcaaggaactgggaaagaaatcatggaagaaactgtacgtttgtcttcggcgatctggactctactgttccacgaaaggcacctccaaggagcctcgacatttacagctcctcgcagatctggaggacagcaatatattttcactcattgccggtcgcaaacaatacaacgctcccaccgaccatgggctctgcatcaagcccaataaggtccgtaatgagacgaaggagttacgtttgctgtgcgccgaagacgagcagacacgcacctgctggatgaccgccttcaggcttctgaagtatggcatgttgctgtaccaaaactaccgcatcccccaacaacgtaaggccttgctctctcctttctcaacccctgtgcggagtgtgtcagagaactcgctagtcgcgatggacttcagtggccaaacaggcagagtcattgaaaatcccgctgaagctcagtctgccgctctagaagagggtcatgcctggaggaagaggagcaccaggatgaacatcctgggctcacagtctcctttacatccttcaactttgagcacagtaattcaccggacccaacactggttccatggacggattagccgtgaagaatcccatcggatcatcaagcagcaggggcttgtggacggactctttctattacgtgatagtcaatcaaacccgaaggcattcgtattaactctgtgtcaccatcagaaaatcaagaactttcagattctcccttgcgaagacgacggtcagacgttctttagtctggacgacgggaacacaaagttttcagatctcattcagctggtagacttttaccagctgaacaagggtgttctcccttgtaaactcaagcaccattgcatccgggtggctctttag

SEQ ID NO: 18708 - DNA, 1611 bp, Artificial Sequence
  derived and/or modified sequence
atgaacgcatctctcgagagtctgtattccgcctgcagcatgcagagcgataccgttcccttattacagaatggccagcatgcccgatctcagcctcgggcatctgggcctccgaggtctattcaaccgcaggtttcccctagacagcgggtgcagagaagtcaaccagtgcacatcctagcagtgcggaggcttcaggaagaggaccagcaattccggaccagctccttgccagcaattcccaacccattccctgaactctgcggacccggatcccctcctgtactgaccccgggtagcctccctcctagccaggcggctgcgaagcaggacgtgaaggttttcagcgaggacgggacctccaaagttgtcgagatactggccgatatgacggccagagacctctgccagctgctcgtgtacaagtctcactgcgtggatgacaattcctggaccctggtagaacaccaccctcatttagggcttgaacgttgcctcgaagatcacgaactggtggttcaggtggagagcacaatggctagtgaaagcaagtttctttttcgcaaaaactatgcaaagtatgaattttttaagaaccccatgaatttttttcccgagcagatggtgacttggtgtcagcaatccaacggttcacagacccaattgctacagaattttctgaacagctcatcatgtcctgaaattcaggggttcttacatgtaaaggaactgggaaagaagtcttggaaaaaactgtatgtgtgcctcagacggtccggactctactgcagtaccaagggtactagtaaagaaccacggcacctgcagctgcttgcagatctggaggatagcaacatattttccttgatagccggtcgcaagcagtataacgctcctaccgaccacggcctatgtataaaacctaacaaggtacggaatgaaacaaaggagctccgtctcctctgtgctgaggatgagcagactcgcacatgctggatgacggcttttcgcctgctgaagtatggaatgctgctgtaccaaaactatcggatccctcagcaacgtaaggctctactttccccgttttcaacacccgtccgcagcgtttcagagaattctcttgtcgccatggactttagcgggcagacaggtcgggtcattgaaaacccagcggaagcgcagtccgccgcattggaagaagggcacgcatggagaaagcgctccacccgaatgaatattctcgggagccagtcccctctccacccttccaccttatccactgttatacacagaacccagcactggttccacggcaggatttctcgtgaggagtcacataggatcatcaagcagcaagggctcgtggacgggctgtttctcctgcgcgacagtcaaagcaacccaaaggcatttgtgctgactctctgccaccatcagaagattaagaatttccagattctgccttgtgaggacgacggccagaccttcttcagtctcgatgacgggaacaccaagtttagtgatttgatccagctcgtggacttttaccagctgaataaaggtgtgctgccttgcaaactgaagcaccattgcatccgggttgccttgtag

SEQ ID NO: 18709 - DNA, 1611 bp, Artificial Sequence
  derived and/or modified sequence
atgaacgcatccctggagtcgctctacagtgcttgctctatgcagtctgacactgtgccccttcttcaaaatggacagcatgccagatcacagcccagggcttctggcccaccacgatccattcagccgcaggtcagccccagacagcgcgtgcagcgtagccagcctgtgcatatactggcagtacgcaggcttcaggaggaagatcagcagtttcgtacgtctagcctgcccgctatccccaatccttttccggagctttgcggacctggttctccccctgttctgaccccaggctccttaccaccaagccaagccgctgccaagcaggatgtaaaggtgttctcagaagatggcacttctaaagtggtcgaaatcctcgctgatatgactgcccgagatctgtgccagcttctggtgtataagtctcactgtgtggacgataactcatggactcttgtcgaacaccatccgcatctgggactggaacgctgtttggaagaccacgagctcgtggtccaggttgagtccactatggccagtgaatcaaagtttctattccgaaaaaactacgccaaatatgagtttttcaaaaaccctatgaacttctttcccgaacagatggttacctggtgtcagcagagcaatggcagccaaacccagctgctgcagaactttctcaacagtagctcatgtcccgaaatacagggatttctgcacgtgaaggaactcgggaagaagtcttggaagaagctgtacgtctgcctgcgccgaagcggattatattgttcaaccaaaggcacttcaaaggagccacggcatttacagctgttggcggacctcgaagacagcaacatcttctccctcattgctggacggaagcagtataacgctcccacagaccacggtctctgcattaagccaaacaaagtccgcaatgagactaaggagctgaggctgttatgtgccgaagacgaacagacgagaacgtgctggatgacagcatttcggctcctaaaatatggaatgttgctctaccagaattaccgtattcctcagcagcggaaggcactacttagcccgttctcaacacccgtgcgcagcgtatccgaaaactcccttgtggcgatggacttctcagggcagacgggcagggtcatcgaaaacccagctgaagcccagtccgcagccctcgaggagggtcatgcttggagaaagagaagcacaagaatgaatattctgggctcccaatccccgcttcacccaagtactctgtcaacagtcattcacaggacccaacattggtttcacgggaggatctcaagggaagagtcgcaccgcatcatcaaacagcagggtctggtggatggactctttttgctccgcgacagtcagtctaatccaaaagcatttgtgctaaccctctgccaccaccagaaaatcaagaattttcagatcctgccatgtgaagatgacggacaaaccttttttagcctggatgacggtaatacaaagttctcagacttaattcagctggtggacttttaccagttaaacaagggagtgctgccatgcaaattgaagcaccattgtatccgtgtggccctgtag

SEQ ID NO: 18710 - DNA, 1611 bp, Artificial Sequence
  derived and/or modified sequence
atgaacgcaagcttggaatccctctacagcgcgtgcagcatgcagagcgatacagtgccgctcctccaaaacgggcaacatgctagaagtcaaccacgcgctagtggcccaccacggagcatccaaccacaagtctcacctaggcaacgtgtgcagcgcagccaacctgtccatatcctggccgtgaggaggttacaggaagaggatcaacagtttcgcactagcagcctccctgccattccaaacccgtttcccgagctgtgcggacccggatctccacccgttcttacccctggatcattgccgccttcccaagccgcagcaaagcaggacgtgaaagtttttagcgaggacggcacatcaaaggtggtggaaattctcgcagacatgactgctagagacttgtgccagctactcgtttataaatctcactgtgtggatgacaactcctggacactcgtcgagcatcacccacacctgggactcgagcggtgtttggaggatcacgagttggtagttcaggtggagtcaacaatggcttctgagagtaaatttctgttccgcaaaaactatgcaaagtacgagttcttcaagaatccaatgaacttctttccagaacaaatggttacctggtgtcagcaaagcaacggcagtcaaacccagttgctccagaacttcctgaacagcagttcttgtcccgaaatccagggatttttgcatgtgaaggaactgggtaagaagtcgtggaaaaaattgtacgtatgtctgcgtagaagtggcctttattgcagtacaaagggaacatcaaaagagcctagacatctgcagctgctggccgaccttgaggactcaaatattttctccttgatcgcaggtaggaagcagtacaacgcaccaactgaccacggcctgtgcatcaaaccaaacaaggtgcggaacgagactaaggagctccgcctgctgtgtgcagaagacgaacagactcgcacctgttggatgacagcatttagactgttgaaatacggaatgcttctgtatcagaactataggatcccccagcagcgcaaggcactcttatctccgtttagtactccggtgaggtcggtcagtgagaattctctcgtggctatggatttttcaggtcagactgggagggttatcgaaaacccagccgaggcccagtctgcagcattggaggaaggccatgcatggcggaagcgttcgacaagaatgaatattctgggatcccagtccccactacatccttcaacgctgagtaccgtgatccatcgcacccagcactggtttcatgggagaataagcagggaggaatcccataggatcatcaagcagcaaggccttgtcgatgggctcttcctgcttcgggacagccagagtaaccctaaagctttcgtcctgacattatgtcaccaccaaaagatcaaaaatttccagatcctcccatgcgaggacgatggccagacatttttctccctggacgatggtaacacgaagttttccgacctcatccagctggtggacttctaccaactgaacaagggcgtgctaccctgtaaattgaagcaccactgcatacgagtagccctttag

SEQ ID NO: 18711 - DNA, 1611 bp, Artificial Sequence
  derived and/or modified sequence
atgaacgcttctctcgaaagtttgtattccgcgtgttccatgcagagtgacaccgtgccattgctccagaacgggcaacatgcccgatcgcagcctcgtgcttccggaccccctagatctattcaaccacaggtatccccacgccagcgcgttcagaggtctcagcccgttcatatcctggcagtgcgccgacttcaggaagaggatcagcagttccgaacgagttcccttccagctatacctaatcccttcccggaactttgcggaccagggtcacccccagtgttgacccctggatccctccctccttcccaggcggctgctaagcaagatgtcaaagtgttttcggaggatggcaccagcaaagtggtggagatattggccgatatgacagcccgagacctttgtcagttactcgtgtacaagtcccattgtgtggacgataattcttggaccctcgtggagcatcaccctcatcttggactcgagagatgccttgaggaccacgagctggtcgtccaggtcgagtcgacaatggcttccgagagcaagtttttgttccggaaaaattatgctaagtatgagttctttaagaacccaatgaacttttttcctgagcagatggtaacatggtgccaacagagcaacggatcacagacgcagttgctgcagaattttctcaacagctcaagttgcccggagatccaaggatttcttcatgttaaagagcttgggaagaaatcctggaagaaattgtatgtgtgcctcaggcgttcgggactttactgcagcactaaaggaacatcaaaggagcccaggcatctacaactactggctgacctagaggattccaatatcttcagcttgatcgcaggtcggaaacagtataacgcacccacagatcatggattatgcattaaacccaacaaggtgaggaacgaaacaaaagaactgaggctgttgtgtgcggaggatgaacagacccgcacctgctggatgaccgcttttagactcctaaagtacggcatgctcctttaccaaaactacagaattccgcaacagaggaaggccttgttgtcacctttttctactccagtgcgttcagtgagcgaaaatagtctggtggccatggacttctctggacagacaggtagagtgatcgagaaccccgctgaggcgcaatctgccgctctcgaggagggtcacgcttggaggaagcgatcaacccggatgaatatcctggggtcgcagagtcccctgcacccatccaccctgtcaaccgtgatccatagaactcagcactggtttcatggtaggattagcagagaagagtcacacagaattatcaaacaacagggcctggtggacggactgtttttactcagagattcgcagtcaaatccgaaggcattcgtcctaaccttatgtcaccaccaaaagattaagaactttcaaatactgccatgtgaggatgacggtcaaacatttttctccctcgacgacggtaatacgaaattcagcgacctgatccagctggtcgacttctaccagctaaacaaaggcgtgctcccatgtaaactcaaacatcattgcatccgagtggccctctag

SEQ ID NO: 18712 - protein, 447 aa, Artificial Sequence
  derived and/or modified sequence
MPVLYDRLLKLKEMFNSKFGSIPKFYVRAPGRVNIIGEHIDYCGYSVLPMAVEQDVLIAVEPVKTYALQLANTNPLYPDFSTSANNIQIDKTKPLWHNYFLCGLKGIQEHFGLSNLTGMNCLVDGNIPPSSGLSSSSALVCCAGLVTLTVLGRNLSKVELAEICAKSERYIGTEGGGMDQSISFLAEEGTAKLIEFSPLRATDVKLPSGAVFVIANSCVEMNKAATSHFNIRVMECRLAAKLLAKYKSLQWDKVLRLEEVQAKLGISLEEMLLVTEDALHPEPYNPEEICRCLGISLEELRTQILSPNTQDVLIFKLYQRAKHVYSEAARVLQFKKICEEAPENMVQLLGELMNQSHMSCRDMYECSCPELDQLVDICRKFGAQGSRLTGAGWGGCTVSMVPADKLPSFLANVHKAYYQRSDGSLAPEKQSLFATKPGGGALVLLEA

SEQ ID NO: 18713 - DNA, 3222 bp, Artificial Sequence
  derived and/or modified sequence
gtttcctccgaagtggttggtgccttagcaactaaagctggcaactgggacatcgtccggtgctgcaggtctcagccgaagggcgtcggaaactgcgctcgcatcgagcagtttccagcctcctgggtaaaggagcagtctcctcccttgcttgggactctggacgcatctcattccggtgaaagtaagggacagcttaggaccagaagcctttcgcggagaaaaggctgacatgcccgtcctatatgacaggttactgaagctaaaggagatgtttaactccaagtttggatctattcccaagttttatgttcgagcaccaggaagagtcaacataataggagagcatatagattattgtggatattctgttcttcctatggctgtagaacaagatgtgctaatagctgtagaacctgtgaaaacgtacgctctccaactggccaatacaaatcccttgtatccggacttcagtactagtgctaataacatccagattgataaaaccaagcctttgtggcacaactatttcttatgtggacttaaaggaattcaggaacactttggtcttagtaacctgactggaatgaactgcctggtagatggaaatatcccaccaagttctggcctctccagctccagtgctttggtctgttgtgctggcttggtgacgctcacagtgctgggaaggaatctatccaaggtggaacttgcagaaatctgtgccaagagtgagcgttacattggcactgaaggaggaggcatggaccagtctatatcatttcttgcagaagaaggaactgccaagttgatagaatttagtcctctgagggcaaccgatgtaaaactcccaagtggagcagtgtttgtgattgccaacagttgtgtggagatgaataaggcagcaacttcccatttcaatatcagggtgatggagtgtcggctggctgcgaagctcctggctaaatacaaaagcttgcaatgggacaaagtactgaggctggaggaggtgcaggctaaactagggattagtctagaagaaatgctgttggtcacagaagatgcccttcatcctgaaccctataaccctgaggagatctgcaggtgtctgggaattagcctggaggaactccgaacccaaatcctgagtccaaacactcaagatgtgctcatcttcaaactctatcagcgggcaaagcatgtgtacagcgaggctgcgcgagtgctccagtttaagaagatatgtgaagaagcacctgaaaacatggtccagctgctgggagagttgatgaaccagagccacatgagctgccgggacatgtatgagtgcagctgccccgagctggatcagctggtggacatctgtcggaagtttggggctcaagggtcacgacttactggagcaggatggggaggctgcacagtatcaatggtacctgcggacaagctgcccagctttctagcaaatgtgcacaaagcttattaccagaggagtgatggaagcttagcaccggagaagcaaagtttgtttgctaccaaacctggaggtggggctttggttttgcttgaggcctgaaaaaatgtaaaaagtctgagagaaactacttagggcacttaggaattggcaggactttctgtgccacagtaaattaatcttccttctgttttgtattatgatgaacggttgctattatatcaagatatattttcaaagaaatggttgaaagctctctatgcttcataatgattctttttccatcttaaaatatggttttactattaagagccaagatcatgcttggacagatcttttaagaataacttactgagatttattgatttgaagattttaaagatgaatggtaaaacacactcttaatactgattacatggattggacttgaattaaatatattgttacaattaaactgataccactgaattgtatgcattattcttgaatagagttcatttctggtttctcttagtattcttcttcctcaaagttgtagttgtctgttgatgatggtgatgatgatgatgatgacgatagtgatgccacacattctctctcaatttcagcttcggaacgctatgaaaataatacatgattaaagtttcacagatcttcttggacattgtataattgaatttgaatgtgagatttctccagttatcaagagactaaggatttttttttttttttgacaaaaggaggatacaggaagaaaattcagactcatttgaatatttgtaaaccatgtaatatataaataaccactttcaattcttttggccctgagctatctccattacttaatagaaaaacttagataaaaaacactttaagactcttctattcacattgaaataaagaattatctagatgataattcagataattcagtttgttcatagaattactttcttatcactctttttctactactttttctcaaatacctctctaatccaagaggcacttccaagaaattccacacattccttatatcccttttttgcttgtctagcaaagcttgtttgtatatatgcaccccattgtaaagcaggtatgcaggtatgtgggtgaaagtgactatgaaaagacttaatgaattctgggatttgtaatggtattgatgggtatctctgtatgtatatcaagagtgggcagaaatgtttggctggtgatggcaaatgactggctttctcttgtggatggactataggaagcactttctgaattatgtaatgatttggaccaaaaagtattttgctgaaatactcaggtaattgagatagcaatggttttatggcatgaattatccaaaaaaatatcagaattacttattattctgtgatttcattagctcattaatgtttaactcacagattgggcatcaccatctagaatttcagtttaagggaggcctgcgcaaagctagttttatttcttaaaggataacagtcatacatagaatactaggaaagccaatattctatttaaaaataaacttctgatgcattttcattcttagcagaaaggtaaatgcttgagaaagcttgagtcaaatttgttaaaagaattttgagttctataaatccaaaaatctgaaacctgaatttatttaaatttataatcctttattttttaataccgtgccattttccacaaaggatttgtggttggtatataattctttaaagatacctggatcagtg

SEQ ID NO: 18714 - DNA, 1834 bp, Artificial Sequence
  derived and/or modified sequence
agggcgggagctgtttatctcccggaagaaaacggctcctgtcacagaagtctcgtgattgctctgggagctttgcttagacacttgaaactacaggagaaagaaggatctagcgaaatatggctacagagagccctgctacgcgtcgggtccaggttactgaagctaaaggagatgtttaactccaagtttggatctattcccaagttttatgttcgagcaccaggaagagtcaacataataggagagcatatagattattgtggatattctgttcttcctatggctgtagaacaagatgtgctaatagctgtagaacctgtgaaaacgtacgctctccaactggccaatacaaatcccttgtatccggacttcagtactagtgctaataacatccagattgataaaaccaagcctttgtggcacaactatttcttatgtggacttaaaggaattcaggaacactttggtcttagtaacctgactggaatgaactgcctggtagatggaaatatcccaccaagttctggcctctccagctccagtgctttggtctgttgtgctggcttggtgacgctcacagtgctgggaaggaatctatccaaggtggaacttgcagaaatctgtgccaagagtgagcgttacattggcactgaaggaggaggcatggaccagtctatatcatttcttgcagaagaaggaactgccaagttgatagaatttagtcctctgagggcaaccgatgtaaaactcccaagtggagcagtgtttgtgattgccaacagttgtgtggagatgaataaggcagcaacttcccatttcaatatcagggtgatggagtgtcggctggctgcgaagctcctggctaaatacaaaagcttgcaatgggacaaagtactgaggctggaggaggtgcaggctaaactagggattagtctagaagaaatgctgttggtcacagaagatgcccttcatcctgaaccctataaccctgaggagatctgcaggtgtctgggaattagcctggaggaactccgaacccaaatcctgagtccaaacactcaagatgtgctcatcttcaaactctatcagcgggcaaagcatgtgtacagcgaggctgcgcgagtgctccagtttaagaagatatgtgaagaagcacctgaaaacatggtccagctgctgggagagttgatgaaccagagccacatgagctgccgggacatgtatgagtgcagctgccccgagctggatcagctggtggacatctgtcggaagtttggggctcaagggtcacgacttactggagcaggatggggaggctgcacagtatcaatggtacctgcggacaagctgcccagctttctagcaaatgtgcacaaagcttattaccagaggagtgatggaagcttagcaccggagaagcaaagtttgtttgctaccaaacctggaggtggggctttggttttgcttgaggcctgaaaaaatgtaaaaagtctgagagaaactacttagggcacttaggaattggcaggactttctgtgccacagtaaattaatcttccttctgttttgtattatgatgaacggttgctattatatcaagatatattttcaaagaaatggttgaaagctctctatgcttcataatgattctttttccatcttaaaatatggttttactattaagagccaagatcatgcttggacagatcttttaagaataacttactgagatttattgatttgaagattttaaagatgaatggtaaaacacactcttaatactgattacatggattggacttgaattaaatatattgttacaattaaactg

SEQ ID NO: 18715 - DNA, 1950 bp, Artificial Sequence
  derived and/or modified sequence
agacacttgaaactacaggagaaagaaggatctagcgaaatatggctacagagagccctgctacgcgtcgggtccaggtggcagaacatcctagatggagtctcgctctgtcacctgtgctggaggctagagtgcaagtggcacgatcttggctcactgcaacctccgcctcctgggttgaagtgattctcctgcctccgcctccggagtagctgggattacaggttactgaagctaaaggagatgtttaactccaagtttggatctattcccaagttttatgttcgagcaccaggaagagtcaacataataggagagcatatagattattgtggatattctgttcttcctatggctgtagaacaagatgtgctaatagctgtagaacctgtgaaaacgtacgctctccaactggccaatacaaatcccttgtatccggacttcagtactagtgctaataacatccagattgataaaaccaagcctttgtggcacaactatttcttatgtggacttaaaggaattcaggaacactttggtcttagtaacctgactggaatgaactgcctggtagatggaaatatcccaccaagttctggcctctccagctccagtgctttggtctgttgtgctggcttggtgacgctcacagtgctgggaaggaatctatccaaggtggaacttgcagaaatctgtgccaagagtgagcgttacattggcactgaaggaggaggcatggaccagtctatatcatttcttgcagaagaaggaactgccaagttgatagaatttagtcctctgagggcaaccgatgtaaaactcccaagtggagcagtgtttgtgattgccaacagttgtgtggagatgaataaggcagcaacttcccatttcaatatcagggtgatggagtgtcggctggctgcgaagctcctggctaaatacaaaagcttgcaatgggacaaagtactgaggctggaggaggtgcaggctaaactagggattagtctagaagaaatgctgttggtcacagaagatgcccttcatcctgaaccctataaccctgaggagatctgcaggtgtctgggaattagcctggaggaactccgaacccaaatcctgagtccaaacactcaagatgtgctcatcttcaaactctatcagcgggcaaagcatgtgtacagcgaggctgcgcgagtgctccagtttaagaagatatgtgaagaagcacctgaaaacatggtccagctgctgggagagttgatgaaccagagccacatgagctgccgggacatgtatgagtgcagctgccccgagctggatcagctggtggacatctgtcggaagtttggggctcaagggtcacgacttactggagcaggatggggaggctgcacagtatcaatggtacctgcggacaagctgcccagctttctagcaaatgtgcacaaagcttattaccagaggagtgatggaagcttagcaccggagaagcaaagtttgtttgctaccaaacctggaggtggggctttggttttgcttgaggcctgaaaaaatgtaaaaagtctgagagaaactacttagggcacttaggaattggcaggactttctgtgccacagtaaattaatcttccttctgttttgtattatgatgaacggttgctattatatcaagatatattttcaaagaaatggttgaaagctctctatgcttcataatgattctttttccatcttaaaatatggttttactattaagagccaagatcatgcttggacagatcttttaagaataacttactgagatttattgatttgaagattttaaagatgaatggtaaaacacactcttaatactgattacatggattggacttgaattaaatatattgttacaattaaactgataccactgaattgtatgcattattcttgaatagagttcatttctgg

SEQ ID NO: 18716 - DNA, 1768 bp, Artificial Sequence
  derived and/or modified sequence
cggggagcaagtggaacccttgggattctataaggacacgtggctgggcttgcaaaaaagatcacgccgcaaacacattctaccttgactactacgaagggttactgaagctaaaggagatgtttaactccaagtttggatctattcccaagttttatgttcgagcaccaggaagagtcaacataataggagagcatatagattattgtggatattctgttcttcctatggctgtagaacaagatgtgctaatagctgtagaacctgtgaaaacgtacgctctccaactggccaatacaaatcccttgtatccggacttcagtactagtgctaataacatccagattgataaaaccaagcctttgtggcacaactatttcttatgtggacttaaaggaattcaggaacactttggtcttagtaacctgactggaatgaactgcctggtagatggaaatatcccaccaagttctggcctctccagctccagtgctttggtctgttgtgctggcttggtgacgctcacagtgctgggaaggaatctatccaaggtggaacttgcagaaatctgtgccaagagtgagcgttacattggcactgaaggaggaggcatggaccagtctatatcatttcttgcagaagaaggaactgccaagttgatagaatttagtcctctgagggcaaccgatgtaaaactcccaagtggagcagtgtttgtgattgccaacagttgtgtggagatgaataaggcagcaacttcccatttcaatatcagggtgatggagtgtcggctggctgcgaagctcctggctaaatacaaaagcttgcaatgggacaaagtactgaggctggaggaggtgcaggctaaactagggattagtctagaagaaatgctgttggtcacagaagatgcccttcatcctgaaccctataaccctgaggagatctgcaggtgtctgggaattagcctggaggaactccgaacccaaatcctgagtccaaacactcaagatgtgctcatcttcaaactctatcagcgggcaaagcatgtgtacagcgaggctgcgcgagtgctccagtttaagaagatatgtgaagaagcacctgaaaacatggtccagctgctgggagagttgatgaaccagagccacatgagctgccgggacatgtatgagtgcagctgccccgagctggatcagctggtggacatctgtcggaagtttggggctcaagggtcacgacttactggagcaggatggggaggctgcacagtatcaatggtacctgcggacaagctgcccagctttctagcaaatgtgcacaaagcttattaccagaggagtgatggaagcttagcaccggagaagcaaagtttgtttgctaccaaacctggaggtggggctttggttttgcttgaggcctgaaaaaatgtaaaaagtctgagagaaactacttagggcacttaggaattggcaggactttctgtgccacagtaaattaatcttccttctgttttgtattatgatgaacggttgctattatatcaagatatattttcaaagaaatggttgaaagctctctatgcttcataatgattctttttccatcttaaaatatggttttactattaagagccaagatcatgcttggacagatcttttaagaataacttactgagatttattgatttgaagattttaaagatgaatggtaaaacacactcttaatactgattacatggattggacttgaattaaatatattgtta

SEQ ID NO: 18717 - DNA, 1344 bp, Artificial Sequence
  derived and/or modified sequence
atgcccgtcctttacgatagacttctgaaattaaaggaaatgtttaattccaagtttgggtccatacctaaattctacgttcgtgccccaggcagagttaatattattggggaacacattgattactgcggttatagtgtgctcccgatggcagtggaacaggatgtgctgattgcagtcgaacccgttaaaacatacgctctgcagcttgccaatactaaccccttgtacccagacttcagtacttctgcgaataatatccaaatagacaaaacgaagccactgtggcataattatttcctgtgcgggctgaaggggatccaggagcatttcggactgagtaatttgactggaatgaactgtctcgtcgatgggaacattcccccaagttccggactgagctcctcttctgccctagtatgctgtgctggtcttgtgacactgacagtgctgggcaggaacctgtctaaagtagaactggcagaaatctgtgccaagagcgaacgttatattgggactgagggaggcgggatggatcagagtatcagctttttggccgaggaaggaaccgcaaaactgatcgaatttagccccttgagagccactgacgtcaagttaccctctggtgctgtcttcgtcatcgctaactcttgtgttgagatgaacaaggcagccacatcccacttcaatattagagttatggagtgcagattagctgcaaaactcttggcaaagtacaaaagcttgcaatgggataaggtgctgcgcttggaggaggtacaggccaaactcggaatttctctagaggagatgctgctagttacagaggatgccctgcaccccgaaccctataaccccgaagaaatctgcagatgcctgggaatcagcctcgaggagttacgtacccagattctgtcaccaaacacacaggacgttctcattttcaaactttatcagcgtgctaagcacgtgtattcggaggctgcgagggttttgcagtttaagaagatttgcgaggaggctcctgagaatatggtccagcttctcggggagctgatgaaccagtctcacatgagttgtcgcgacatgtatgaatgttcctgcccagagttggatcaactggtggatatttgtagaaagtttggagcccagggaagccgactgaccggtgccggctggggaggctgtacagtaagtatggtgccggctgacaagctgccttcctttctggcaaacgttcacaaggcttactatcagaggagcgacggttctttggccccagagaaacagtcgctcttcgcgaccaagcctggcggaggcgcactggtcttgctggaagcttag

SEQ ID NO: 18718 - DNA, 1344 bp, Artificial Sequence
  derived and/or modified sequence
atgcctgtgctgtatgaccggctgctgaagctgaaggagatgttcaacagcaagtttggcagcatccccaagttctacgtgcgggcccctggccgggtgaacatcatcggggagcacatcgactactgcggctacagcgtgctgcccatggctgtggagcaggatgtgctgattgctgtggagcctgtgaagacctacgccctgcagctggccaacaccaaccccctgtacccagacttcagcaccagcgccaacaacatccagattgacaagaccaagcccctgtggcacaactacttcctgtgtggcctgaagggcatccaggagcacttcggcctgagcaacctgaccggcatgaactgcctggtggatggcaacatcccccccagcagcggcctgagcagcagcagcgccctggtgtgctgtgccggcctggtgaccctgactgtgctgggcaggaacctgagcaaggtggagctggccgagatctgtgccaagtctgagcgctacatcggcacagaaggaggcggcatggaccagagcatctccttcctggccgaggagggcacagccaagctgattgagttcagccccctgcgggccacagatgtgaagctgcccagcggggctgtgtttgtgattgccaacagctgtgtggagatgaacaaggccgccaccagccacttcaacatccgggtgatggagtgccgcctggccgccaagctgctggccaagtacaagagcctgcagtgggacaaggtgctgcggctggaggaggtgcaggccaagctgggcatcagcctggaggagatgctgctggtgacagaagatgccctgcaccctgagccctacaaccctgaggagatctgccgctgcctgggcatcagcctggaggagctgcggacccagatcctgagccccaacacccaggatgtgctgatcttcaagctgtaccagagggccaagcacgtgtacagcgaggccgcccgggtgctgcagttcaagaagatctgtgaggaggcccctgagaacatggtgcagctgctgggggagctgatgaaccagagccacatgagctgccgggacatgtatgaatgtagctgcccagagctggaccagctggtggacatctgcaggaagtttggagcccagggcagccggctgactggagctggctggggcggctgcaccgtgtccatggtgcctgctgacaagctgcccagcttcctggccaacgtgcacaaggcctactaccagaggagtgatggcagcctggcccctgagaagcagagcctgtttgccaccaagccaggcggcggggccctggtgctgctggaggcctag

SEQ ID NO: 18719 - DNA, 1344 bp, Artificial Sequence
  derived and/or modified sequence
atgcccgtgctgtacgaccggctgctgaagctgaaggagatgttcaactccaagttcggaagtattccaaagttctatgtccgcgcacctgggcgcgtgaacattattggggaacacatcgattactgcggatacagtgtcttgcccatggctgtggaacaagacgtgttgattgcggtggaaccggtgaagacctatgcactccagttggcgaacactaatccattgtatcccgactttagcacgagcgccaacaatattcagatcgacaagaccaaaccactatggcacaattattttctttgcgggttgaaaggaatccaggagcacttcggactgagcaacctcactggcatgaactgtctcgttgatggcaacatccctccgagtagtggtttgtctagctcttcagctttagtctgttgtgcagggctcgtgactctaacagtgctgggcaggaacttgtctaaggttgagctcgcggagatctgtgccaaatccgagcggtacattgggaccgaaggcgggggaatggatcagagcatttctttcctggcagaggaaggaactgctaagttgatagagttctctccgttacgggctaccgacgtgaagcttccttctggcgccgtctttgtcatcgctaactcatgtgtagaaatgaataaggccgcaacttctcactttaatattagagtgatggagtgtcgcctggccgccaagctccttgctaagtacaaatccctccagtgggataaggtccttcgactggaagaagtgcaggcaaaactgggaattagtctggaagaaatgctcctggtgactgaagacgcgctccaccctgagccttataatcctgaagagatatgccgttgcctcgggatctcgttagaagaactcaggacccagatccttagtcccaatacccaggatgttctcatcttcaaattatatcagcgggcgaagcatgtgtacagcgaggcggcgagagtactccagtttaagaaaatttgcgaagaagcccctgagaacatggtccagctgttgggagagctcatgaatcagtctcatatgtcttgccgcgatatgtatgaatgctcatgcccagagttagatcaactggtcgacatttgccggaagtttggcgcccagggatccagactcacaggcgccgggtggggtggttgcaccgtgtcaatggttcctgctgacaagctccctagcttcctcgctaatgtccacaaggcgtattaccagagaagtgacgggagcttggcacccgaaaagcagagtctattcgcaaccaaacccggcggaggggcccttgtgctgctggaggcatag

SEQ ID NO: 18720 - DNA, 1344 bp, Artificial Sequence
  derived and/or modified sequence
atgcccgtcctatatgacagattgctgaaactcaaagaaatgttcaattcgaagttcggcagcatcccgaagttttatgtgcgcgcacccggtagggtgaacataatcggggagcatatcgattactgtgggtacagcgtgttgccaatggctgtggagcaggatgtgttaatcgccgtggagcccgtaaagacttatgcccttcagttagcaaacactaacccactgtaccctgacttctccacaagcgccaacaacatccagatcgacaagacgaaacccctctggcacaattacttcctatgtggcctgaagggaatccaggagcatttcggtttgagtaatctgaccggaatgaactgtttagtcgacggcaatatccctccctccagtggacttagctcttctagcgcactcgtgtgctgcgccggacttgtcacactgaccgtcctcgggaggaacctgagtaaggtagagctagctgagatatgtgccaagagcgagcggtacatcggcactgagggcggagggatggatcagtctatttcatttctcgccgaagaggggacagcgaagctcatagaatttagcccgctgcgagccaccgacgttaagctgccttcaggtgccgtcttcgtcatcgccaacagctgcgtggagatgaacaaagccgcaacttcacattttaacatccgagtgatggaatgtagactcgccgcaaagctgctggccaagtataaatccctgcaatgggataaggtgctgagactggaggaggtgcaggcaaaattaggaatcagcctcgaagagatgctattggtaactgaggatgcactccatccagagccctacaatcccgaggagatctgccgatgcctcgggatttcactagaagagctgcgaactcagatactcagccccaatacccaggacgtgttaattttcaagttgtaccagcgggctaaacacgtctattccgaggcagcccgtgtgttgcaattcaagaaaatttgtgaggaggccccagaaaatatggtgcagctcttgggagagctcatgaaccagagccacatgtcttgcagagatatgtacgagtgttcatgccccgagctggaccaactagtcgacatttgccggaagtttggcgctcaggggtctaggctcaccggggctggatggggtggttgtaccgtcagtatggttcccgctgataagctgccgtccttcttggccaacgttcacaaagcctactatcagcggagcgatggctcactcgctccggagaaacagtccctgttcgctactaagcccggaggtggcgctctagtcctcctggaagcctag

SEQ ID NO: 18721 - DNA, 1344 bp, Artificial Sequence
  derived and/or modified sequence
atgcccgtgctgtacgacagactgctgaagctgaaggagatgttcaacagcaagttcggcagcatccccaagttctacgtgagagcccccggcagagtgaacatcatcggcgagcacatcgactactgcggctacagcgtgctgcccatggccgtggagcaggacgtgctgatcgccgtggagcccgtgaagacctacgccctgcagctggccaacaccaaccccctgtaccccgacttcagcaccagcgccaacaacatccagatcgacaagaccaagcccctgtggcacaactacttcctgtgcggcctgaagggcatccaggagcacttcggcctgagcaacctgaccggcatgaactgcctggtggacggcaacatcccccccagcagcggcctgagcagcagcagcgccctggtgtgctgcgccggcctggtgaccctgaccgtgctgggcagaaacctgagcaaggtggagctggccgagatctgcgccaagagcgagagatacatcggcaccgagggcggcggcatggaccagagcatcagcttcctggccgaggagggcaccgccaagctgatcgagttcagccccctgagagccaccgacgtgaagctgcccagcggcgccgtgttcgtgatcgccaacagctgcgtggagatgaacaaggccgccaccagccacttcaacatcagagtgatggagtgcagactggccgccaagctgctggccaagtacaagagcctgcagtgggacaaggtgctgagactggaggaggtgcaggccaagctgggcatcagcctggaggagatgctgctggtgaccgaggacgccctgcaccccgagccctacaaccccgaggagatctgcagatgcctgggcatcagcctggaggagctgagaacccagatcctgagccccaacacccaggacgtgctgatcttcaagctgtaccagagagccaagcacgtgtacagcgaggccgccagagtgctgcagttcaagaagatctgcgaggaggcccccgagaacatggtgcagctgctgggcgagctgatgaaccagagccacatgagctgcagagacatgtacgagtgcagctgccccgagctggaccagctggtggacatctgcagaaagttcggcgcccagggcagcagactgaccggcgccggctggggcggctgcaccgtgagcatggtgcccgccgacaagctgcccagcttcctggccaacgtgcacaaggcctactaccagagaagcgacggcagcctggcccccgagaagcagagcctgttcgccaccaagcccggcggcggcgccctggtgctgctggaggcctag

SEQ ID NO: 18722 - protein, 455 aa, Artificial Sequence
  derived and/or modified sequence
MDTPRVLLSAVFLISFLWDLPGFQQASISSSSSSAELGSTKGMRSRKEGKMQRAPRDSDAGREGQEPQPRPQDEPRAQQPRAQEPPGRGPRVVPHEYMLSIYRTYSIAEKLGINASFFQSSKSANTITSFVDRGLDDLSHTPLRRQKYLFDVSMLSDKEELVGAELRLFRQAPSAPWGPPAGPLHVQLFPCLSPLLLDARTLDPQGAPPAGWEVFDVWQGLRHQPWKQLCLELRAAWGELDAGEAEARARGPQQPPPPDLRSLGFGRRVRPPQERALLVVFTRSQRKNLFAEMREQLGSAEAAGPGAGAEGSWPPPSGAPDARPWLPSPGRRRRRTAFASRHGKRHGKKSRLRCSKKPLHVNFKELGWDDWIIAPLEYEAYHCEGVCDFPLRSHLEPTNHAIIQTLMNSMDPGSTPPSCCVPTKLTPISILYIDAGNNVVYKQYEDMVVESCGCR

SEQ ID NO: 18723 - protein, 353 aa, Artificial Sequence
  derived and/or modified sequence
MDTPRVLLSAVFLISFLWDLPGFQQASISSSSSSAELGSTKGMRSRKEGKMQRAPRDSDAGREGQEPQPRPQDEPRAQQPRAQEPPGRGPRVVPHEYMLSIYRTYSIAEKLGINASFFQSSKSANTITSFVDRGLDDLSHTPLRRQKYLFDVSMLSDKEELVGAELRLFRQAPSAPWGPPAGPLHVQLFPCLSPLLLDARTLDPQGAPPAGWEVFDVWQGLRHQPWKQLCLELRAAWGELDAGEAEARARGPQQPPPPDLRSLGFGRRVRPPQERALLVVFTRSQRKNLFAPGVRGLSLRGCMRLPAALAPGAHQPRHHPDADELHGPRLHPAQLLRAHQIDSHQHSIHRRGQ

SEQ ID NO: 18724 - protein, 271 aa, Artificial Sequence [sequence omitted]

SEQ ID NO: 18725 - DNA, 1368 bp, Artificial Sequence
  derived and/or modified sequence
atggacacgccaagggtgttattatccgccgtgttcctcatcagcttcctgtgggatctcccaggcttccagcaggctagcatatccagctcctctagctcagcggaattaggctcgacgaagggcatgcgatcacgaaaagagggcaaaatgcagagagcgccacgggactcggatgctggaagagagggacaagaacctcagccgcggcctcaggatgagccccgagctcagcagcctagggcccaggagccacccggccggggccctagggtcgtgccccatgaatacatgttgtctatttacagaacctacagtattgcagaaaaactgggcattaacgcgtcatttttccaaagtagtaaaagcgctaatacaattactagctttgtggatagaggattagatgatctctcccatactcctcttaggcgccaaaagtacctctttgatgtgtccatgctgtccgataaggaggaacttgttggagccgaactccgtctcttcagacaagcaccttcagccccttggggcccaccagctgggcccctacatgttcagctgttcccatgtctgtccccgcttctgctggacgcccgcaccttggacccacagggggccccgccggccggctgggaggtttttgacgtgtggcagggactgcgccaccagccttggaaacagctgtgtctggagctgcgggccgcttggggggagctggatgctggcgaagccgaagcccgagctaggggtccacagcagcccccccctcctgatctgagatccttggggtttggccgacgtgtgagacccccacaggaaagggccctgcttgtggtgttcacaagaagtcagagaaagaatctctttgctgagatgcgcgaacaacttggatctgccgaagccgccgggcccggagcaggggccgagggcagctggccgccgccctcaggcgctcccgacgccagaccctggttaccctcacctgggaggagaaggcgcagaaccgcctttgcttcacggcatggtaagcgacacggtaaaaagagtcggctgcgatgtagcaagaaaccactccacgttaattttaaagagttgggttgggacgattggattattgctccactcgagtacgaagcgtatcactgtgaaggcgtttgtgattttccactacgatcgcacctggagcccacaaatcatgcgataattcagaccttaatgaattccatggaccctggctctactcctccttcctgttgtgtgccaaccaagctcacccccatttcgatcctttacatcgatgccggcaataacgttgtctacaagcagtatgaagatatggttgtggagtcctgtggctgtcggtag

SEQ ID NO: 18726 - DNA, 1062 bp, Artificial Sequence
  derived and/or modified sequence
atggacacccctcgcgtcctactgtccgctgttttcctgattagtttcctctgggaccttcccggtttccagcaggcaagcatatcttctagctctagcagtgcagaactgggaagtactaaagggatgaggtctagaaaagagggcaaaatgcagagggcccctcgggattctgatgctggccgggagggccaggagccacagccgcgaccacaggatgagccccgtgcccaacagccacgtgcccaggagccaccaggaagagggcctagggtggtgccacacgaatatatgctaagcatttatcgcacctacagtatcgctgaaaagctagggatcaatgccagcttcttccagtcttcaaagagtgctaataccattacctcctttgtcgatcgcggcttggatgatctgtcccataccccacttagaaggcagaaatacttatttgacgtgtctatgctctcagataaggaggaattagttggtgctgagctgaggttgtttcggcaagcaccatccgctccttggggtcctcctgccggtccgctgcacgtccagctctttccttgcctgtcaccgctgctgcttgatgcacgcactttagacccccagggcgctccgccagcagggtgggaggtctttgacgtgtggcagggactcaggcaccagccatggaaacagctgtgccttgaactcagagcggcctggggcgagctagatgctggcgaagcggaggccagagctaggggtcctcagcagccacccccaccagatctccgcagcctgggattcggacggcgtgtgcggcctcctcaggaacgagctctcctggtggtgtttacgaggagtcagaggaaaaacctctttgcccccggtgtcagaggtctgtctcttcgcgggtgtatgcgcttaccggcagctctcgcacccggcgcacaccagccccgtcaccacccagatgcagatgagcttcatggccctcggcttcacccagcgcagctcctccgtgcacaccagatagactcacaccagcacagcattcacagacgtggccagtag

SEQ ID NO: 18727 - DNA, 816 bp, Artificial Sequence
  derived and/or modified sequence
atggatacaccccgtgtgctgctgagcgcggttttcttgattagctttctgtgggatctacctggatttcaacaggccagtatctctagtagttcgagctcggccgagttgggctccactaagggtatgagaagcagaaaggaaggtaaaatgcaaagagcacctagagattctgacgctggacgagaaggtcaggagcctcaaccgcgtccgcaagacgagccacgggcccagcagcccagagcacaagagccccccggtaggggaccccgcgtcgtccctcatgaatacatgctttccatctaccgaacctatagcattgcagagaagctggggatcaatgcatctttttttcagagcagcaaaagcgcgaatacaattacgtcctttgtcgacagggggcttgatgacctgagtcacactccgctcaggaggcagaaatacctattcgatgtgtcaatgctgagcgataaggaagagctggtcggagctgagctcaggcttttccgacaggcaccctctgcaccttggggtccgcccgcaggccccctgcatgtgcagcttttcccctgtctgtcccctcttttgcttgatgctagaacactggatccccagggtgcaccacccgccggttgggaggtcttcgacgtgtggcagggcttacgccatcagccttggaaacagttgtgtttggaactccgtgccgctcccggcccggccgagtcaggcctgcgacctgaaggcgcagcctctccgggtgccgggcccgccgggggaatccaccagataccggctgccgcttgcccgcccaactag

SEQ ID NO: 18728 - DNA, 3701 bp, Artificial Sequence
  derived and/or modified sequence
cccgaggagccgggccccggccgctgtccagccgctccgtgccccgcgcgtcctgcgccgccgccaccgcctcctggggagacgcagccacttgcccgccatggatactcccagggtcctgctctcggccgtcttcctcatcagttttctgtgggatttgcccggtttccagcaggcttccatctcatcctcctcgtcgtccgccgagctgggttccaccaagggcatgcgaagccgcaaggaaggcaagatgcagcgggcgccgcgcgacagtgacgcgggccgggagggccaggaaccacagccgcggcctcaggacgaaccccgggctcagcagccccgggcgcaggagccgccaggcaggggtccgcgcgtggtgccccacgagtacatgctgtcaatctacaggacttactccatcgctgagaagctgggcatcaatgccagctttttccagtcttccaagtcggctaatacgatcaccagctttgtagacaggggactagacgatctctcgcacactcctctccggagacagaagtatttgtttgatgtgtccatgctctcagacaaagaagagctggtgggcgcggagctgcggctctttcgccaggcgccctcagcgccctgggggccaccagccgggccgctccacgtgcagctcttcccttgcctttcgcccctactgctggacgcgcggaccctggacccgcagggggcgccgccggccggctgggaagtcttcgacgtgtggcagggcctgcgccaccagccctggaagcagctgtgcttggagctgcgggccgcatggggcgagctggacgccggggaggccgaggcgcgcgcgcggggaccccagcaaccgccgcccccggacctgcggagtctgggcttcggccggagggtgcggcctccccaggagcgggccctgctggtggtattcaccagatcccagcgcaagaacctgttcgcagagatgcgcgagcagctgggctcggccgaggctgcgggcccgggcgcgggcgccgaggggtcgtggccgccgccgtcgggcgccccggatgccaggccttggctgccctcgcccggccgccggcggcggcgcacggccttcgccagtcgccatggcaagcggcacggcaagaagtccaggctacgctgcagcaagaagcccctgcacgtgaacttcaaggagctgggctgggacgactggattatcgcgcccctggagtacgaggcctatcactgcgagggtgtatgcgacttcccgctgcgctcgcacctggagcccaccaaccacgccatcatccagacgctgatgaactccatggaccccggctccaccccgcccagctgctgcgtgcccaccaaattgactcccatcagcattctatacatcgacgcgggcaataatgtggtctacaagcagtacgaggacatggtggtggagtcgtgcggctgcaggtagcggtgcctttcccgccgccttggcccggaaccaaggtgggccaaggtccgccttgcaggggaggcctggctgcagagaggcggaggaggaagctggcgctgggggaggctgagggtgagggaacagcctggatgtgagagccggtgggagagaagggagcgcagccttcccagtaacttctacctgccagcccagagggaaatatggattttcacaccttgcctggccaccctggaaaaacaagccaaggaggatttcttttgttctgttttctctctctctctctctctctctctctctctctctctctctctctctattactgtggctttggatttccttatgtgtcttacaggctttgatagaaggggaggggaggagagatgcatacccgtttctcaactgctccatggattgaaaaaataacagtttaaaaagggaaacaatgtgggaggaagaatcaccgttgacgcatcttgatttggttggtttttacatgtgtaaagaaggtggggtctctggccatgtcatagcccatgtcttgtgccctcccacacagaaagtgttagatagggaaattggcaaaaagaatagttaagtcaggaatggtcctgcctatagaagagctttgagagaggtgggcccacgggtgcccctctcacccatttgtgtactctgtgagtttaccagctctgccctggcctctttcggtaccaggaactggcaaccttcatctcactcctgagggcccaggtctctgccttcattgttgctttttctggtgggggcaaggggagctggtatggatggaatgacaagaattagtccaaatggaaccccttgaaggataatgagaaaccacaaggcctgcctctgactggggctgacacggaggtgcattagcccaggctggaggtagcccacccaaatgccctttctgattctaattgatttctttcaacagaatttgccaaaattcagacatgcacttctaaggggaaggtgattttccagttcaaaaaaatgggcaggagtggggaacaaaacaattaacgtaagagctacaaaggagggaaaaggaaccaagaagtagaaggagtcccatcaggagggaagatggtgggcctcagggaggatggggatcaagggacaggccaggagccaggagtggggaagggagggatgaaaggggacacaagtccctgtctctgaagtttctttaaaatctgagttccctcccctctctttgacattcctgaaagattaccagccagcaatagcccagggctcccccaaaagaattggttcagattgtaattatcagttaggcaatgtttttaaaacttagtaatgagaaactgtgaaaagagccaagtgttacattgagcttggggtgggagatggggaacaggcagtgaggaaggagacaggggtggaattcgtcttctgggaggaagctggagagagcacagtgaaattgaaatacccattcccagatagtcaaaaacatgaactttcccccagcctgcaccagtattgttttcaaacattgcccatgagtaggccctttgaagagttagcttcctcctcatctttgactataaaattgtttaatcaatggaatttgtaccagccttttaaaaagttttagtttttcctaagtgattttgctctcttccaatctaaacctgttgcttgtttggttcagagaactacaaactgtcaaagaaagggtggggatgataagaaatgctaatataaaaatgctaagtgaaaaaaagacttggccaggagaaataatttaaaatgcacatttgctttggatgcactgttgttctgttaaggctgtatatatttgtttatttaaggtgactgaaagtgcaaagaggaaatggacagcatgcaattcatcctaatgtacaaaacgttatatgcactcaaatgttataatttctaatatttttaaagtttatattcgagttgtacaaagttaagcattaatcagatatttcattttttcataatgttaccattttcttaaatattattacaaaattttaagtctgtctaatggagagttttttttaaactgtctacctcatataatacaagtatttacaacgctaaagttaccagaggtcaatgaataatcaaaacattttttacagtacacctttcctggatgatatgcaatcgaatgctatattattaaacgcatttttctccttaataa

SEQ ID NO: 18729 - DNA, 1162 bp, Artificial Sequence
  derived and/or modified sequence
cccgaggagccgggccccggccgctgtccagccgctccgtgccccgcgcgtcctgcgccgccgccaccgcctcctggggagacgcagccacttgcccgccatggatactcccagggtcctgctctcggccgtcttcctcatcagttttctgtgggatttgcccggtttccagcaggcttccatctcatcctcctcgtcgtccgccgagctgggttccaccaagggcatgcgaagccgcaaggaaggcaagatgcagcgggcgccgcgcgacagtgacgcgggccgggagggccaggaaccacagccgcggcctcaggacgaaccccgggctcagcagccccgggcgcaggagccgccaggcaggggtccgcgcgtggtgccccacgagtacatgctgtcaatctacaggacttactccatcgctgagaagctgggcatcaatgccagctttttccagtcttccaagtcggctaatacgatcaccagctttgtagacaggggactagacgatctctcgcacactcctctccggagacagaagtatttgtttgatgtgtccatgctctcagacaaagaagagctggtgggcgcggagctgcggctctttcgccaggcgccctcagcgccctgggggccaccagccgggccgctccacgtgcagctcttcccttgcctttcgcccctactgctggacgcgcggaccctggacccgcagggggcgccgccggccggctgggaagtcttcgacgtgtggcagggcctgcgccaccagccctggaagcagctgtgcttggagctgcgggccgcatggggcgagctggacgccggggaggccgaggcgcgcgcgcggggaccccagcaaccgccgcccccggacctgcggagtctgggcttcggccggagggtgcggcctccccaggagcgggccctgctggtggtattcaccagatcccagcgcaagaacctgttcgcccctggagtacgaggcctatcactgcgagggtgtatgcgacttcccgctgcgctcgcacctggagcccaccaaccacgccatcatccagacgctgatgaactccatggaccccggctccaccccgcccagctgctgcgtgcccaccaaattgactcccatcagcattctatacatcgacgcgggcaataa

SEQ ID NO: 18730 - DNA, 973 bp, Artificial Sequence
  derived and/or modified sequence
ctggggagacgcagccacttgcccgccatggatactcccagggtcctgctctcggccgtcttcctcatcagttttctgtgggatttgcccggtttccagcaggcttccatctcatcctcctcgtcgtccgccgagctgggttccaccaagggcatgcgaagccgcaaggaaggcaagatgcagcgggcgccgcgcgacagtgacgcgggccgggagggccaggaaccacagccgcggcctcaggacgaaccccgggctcagcagccccgggcgcaggagccgccaggcaggggtccgcgcgtggtgccccacgagtacatgctgtcaatctacaggacttactccatcgctgagaagctgggcatcaatgccagctttttccagtcttccaagtcggctaatacgatcaccagctttgtagacaggggactagacgatctctcgcacactcctctccggagacagaagtatttgtttgatgtgtccatgctctcagacaaagaagagctggtgggcgcggagctgcggctctttcgccaggcgccctcagcgccctgggggccaccagccgggccgctccacgtgcagctcttcccttgcctttcgcccctactgctggacgcgcggaccctggacccgcagggggcgccgccggccggctgggaagtcttcgacgtgtggcagggcctgcgccaccagccctggaagcagctgtgcttggagctgcgggccgcccccggacctgcggagtctgggcttcggccggagggtgcggcctccccaggagcgggccctgctggtggtattcaccagatcccagctgctgcgtgcccaccaaattgactcccatcagcattctatacatcgacgcgggcaataatgtggtctacaagcagtacgaggacatggtggtggagtcgtgcggctgcaggtagcggtgcctttcccgccgccttggcccggaaccaaggtg

SEQ ID NO: 18731 - DNA, 1368 bp, Artificial Sequence
  derived and/or modified sequence
atggacaccccccgggtgctgctgtctgctgtgttcctgatctccttcctgtgggacctgcccggcttccagcaggccagcatcagcagcagcagcagcagcgctgagctgggcagcaccaagggcatgaggagcaggaaggagggcaagatgcagagggccccccgggacagtgatgctggccgggagggccaggagccccagccccggccccaggatgagccccgggcccagcagccccgggcccaggagcccccaggccggggcccccgggtggtgccccatgagtacatgctgagcatctaccgcacctacagcattgctgagaagctgggcatcaatgccagcttcttccagagcagcaagagcgccaacaccatcaccagctttgtggaccggggcctggatgacctgagccacacccccctgcggcggcagaagtacctgtttgatgtgtccatgctgagtgacaaggaggagctggtgggcgctgagctgcggctcttccggcaggcccccagcgccccctggggccccccagctggccccctgcacgtgcagctgttcccctgcctgagccccctgctgctggatgcccggaccctggacccccagggcgcccccccagctggctgggaggtgtttgatgtgtggcagggcctgcggcaccagccctggaagcagctgtgcctggagctgcgggccgcctggggcgagctggatgctggggaggccgaggcccgggcccggggcccccagcagcccccacctccagacctgcggagcctgggctttggaagaagagtgcggcccccccaggagcgggccctgctggtggtgttcaccaggagccagaggaagaacctgtttgctgagatgagggagcagctgggcagcgctgaggccgccggccctggagctggagctgagggctcctggcccccaccttctggggccccagatgcccggccctggctgcccagccctggaagaagaagaagaagaacagcctttgccagccgccacggcaagagacatggcaagaagagccggctgcgctgcagcaagaagcccctgcacgtgaacttcaaggagctgggctgggatgactggatcatcgcccccctggagtatgaggcctaccactgtgaaggagtgtgtgacttccccctgcggagccacctggagcccaccaaccacgccatcatccagaccctgatgaacagcatggaccccggcagcaccccacccagctgctgcgtgcccaccaagctgacccccatcagcatcctgtacattgatgctggcaacaacgtggtgtacaagcagtatgaggacatggtggtggagagctgtggctgcaggtag

SEQ ID NO: 18732 - DNA, 1062 bp, Artificial Sequence
  derived and/or modified sequence
atggacaccccccgggtgctgctgtctgctgtgttcctgatctccttcctgtgggacctgcccggcttccagcaggccagcatcagcagcagcagcagcagcgctgagctgggcagcaccaagggcatgaggagcaggaaggagggcaagatgcagagggccccccgggacagtgatgctggccgggagggccaggagccccagccccggccccaggatgagccccgggcccagcagccccgggcccaggagcccccaggccggggcccccgggtggtgccccatgagtacatgctgagcatctaccgcacctacagcattgctgagaagctgggcatcaatgccagcttcttccagagcagcaagagcgccaacaccatcaccagctttgtggaccggggcctggatgacctgagccacacccccctgcggcggcagaagtacctgtttgatgtgtccatgctgagtgacaaggaggagctggtgggcgctgagctgcggctcttccggcaggcccccagcgccccctggggccccccagctggccccctgcacgtgcagctgttcccctgcctgagccccctgctgctggatgcccggaccctggacccccagggcgcccccccagctggctgggaggtgtttgatgtgtggcagggcctgcggcaccagccctggaagcagctgtgcctggagctgcgggccgcctggggcgagctggatgctggggaggccgaggcccgggcccggggcccccagcagcccccacctccagacctgcggagcctgggctttggaagaagagtgcggcccccccaggagcgggccctgctggtggtgttcaccaggagccagaggaagaacctgtttgcccctggggtgcggggcctgagcctgcggggctgcatgaggctgcctgctgccctggcccctggggcccaccagcccaggcaccacccagatgctgatgagctgcacggcccccggctgcacccagcccagctgctgcgggcccaccagattgacagccaccagcacagcatccaccggcggggccagtag

SEQ ID NO: 18733 - DNA, 816 bp, Artificial Sequence
  derived and/or modified sequence
atggacaccccccgggtgctgctgtctgctgtgttcctgatctccttcctgtgggacctgcccggcttccagcaggccagcatcagcagcagcagcagcagcgctgagctgggcagcaccaagggcatgaggagcaggaaggagggcaagatgcagagggccccccgggacagtgatgctggccgggagggccaggagccccagccccggccccaggatgagccccgggcccagcagccccgggcccaggagcccccaggccggggcccccgggtggtgccccatgagtacatgctgagcatctaccgcacctacagcattgctgagaagctgggcatcaatgccagcttcttccagagcagcaagagcgccaacaccatcaccagctttgtggaccggggcctggatgacctgagccacacccccctgcggcggcagaagtacctgtttgatgtgtccatgctgagtgacaaggaggagctggtgggcgctgagctgcggctcttccggcaggcccccagcgccccctggggccccccagctggccccctgcacgtgcagctgttcccctgcctgagccccctgctgctggatgcccggaccctggacccccagggcgcccccccagctggctgggaggtgtttgatgtgtggcagggcctgcggcaccagccctggaagcagctgtgcctggagctgcgggccgcccctggccctgctgagagcggcctgcggcctgagggcgccgccagccctggggccggccctgctgggggcatccaccagatcccagctgctgcctgcccccccaactag

SEQ ID NO: 18734 - DNA, 1368 bp, Artificial Sequence
  derived and/or modified sequence
atggacaccccccgggtgctgctgagcgccgtgttcctgatcagcttcctgtgggacctgccgggcttccagcaagcgagtatttcatcgagcagttcctcagccgaactcggttccaccaagggcatgaggagtagaaaagaaggcaagatgcaaagagctccacgggactctgacgcaggccgtgaagggcaagagccccaaccccggccccaggatgaaccacgggcccaacagccaagggctcaggaaccccctggacgcgggcccagggtggttcctcacgagtacatgctgagcatttatagaacctatagcatcgcagagaagctgggaatcaatgcctcatttttccaaagtagcaaatctgctaacactattacttccttcgttgacagggggttggacgatttatcccacactcctttgcgtcgtcagaagtacctcttcgatgtgagcatgctgagtgacaaggaagaactcgttggtgccgaactcaggcttttcagacaagccccttccgccccatggggcccgcccgccggtcctctgcacgtgcaactgtttccttgcctgtctccccttctgttagacgcacgtaccctggacccccaaggggcaccacctgctggttgggaagtttttgatgtgtggcagggtcttaggcaccagccatggaagcaactgtgtctcgaacttagggccgcatggggagaactggacgctggggaagccgaagcccgtgcccgtggtcctcaacagcctccaccccccgatctcaggtcgctcggattcggccgccgcgtgcgccccccccaggagagggctctgctggtcgtgttcactcgtagccagcgcaaaaacttattcgcagagatgagagagcagctcgggagcgccgaggcagctggtcctggtgccggggctgaaggctcctggcctcccccgagtggcgcccccgatgctcgaccatggctacctagcccaggtcgacgccggaggcgcaccgcgtttgcctcgcgccacgggaagaggcacggaaaaaaatcgcgcctgcgctgttccaagaagccgctgcatgttaactttaaggaactgggctgggatgactggattatcgcccctctggaatacgaggcctatcattgcgaaggtgtatgtgattttcccctgagatcacatcttgaacccacaaatcatgccatcatccagaccctcatgaacagcatggatcctgggagcacacccccatcctgctgtgtgcctaccaaactgacgcctataagtatattgtatattgacgccgggaacaacgtcgtgtacaagcagtatgaagacatggtcgtcgagtcctgcggatgcaggtag

SEQ ID NO: 18735 - DNA, 1062 bp, Artificial Sequence
  derived and/or modified sequence
atggacaccccccgggtgctgctgagcgccgtgttcctgatcagcttcctgtgggatcttccgggttttcagcaggctagtatcagctcgtctagcagttcagcggagctaggtagtacaaaggggatgagaagtagaaaggaaggaaaaatgcagcgagccccgcgggattccgatgccgggcgcgagggacaggaaccgcagcctcgccctcaggacgagcctcgggcacagcaaccacgggctcaagagccccccggacgtggtccaagggtggtcccacacgagtacatgctgtcgatctaccgtacatattctatcgcagagaagctcggcatcaatgcttccttctttcaatcctctaagtccgccaacactattacaagcttcgtggaccgaggcttggacgatctgagccacactcctttgcgcagacaaaaatatctgtttgacgtttcaatgctgtctgacaaggaggaattagtgggcgctgagctgcgactcttcagacaggcaccctcagccccgtggggtccgccagccgggcctctccatgtgcagttgttcccttgcctgtcaccactgcttctcgacgcccggacacttgatcctcaaggcgcgcccccagccggatgggaagtttttgacgtttggcaagggttgcggcaccagccatggaaacagctgtgcctcgagctgagagctgcatggggggagctcgatgcgggcgaggcagaggcccgggcgagaggcccacagcaaccccccccccccgacctcagatctctcgggttcggaaggagagttcggcctcctcaggagagggcacttttagtggtgttcactcggtcccagcgcaaaaatctgttcgctccaggcgtgcgcggcctcagtttgagaggctgcatgaggcttccggcggcacttgcgccaggggcccaccaaccccgtcatcaccccgatgccgacgagctgcacggaccccgcttgcatcccgcgcagctgcttcgggcgcaccagatcgactcccatcagcactctatccatagaagaggccagtag

SEQ ID NO: 18736 - DNA, 816 bp, Artificial Sequence
  derived and/or modified sequence
atggacaccccccgggtgctgctgagcgccgtgttcctgatcagctttctgtgggacttgcccggctttcagcaagccagcattagctccagtagtagctccgcagagctgggttccaccaaagggatgcgatcccgtaaggagggcaagatgcagagggccccgagggacagcgacgccggaagagagggacaggagccacaacccaggccgcaggacgagcccagggctcaacagccccgcgcgcaggagccacctggacgggggcctcgggtcgttccccacgaatatatgctcagtatttatcgaacctacagcattgctgaaaagttgggcataaacgcctccttcttccaaagctccaaatctgcaaatacgattacaagcttcgtggacagagggctcgatgacctcagccatacacccctgcggaggcaaaagtatttattcgacgtatcgatgctctctgacaaggaggagctagtgggcgcagaattgagactgttccgccaagctccgtccgccccatggggccctcctgctggcccactgcacgtccagctctttccttgtctgtcccccttgctgctcgacgctaggaccttggacccgcagggtgccccaccagctggatgggaagtgttcgacgtctggcaaggtttacggcaccaaccatggaagcagctatgtcttgagctgcgggccgcacctggaccagcggagtcaggtctgcgcccggaaggagctgcttcacccggcgccggccccgctggtggcatccaccaaatccccgcagccgcctgcccccctaattag

SEQ ID NO: 18737 - DNA, 1368 bp, Artificial Sequence
  derived and/or modified sequence
atggacactcccagggtactccttagtgcggtctttttaatctctttcctgtgggatctgcctgggttccagcaggcgtccattagttcaagctcatcgagcgctgaattgggtagcacgaaaggcatgagatcacgaaaagagggaaaaatgcagcgtgcaccaagagactccgatgcagggcgtgagggtcaggaaccacagccacggccacaagacgaaccgagagcacaacagccacgggcacaggagccacctgggcgaggcccaagggtcgtcccgcacgagtacatgctgagcatataccgcacttactctattgccgaaaaattgggcatcaacgcgtcttttttccaaagcagtaagagtgcaaatacaattactagttttgtggataggggattggacgacctttcacacacaccactgagacgacagaagtacctgtttgacgtgagtatgctctctgataaagaggagcttgttggcgcagaactgaggctgtttcgccaagccccaagtgcaccatggggtccgcctgcaggccctctgcatgtccagctgtttccctgtttgtcccctttgctactggatgctcgcactctggatcctcagggagccccaccggctggatgggaagtcttcgatgtctggcaggggctgcgacatcagccgtggaagcagctgtgcttagaattgagagcagcctggggagaactcgacgccggagaggcggaggcccgagccagggggcctcagcagccgccaccgcctgatctaagatcgctggggtttggccgtagggtgaggccgcctcaggaacgtgccttgctagtggtgttcactcgcagccaaaggaagaatctcttcgcggaaatgcgggagcagttgggctccgccgaagctgccggaccaggcgctggcgctgaaggaagctggcctccgccaagcggcgctcctgacgctcgcccttggcttccgtctcctggtcgcaggaggcgaagaactgcatttgcttctagacacggcaagcgccacggcaaaaaatccaggttgaggtgctctaagaagccactccacgtcaatttcaaagagctgggatgggacgattggatcattgcgcctctggaatatgaagcctatcattgcgagggtgtttgcgattttcctctccggagccacctagagccgactaaccatgctatcatccaaactttgatgaattctatggaccccggatctaccccgccttcttgctgcgtgcccacaaaactgacaccaatatccatcctgtatattgacgctggtaataatgtggtgtataagcaatatgaggacatggtggtcgagagctgtgggtgcaggtag

SEQ ID NO: 18738 - DNA, 1062 bp, Artificial Sequence
  derived and/or modified sequence
atggatacccccagagtgcttttgagcgccgtgtttctgatctcttttttgtgggacctgccgggattccagcaggcaagcatatcctcatctagcagcagcgcggaactgggttccacaaaaggaatgcgcagccggaaagagggaaagatgcaacgggcaccaagagattctgatgccggtagagaggggcaggagccccagccaagaccgcaggatgagccgagggctcaacagccacgcgctcaagagccccctggcagggggccaagggtcgttcctcatgagtatatgcttagtatctaccgcacatattcaatagccgaaaagctcggtattaacgccagcttcttccagtcctccaaatccgctaacacaattactagtttcgtggaccgcggtctggacgatctgagtcacacacccctgaggagacagaagtacttattcgacgtctccatgcttagcgacaaagaggagctggtaggagctgaattgcgccttttccggcaggctccatccgccccatggggacctcccgcaggccctctgcacgtgcagcttttcccctgtctgtcaccactgttactggacgctagaaccctggacccacagggagctcctccagccggatgggaagtgttcgacgtttggcagggcctgcgccaccagccttggaaacagctgtgccttgagctgagagccgcttggggcgagttggacgctggagaagctgaggcacgggctcggggtcctcagcaaccccctccccctgatctgaggagcctgggtttcgggcgacgggtacgtccaccacaggagagggctctgctggtggtgtttacaagatcccaacggaaaaacctgttcgcccctggagtcagggggctctcactcagggggtgcatgcgtttgcccgcagccctcgcaccaggagcacaccagcctcgacatcaccctgacgctgatgagttgcacggtcctcggctccatcccgctcagctcctccgggctcatcagattgattcccaccagcactccatccacagaagagggcaatag

SEQ ID NO: 18739 - DNA, 816 bp, Artificial Sequence
  derived and/or modified sequence
atggatactccgcgagtccttctgtcagcagtgtttttgatttccttcctgtgggacctgccaggcttccagcaagcctccatctccagctcttccagttctgcagagctggggagtaccaagggaatgaggtcaagaaaagagggcaagatgcagcgagccccacgtgatagcgacgccggacgcgagggccaggagcctcagccgaggcctcaggatgaaccgcgagcccagcagccccgagcacaagagcccccaggtcggggaccgcgagtcgttcctcatgaatacatgcttagcatctaccgcacatattccatagcggagaaactcgggattaatgctagctttttccaaagctctaaatcagccaataccatcaccagttttgttgatagaggcctcgatgatttgtcacacactcctctcaggagacagaagtatctattcgatgtctccatgctgagcgacaaagaggagttagtgggcgctgagctgaggttattcagacaagccccatctgcgccttggggcccaccagcaggacctctgcacgttcagctttttccgtgcctttctcctctcctgctggacgcccgtacactggatcctcaaggggcaccaccagcaggctgggaagtcttcgatgtgtggcaaggcttaaggcatcaaccatggaaacagctgtgcctagaactccgcgcagctccgggtcccgctgagtcagggctgagacctgagggggcagcttcccctggggctggcccagctggaggaatccaccagattcctgcagctgcctgccccccaaactag

SEQ ID NO: 18740 - DNA, 1368 bp, Artificial Sequence
  derived and/or modified sequence
atggacacccccagagtgctgctgagcgccgtgttcctgatcagcttcctgtgggacctgcccggcttccagcaggccagcatcagcagcagcagcagcagcgccgagctgggcagcaccaagggcatgagaagcagaaaggagggcaagatgcagagagcccccagagacagcgacgccggcagagagggccaggagccccagcccagaccccaggacgagcccagagcccagcagcccagagcccaggagccccccggcagaggccccagagtggtgccccacgagtacatgctgagcatctacagaacctacagcatcgccgagaagctgggcatcaacgccagcttcttccagagcagcaagagcgccaacaccatcaccagcttcgtggacagaggcctggacgacctgagccacacccccctgagaagacagaagtacctgttcgacgtgagcatgctgagcgacaaggaggagctggtgggcgccgagctgagactgttcagacaggcccccagcgccccctggggcccccccgccggccccctgcacgtgcagctgttcccctgcctgagccccctgctgctggacgccagaaccctggacccccagggcgccccccccgccggctgggaggtgttcgacgtgtggcagggcctgagacaccagccctggaagcagctgtgcctggagctgagagccgcctggggcgagctggacgccggcgaggccgaggccagagccagaggcccccagcagccccccccccccgacctgagaagcctgggcttcggcagaagagtgagacccccccaggagagagccctgctggtggtgttcaccagaagccagagaaagaacctgttcgccgagatgagagagcagctgggcagcgccgaggccgccggccccggcgccggcgccgagggcagctggcccccccccagcggcgcccccgacgccagaccctggctgcccagccccggcagaagaagaagaagaaccgccttcgccagcagacacggcaagagacacggcaagaagagcagactgagatgcagcaagaagcccctgcacgtgaacttcaaggagctgggctgggacgactggatcatcgcccccctggagtacgaggcctaccactgcgagggcgtgtgcgacttccccctgagaagccacctggagcccaccaaccacgccatcatccagaccctgatgaacagcatggaccccggcagcaccccccccagctgctgcgtgcccaccaagctgacccccatcagcatcctgtacatcgacgccggcaacaacgtggtgtacaagcagtacgaggacatggtggtggagagctgcggctgcagatag

SEQ ID NO: 18741 - DNA, 1062 bp, Artificial Sequence
  derived and/or modified sequence
atggacacccccagagtgctgctgagcgccgtgttcctgatcagcttcctgtgggacctgcccggcttccagcaggccagcatcagcagcagcagcagcagcgccgagctgggcagcaccaagggcatgagaagcagaaaggagggcaagatgcagagagcccccagagacagcgacgccggcagagagggccaggagccccagcccagaccccaggacgagcccagagcccagcagcccagagcccaggagccccccggcagaggccccagagtggtgccccacgagtacatgctgagcatctacagaacctacagcatcgccgagaagctgggcatcaacgccagcttcttccagagcagcaagagcgccaacaccatcaccagcttcgtggacagaggcctggacgacctgagccacacccccctgagaagacagaagtacctgttcgacgtgagcatgctgagcgacaaggaggagctggtgggcgccgagctgagactgttcagacaggcccccagcgccccctggggcccccccgccggccccctgcacgtgcagctgttcccctgcctgagccccctgctgctggacgccagaaccctggacccccagggcgccccccccgccggctgggaggtgttcgacgtgtggcagggcctgagacaccagccctggaagcagctgtgcctggagctgagagccgcctggggcgagctggacgccggcgaggccgaggccagagccagaggcccccagcagccccccccccccgacctgagaagcctgggcttcggcagaagagtgagacccccccaggagagagccctgctggtggtgttcaccagaagccagagaaagaacctgttcgcccccggcgtgagaggcctgagcctgagaggctgcatgagactgcccgccgccctggcccccggcgcccaccagcccagacaccaccccgacgccgacgagctgcacggccccagactgcaccccgcccagctgctgagagcccaccagatcgacagccaccagcacagcatccacagaagaggccagtag

SEQ ID NO: 18742 - DNA, 816 bp, Artificial Sequence
  derived and/or modified sequence
atggacacccccagagtgctgctgagcgccgtgttcctgatcagcttcctgtgggacctgcccggcttccagcaggccagcatcagcagcagcagcagcagcgccgagctgggcagcaccaagggcatgagaagcagaaaggagggcaagatgcagagagcccccagagacagcgacgccggcagagagggccaggagccccagcccagaccccaggacgagcccagagcccagcagcccagagcccaggagccccccggcagaggccccagagtggtgccccacgagtacatgctgagcatctacagaacctacagcatcgccgagaagctgggcatcaacgccagcttcttccagagcagcaagagcgccaacaccatcaccagcttcgtggacagaggcctggacgacctgagccacacccccctgagaagacagaagtacctgttcgacgtgagcatgctgagcgacaaggaggagctggtgggcgccgagctgagactgttcagacaggcccccagcgccccctggggcccccccgccggccccctgcacgtgcagctgttcccctgcctgagccccctgctgctggacgccagaaccctggacccccagggcgccccccccgccggctgggaggtgttcgacgtgtggcagggcctgagacaccagccctggaagcagctgtgcctggagctgagagccgcccccggccccgccgagagcggcctgagacccgagggcgccgccagccccggcgccggccccgccggcggcatccaccagatccccgccgccgcctgcccccccaactag

SEQ ID NO: 18743 - protein, 552 aa, Artificial Sequence
  derived and/or modified sequence
MEPAMEPETLEARINRATNPLNKELDWASINGFCEQLNEDFEGPPLATRLLAHKIQSPQEWEAIQALTVLETCMKSCGKRFHDEVGKFRFLNELIKVVSPKYLGSRTSEKVKNKILELLYSWTVGLPEEVKIAEAYQMLKKQGIVKSDPKLPDDTTFPLPPPRPKNVIFEDEEKSKMLARLLKSSHPEDLRAANKLIKEMVQEDQKRMEKISKRVNAIEEVNNNVKLLTEMVMSHSQGGAAAGSSEDLMKELYQRCERMRPTLFRLASDTEDNDEALGLSDPTPPSGPSLDGTGWNSFQSSDATEPPAPALAQAPSMESRPPAQTSLPASSGLDDLDLLGKTLLQQSLPPESQQVRWEKQQPTPRLTLRDLQNKSSSCSSPSSSATSLLHTVSPEPPRPPQQPVPTELSLASITVPLESIKPSNILPVTVYDQHGFRILFHFARDPLPGRSDVLVVVVSMLSTAPQPIRNIVFQSAVPKVMKVKLQPPSGTELPAFNPIVHPSAITQVLLLANPQKEKVRLRYKLTFTMGDQTYNEMGDVDQFPPPETWGSL

SEQ ID NO: 18744 - DNA, 1659 bp, Artificial Sequence
  derived and/or modified sequence
atggaacccgctatggagccagagaccttggaagcgagaataaaccgggctactaatccgttgaataaagagcttgactgggctagtataaatggtttttgtgagcaactgaacgaagatttcgagggcccacctctggcaacccgattgctggcccataagattcagtcgcctcaggagtgggaggcgatccaggccttaaccgttctggaaacctgcatgaagtcgtgcggcaagaggtttcatgacgaggtagggaaattcagattcctcaacgagctcatcaaggttgttagccccaaatacctcggttcccgaaccagcgagaaggtgaaaaacaagattctcgaattgctgtatagctggaccgtcggattgccggaggaggtcaagatcgccgaagcatatcagatgctcaagaagcaaggcatagtgaaatccgacccaaagcttccagatgatacgactttccctcttcctccacctcggccgaaaaatgttatcttcgaagacgaggagaagtcaaagatgttagctcggctccttaaatcaagccacccagaagatctgagagctgccaataaactcattaaggagatggtacaggaagaccaaaagcgtatggaaaagatcagcaagagggtcaacgctatcgaggaggttaacaataatgtaaaactcctgaccgagatggttatgtcacactcccaaggcggtgccgctgctggaagcagtgaagacttaatgaaggagttatatcagagatgcgaaagaatgcgcccaacgctgtttcgcctggcctcggatacagaggacaacgacgaagccctcggtctctcagatccaacgccaccttccggtccctctttggacgggacgggctggaattctttccagagcagcgatgcaaccgagcctcccgccccagcactggcacaagctccaagcatggaatcccgcccacccgcacaaacatcgctgcctgccagcagcgggctcgacgacctagacctgcttggaaaaactctgctccagcagagcttgccaccggaatctcagcaagtgcggtgggagaaacagcagcccactccacggcttacgctgagggatctgcagaacaagagttcttcttgttcaagcccctcgagcagtgctacatctttgctgcacacggtctcccctgaacctcctcgcccaccacagcagcctgtacctaccgagctgtccttggcaagcatcaccgtccccttggagtccatcaaaccctcaaacattctgccagtaaccgtgtatgatcagcatggcttcagaattctgttccattttgcccgcgatcctctccctggcaggagtgatgtactggttgtagtcgtatccatgctgagtaccgccccacaacccatcagaaatattgtattccaaagtgccgttccgaaagtgatgaaagtgaaactgcagcctcctagcggtaccgagctgcctgcgtttaatcccattgtccacccctcggccatcacgcaggtactcctcctggctaaccctcagaaggaaaaggtgcggctgagatataagttaacctttaccatgggcgaccaaacatacaacgagatgggtgatgtcgaccagttccccccacctgaaacatgggggagtttgtag

SEQ ID NO: 18745 - DNA, 117 bp, Artificial Sequence
  derived and/or modified sequence
atgaagtcctgcgggaaaagattccatgacgaggtcggcaagttcaggttcctgaatgagctgatcaaagtagtttctcctaaatatctaggcagtaggacctctgaaaaggtgtag

SEQ ID NO: 18746 - DNA, 123 bp, Artificial Sequence
  derived and/or modified sequence
atgaagagttgcggcaaaaggtttcacgacgaagtgggcaagtttcgcttcttgaatgagctcataaaagtcgtcagccccaagtacttaggctccaggacaagtgagaaggtgaaaaactag

SEQ ID NO: 18747 - DNA, 330 bp, Artificial Sequence
  derived and/or modified sequence
atgaagtcatgcggcaagcgcttccacgacgaggtaggcaagtttagattcctcaacgagctcatcaaggtggtgtcccccaaatatcttgggtctagaacctccgagaaagtcaagaataagatcctggagctgctgtacagctggacagtggggttgcccgaggaagtcaagatcgcagaggcataccagatgctaaaaaaacaaggaatcgtgaaaagcgatccgaagctgcccgacgacaccacctttccgctacctccaccccgacctaagaacgtgatttttgaagacgaggagaagtccaagatgctggctcgcttgttgtag

SEQ ID NO: 18748 - DNA, 330 bp, Artificial Sequence
  derived and/or modified sequence
atgaaatcatgtggtaagagatttcatgacgaggtggggaaattccggtttctcaacgaactcatcaaggtggtttcccctaagtatctcgggtcaaggacgtccgaaaaggtgaaaaataaaatccttgaacttctgtattcatggactgttggtcttcccgaggaggtaaaaatcgctgaagcataccagatgctaaaaaaacagggcatcgtcaagagtgacccaaaactccccgacgatactactttcccactgccccccccaagaccgaagaacgtcatatttgaagacgaggagaagagcaagatgctggctagattactgtag

SEQ ID NO: 18749 - DNA, 327 bp, Artificial Sequence
  derived and/or modified sequence
atgaaatcctgtggcaagcggtttcacgacgaggtggggaaattccggttcctgaacgaattgatcaaggtcgtgtcacccaaatatttgggaagcagaacttcggaaaaagtaaagaacaaaattctggagctcctgtatagctggaccgtggggttaccggaggaagtcaaaattgcggaggcttatcaaatgctcaagaagcagggtatcgtgaagtctgatcctaagctgcccgatgataccacattccccctgccccccccgaggcctaaaaacgtcatttttgaagacgaggagaagagtaagatgctcgcacgtttgtag

SEQ ID NO: 18750 - DNA, 183 bp, Artificial Sequence
  derived and/or modified sequence
atgaaatcgtgcgggaaacgattccatgacgaagtgggaaagtttcgatttttgaacgagcttattaaggttgtaagccccaaatacctggggtctcgcaccagcgagaaggtgaagaataagatccttgagctgctctattcctggaccgtgggtctccccgaggaggtcaagattgcatag

SEQ ID NO: 18751 - DNA, 213 bp, Artificial Sequence
  derived and/or modified sequence
atgaagtcctgcggaaagagatttcacgacgaagttggaaagttcagattcctgaacgagctgattaaggtggtcagtccaaaatacctcgggtcacgaacctcagaaaaagtcaaaaacaaaatcctggaactgttgtattcttggacggttggcctgccggaggaagtaaaaatcgctgaagcatatcagatgctcaagaagcagggctag

SEQ ID NO: 18752 - DNA, 2528 bp, Artificial Sequence
  derived and/or modified sequence
tgggggccggtggcggatggagcccgcgatggagccggagactctggaggcgcgaatcaatagagccacgaaccccctgaacaaggagctcgactgggccagcatcaacggcttctgcgagcagctcaacgaggactttgaggggcctccactcgccacccggctgctggcccacaagatccagtccccacaggagtgggaggcgatccaggccttgacggtgctggaaacatgcatgaagagctgcggcaagcggttccacgacgaagtgggcaagttccgctttctcaacgagctcatcaaggtcgtgtctcccaagtatctgggctctcggacatcggagaaggtgaagaacaagatcttggagctcctctacagctggacagtgggcctgcccgaggaggtgaaaatcgcagaggcctaccagatgctaaagaagcaggggattgtaaagtccgaccccaagcttccagatgacactacctttccccttcctcctccacggccgaagaatgtgatctttgaagatgaggagaaatccaagatgctggcccgcctgctgaagagctcccatcccgaagacctccgcgcagccaataagctcatcaaagagatggtgcaggaggaccagaagcggatggagaagatctcgaagagggtgaatgccatcgaggaggtgaacaacaatgtgaaactgctcacggagatggtgatgagccacagccagggcggcgcagcagctggcagcagcgaggacctcatgaaggaactgtaccagcgctgtgagcggatgcggcccacgctcttccgactggcgagtgacacagaggacaatgatgaggccttaggcctcagtgaccccacacccccttcaggcccaagcctggatggtaccggatggaacagcttccagtcgtcggatgccactgagcccccagcccctgctctggcccaggcccccagtatggaaagccgacccccagcgcagacatccctgccagcaagcagcggtctggacgacctagacctcctggggaagaccctcctgcagcagtcgctgcccccggaatcccagcaagtgcggtgggagaagcagcagccaaccccccggctcacactccgggacctgcagaataagagcagcagctgcagctcccccagctccagcgccaccagccttctccacaccgtgtccccagagccccccaggcctccgcagcagcccgtaccaaccgagctctcactggccagcatcactgtgcccctggagtccatcaaacccagcaacatcctgcccgtgactgtgtatgaccagcacggcttccgcatcctcttccattttgcccgggacccactgccagggcgctccgacgtgctggtggtggtggtttccatgctgagcaccgccccccagcccatccgcaacatcgtgttccagtcagctgtccccaaggttatgaaggtgaagctgcagccaccctcgggcacggagctgccagcttttaaccccatcgtccacccctcagcaatcacccaggtcctgctgcttgccaacccccagaaggagaaggttcgcctccgctacaagctcaccttcaccatgggtgaccagacctacaacgagatgggggatgtggaccagttccccccacctgaaacctggggtagcctctagaacagaggggctggggagaggaaggggcagagggaccggtcactgtccagcctggagggaggcattggtggccaaggacaccctttgttgcccatggccattcacccccaggcctggtgcttctccccacacccctgtaggcctcaagtgactcttccccctcctgctccggccccgcccctgctgagccaaacccagtaggaggctgggcctgggtttgtgccgctggggtctccatcaccgggacctggagagggaggggctgtgtagccttggaagaacttgggtcatggggaggaagcacagctgttggggaagggccaggacctcaggcccagccccaaccccagctggggtggggtcttccccacctgtctcttatgccttatgggaaggcccagccataactcgggggccatgctggagctggggaccagcttaggcctcctccataggaacccagtgactggggggtgacgcctacacccccagctatttgcactctggtgtgtggtttgactctgcttttcttccggattggccctgtggtcacagcctcagggggccaggctgggggaacctcacctggcccgtactcctgggggtttccctttgccattgggccccctgagggactgtgggggctcaagggtaatgccagaggcccatggccccagcgaggggctgtggggcacctagagttctcggtgtgtctccttcattcattggcctctgctggggcctcctatgggtgtcttacgtctgtccatccatctgtccgtggtcagaagtggggtcagtgtgtgagtgagagcaggagtatttatgaaaataaaacgtcgtttttcctgga

SEQ ID NO: 18753 - DNA, 946 bp, Artificial Sequence
  derived and/or modified sequence
ccaaggtgggcggatcacaaggtcaggagattgagaccatcctggctaacatggtgaaaccctgtctctactaaaaatacaaaaaaaaattagccgggcgtggtggcgggtgcctgtagtcccagctactcgggaggctgaggaaggagaatggcatgaacctgggaggcggagcttgcagtgagccgagatcgtgccactgcactccagcctgggcaacagcgtgagactcgtctcaaaaaaaaaaaaaaatccatatttcattccagctttacaagatggggaaatggaggttcagggaagcatgtaagctagattgttgtttaaccagtattgggggttaaaggggtagctgtctggtcgtgtttacaccacttcatgtagacctgttggccctctttccttgccactatccatttctggattcagtcttccccagaacctcaccctttgcctgccctcagctgactgctcattcatttgccaaggggagacaggtgtggacatgagtggctgggatgcagtgccgtagcaggctgggggacacaaaagagaactgacccagcactgctaccctgggcaggagtagaggattagagaaggggacaccggagccactcccaagggaatgaaggctttctgaacctggtgtgatgatagagccacgaaccccctgaacaaggagctcgactgggccagcatcaacggcttctgcgagcagctcaacgaggactttgaggggcctccactcgccacccggctgctggcccacaagatccagtccccacaggagtgggaggcgatccaggccttgacggtgctggaaacatgcatgaagagctgcggcaagcggttccacgacgaagtgggcaagttccgctttctcaacgagctcatcaaggtcgtgtctcccaagtatctgggctctcggacatcggagaaggtg

SEQ ID NO: 18754 - DNA, 661 bp, Artificial Sequence
  derived and/or modified sequence
gggccccttcccggcgggggcggggtacgggtcgccccctcctcacgccccgcccccggcccgggaggggcggtgtcctcagtcggcccctcagaccctggagcgatggaggaccccggccccggcgcggtccagcggtgggagcgggcgccgcccacctgtcggatccctgggccatgacccctgggacggcgagggagacaggtgtggacatgagtggctgggatgcagtgccgtagcaggctgggggacacaaaagagaactgacccagcactgctaccctgggcaggagtagaggattagagaaggggacaccggagccactcccaagggaatgaaggctttctgaacctggtgtgatgatagagccacgaaccccctgaacaaggagctcgactgggccagcatcaacggcttctgcgagcagctcaacgaggactttgaggggcctccactcgccacccggctgctggcccacaagatccagtccccacaggagtgggaggcgatccaggccttgacggtgctggaaacatgcatgaagagctgcggcaagcggttccacgacgaagtgggcaagttccgctttctcaacgagctcatcaaggtcgtgtctcccaagtatctgggctctcggacatcggagaaggtgaagaacaa

SEQ ID NO: 18755 - DNA, 565 bp, Artificial Sequence
  derived and/or modified sequence
ctctaaaagtggggccctttggagggcagctgtgctcatctgtctgtctacacccacaatcagatagagccacgaaccccctgaacaaggagctcgactgggccagcatcaacggcttctgcgagcagctcaacgaggactttgaggggcctccactcgccacccggctgctggcccacaagatccagtccccacaggagtgggaggcgatccaggccttgacggtgctggaaacatgcatgaagagctgcggcaagcggttccacgacgaagtgggcaagttccgctttctcaacgagctcatcaaggtcgtgtctcccaagtatctgggctctcggacatcggagaaggtgaagaacaagatcttggagctcctctacagctggacagtgggcctgcccgaggaggtgaaaatcgcagaggcctaccagatgctaaagaagcaggggattgtaaagtccgaccccaagcttccagatgacactacctttccccttcctcctccacggccgaagaatgtgatctttgaagatgaggagaaatccaagatgctggcccgcctgct

SEQ ID NO: 18756 - DNA, 559 bp, Artificial Sequence
  derived and/or modified sequence
gtggaagagcaggaatcccactgccgggccacaatgaccccagctctcctcttccagatagagccacgaaccccctgaacaaggagctcgactgggccagcatcaacggcttctgcgagcagctcaacgaggactttgaggggcctccactcgccacccggctgctggcccacaagatccagtccccacaggagtgggaggcgatccaggccttgacggtgctggaaacatgcatgaagagctgcggcaagcggttccacgacgaagtgggcaagttccgctttctcaacgagctcatcaaggtcgtgtctcccaagtatctgggctctcggacatcggagaaggtgaagaacaagatcttggagctcctctacagctggacagtgggcctgcccgaggaggtgaaaatcgcagaggcctaccagatgctaaagaagcaggggattgtaaagtccgaccccaagcttccagatgacactacctttccccttcctcctccacggccgaagaatgtgatctttgaagatgaggagaaatccaagatgctggcccgcctgct

SEQ ID NO: 18757 - DNA, 566 bp, Artificial Sequence
  derived and/or modified sequence
gtgccgaggctgggggccggtggcggatggagcccgcgatggagccggagactctggaggcgcgaatcaagccacgaaccccctgaacaaggagctcgactgggccagcatcaacggcttctgcgagcagctcaacgaggactttgaggggcctccactcgccacccggctgctggcccacaagatccagtccccacaggagtgggaggcgatccaggccttgacggtgctggaaacatgcatgaagagctgcggcaagcggttccacgacgaagtgggcaagttccgctttctcaacgagctcatcaaggtcgtgtctcccaagtatctgggctctcggacatcggagaaggtgaagaacaagatcttggagctcctctacagctggacagtgggcctgcccgaggaggtgaaaatcgcagaggcctaccagatgctaaagaagcaggggattgtaaagtccgaccccaagcttccagatgacactacctttccccttcctcctccacggccgaagaatgtgatctttgaagatgaggagaaatccaagatgctggcccgcctgc

SEQ ID NO: 18758 - DNA, 483 bp, Artificial Sequence
  derived and/or modified sequence
gagcgatggaggaccccggccccggcgcggtccagcggtgggagcgggcgccgcccacctgtcggatccctgggccatgacccctgggacggcgagtgtggacatgagtggctgggatgcagtgccgtagcaggctgggggacacaaaagagaactgacccagcactgctaccctgggcaggagtagaggattagagaaggggacaccggagccactcccaagggaatgaaggctttctgaacctggtgtgatgatagagccacgaaccccctgaacaaggagctcgactgggccagcatcaacggcttctgcgagcagctcaacgaggactttgaggggcctccactcgccacccggctgctggcccacaagatccagtccccacaggagtgggaggcgatccaggccttgacggtgctggaaacatgcatgaagagctgcggcaagcggttccacgacgaagtgggcaagttccgctttct

SEQ ID NO: 18759 - DNA, 568 bp, Artificial Sequence
  derived and/or modified sequence
ggaaccggaaccgggggcacgaggcgggccccttcccggcgggggcggggggagacaggtgtggacatgagtggctgggatgcagtgccgtagcaggctgggggacacaaaagagaactgacccagcactgctaccctgggcaggagtagaggattagagaaggggacaccggagccactcccaagggaatgaaggctttctgaacctggtgtgatgagccacgaaccccctgaacaaggagctcgactgggccagcatcaacggcttctgcgagcagctcaacgaggactttgaggggcctccactcgccacccggctgctggcccacaagatccagtccccacaggagtgggaggcgatccaggccttgacggtgctggaaacatgcatgaagagctgcggcaagcggttccacgacgaagtgggcaagttccgctttctcaacgagctcatcaaggtcgtgtctcccaagtatctgggctctcggacatcggagaaggtgaagaacaagatcttggagctcctctacagctggacagtgggcctgcccgaggaggtgaaaatcgc

SEQ ID NO: 18760 - DNA, 639 bp, Artificial Sequence
  derived and/or modified sequence
gggcggggtacgggtcgccccctcctcacgccccgcccccggcccgggaggggcggtgtcctcagtcggcccctcagaccctggagcgatggaggaccccggccccggcgcggtccagcggtgggagcgggcgccgcccacctgtcggatccctgggccatgacccctgggacggcgagagtagaggattagagaaggggacaccggagccactcccaagggaatgaaggctttctgaacctggtgtgatgatagagccacgaaccccctgaacaaggagctcgactgggccagcatcaacggcttctgcgagcagctcaacgaggactttgaggggcctccactcgccacccggctgctggcccacaagatccagtccccacaggagtgggaggcgatccaggccttgacggtgctggaaacatgcatgaagagctgcggcaagcggttccacgacgaagtgggcaagttccgctttctcaacgagctcatcaaggtcgtgtctcccaagtatctgggctctcggacatcggagaaggtgaagaacaagatcttggagctcctctacagctggacagtgggcctgcccgaggaggtgaaaatcgcagaggcctaccagatgctaaagaagcaggggat

SEQ ID NO: 18761 - DNA, 1659 bp, Artificial Sequence
  derived and/or modified sequence
atggagcccgccatggagcctgagaccctggaggcccgcatcaacagagccaccaaccccctgaacaaggagctggactgggccagcatcaatggcttctgtgagcagctgaatgaagattttgagggcccccccctggccacccggctgctggcccacaagatccagagcccccaggagtgggaggccatccaggccctgactgtgctggagacctgcatgaagagctgtgggaagcgcttccatgatgaggtgggcaagttccgcttcctgaatgagctgatcaaggtggtgagccccaagtacctgggcagcaggaccagcgagaaggtgaagaacaagatcctggagctgctgtacagctggacagtgggcctgcctgaggaggtgaagattgctgaggcctaccagatgctgaagaagcagggcatcgtgaagagtgaccccaagctgcctgatgacaccaccttccccctgcccccaccccggcccaagaatgtcatctttgaagatgaggagaagagcaagatgctggcccggctgctgaagagcagccaccctgaggacctgcgggccgccaacaagctgatcaaggagatggtgcaggaggaccagaagaggatggagaagatcagcaagagggtgaatgccatcgaggaggtgaacaacaacgtgaagctgctgacagagatggtgatgagccacagccagggcggcgctgctgctggcagcagcgaggacctgatgaaggagctgtaccagagatgtgagaggatgaggcccaccctcttccggctggccagtgacacagaagataatgatgaggccctgggcctgagtgaccccaccccacccagcggccccagcctggatggcaccggctggaacagcttccagagcagtgatgccacagagcccccagccccagccctggcccaggcccccagcatggagagccggcccccagcccagaccagcctgcctgccagcagcggcctggatgacctggacctgctgggcaagaccctgctgcagcagagcctgcccccagagagccagcaggtgcgctgggagaagcagcagcccaccccccggctgaccctgcgggacctgcagaacaagagcagcagctgcagcagccccagcagcagcgccaccagcctgctgcacacagtgtccccagagccccccaggcctccccagcagcctgtgcccacagagctgagcctggccagcatcaccgtgcccctggagagcatcaagcccagcaacatcctgcctgtgacagtgtatgaccagcacggcttccgcatcctcttccactttgcccgggaccccctgcccggccgcagtgatgtgctggtggtggtggtgtccatgctgagcacagccccccagcccatcagaaatattgtgttccagagcgctgtgcccaaggtgatgaaggtgaagctgcagcccccatctggaacagagctgcctgccttcaaccccatcgtgcaccccagcgccatcacccaggtgctgctgctggccaacccccagaaggagaaggtgcggctgcgctacaagctgaccttcaccatgggagaccagacctacaatgagatgggagatgtggaccagttccccccacctgagacctggggcagcctgtag

SEQ ID NO: 18762 - DNA, 117 bp, Artificial Sequence
  derived and/or modified sequence
atgaagagctgtgggaagcgcttccatgatgaggtgggcaagttccgcttcctgaatgaactcatcaaggtggtgagccccaagtacctgggcagcaggaccagcgagaaggtgtag

SEQ ID NO: 18763 - DNA, 123 bp, Artificial Sequence
  derived and/or modified sequence
atgaagagctgtgggaagcgcttccatgatgaggtgggcaagttccgcttcctgaatgaactcatcaaggtggtgagccccaagtacctgggcagcaggaccagcgagaaggtgaagaactag

SEQ ID NO: 18764 - DNA, 330 bp, Artificial Sequence
  derived and/or modified sequence
atgaagagctgtgggaagcgcttccatgatgaggtgggcaagttccgcttcctgaatgaactcatcaaggtggtgagccccaagtacctgggcagcaggaccagcgagaaggtgaagaacaagatcctggagctgctgtacagctggacagtgggcctgcctgaggaggtgaagattgctgaggcctaccagatgctgaagaagcagggcatcgtgaagagtgaccccaagctgcctgatgacaccaccttccccctgcccccaccccggcccaagaatgtcatctttgaagatgaggagaagagcaagatgctggcccggctgctgtag

SEQ ID NO: 18765 - DNA, 327 bp, Artificial Sequence
  derived and/or modified sequence
atgaagagctgtgggaagcgcttccatgatgaggtgggcaagttccgcttcctgaatgaactcatcaaggtggtgagccccaagtacctgggcagcaggaccagcgagaaggtgaagaacaagatcctggagctgctgtacagctggacagtgggcctgcctgaggaggtgaagattgctgaggcctaccagatgctgaagaagcagggcatcgtgaagagtgaccccaagctgcctgatgacaccaccttccccctgcccccaccccggcccaagaatgtcatctttgaagatgaggagaagagcaagatgctggcccggctgtag

SEQ ID NO: 18766 - DNA, 183 bp, Artificial Sequence
  derived and/or modified sequence
atgaagagctgtgggaagcgcttccatgatgaggtgggcaagttccgcttcctgaatgaactcatcaaggtggtgagccccaagtacctgggcagcaggaccagcgagaaggtgaagaacaagatcctggagctgctgtacagctggacagtgggcctgcctgaggaggtgaagatcgcctag

SEQ ID NO: 18767 - DNA, 213 bp, Artificial Sequence
  derived and/or modified sequence
atgaagagctgtgggaagcgcttccatgatgaggtgggcaagttccgcttcctgaatgaactcatcaaggtggtgagccccaagtacctgggcagcaggaccagcgagaaggtgaagaacaagatcctggagctgctgtacagctggacagtgggcctgcctgaggaggtgaagattgctgaggcctaccagatgctgaagaagcagggctag

SEQ ID NO: 18768 - DNA, 1659 bp, Artificial Sequence
  derived and/or modified sequence
atggagcccgccatggagcccgagaccctggaggcccggatcaaccgggcaactaatcctcttaacaaagagctcgattgggcatcaatcaatgggttctgtgaacagctcaatgaagatttcgagggccctccgcttgcaacacggctgctcgcccacaagattcagagcccccaagaatgggaggctatccaagcactcacagtgcttgaaacttgtatgaagagttgcggaaaacgctttcacgatgaggtcgggaaatttagattcttgaacgagcttattaaggtggtgagcccgaaatatctgggaagtcgcacatcggaaaaagtaaagaacaagattcttgagctactatactcttggaccgtgggtctgcccgaagaagttaaaatcgcggaagcataccaaatgctcaaaaagcaggggatagtgaaaagtgatccaaagctcccggatgacacaacattccctctaccacccccaaggccgaaaaatgtgatattcgaggacgaagagaaatctaagatgctggcaagactgctgaagagtagccaccccgaggacctgcgcgcagcgaataagctgataaaggaaatggtccaggaggatcagaaacgaatggagaaaatatcaaagcgggtcaatgcaatcgaagaggttaataataacgtgaagctcttgaccgagatggttatgtctcactcccagggcggcgcagcagccgggtcatccgaggatttgatgaaagaattgtaccagcgctgtgagcggatgagaccaactttgtttcgcttggcatccgatacggaagacaacgacgaggcactcggactgagtgaccctacgccgccaagcggaccgtctctggacggcacaggctggaactcttttcagtcatcagacgccactgaaccgccggcccctgccctcgcccaggcaccatctatggaatccaggcccccggctcagacatctctcccagctagcagcggattggacgacctggacctgcttggcaagacactccttcagcaaagcctcccacccgagtctcagcaggtcagatgggaaaaacaacaacccacacctcgcctcacacttagggacttacagaataagtcttctagctgctcttcccctagcagtagtgccacctccttactgcacacggtgagccctgagccgcccagacctcctcagcagcctgtgccaaccgagctgtccctggcaagtatcaccgtccccctcgagagcattaagccttcaaacatcctgccagtgactgtatacgatcaacacgggtttaggatactattccattttgcacgcgaccctctgccagggcgatctgacgtactggtggttgtcgtgtcaatgttgagtaccgctccacagccaatacggaatatagtgtttcagtcggccgtgccaaaagtaatgaaggtaaagttacagcccccctcaggcacagagttacctgcattcaaccctatagttcacccctctgcaataacccaggtcctgttgctggccaatcctcagaaggaaaaggttaggctcagatataagttgacgtttactatgggcgaccagacctataacgagatgggtgacgtcgaccaattcccccctccagagacatggggatccttatag

SEQ ID NO: 18769 - DNA, 117 bp, Artificial Sequence
  derived and/or modified sequence
atgaagagctgcggcaagcggttccacgacgaggtgggcaagttcagatttcttaatgagctaataaaggtcgtctcccctaaatacctcggcagcagaaccagcgagaaggtgtag

SEQ ID NO: 18770 - DNA, 123 bp, Artificial Sequence
  derived and/or modified sequence
atgaagagctgcggcaagcggttccacgacgaggtgggcaagttccgctttctgaatgagctgatcaaggttgtgtcacctaagtatctcggtagcaggacatcagagaaggtaaaaaactag

SEQ ID NO: 18771 - DNA, 330 bp, Artificial Sequence
  derived and/or modified sequence
atgaagagctgcggcaagcggttccacgacgaggtgggcaagttcaggtttctcaatgagttaatcaaagttgtatcacccaaatacctcggctcaaggaccagtgaaaaagtgaaaaataaaattctggagctgctctactcctggaccgtcggtctgcctgaggaggttaaaattgccgaggcatatcaaatgctgaagaaacagggcattgtgaaaagcgacccaaagcttccagacgacactactttccccttgccgccccctcggccaaaaaatgttattttcgaggatgaggagaaaagcaaaatgctcgcgcggctattatag

SEQ ID NO: 18772 - DNA, 330 bp, Artificial Sequence
  derived and/or modified sequence
atgaagagctgcggcaagcggttccacgacgaggtgggcaagttcaggtttttaaatgaacttatcaaggtggtctctccaaaatacctcggctcccgcacaagtgagaaggtcaagaacaagatactagagctcctgtatagctggactgtcgggctacctgaagaggtgaagatcgcagaggcttaccaaatgcttaaaaaacagggaattgttaaaagcgatccaaaacttcctgacgatactacatttcctctgcccccgcctcggcccaagaacgttatttttgaggacgaagagaagtccaagatgctcgcccgccttctctag

SEQ ID NO: 18773 - DNA, 327 bp, Artificial Sequence
  derived and/or modified sequence
atgaagagctgcggcaagcggttccacgacgaggtgggcaagttccggtttctgaacgaactgattaaagtcgtcagtccgaagtatctgggttctcgcacatctgaaaaggtgaagaataagattctggagcttttgtactcatggaccgtgggtctccctgaagaagttaaaattgctgaggcctaccagatgctaaagaagcaggggatcgtgaaatccgaccctaagcttcccgacgatacaacattccctttgccacctcctagacctaaaaacgtaatttttgaggacgaggagaagtcgaaaatgttggctcgcttgtag

SEQ ID NO: 18774 - DNA, 183 bp, Artificial Sequence
  derived and/or modified sequence
atgaagagctgcggcaagcggttccacgacgaggtgggcaagttcaggtttctgaatgagttgatcaaagtggtctcccccaagtatttgggatctcgaacctccgaaaaagtcaagaacaaaatacttgagctcctctacagttggacagttgggctgcccgaagaagtcaagatcgcctag

SEQ ID NO: 18775 - DNA, 213 bp, Artificial Sequence
  derived and/or modified sequence
atgaagagctgcggcaagcggttccacgacgaggtgggcaagttcagattcttaaatgagctgataaaggtggtgtcccctaagtacttggggagcaggaccagtgaaaaggtcaagaacaagatactggagctcttgtatagctggacagtaggtttgccagaagaagtcaaaattgctgaggcttaccagatgctgaagaaacagggatag

SEQ ID NO: 18776 - DNA, 1659 bp, Artificial Sequence
  derived and/or modified sequence
atggagcctgccatggagccagaaacattagaagcacggattaatagagctacaaatcccctgaacaaggaacttgactgggcttccatcaatggattttgtgaacagttgaatgaagattttgagggacccccactggccactagattgcttgcccacaaaatccaatctccacaggagtgggaagctatacaggccctgaccgtgctcgagacttgcatgaagtcatgtggaaaaagattccacgacgaggtcggcaaattcagatttctgaacgaactgataaaggtggtcagccctaaatatttgggaagtaggacctctgagaaagttaaaaacaaaattttagagctgctctattcatggactgtcggtctccccgaggaagtgaagattgcggaggcctaccagatgctcaagaaacagggtattgtcaaaagtgatcccaagttacctgacgatacgacattcccactgccccctccccgtcccaaaaacgtcatcttcgaggacgaagaaaagtctaaaatgctggctcggctgttaaaaagctcccatcctgaggatctccgtgccgctaacaaactcattaaggaaatggttcaggaggaccaaaagaggatggagaagatcagtaagagggtcaacgctattgaagaagtcaacaataacgtgaagttattgaccgagatggttatgtcccacagccaggggggagcagccgctggttctagcgaagatctgatgaaagagctctaccaaagatgcgaacgcatgcggcctacattatttcggctggcttcagacactgaggacaatgacgaggcccttggactgagcgatcccacccctcccagcggaccaagtttagatggcactggctggaactcctttcagagctccgacgccacagagccacccgcaccagcactggcccaggctccatctatggagagtaggccaccggctcagacttccctgccagcctcctcaggacttgacgacttagacttgctgggaaaaacactgctccagcagtcactcccaccagagtctcagcaagttcgttgggagaagcagcagccaacacctcggctgactctgcgagatctacaaaataaatcttccagctgctcctccccttcttccagtgctacttcactgctgcacacagtgtcccctgagcctccgcgtccgcctcaacagcctgtacccactgaactgagtttggctagcatcactgtacctctggaaagtatcaagccgtccaacatcctgccagtgacagtttacgaccagcatgggttccggatactcttccactttgcgagggatccgcttcccggacgcagcgacgtgctggtcgtggtggtcagcatgttgagtaccgctcctcagccaatcagaaacattgtcttccagagcgctgttcccaaggtgatgaaagttaagctgcagcctccaagtggcaccgagctgcccgcattcaaccctatcgtgcaccccagcgcaatcactcaggtattgttacttgcaaatcctcagaaggaaaaggtccggttacgctataaattgaccttcacaatgggcgaccaaacttataatgagatgggtgatgtcgaccagttccctccccctgaaacatgggggagcctgtag

SEQ ID NO: 18777 - DNA, 117 bp, Artificial Sequence
  derived and/or modified sequence
atgaaatcatgcgggaagcgctttcatgacgaggttgggaaatttcgttttttaaatgagctcattaaagtggtgagccccaaatatttagggagccgcacttctgagaaggtgtag

SEQ ID NO: 18778 - DNA, 123 bp, Artificial Sequence
  derived and/or modified sequence
atgaaatcttgcggtaagcgttttcacgatgaggttgggaagttcaggttcttgaacgagctaataaaagtagtgtctcctaaatacctgggcagcagaacttctgaaaaggtaaaaaactag

SEQ ID NO: 18779 - DNA, 330 bp, Artificial Sequence
  derived and/or modified sequence
atgaagtcctgtggcaagcggttccatgacgaagtcgggaaatttcgatttcttaacgagctaatcaaggtggtgtcccccaagtacttagggtctcgcacctctgagaaggtcaaaaacaagatcctcgaacttctatacagttggacggtaggactccctgaagaggttaaaatcgcagaggcctatcagatgctgaaaaaacagggtatcgtcaagagtgatcctaagctgccggatgatacaaccttcccactcccccctccaaggcccaagaatgtgatctttgaagacgaagagaagtctaagatgttggccagactgttatag

SEQ ID NO: 18780 - DNA, 330 bp, Artificial Sequence
  derived and/or modified sequence
atgaagagctgcggtaaacgattccatgatgaagtgggcaagtttagatttctaaatgaactgattaaggtggtatctcccaagtatctcggatcccgcacttcagaaaaggtcaagaataagatcctcgaactgttatattcttggacagtgggtttgcctgaagaagtgaagatagctgaggcataccaaatgctaaagaaacagggaattgtgaagtctgaccccaagttgcccgatgatacaaccttcccattaccccctccaaggccgaaaaacgtcatcttcgaggacgaggagaagagcaagatgctcgctagactgttgtag

SEQ ID NO: 18781 - DNA, 327 bp, Artificial Sequence
  derived and/or modified sequence
atgaagagctgtggcaaacggttccatgacgaagtaggaaaatttcgatttctcaacgaactcatcaaagtggtgtcccccaaatatctgggctcgaggacctcggagaaggtaaaaaacaagattctcgagcttttgtattcatggactgtgggcctcccagaagaggtgaaaatcgcagaggcctaccagatgctgaaaaaacagggtatcgttaaatccgatccaaaactgccagacgacaccacattcccactaccgccacctagaccaaaaaatgtgatcttcgaggacgaagaaaagtccaaaatgttagctcgcctctag

SEQ ID NO: 18782 - DNA, 183 bp, Artificial Sequence
  derived and/or modified sequence
atgaaatcatgcggtaagagattccatgacgaagtaggtaagttccggttcctgaacgagttaatcaaagtagtgtcccctaagtacctgggatcgaggacctctgaaaaagtgaaaaataagatccttgaactgctctactcatggaccgtgggactgcccgaagaagtgaaaatcgcctag

SEQ ID NO: 18783 - DNA, 213 bp, Artificial Sequence
  derived and/or modified sequence
atgaaaagttgcggaaagagatttcatgatgaagttgggaaatttaggttcctgaacgagcttatcaaggtcgtgagtcctaaataccttgggagccggacttctgagaaggtaaagaacaagatcctggagcttctgtattcgtggacagtaggtctcccagaagaagtaaagatagcagaggcctaccaaatgttaaaaaagcagggatag

SEQ ID NO: 18784 - DNA, 1659 bp, Artificial Sequence
  derived and/or modified sequence
atggagcccgccatggagcccgagaccctggaggccagaatcaacagagccaccaaccccctgaacaaggagctggactgggccagcatcaacggcttctgcgagcagctgaacgaggacttcgagggcccccccctggccaccagactgctggcccacaagatccagagcccccaggagtgggaggccatccaggccctgaccgtgctggagacctgcatgaagagctgcggcaagagattccacgacgaggtgggcaagttcagattcctgaacgagctgatcaaggtggtgagccccaagtacctgggcagcagaaccagcgagaaggtgaagaacaagatcctggagctgctgtacagctggaccgtgggcctgcccgaggaggtgaagatcgccgaggcctaccagatgctgaagaagcagggcatcgtgaagagcgaccccaagctgcccgacgacaccaccttccccctgcccccccccagacccaagaacgtgatcttcgaggacgaggagaagagcaagatgctggccagactgctgaagagcagccaccccgaggacctgagagccgccaacaagctgatcaaggagatggtgcaggaggaccagaagagaatggagaagatcagcaagagagtgaacgccatcgaggaggtgaacaacaacgtgaagctgctgaccgagatggtgatgagccacagccagggcggcgccgccgccggcagcagcgaggacctgatgaaggagctgtaccagagatgcgagagaatgagacccaccctgttcagactggccagcgacaccgaggacaacgacgaggccctgggcctgagcgaccccaccccccccagcggccccagcctggacggcaccggctggaacagcttccagagcagcgacgccaccgagccccccgcccccgccctggcccaggcccccagcatggagagcagaccccccgcccagaccagcctgcccgccagcagcggcctggacgacctggacctgctgggcaagaccctgctgcagcagagcctgccccccgagagccagcaggtgagatgggagaagcagcagcccacccccagactgaccctgagagacctgcagaacaagagcagcagctgcagcagccccagcagcagcgccaccagcctgctgcacaccgtgagccccgagccccccagacccccccagcagcccgtgcccaccgagctgagcctggccagcatcaccgtgcccctggagagcatcaagcccagcaacatcctgcccgtgaccgtgtacgaccagcacggcttcagaatcctgttccacttcgccagagaccccctgcccggcagaagcgacgtgctggtggtggtggtgagcatgctgagcaccgccccccagcccatcagaaacatcgtgttccagagcgccgtgcccaaggtgatgaaggtgaagctgcagccccccagcggcaccgagctgcccgccttcaaccccatcgtgcaccccagcgccatcacccaggtgctgctgctggccaacccccagaaggagaaggtgagactgagatacaagctgaccttcaccatgggcgaccagacctacaacgagatgggcgacgtggaccagttccccccccccgagacctggggcagcctgtag

SEQ ID NO: 18785 - DNA, 117 bp, Artificial Sequence
  derived and/or modified sequence
atgaagagctgcggcaagagattccacgacgaggtgggcaagttcagattcctgaacgagctgatcaaggtggtgagccccaagtacctgggcagcagaaccagcgagaaggtgtag

SEQ ID NO: 18786 - DNA, 123 bp, Artificial Sequence
  derived and/or modified sequence
atgaagagctgcggcaagagattccacgacgaggtgggcaagttcagattcctgaacgagctgatcaaggtggtgagccccaagtacctgggcagcagaaccagcgagaaggtgaagaactag

SEQ ID NO: 18787 - DNA, 330 bp, Artificial Sequence
  derived and/or modified sequence
atgaagagctgcggcaagagattccacgacgaggtgggcaagttcagattcctgaacgagctgatcaaggtggtgagccccaagtacctgggcagcagaaccagcgagaaggtgaagaacaagatcctggagctgctgtacagctggaccgtgggcctgcccgaggaggtgaagatcgccgaggcctaccagatgctgaagaagcagggcatcgtgaagagcgaccccaagctgcccgacgacaccaccttccccctgcccccccccagacccaagaacgtgatcttcgaggacgaggagaagagcaagatgctggccagactgctgtag

SEQ ID NO: 18788 - DNA, 327 bp, Artificial Sequence
  derived and/or modified sequence
atgaagagctgcggcaagagattccacgacgaggtgggcaagttcagattcctgaacgagctgatcaaggtggtgagccccaagtacctgggcagcagaaccagcgagaaggtgaagaacaagatcctggagctgctgtacagctggaccgtgggcctgcccgaggaggtgaagatcgccgaggcctaccagatgctgaagaagcagggcatcgtgaagagcgaccccaagctgcccgacgacaccaccttccccctgcccccccccagacccaagaacgtgatcttcgaggacgaggagaagagcaagatgctggccagactgtag

SEQ ID NO: 18789 - DNA, 183 bp, Artificial Sequence
  derived and/or modified sequence
atgaagagctgcggcaagagattccacgacgaggtgggcaagttcagattcctgaacgagctgatcaaggtggtgagccccaagtacctgggcagcagaaccagcgagaaggtgaagaacaagatcctggagctgctgtacagctggaccgtgggcctgcccgaggaggtgaagatcgcctag

SEQ ID NO: 18790 - DNA, 213 bp, Artificial Sequence
  derived and/or modified sequence
atgaagagctgcggcaagagattccacgacgaggtgggcaagttcagattcctgaacgagctgatcaaggtggtgagccccaagtacctgggcagcagaaccagcgagaaggtgaagaacaagatcctggagctgctgtacagctggaccgtgggcctgcccgaggaggtgaagatcgccgaggcctaccagatgctgaagaagcagggctag

SEQ ID NO: 18791 - protein, 456 aa, Artificial Sequence
  derived and/or modified sequence
MASALSLGNKCDPFLRCVLCRGGGALQGPRGRGPDDFESQLSPPGSARRLVRSKRACGNPPDAFGLSRASVHPPLPRVSIGCSSGPGRAKRERVGGAAWRQRKMAASAAVFSRLRSGLRLGSRGLCTRLATPPRRAPDQAAEIGSRGSTKAQGPQQQPGSEGPSYAKKVALWLAGLLGAGGTVSVVYIFGNNPVDENGAKIPDEFDNDPILVQQLRRTYKYFKDYRQMIIEPTSPCLLPDPLQEPYYQPPYTLVLELTGVLLHPEWSLATGWRFKKRPGIETLFQQLAPLYEIVIFTSETGMTAFPLIDSVDPHGFISYRLFRDATRYMDGHHVKDISCLNRDPARVVVVDCKKEAFRLQPYNGVALRPWDGNSDDRVLLDLSAFLKTIALNGVEDVRTVLEHYALEDDPLAAFKQRQSRLEQEEQQRLAELSKSNKQNLFLGSLTSRLWPRSKQP

SEQ ID NO: 18792 - protein, 240 aa, Artificial Sequence
  derived and/or modified sequence
MVPRFLMSSTMMIIEPTSPCLLPDPLQEPYYQPPYTLVLELTGVLLHPEWSLATGWRFKKRPGIETLFQQLAPLYEIVIFTSETGMTAFPLIDSVDPHGFISYRLFRDATRYMDGHHVKDISCLNRDPARVVVVDCKKEAFRLQPYNGVALRPWDGNSDDRVLLDLSAFLKTIALNGVEDVRTVLEHYALEDDPLAAFKQRQSRLEQEEQQRLAELSKSNKQNLFLGSLTSRLWPRSKQP

SEQ ID NO: 18793 - DNA, 1371 bp, Artificial Sequence
  derived and/or modified sequence
atggccagcgccctgagcctgggcaacaagtgcgaccccttcctgagatgcgtgctgtgcagaggcggcggcgccctgcagggccccagaggcagaggccccgacgacttcgagagccagctgagcccccccggcagcgccagaagactggtgagaagcaagagagcctgcggcaacccccccgacgccttcggcctgagcagagccagcgtgcacccccccctgcccagagtgagcatcggctgcagcagcggccccggcagagccaagagagagagagtgggcggcgccgcctggagacagagaaagatggccgccagcgccgccgtgttcagcagactgagaagcggcctgagactgggcagcagaggcctgtgcaccagactggccaccccccccagaagagcccccgaccaggccgccgagatcggcagcagaggcagcaccaaggcccagggcccccagcagcagcccggcagcgagggccccagctacgccaagaaggtggccctgtggctggccggcctgctgggcgccggcggcaccgtgagcgtggtgtacatcttcggcaacaaccccgtggacgagaacggcgccaagatccccgacgagttcgacaacgaccccatcctggtgcagcagctgagaagaacctacaagtacttcaaggactacagacagatgatcatcgagcccaccagcccctgcctgctgcccgaccccctgcaggagccctactaccagcccccctacaccctggtgctggagctgaccggcgtgctgctgcaccccgagtggagcctggccaccggctggagattcaagaagagacccggcatcgagaccctgttccagcagctggcccccctgtacgagatcgtgatcttcaccagcgagaccggcatgaccgccttccccctgatcgacagcgtggacccccacggcttcatcagctacagactgttcagagacgccaccagatacatggacggccaccacgtgaaggacatcagctgcctgaacagagaccccgccagagtggtggtggtggactgcaagaaggaggccttcagactgcagccctacaacggcgtggccctgagaccctgggacggcaacagcgacgacagagtgctgctggacctgagcgccttcctgaagaccatcgccctgaacggcgtggaggacgtgagaaccgtgctggagcactacgccctggaggacgaccccctggccgccttcaagcagagacagagcagactggagcaggaggagcagcagagactggccgagctgagcaagagcaacaagcagaacctgttcctgggcagcctgaccagcagactgtggcccagaagcaagcagccctag

SEQ ID NO: 18794 - DNA, 1371 bp, Artificial Sequence
  derived and/or modified sequence
atggcctctgcgctgagcttaggcaataagtgtgatcccttcctaagatgtgtgttgtgcagaggtggaggagctctgcaggggcccaggggcagaggacccgatgatttcgagtcacagcttagccctccgggcagcgcaaggaggttggtgagatcaaagagagcttgtgggaacccacctgacgcctttggtctatctagggcgagcgtgcaccctcctttgcctcgagtgtcaatcggatgctccagcggtccaggacgagcaaagagagagcgcgtgggtggcgccgcttggcggcagcgaaagatggctgcttccgctgcagtctttagccggctgagaagtggtttgcggctcggctcccgaggcctgtgtacacgcctcgccacccccccgcgcagagcaccagatcaagcagccgagatcggcagtagggggagtacaaaagctcagggtccacagcagcagcctggtagtgaggggccatcatacgcgaaaaaagtcgcattgtggcttgctgggctcctgggggcaggggggacagtaagcgtcgtatatatttttggaaataatccggtcgacgagaatggtgcaaagatacctgacgagtttgataatgaccccatccttgttcagcagcttagacggacttataaatacttcaaggactatagacaaatgataatcgagcccacatctccctgcctgctgccggacccattacaagaaccctactatcaaccaccgtatactctcgtcctcgaactgaccggagttttgctgcaccctgagtggtcattggctaccggctggcgatttaaaaaaaggcctggaatcgaaactctctttcagcagttagctccattgtatgaaatagttatctttacctcggaaactggtatgacagccttccctcttattgatagtgttgacccacatggcttcatctcctatagacttttcagggatgctacccgttacatggatggtcaccacgtcaaggacataagctgcctgaatcgggacccagctcgggttgtggtcgtcgattgcaaaaaggaagcattccgcctgcagccatacaatggtgtggccctcagaccatgggatggaaatagcgacgatcgggtcctactcgatctgagcgcatttcttaaaacaatcgctctgaacggcgtggaagatgtccggaccgtcctcgagcattacgccctggaggacgacccccttgcggcgttcaagcaaagacagagcaggcttgaacaggaagagcaacagcgcctggccgagctatctaagtcaaacaagcagaatctcttccttggaagtctgacttctaggctgtggcctagatcaaaacaaccttag

SEQ ID NO: 18795 - DNA, 1371 bp, Artificial Sequence
  derived and/or modified sequence
atggccagcgccctgagcctgggcaacaagtgtgaccccttcctgcgctgtgtgctgtgccggggcggcggggccctgcagggcccccggggccggggcccagatgactttgagagccagctgagccccccaggcagcgcccggcggctggtgcgcagcaagagggcctgtggcaaccccccagatgccttcggcctgagccgggcctctgtgcacccccccctgccccgggtgtccatcggctgcagcagcggccctggccgggccaagcgggagcgggtgggcggggccgcctggaggcagaggaagatggccgccagcgctgctgtgttcagccggctgcggagcggcctgcggctgggcagccggggcctgtgcacccggctggccaccccaccccggcgggccccagaccaggccgctgagatcggcagccggggcagcaccaaggcccagggcccccagcagcagcccggcagcgagggccccagctatgccaagaaggtggccctgtggctggccggcctgctgggcgccggcggcaccgtgtctgtggtgtacatctttggaaacaaccctgtggatgaaaatggagccaagatcccagatgaatttgacaatgaccccatcctggtgcagcagctgcggaggacctacaagtacttcaaggactaccggcagatgatcatcgagcccaccagcccctgcctgctgcctgaccccctgcaggagccctactaccagcccccctacaccctggtgctggagctgactggagtgctgctgcaccctgagtggagcctggccaccggctggaggttcaagaagaggcctggcatcgagaccctcttccagcagctggcccccctgtatgaaattgtcatcttcaccagcgagaccggcatgacagccttccccctgattgacagcgtggacccccacggcttcatctcctaccgcctcttcagagatgccacccgctacatggatggccaccacgtgaaggacatcagctgcctgaacagagatcctgcccgggtggtggtggtggactgcaagaaggaggccttccggctgcagccctacaatggagtggccctgcggccctgggatggcaacagtgatgacagagtgctgctggacctgagcgccttcctgaagaccatcgccctgaatggagtggaggatgtgaggacagtgctggagcactacgccctggaggatgaccccctggccgccttcaagcagaggcagagccggctggagcaggaggagcagcagaggctggccgagctgagcaagagcaacaagcagaacctcttcctgggcagcctgaccagccggctgtggcccaggagcaagcagccctag

SEQ ID NO: 18796 - DNA, 1371 bp, Artificial Sequence
  derived and/or modified sequence
atggccagcgccctgagcctgggcaacaagtgcgaccccttcctgcggtgtgtgctgtgtagaggcggcggcgctctgcagggccctagaggacgcgggccagatgattttgaaagccagttgtcccctcctggaagcgcaagaaggcttgtccggagcaagcgggcttgtggcaatcctcccgatgccttcggtctgagtcgagcctccgtgcacccccccctgcccagagtctcaattggttgtagttcagggcccgggcgggccaagagggaaagagtcggcggagctgcctggaggcaaaggaaaatggcggccagtgctgcagtcttttcccggctgaggtccggcctgcgtcttggctcccgcgggctgtgtacccgactggccacaccgccacgacgagcccctgaccaggctgcagaaatcggatcaagaggatccacaaaggcacaaggtccccagcaacagcctgggtctgagggcccatcatacgcaaagaaggtagccctgtggcttgccggcctgctgggggccggtggaaccgtttctgttgtttatatctttgggaacaatcccgttgacgagaacggagccaaaatacctgacgagttcgacaatgatcctatcctggtccaacagctgcgcaggacctacaaatattttaaagactacagacagatgatcatcgagcccacgagcccttgcctgttgccggaccctctccaggagccttattatcaacctccctataccttggtgctcgagctgactggcgttctcctgcacccagagtggtctctggcaacaggctggaggtttaagaagcggccagggatagagacgttattccagcagctcgcccccctgtacgagatagtaattttcacttctgaaaccgggatgaccgctttcccactgattgattcggtcgatccccacggatttatttcgtataggctcttccgggacgccacccgatacatggacggccaccacgtaaaggacatttcctgcctgaatagggacccagcgcgcgtcgtcgtggttgactgtaaaaaagaggcctttcgccttcagccttataatggtgtcgcccttaggccctgggatggaaatagcgatgaccgcgtactgctggatctgagcgctttcctgaaaaccattgccctgaacggggtcgaggatgttcggaccgtcttagaacactatgccctggaagacgatccactggccgcattcaaacagcgtcagtctagattggaacaggaagaacaacagcgactggcggagctgagtaagagtaataaacagaatctgttcctaggctctcttacctcgaggctctggcctaggagcaagcaaccatag

SEQ ID NO: 18797 - DNA, 1371 bp, Artificial Sequence
  derived and/or modified sequence
atggcatcagctctgtcactgggcaacaagtgcgatccctttctgcggtgcgtgttgtgtagggggggaggtgcactccaaggcccacgcggtcgagggccagacgatttcgagagtcagctgtcaccacccggttccgccagaaggctggtccggtccaagagggcctgtggaaacccacctgatgcatttggtcttagccgggcttccgtgcacccccctctgcctcgagtgtcgatcggctgctcgtctgggcctggtagggccaagcgtgaaagggtgggcggtgctgcttggagacaacggaaaatggctgcttccgccgctgtgttctctagactccggtcaggcctgaggctcgggtctcggggtctgtgcactaggctcgccactccacctagacgggcaccggaccaggcagcagagatcggtagccgcggttccaccaaagctcagggcccacagcagcagccaggctccgaaggccctagctacgctaagaaggtcgcactatggctcgcagggctgctcggagcgggtgggaccgtctccgtggtctatatcttcggtaataaccccgtggacgaaaatggtgcaaagataccggatgagttcgataatgatccaattttggttcagcaactgagacgcacatacaagtattttaaggactatcggcagatgataatcgagcccacttccccatgcctgctgcccgatcccctccaggagccctattatcagcctccgtataccttggtgctggaactgaccggggtccttcttcaccctgagtggtcgctagccaccggctggaggtttaagaaacgtcccggtatcgaaacactgttccagcagctagcaccattatacgagatcgtcatcttcacctcagagacaggaatgactgcatttccactgattgactccgtggaccctcacgggtttatatcctatagattattcagagatgctaccaggtatatggatggccaccacgttaaagacatatcttgcctgaaccgtgatccagctcgggtggtagtggtcgactgcaaaaaggaggcctttaggcttcagccgtataacggcgtcgcactgcggccatgggacgggaactcagatgatagagtcctacttgacttatcagccttcctgaagacgattgcccttaacggcgtggaggatgttaggaccgtactggaacactatgccctcgaggacgaccctctcgccgcattcaaacagaggcagtctcgactagaacaagaagaacaacaacggctggctgaactttcgaagtcaaacaagcagaacttgtttctgggaagtctcacaagccgcctctggccacgctcgaagcaaccgtag

SEQ ID NO: 18798 - DNA, 2572 bp, Artificial Sequence
  derived and/or modified sequence
acaggtgtggaggggcaacccatcccttcagacaattgggaggtgagggccgattgccttacacggtgagacaagcggcctgactcgtgactatttttttggacaaatcaggcagccactgactcccttcattatggcctcagctttatctctgggcaataagtgtgatcccttccttcgctgcgtcctttgcaggggcggtggcgctctgcaaggcccaagggggcgtggtccagatgactttgaatcccagttgtcgcccccagggtcagccaggagactagtcagaagcaaacgcgcctgcggcaatccgcccgatgcctttggtctctctcgggcttccgtccacccgcccctcccccgcgtttccattggctgtagctccggcccggggcgggcgaagagggagcgagtgggcggggccgcgtggcgtcagcgcaagatggcggcctcggcagcggtgttctcgcgcttgcgaagcgggctccggctcggctcgcggggactgtgcacgaggttggcgacgccgccccgccgggccccagatcaggccgcagagatcgggagccgcgggagcactaaggcgcaagggccacagcagcagccgggctcagagggtcccagctatgccaaaaaagttgcgctctggcttgctgggctgcttggagctggtgggactgtgagcgtcgtctatatctttggaaacaacccggtggacgaaaatggtgccaagattcctgatgagttcgacaatgatccaattctggtacagcagttgcgccggacatacaaatatttcaaagattatagacagatgatcatcgagcccaccagcccttgccttctcccagaccctctgcaggaaccgtactaccagccaccctacacgctcgttttggagctcaccggcgtcctcttgcatcctgagtggtcgctggccactggctggaggtttaagaagcgcccaggcatcgagaccttgttccagcagcttgcccctttatatgaaattgtcatctttacgtcagagactggcatgactgcgtttccactcattgatagtgtggacccccatggcttcatctcctaccgcctattccgggacgccacaagatacatggatggacaccatgtaaaggatatttcatgtctgaatcgggacccagctcgagtagtagttgtggactgcaagaaggaagccttccgcctgcagccctataacggcgttgccctgcggccctgggacggcaactctgatgaccgggtcttgttggatctgtctgccttcctcaagaccattgcactgaatggtgtggaggacgtgcgaaccgtgctggagcactatgccctggaggatgacccgctggcggctttcaaacagcggcaaagccggctagagcaggaggagcagcagcgcctggccgagctctccaagtccaacaagcagaacctcttccttggctccctcaccagccgcttgtggcctcgctccaaacagccctgaactctgggcctcctcaaactcagtgcctgggtccagggccccagtgcttccagaccaagacttgggccaccacttgtccaataaagtacatcccagacgccacacctgctgtgtcccgagagtctccagatgggggcatcagggtgaggtccgggactcttgggtcatcgtcccacagtggctgatcggctgccaagcacagtgggggtgctttgttggatcagagcagatttttcaccctggtctcggaatctaaaaaccctcgctgtgtcttcctgtgtgttgcgtgatctgtgaaaaatacatctccctctgaccacagactcctcatctgtggagaagggaagagaggatggcacttggctttaaagacaggtagctgccaggctactgtggagagaatgtgttatgggcctagtgggcctctggtggaccagagattacccctctcaacaggccagctgctggttggctccagccagtgtggccctggggtaaagggggcctggagttgcttgacacgccagttgttcaaaagaagcaagaacttgggaatattttttttttttttttgagacagggtctcactgttgcccaggctggagtgcattgatgtgatcttagcttacaacagccttgacctcccggctcaagtgatctccaagtgaccctcctgcctcagcctcctgagtaccctcctggggactacaggtgcgtgctaccatacccagctaatttaaacaaattttttttttgtagagatggggtcttggtgcccaagctggtctcaaactcctagtcttaagcaatcttcctgctttggcctcccaaagcgctaggattccaggtgtgagctactgtgcccagctaaaatagggatttttatattaaatctccctattttaaaatgttggctcctagcggggcgcagtggctcacgcctgtaatcccagcactttgggaggctgaggtgggtggatcacctgaggtcaggagttcaagaccagcctcaacatggagaaaccccatctctactaaaaatacaaaattagctgggcgtggtggagc

SEQ ID NO: 18799 - protein, 533 aa, Artificial Sequence
  derived and/or modified sequence
MGSGSSSYRPKAIYLDIDGRIQKVIFSKYCNSSDIMDLFCIATGLPRNTTISLLTTDDAMVSIDPTMPANSERTPYKVRPVAIKQLSEREELIQSVLAQVAEQFSRAFKINELKAEVANHLAVLEKRVELEGLKVVEIEKCKSDIKKMREELAARSSRTNCPCKYSFLDNHKKLTPRRDVPTYPKYLLSPETIEALRKPTFDVWLWEPNEMLSCLEHMYHDLGLVRDFSINPVTLRRWLFCVHDNYRNNPFHNFRHCFCVAQMMYSMVWLCSLQEKFSQTDILILMTAAICHDLDHPGYNNTYQINARTELAVRYNDISPLENHHCAVAFQILAEPECNIFSNIPPDGFKQIRQGMITLILATDMARHAEIMDSFKEKMENFDYSNEEHMTLLKMILIKCCDISNEVRPMEVAEPWVDCLLEEYFMQSDREKSEGLPVAPFMDRDKVTKATAQIGFIKFVLIPMFETVTKLFPMVEEIMLQPLWESRDRYEELKRIDDAMKELQKKTDSLTSGATEKSRERSRDVKNSEGDCA

SEQ ID NO: 18800 - protein, 465 aa, Artificial Sequence
  derived and/or modified sequence
MDLFCIATGLPRNTTISLLTTDDAMVSIDPTMPANSERAFKINELKAEVANHLAVLEKRVELEGLKVVEIEKCKSDIKKMREELAARSSRTNCPCKYSFLDNHKKLTPRRDVPTYPKYLLSPETIEALRKPTFDVWLWEPNEMLSCLEHMYHDLGLVRDFSINPVTLRRWLFCVHDNYRNNPFHNFRHCFCVAQMMYSMVWLCSLQEKFSQTDILILMTAAICHDLDHPGYNNTYQINARTELAVRYNDISPLENHHCAVAFQILAEPECNIFSNIPPDGFKQIRQGMITLILATDMARHAEIMDSFKEKMENFDYSNEEHMTLLKMILIKCCDISNEVRPMEVAEPWVDCLLEEYFMQSDREKSEGLPVAPFMDRDKVTKATAQIGFIKFVLIPMFETVTKLFPMVEEIMLQPLWESRDRYEELKRIDDAMKELQKKTDSLTSGATEKSRERSRDVKNSEGDCA

SEQ ID NO: 18801 - DNA, 1602 bp, Artificial Sequence
  derived and/or modified sequence
atgggaagcgggtcatcgagttacagacccaaagccatctacttagatatagacggccgtatccagaaagttatcttttcaaagtattgcaacagttctgacataatggatttattttgtattgcgactggcctcccccggaacacaaccatttccctgttaactaccgatgatgccatggtctctatcgatccaaccatgccagccaactcagaacggacaccctataaggtgcggcctgtggcaattaaacagctgtcagagcgtgaggaattaattcagtctgtgctcgcacaggttgcagaacagttttctcgggctttcaagattaatgagttaaaggccgaagttgctaaccatctcgccgtgctcgagaagcgtgttgagctggaggggctgaaggtcgtcgaaatcgagaaatgcaaatcagacattaaaaagatgagagaagagttggcagccagaagctcccgcacgaattgcccatgcaagtacagtttccttgacaatcataaaaaacttacaccacgacgggatgttcccacgtaccctaaatacctactgagccctgaaaccattgaagccctgcgcaagccaactttcgatgtgtggctgtgggaacccaatgaaatgttatcgtgtctggagcatatgtatcacgatctcggcctggtgagggacttttccatcaaccctgtcaccctaaggcgctggctgttctgcgttcacgacaattatcgtaataatcctttccataatttcagacactgcttttgtgtggcccaaatgatgtacagcatggtctggctgtgcagcttgcaggagaaattttcacagaccgacatactgatcttgatgactgccgccatctgtcatgatctggatcacccggggtataacaacacctatcaaatcaacgctcggacggagctcgcggtgcgttataacgacataagtccgttggaaaaccatcactgtgccgttgctttccaaattctggcggaacctgagtgtaacatcttctccaatattccacctgatggctttaagcagatccgacagggcatgatcacactcattctggctaccgacatggcacgccacgccgaaatcatggatagtttcaaagagaagatggagaactttgactatagtaatgaggagcatatgacgctcctgaaaatgatcttgattaaatgctgcgacatcagtaacgaggttagaccgatggaagtggccgagccttgggtggactgtcttttagaagagtacttcatgcagtcagatagggagaagagtgaaggactgcctgtcgctcctttcatggaccgagataaggtcactaaggcgaccgcccagatcggcttcatcaagtttgtgctcattcccatgttcgagaccgttaccaaactgttccctatggtggaggaaattatgctccagccactatgggagtctcgggatcgctacgaagagttgaaacgaattgatgacgctatgaaggaactgcagaagaaaacagactctctaacctctggtgccaccgagaagtcaagggagagaagtcgagatgtgaagaactccgagggagattgcgcctag

SEQ ID NO: 18802 - DNA, 1398 bp, Artificial Sequence
  derived and/or modified sequence
atggatctgttctgcatcgccaccggacttccgagaaatacaaccatctctttgctgaccaccgacgatgccatggttagcattgaccccaccatgcctgccaacagcgagcgcgccttcaaaattaatgagttgaaggcagaggtggccaatcatttagcagtgctcgagaagagagttgaactcgaaggtctcaaggtggtggagattgagaaatgcaaatccgacattaagaagatgcgcgaggaactcgcagcaaggtcttctcgcacgaactgcccttgcaaatactctttcctcgataaccacaaaaaactgactcctcgaagagacgtccctacctaccctaaatacctcttaagccccgagaccattgaggcgctccggaaaccaactttcgatgtctggttatgggaaccgaacgagatgctgtcatgcttggagcatatgtatcatgatcttggtctggttcgtgacttctcgatcaacccggtgactctgagacgttggcttttctgcgtgcacgataattatagaaataacccgtttcacaacttcaggcactgtttctgcgtggctcaaatgatgtacagtatggtgtggttatgctcactccaggagaagtttagccagacagacatattaatcttgatgacagccgccatttgccacgacctggatcaccctggctacaacaatacttatcagatcaatgcacgtacggagcttgcagtgagatacaatgatatttcccctctggaaaatcaccattgcgccgtggctttccagattctagccgaaccggagtgtaacatcttcagcaatatccctcccgacgggtttaagcagattcgtcaaggcatgattacactgattttagccacagacatggcccggcacgccgagattatggattcattcaaagagaaaatggagaactttgactactctaatgaggaacatatgactctgctgaaaatgatcctgattaaatgctgtgacatttccaacgaggttagacctatggaagtcgctgagccatgggtggactgtctcctggaggagtattttatgcagtcagatagggagaagagtgaaggtttaccggtcgccccattcatggaccgcgacaaggtgacaaaggcaaccgcacaaatcggcttcatcaagttcgttcttattccaatgtttgaaaccgtgacgaagttgttccccatggtggaggaaatcatgctgcagcccctctgggaaagccgggatcggtatgaagaactgaaacgtatcgacgacgctatgaaggagctgcagaagaagacggatagcttgactagcggtgccacagaaaagtctagagagagaagcagggatgtgaaaaacagtgagggcgactgcgcttag

SEQ ID NO: 18803 - DNA, 1602 bp, Artificial Sequence
  derived and/or modified sequence
atgggcagcggcagcagcagctaccggcccaaggccatctacctggacattgatggccgcatccagaaggtgatcttcagcaagtactgcaacagcagtgacatcatggacctcttctgcatcgccaccggcctgcccaggaacaccaccatcagcctgctgaccacagatgatgccatggtgtccattgaccccaccatgcctgccaacagcgagaggaccccctacaaggtgcggcctgtggccatcaagcagctgtctgagcgggaggagctgatccagagcgtgctggcccaggtggccgagcagttcagccgggccttcaagatcaatgagctgaaggccgaggtggccaaccacctggccgtgctggagaagagggtggagctggagggcctgaaggtggtggagattgagaagtgcaagagtgacatcaagaagatgagggaggagctggccgcccggagcagcaggaccaactgcccctgcaagtacagcttcctggacaaccacaagaagctgaccccaagaagagatgtgcccacctaccccaagtacctgctgagccctgagaccatcgaggccctgaggaagcccacctttgatgtgtggctgtgggagcccaatgagatgctgagctgcctggagcacatgtaccatgacctgggcctggtgcgggacttcagcatcaaccctgtgaccctgcggcgctggctgttctgtgtgcatgacaactacagaaacaaccccttccacaacttccgccactgcttctgtgtggcccagatgatgtacagcatggtgtggctgtgcagcctgcaggagaagttcagccagacagacatcctgatcctgatgacagctgccatctgccacgacctggaccaccctggctacaacaacacctaccagatcaatgccaggacagagctggccgtgcgctacaatgacatcagccccctggagaaccaccactgtgctgtggccttccagatcctggccgagcctgagtgcaacatcttcagcaacatccccccagatggcttcaagcagatccggcagggcatgatcaccctcatcctggccacagacatggcccggcatgctgagatcatggacagcttcaaggagaagatggagaactttgactacagcaatgaggagcacatgaccctgctgaagatgatcctgatcaagtgctgtgacatcagcaatgaggtgcggcccatggaggtggccgagccctgggtggactgcctgctggaggagtacttcatgcagagcgaccgggagaagtctgagggcctgcctgtggcccccttcatggaccgggacaaggtgaccaaggccacagcccagatcggcttcatcaagtttgtgctgatccccatgtttgaaacagtgaccaagctgttccccatggtggaggagatcatgctgcagcccctgtgggagagccgggacagatatgaggagctgaagagaattgatgatgccatgaaggagctgcagaagaagacagacagcctgaccagcggggccacagagaagagccgggagaggagcagagatgtgaagaacagcgagggggactgtgcctag

SEQ ID NO: 18804 - DNA, 1398 bp, Artificial Sequence
  derived and/or modified sequence
atggacctcttctgcatcgccaccggcctgcccaggaacaccaccatcagcctgctgaccacagatgatgccatggtgtccattgaccccaccatgcctgccaacagcgagcgggccttcaagatcaatgagctgaaggccgaggtggccaaccacctggccgtgctggagaagagggtggagctggagggcctgaaggtggtggagattgagaagtgcaagagtgacatcaagaagatgagggaggagctggccgcccggagcagcaggaccaactgcccctgcaagtacagcttcctggacaaccacaagaagctgaccccaagaagagatgtgcccacctaccccaagtacctgctgagccctgagaccatcgaggccctgaggaagcccacctttgatgtgtggctgtgggagcccaatgagatgctgagctgcctggagcacatgtaccatgacctgggcctggtgcgggacttcagcatcaaccctgtgaccctgcggcgctggctgttctgtgtgcatgacaactacagaaacaaccccttccacaacttccgccactgcttctgtgtggcccagatgatgtacagcatggtgtggctgtgcagcctgcaggagaagttcagccagacagacatcctgatcctgatgacagctgccatctgccacgacctggaccaccctggctacaacaacacctaccagatcaatgccaggacagagctggccgtgcgctacaatgacatcagccccctggagaaccaccactgtgctgtggccttccagatcctggccgagcctgagtgcaacatcttcagcaacatccccccagatggcttcaagcagatccggcagggcatgatcaccctcatcctggccacagacatggcccggcatgctgagatcatggacagcttcaaggagaagatggagaactttgactacagcaatgaggagcacatgaccctgctgaagatgatcctgatcaagtgctgtgacatcagcaatgaggtgcggcccatggaggtggccgagccctgggtggactgcctgctggaggagtacttcatgcagagcgaccgggagaagtctgagggcctgcctgtggcccccttcatggaccgggacaaggtgaccaaggccacagcccagatcggcttcatcaagtttgtgctgatccccatgtttgaaacagtgaccaagctgttccccatggtggaggagatcatgctgcagcccctgtgggagagccgggacagatatgaggagctgaagagaattgatgatgccatgaaggagctgcagaagaagacagacagcctgaccagcggggccacagagaagagccgggagaggagcagagatgtgaagaacagcgagggggactgtgcctag

SEQ ID NO: 18805 - DNA, 1602 bp, Artificial Sequence
  derived and/or modified sequence
atgggcagcggcagcagcagctaccggcccaaggccatctacctggacatcgacggtagaatacagaaagtgattttttcaaaatattgcaactccagcgatatcatggatctgttctgtatcgctaccgggctgccccgcaatacaaccatttctcttctaacaactgatgacgccatggtgagtatcgatcccactatgcctgccaattcagagcggacgccctataaggtgcgccccgtcgctataaaacagttgtcggagcgagaagaactgattcagtccgtgctggcccaggtggcagagcaatttagcagagcatttaaaatcaatgaattgaaggctgaggtcgccaaccacctcgccgtcctggaaaaacgggtggagctagagggactgaaagtcgtcgagatcgagaaatgtaagtctgatatcaagaagatgagggaagagcttgccgcccgcagtagccgaaccaattgtccatgcaaatatagctttctggataaccacaagaagcttaccccgagacgggacgtaccaacttatcctaaatacctgctgtcccccgaaaccatcgaagcccttcggaagccgactttcgatgtttggctgtgggagcccaatgagatgttatcttgcctagagcatatgtaccacgatcttggcctggtgcgggattttagcattaatccagtgacacttagaagatggttattctgcgtacacgacaactaccgaaataatccattccacaactttcggcattgtttttgtgtggcacagatgatgtattccatggtttggctgtgctctctgcaggagaagttctcccagacagatattctgatcctgatgaccgctgctatctgccacgaccttgaccacccaggttataataacacataccaaattaatgccaggaccgagctggctgtacgctacaatgacatcagccccctggaaaaccatcattgtgctgtggcctttcagatcctggccgagcccgagtgtaatatcttttccaacatcccccctgatggctttaagcagatcaggcagggcatgattacactgattttggccactgacatggcccgacacgccgagattatggattcgttcaaagagaagatggagaatttcgactactccaatgaggagcatatgactctgctcaaaatgattctgatcaagtgttgtgatattagcaacgaagttcgaccaatggaggtcgccgagccctgggttgactgcttactggaggaatatttcatgcaaagcgatcgggaaaagagcgaggggctgcctgtggccccgttcatggaccgagataaagttactaaggcgacagcgcagattggattcattaagttcgtgctgatcccaatgttcgagaccgtgactaaacttttccccatggtggaagaaattatgctacagcccctttgggagagccgggataggtatgaggaactgaagcggattgatgatgccatgaaagaactgcagaaaaaaacagattctttaacgagcggcgctacagaaaagtctcgcgaaagaagtcgggacgtgaagaactcagaaggagactgtgcttag

SEQ ID NO: 18806 - DNA, 1398 bp, Artificial Sequence
  derived and/or modified sequence
atggacctgttctgcatcgccaccggcctgccccggaacaccaccatcagtttactgacgacagacgatgctatggtgagcatagaccccacaatgcccgcgaattccgagagagctttcaaaatcaacgagttgaaagcggaggtggctaaccatttagctgtgttggagaaaagggtcgagctggaggggcttaaagttgtcgagatagaaaaatgtaagtctgatattaagaaaatgcgcgaggaactagccgcaaggagctctcggactaactgcccctgcaaatacagcttcctggataatcacaagaagctgacacctagacgcgatgtgcccacctaccccaaataccttctgagtcccgagaccattgaggcactgcgcaagccaacctttgacgtctggctatgggagcccaatgaaatgttgtcgtgtctggagcacatgtatcacgatcttggtcttgtgcgagacttcagcataaacccagtaacactccggcggtggctgttttgtgttcacgacaattaccggaacaatcctttccacaattttaggcactgcttttgcgtggctcagatgatgtattctatggtgtggctttgcagcttgcaggaaaagttctcacagaccgacatcctcattttgatgaccgctgccatctgccatgacttggatcacccaggctacaacaatacctatcagatcaatgctagaaccgagctggctgtccgctacaatgatatttctcctctggaaaaccatcactgtgccgtcgccttccaaatcctggccgagcctgaatgtaatatttttagtaatatccccccggatggtttcaaacagattagacagggtatgatcactctgatactggccactgatatggcgcggcacgcggagattatggactccttcaaagaaaagatggagaacttcgactactctaatgaggagcatatgaccctattaaagatgatactaataaagtgttgtgatatcagcaacgaggtcagacctatggaggtcgctgagccatgggtagactgtttactggaagagtatttcatgcagagtgaccgtgagaagtccgaaggactacccgtcgcaccctttatggaccgagataaagtgacgaaggcgaccgcgcaaatcggtttcattaaattcgttctcattccgatgtttgaaactgtgaccaaactgttcccaatggtggaagaaatcatgctccagcccctatgggagtcccgtgataggtatgaagaattgaaaaggatcgacgatgccatgaaggagttgcagaaaaagaccgacagcttgacctctggggccactgaaaagtctcgagaacgatctcgcgatgttaaaaattctgagggggactgtgcgtag

SEQ ID NO: 18807 - DNA, 1883 bp, Artificial Sequence
  derived and/or modified sequence
cctcccgcggcggctggcgtcgggaaagtacagtaaaaagtccgagtgcagccgccgggcgcaggatgggatccggctcctccagctaccggcccaaggccatctacctggacatcgatggacgcattcagaaggtaatcttcagcaagtactgcaactccagcgacatcatggacctgttctgcatcgccaccggcctgcctcggaacacgaccatctccctgctgaccaccgacgacgccatggtctccatcgaccccaccatgcccgcgaattcagaacgcactccgtacaaagtgagacctgtggccatcaagcaactctccgagagagaagaattaatccagagcgtgctggcgcaggttgcagagcagttctcaagagcattcaaaatcaatgaactgaaagctgaagttgcaaatcacttggctgtcctagagaaacgcgtggaattggaaggactaaaagtggtggagattgagaaatgcaagagtgacattaagaagatgagggaggagctggcggccagaagcagcaggaccaactgcccctgtaagtacagttttttggataaccacaagaagttgactcctcgacgcgatgttcccacttaccccaagtacctgctctctccagagaccatcgaggccctgcggaagccgacctttgacgtctggctttgggagcccaatgagatgctgagctgcctggagcacatgtaccacgacctcgggctggtcagggacttcagcatcaaccctgtcaccctcaggaggtggctgttctgcgtccacgacaactacagaaacaaccccttccacaacttccggcactgcttctgcgtggcccagatgatgtacagcatggtctggctctgcagtctccaggagaagttctcacaaacggatatcctgatcctaatgacagcggccatctgccacgatctggaccatcccggctacaacaacacgtaccagatcaatgcccgcacagagctggcggtccgctacaatgacatctcaccgctggagaaccaccactgcgccgtggccttccagatcctcgccgagcctgagtgcaacatcttctccaacatcccacctgatgggttcaagcagatccgacagggaatgatcacattaatcttggccactgacatggcaagacatgcagaaattatggattctttcaaagagaaaatggagaattttgactacagcaacgaggagcacatgaccctgctgaagatgattttgataaaatgctgtgatatctctaacgaggtccgtccaatggaagtcgcagagccttgggtggactgtttattagaggaatattttatgcagagcgaccgtgagaagtcagaaggccttcctgtggcaccgttcatggaccgagacaaagtgaccaaggccacagcccagattgggttcatcaagtttgtcctgatcccaatgtttgaaacagtgaccaagctcttccccatggttgaggagatcatgctgcagccactttgggaatcccgagatcgctacgaggagctgaagcggatagatgacgccatgaaagagttacagaagaagactgacagcttgacgtctggggccaccgagaagtccagagagagaagcagagatgtgaaaaacagtgaaggagactgtgcctgaggaaagcggggggcgtggctgcagttctggacgggctggccgagctgcgcgggatccttgtgcagggaagagctgccctgggcacctggcaccacaagaccatgttttctaagaaccattttgttcactgatacaaaaaaaaaaaaaggaattcatgatgctgtacagaattttatttttaaactgtcttttaaataatatattcttatacggaaa

SEQ ID NO: 18808 - DNA, 1779 bp, Artificial Sequence
  derived and/or modified sequence
tcccgcggcggctggcgtcgggaaagtacagtaaaaagtccgagtgcagccgccgggcgcaggatgggatccggctcctccagctaccggcccaaggccatctacctggacatcgatggacgcattcagaaggtaatcttcagcaagtactgcaactccagcgacatcatggacctgttctgcatcgccaccggcctgcctcggaacacgaccatctccctgctgaccaccgacgacgccatggtctccatcgaccccaccatgcccgcgaattcagaacgagcattcaaaatcaatgaactgaaagctgaagttgcaaatcacttggctgtcctagagaaacgcgtggaattggaaggactaaaagtggtggagattgagaaatgcaagagtgacattaagaagatgagggaggagctggcggccagaagcagcaggaccaactgcccctgtaagtacagttttttggataaccacaagaagttgactcctcgacgcgatgttcccacttaccccaagtacctgctctctccagagaccatcgaggccctgcggaagccgacctttgacgtctggctttgggagcccaatgagatgctgagctgcctggagcacatgtaccacgacctcgggctggtcagggacttcagcatcaaccctgtcaccctcaggaggtggctgttctgcgtccacgacaactacagaaacaaccccttccacaacttccggcactgcttctgcgtggcccagatgatgtacagcatggtctggctctgcagtctccaggagaagttctcacaaacggatatcctgatcctaatgacagcggccatctgccacgatctggaccatcccggctacaacaacacgtaccagatcaatgcccgcacagagctggcggtccgctacaatgacatctcaccgctggagaaccaccactgcgccgtggccttccagatcctcgccgagcctgagtgcaacatcttctccaacatcccacctgatgggttcaagcagatccgacagggaatgatcacattaatcttggccactgacatggcaagacatgcagaaattatggattctttcaaagagaaaatggagaattttgactacagcaacgaggagcacatgaccctgctgaagatgattttgataaaatgctgtgatatctctaacgaggtccgtccaatggaagtcgcagagccttgggtggactgtttattagaggaatattttatgcagagcgaccgtgagaagtcagaaggccttcctgtggcaccgttcatggaccgagacaaagtgaccaaggccacagcccagattgggttcatcaagtttgtcctgatcccaatgtttgaaacagtgaccaagctcttccccatggttgaggagatcatgctgcagccactttgggaatcccgagatcgctacgaggagctgaagcggatagatgacgccatgaaagagttacagaagaagactgacagcttgacgtctggggccaccgagaagtccagagagagaagcagagatgtgaaaaacagtgaaggagactgtgcctgaggaaagcggggggcgtggctgcagttctggacgggctggccgagctgcgcgggatccttgtgcagggaagagctgccctgggcacctggcaccacaagaccatgttttctaagaaccattttgttcactgatacaaaaaaaaaaaaaggaattcatgatgctgtacagaattttatttttaaactgtcttttaaataatatattcttatacgg

SEQ ID NO: 18809 - DNA, 1602 bp, Artificial Sequence
  derived and/or modified sequence
atggggagcggttcctcaagctacaggcccaaagccatatacctcgacatcgacggccgaatccagaaggtcattttctcgaaatattgtaatagctccgatattatggacctgttctgtatcgccaccggactccctcgcaacaccacgatatcgctactgacgaccgacgacgccatggtcagcatcgaccccactatgcccgctaattctgaaagaaccccctacaaagtgcgcccagtcgcaatcaagcagttatctgaaagggaggagctgatacaaagtgtcctggcccaagtagccgaacagttctcgcgggctttcaagataaatgagctgaaggcagaagtcgcaaatcacctcgctgtgctggagaagcgcgtagagttggagggcctaaaggtagtggagatagaaaagtgtaaaagcgacattaagaagatgcgtgaagagctggcagctcgtagctcaagaactaactgcccatgcaagtatagtttccttgacaaccacaaaaaactgacccctcgtcgggacgtgcccacgtatcccaagtacttactcagccccgaaacaattgaagccctgcggaagccaacttttgacgtatggctctgggagcccaacgagatgcttagttgtctggaacatatgtatcacgatttagggctggtgagggacttttccatcaatcctgtgaccttgaggcgatggttgttctgtgtgcacgacaattatcgaaataacccgttccataatttcagacactgcttctgcgtggctcagatgatgtattccatggtctggctatgttccctgcaggagaaattttcccaaacagacattcttattctgatgactgctgccatctgccacgatctcgatcatccaggatataacaacacatatcagatcaatgccagaacagaactggcagtacgatacaatgatattagcccgctggaaaatcatcactgtgcggtcgcatttcagattctagctgaaccggagtgcaatatctttagcaatattccacctgatggctttaaacagatcagacaaggaatgatcacccttatactagcaaccgatatggctcgtcacgctgagattatggacagcttcaaggagaagatggaaaatttcgactattccaatgaggagcatatgacactcttaaaaatgatcttgattaagtgctgtgatatctcaaacgaggtgcgacctatggaagtcgctgagccctgggttgattgcttgctggaggagtatttcatgcaatctgatcgagaaaaatccgaggggttacccgtggcaccatttatggacagagacaaggttaccaaggccaccgcacagatcgggttcattaagtttgtactgatccccatgtttgagacagtgacaaagctgtttccgatggtagaggagattatgcttcagcctctgtgggagtcgagagaccggtatgaggagctcaagcgcatagacgatgccatgaaggagctccagaagaagaccgatagcctgacatctggcgctaccgagaagagcagggagcgctctcgtgacgtaaagaacagcgaaggcgattgcgcatag

SEQ ID NO: 18810 - DNA, 1398 bp, Artificial Sequence
  derived and/or modified sequence
atggatctgttttgcatcgctactgggttacccaggaatacgacaatctctctcctgactacggatgacgctatggtgtccattgatccaacaatgccagctaactccgaacgggcttttaagatcaatgagctgaaagcagaggttgcaaaccacctggctgtcctggaaaaaagagtggagctggaaggactaaaggtcgtcgagattgagaaatgcaaaagtgatattaagaagatgcgcgaggagttagccgcacggagtagcagaaccaattgcccttgcaagtattccttccttgataaccataaaaagctgaccccacgcagagacgtgcccacatacccaaaatatttgctgagtcccgagacgatcgaagcccttagaaagcccacgttcgatgtctggttatgggagcctaatgaaatgttgagttgcctcgagcatatgtaccacgatcttggcctggtccgtgattttagtatcaacccagtgacgcttcggcgttggttattttgtgtgcacgacaactatcgcaataatcctttccataatttcaggcattgcttctgcgtcgcgcagatgatgtatagtatggtgtggctttgctccctccaagagaagttcagccagaccgatattttaattctgatgactgctgccatttgccacgacctcgatcaccctggatacaataatacataccaaattaacgctagaactgagctggcagtgcggtacaatgatatttcaccccttgagaatcatcactgtgcagtcgcctttcagattttggcagagccagaatgcaacatattcagtaacatacctccggacggcttcaaacaaattaggcaggggatgattaccttgatcctggccactgacatggccaggcacgcagagataatggattctttcaaggaaaagatggagaacttcgattatagtaacgaagaacacatgactctgcttaagatgattctgattaagtgctgtgacatttccaacgaggtacggcctatggaagtggccgagccctgggtcgactgccttctggaggaatactttatgcaaagcgaccgggagaagagcgagggcctgcccgtggctccgttcatggatcgcgataaggtaactaaagctacagcccagattggcttcataaagttcgtgctcatcccaatgttcgaaaccgtgaccaaactgtttcctatggtcgaagaaattatgcttcaacctctctgggaaagcagagaccgatacgaggaactgaagaggatcgatgatgctatgaaagaactacagaagaagacggactcacttacatcaggagcaacggagaagtctcgggagaggtcacgggatgtcaagaatagcgaaggagactgtgcttag

SEQ ID NO: 18811 - DNA, 1602 bp, Artificial Sequence
  derived and/or modified sequence
atgggcagcggcagcagcagctacagacccaaggccatctacctggacatcgacggcagaatccagaaggtgatcttcagcaagtactgcaacagcagcgacatcatggacctgttctgcatcgccaccggcctgcccagaaacaccaccatcagcctgctgaccaccgacgacgccatggtgagcatcgaccccaccatgcccgccaacagcgagagaaccccctacaaggtgagacccgtggccatcaagcagctgagcgagagagaggagctgatccagagcgtgctggcccaggtggccgagcagttcagcagagccttcaagatcaacgagctgaaggccgaggtggccaaccacctggccgtgctggagaagagagtggagctggagggcctgaaggtggtggagatcgagaagtgcaagagcgacatcaagaagatgagagaggagctggccgccagaagcagcagaaccaactgcccctgcaagtacagcttcctggacaaccacaagaagctgacccccagaagagacgtgcccacctaccccaagtacctgctgagccccgagaccatcgaggccctgagaaagcccaccttcgacgtgtggctgtgggagcccaacgagatgctgagctgcctggagcacatgtaccacgacctgggcctggtgagagacttcagcatcaaccccgtgaccctgagaagatggctgttctgcgtgcacgacaactacagaaacaaccccttccacaacttcagacactgcttctgcgtggcccagatgatgtacagcatggtgtggctgtgcagcctgcaggagaagttcagccagaccgacatcctgatcctgatgaccgccgccatctgccacgacctggaccaccccggctacaacaacacctaccagatcaacgccagaaccgagctggccgtgagatacaacgacatcagccccctggagaaccaccactgcgccgtggccttccagatcctggccgagcccgagtgcaacatcttcagcaacatcccccccgacggcttcaagcagatcagacagggcatgatcaccctgatcctggccaccgacatggccagacacgccgagatcatggacagcttcaaggagaagatggagaacttcgactacagcaacgaggagcacatgaccctgctgaagatgatcctgatcaagtgctgcgacatcagcaacgaggtgagacccatggaggtggccgagccctgggtggactgcctgctggaggagtacttcatgcagagcgacagagagaagagcgagggcctgcccgtggcccccttcatggacagagacaaggtgaccaaggccaccgcccagatcggcttcatcaagttcgtgctgatccccatgttcgagaccgtgaccaagctgttccccatggtggaggagatcatgctgcagcccctgtgggagagcagagacagatacgaggagctgaagagaatcgacgacgccatgaaggagctgcagaagaagaccgacagcctgaccagcggcgccaccgagaagagcagagagagaagcagagacgtgaagaacagcgagggcgactgcgcctag

SEQ ID NO: 18812 - DNA, 1398 bp, Artificial Sequence
  derived and/or modified sequence
atggacctgttctgcatcgccaccggcctgcccagaaacaccaccatcagcctgctgaccaccgacgacgccatggtgagcatcgaccccaccatgcccgccaacagcgagagagccttcaagatcaacgagctgaaggccgaggtggccaaccacctggccgtgctggagaagagagtggagctggagggcctgaaggtggtggagatcgagaagtgcaagagcgacatcaagaagatgagagaggagctggccgccagaagcagcagaaccaactgcccctgcaagtacagcttcctggacaaccacaagaagctgacccccagaagagacgtgcccacctaccccaagtacctgctgagccccgagaccatcgaggccctgagaaagcccaccttcgacgtgtggctgtgggagcccaacgagatgctgagctgcctggagcacatgtaccacgacctgggcctggtgagagacttcagcatcaaccccgtgaccctgagaagatggctgttctgcgtgcacgacaactacagaaacaaccccttccacaacttcagacactgcttctgcgtggcccagatgatgtacagcatggtgtggctgtgcagcctgcaggagaagttcagccagaccgacatcctgatcctgatgaccgccgccatctgccacgacctggaccaccccggctacaacaacacctaccagatcaacgccagaaccgagctggccgtgagatacaacgacatcagccccctggagaaccaccactgcgccgtggccttccagatcctggccgagcccgagtgcaacatcttcagcaacatcccccccgacggcttcaagcagatcagacagggcatgatcaccctgatcctggccaccgacatggccagacacgccgagatcatggacagcttcaaggagaagatggagaacttcgactacagcaacgaggagcacatgaccctgctgaagatgatcctgatcaagtgctgcgacatcagcaacgaggtgagacccatggaggtggccgagccctgggtggactgcctgctggaggagtacttcatgcagagcgacagagagaagagcgagggcctgcccgtggcccccttcatggacagagacaaggtgaccaaggccaccgcccagatcggcttcatcaagttcgtgctgatccccatgttcgagaccgtgaccaagctgttccccatggtggaggagatcatgctgcagcccctgtgggagagcagagacagatacgaggagctgaagagaatcgacgacgccatgaaggagctgcagaagaagaccgacagcctgaccagcggcgccaccgagaagagcagagagagaagcagagacgtgaagaacagcgagggcgactgcgcctag

SEQ ID NO: 18813 - protein, 466 aa, Artificial Sequence
  derived and/or modified sequence
MDAFRSTPYKVRPVAIKQLSEREELIQSVLAQVAEQFSRAFKINELKAEVANHLAVLEKRVELEGLKVVEIEKCKSDIKKMREELAARSSRTNCPCKYSFLDNHKKLTPRRDVPTYPKYLLSPETIEALRKPTFDVWLWEPNEMLSCLEHMYHDLGLVRDFSINPVTLRRWLFCVHDNYRNNPFHNFRHCFCVAQMMYSMVWLCSLQEKFSQTDILILMTAAICHDLDHPGYNNTYQINARTELAVRYNDISPLENHHCAVAFQILAEPECNIFSNIPPDGFKQIRQGMITLILATDMARHAEIMDSFKEKMENFDYSNEEHMTLLKMILIKCCDISNEVRPMEVAEPWVDCLLEEYFMQSDREKSEGLPVAPFMDRDKVTKATAQIGFIKFVLIPMFETVTKLFPMVEEIMLQPLWESRDRYEELKRIDDAMKELQKKTDSLTSGATEKSRERSRDVKNSEGDCA

SEQ ID NO: 18814 - DNA, 1401 bp, Artificial Sequence
  derived and/or modified sequence
atggatgccttcagaagcaccccctacaaagtgagaccagtagccatcaaacaactcagcgagagggaggagctgattcagagcgttctcgctcaggtggccgagcagtttagccgggcgttcaagattaacgagttgaaggcggaggttgccaaccacttggctgtgctggaaaaacgagtggaacttgagggtctgaaggttgtcgaaatcgagaagtgcaaatccgacatcaagaagatgagagaagaactggccgcaagaagttcacgcacaaattgtccctgcaaatatagctttcttgacaatcataaaaaactcacgccccgaagggacgttcccacctacccgaaatacctgctatcaccggaaactattgaagcccttcgcaaaccaacgttcgacgtctggttatgggaacccaacgagatgctgtcttgtctggagcatatgtatcacgatttgggtctagtccgggattttagcattaatcccgtgacactgcgaaggtggttgttctgtgttcatgacaattaccgcaacaacccgtttcacaacttccgacattgcttttgcgtggcacagatgatgtactccatggtatggctgtgtagcctccaggagaagttctctcagacggatatcctgatactgatgacagctgctatctgtcacgacttggatcatccgggatacaacaacacttaccaaattaacgcccgcaccgagctggccgtacgatacaacgatatttcccccctggagaatcaccactgtgctgtcgcttttcagatactggcagagcctgaatgtaacatattcagtaacatcccccccgacgggtttaagcagataagacaaggaatgatcaccctgatcctggccacagacatggcgagacacgcggagattatggattcctttaaagagaaaatggagaacttcgattatagcaacgaagagcacatgaccctactgaagatgatcctaatcaaatgctgcgacatttctaacgaggtgagacccatggaagtagctgagccgtgggtggattgtttgttagaagagtactttatgcaaagtgatagagaaaaatccgaggggttacccgtagccccgtttatggatcgcgacaaggtgactaaggccacggcacagatcggctttatcaaattcgtactgatccctatgttcgagaccgtgaccaagctgttcccaatggtcgaggagatcatgcttcagccgctctgggaatcacgcgatcgttacgaggaactcaagagaatcgacgacgcgatgaaagagctgcagaagaaaacagattccctgacctctggggcaactgagaaatcccgcgagagaagccgagacgtcaagaatagcgaaggcgactgtgcctag

SEQ ID NO: 18815 - DNA, 1401 bp, Artificial Sequence
  derived and/or modified sequence
atggatgccttccgcagcaccccctacaaggtgcggcctgtggccatcaagcagctgtctgagcgggaggagctgatccagagcgtgctggcccaggtggccgagcagttcagccgggccttcaagatcaatgagctgaaggccgaggtggccaaccacctggccgtgctggagaagagggtggagctggagggcctgaaggtggtggagattgagaagtgcaagagtgacatcaagaagatgagggaggagctggccgcccggagcagcaggaccaactgcccctgcaagtacagcttcctggacaaccacaagaagctgacccccaggagagatgtgcccacctaccccaagtacctgctgagccctgagaccatcgaggccctgaggaagcccacctttgatgtgtggctgtgggagcccaatgagatgctgagctgcctggagcacatgtaccatgacctgggcctggtgcgggacttcagcatcaaccctgtgaccctgcggcgctggctgttctgtgtgcatgacaactacagaaacaaccccttccacaacttccgccactgcttctgtgtggcccagatgatgtacagcatggtgtggctgtgcagcctgcaggagaagttcagccagacagacatcctgatcctgatgacagctgccatctgccacgacctggaccaccctggctacaacaacacctaccagatcaatgccaggacagagctggccgtgcgctacaatgacatcagccccctggagaaccaccactgtgctgtggccttccagatcctggccgagcctgagtgcaacatcttcagcaacatccccccagatggcttcaagcagatccggcagggcatgatcaccctcatcctggccacagacatggcccggcatgctgagatcatggacagcttcaaggagaagatggagaactttgactacagcaatgaggagcacatgaccctgctgaagatgatcctgatcaagtgctgtgacatcagcaatgaggtgcggcccatggaggtggccgagccctgggtggactgcctgctggaggagtacttcatgcagagcgaccgggagaagtctgagggcctgcctgtggcccccttcatggaccgggacaaggtgaccaaggccacagcccagatcggcttcatcaagtttgtgctgatccccatgtttgagaccgtgaccaagctgttccccatggtggaggagatcatgctgcagcccctgtgggagagccgggacagatatgaggagctgaagagaattgatgatgccatgaaggagctgcagaagaagacagacagcctgaccagcggggccacagagaagagccgggagaggagcagagatgtgaagaacagcgagggggactgtgcctag

SEQ ID NO: 18816 - DNA, 1401 bp, Artificial Sequence
  derived and/or modified sequence
atggacgccttccggagcaccccctacaaggtgcggcccgtggccatcaaacaattgagcgagagggaggagcttatccaatcagtgttagcccaagtcgccgaacagttcagccgggcattcaaaatcaatgagctcaaagctgaggtcgccaaccatctcgccgtgctggaaaaacgggtggagctggaggggctcaaggtagtggagattgaaaagtgcaagagcgatattaagaaaatgcgagaggaattggcagcaaggagttctcggaccaactgtccctgcaagtacagtttccttgacaaccacaagaagctgacgccacgaagagacgttcctacttaccccaagtacctcctgtcccccgaaacaattgaagctcttcgcaagcccactttcgacgtctggctgtgggaacccaatgagatgttaagctgcctcgagcatatgtatcatgacttaggtttggttcgcgatttcagtataaacccagtgacacttcggcgttggctgttctgcgtacacgacaactatcgaaataaccccttccataactttagacattgtttttgtgtagcacaaatgatgtacagcatggtctggctctgttccctccaagaaaagtttagtcagacagacattttgattttgatgaccgctgctatttgccacgacctagatcatcctggctacaataatacatatcagatcaacgcaaggaccgaactcgcggtccgatacaatgatatctcacctctcgaaaaccaccactgcgccgtggcgtttcagattttagccgaacctgaatgtaatatcttcagcaatatcccccctgatggattcaagcagatccgacagggcatgataacgctcatcctggccaccgacatggctagacatgctgagattatggacagttttaaggaaaaaatggagaacttcgattactcaaacgaggaacacatgactctgctgaagatgatccttatcaagtgttgtgacatctccaatgaggtcagaccaatggaagtggcagaaccctgggtggattgtcttctggaggaatacttcatgcaatccgaccgggagaagtctgaaggcttgcccgtagcccccttcatggatcgggacaaagtaacaaaggctacagcccagatcggcttcataaaattcgtcctcattccaatgtttgagactgtcaccaaacttttcccaatggtggaagagatcatgttacagccactctgggaatcacgggatagatatgaggagttgaagaggatcgacgacgccatgaaggaacttcagaagaagaccgacagcctgacttcaggggctactgaaaagagtcgcgaaagatcgcgggatgttaaaaatagcgagggggattgcgcctag

SEQ ID NO: 18817 - DNA, 1671 bp, Artificial Sequence
  derived and/or modified sequence
ggatgggatccggctcctccagctaccggcccaaggccatctacctggacatcgatggacgcattcagaagcactccgtacaaagtgagacctgtggccatcaagcaactctccgagagagaagaattaatccagagcgtgctggcgcaggttgcagagcagttctcaagagcattcaaaatcaatgaactgaaagctgaagttgcaaatcacttggctgtcctagagaaacgcgtggaattggaaggactaaaagtggtggagattgagaaatgcaagagtgacattaagaagatgagggaggagctggcggccagaagcagcaggaccaactgcccctgtaagtacagttttttggataaccacaagaagttgactcctcgacgcgatgttcccacttaccccaagtacctgctctctccagagaccatcgaggccctgcggaagccgacctttgacgtctggctttgggagcccaatgagatgctgagctgcctggagcacatgtaccacgacctcgggctggtcagggacttcagcatcaaccctgtcaccctcaggaggtggctgttctgcgtccacgacaactacagaaacaaccccttccacaacttccggcactgcttctgcgtggcccagatgatgtacagcatggtctggctctgcagtctccaggagaagttctcacaaacggatatcctgatcctaatgacagcggccatctgccacgatctggaccatcccggctacaacaacacgtaccagatcaatgcccgcacagagctggcggtccgctacaatgacatctcaccgctggagaaccaccactgcgccgtggccttccagatcctcgccgagcctgagtgcaacatcttctccaacatcccacctgatgggttcaagcagatccgacagggaatgatcacattaatcttggccactgacatggcaagacatgcagaaattatggattctttcaaagagaaaatggagaattttgactacagcaacgaggagcacatgaccctgctgaagatgattttgataaaatgctgtgatatctctaacgaggtccgtccaatggaagtcgcagagccttgggtggactgtttattagaggaatattttatgcagagcgaccgtgagaagtcagaaggccttcctgtggcaccgttcatggaccgagacaaagtgaccaaggccacagcccagattgggttcatcaagtttgtcctgatcccaatgtttgaaacagtgaccaagctcttccccatggttgaggagatcatgctgcagccactttgggaatcccgagatcgctacgaggagctgaagcggatagatgacgccatgaaagagttacagaagaagactgacagcttgacgtctggggccaccgagaagtccagagagagaagcagagatgtgaaaaacagtgaaggagactgtgcctgaggaaagcggggggcgtggctgcagttctggacgggctggccgagctgcgcgggatccttgtgcagggaagagctgccctgggcacctggcaccacaagaccatgttttctaagaaccattttgttcactgatacaaaaaaaaaaaaaggaattcatgatgctgtacagaattttatttttaaactgtcttttaaataatatattcttatacggaaa

SEQ ID NO: 18818 - DNA, 1401 bp, Artificial Sequence
  derived and/or modified sequence
atggacgcctttcgatcaactccttacaaagtacgacctgtcgctatcaagcaactgagtgagcgcgaggaacttatccagtccgtgctggcccaggtggccgaacagttcagccgtgccttcaaaataaacgagttaaaggctgaagttgctaaccaccttgcggtgctggagaaaagggtggagttggagggattgaaggtcgttgagatcgagaagtgcaagtctgatatcaaaaagatgagggaagagctagcagcccgatcatctcgtacaaactgcccctgtaagtactctttcttagacaatcacaaaaaactgactccacggcgagacgttcccacttaccccaagtatttgttgagtcctgaaactattgaggccctccggaagcccacctttgacgtctggctctgggagcctaatgagatgctgtcctgcctggagcatatgtatcatgatctgggcctagtgcgggattttagcattaacccagtgactctgcgcaggtggcttttctgtgtgcacgacaactacaggaataacccatttcacaatttcagacactgcttttgcgtggcccagatgatgtactctatggtatggctgtgttcccttcaagaaaagttctctcagaccgatatcctcattctgatgacggccgctatctgccatgatttggaccatccagggtacaacaacacgtatcaaataaacgcccgaaccgagttggccgttagatacaatgatatcagcccattagagaatcatcactgcgcagtggctttccaaattctggcagaacccgaatgtaacatcttctccaatatccctccggatggattcaagcaaatccggcagggaatgattaccctgatcttagccactgacatggccaggcatgctgaaattatggatagttttaaagagaaaatggagaatttcgactattcgaacgaggaacatatgaccctgttgaagatgatacttatcaagtgttgcgatatatcaaatgaagtgaggcccatggaggtcgccgaaccatgggtcgattgcctactggaagagtactttatgcagtctgatcgggagaagtctgagggactgccggtagccccattcatggacagagacaaagtgacgaaagccacagctcagataggctttattaagttcgtgctgattccaatgttcgagacagtaaccaagctgttccctatggttgaagaaataatgctgcagcccctgtgggaatccagagacagatacgaggagctcaagcgtatcgacgatgcgatgaaggaattgcagaaaaaaaccgactccctgactagtggagccactgagaaatctcgcgaaagatccagagatgtgaaaaacagcgaaggcgactgtgcttag

SEQ ID NO: 18819 - DNA, 1401 bp, Artificial Sequence
  derived and/or modified sequence
atggacgccttcagaagcaccccctacaaggtgagacccgtggccatcaagcagctgagcgagagagaggagctgatccagagcgtgctggcccaggtggccgagcagttcagcagagccttcaagatcaacgagctgaaggccgaggtggccaaccacctggccgtgctggagaagagagtggagctggagggcctgaaggtggtggagatcgagaagtgcaagagcgacatcaagaagatgagagaggagctggccgccagaagcagcagaaccaactgcccctgcaagtacagcttcctggacaaccacaagaagctgacccccagaagagacgtgcccacctaccccaagtacctgctgagccccgagaccatcgaggccctgagaaagcccaccttcgacgtgtggctgtgggagcccaacgagatgctgagctgcctggagcacatgtaccacgacctgggcctggtgagagacttcagcatcaaccccgtgaccctgagaagatggctgttctgcgtgcacgacaactacagaaacaaccccttccacaacttcagacactgcttctgcgtggcccagatgatgtacagcatggtgtggctgtgcagcctgcaggagaagttcagccagaccgacatcctgatcctgatgaccgccgccatctgccacgacctggaccaccccggctacaacaacacctaccagatcaacgccagaaccgagctggccgtgagatacaacgacatcagccccctggagaaccaccactgcgccgtggccttccagatcctggccgagcccgagtgcaacatcttcagcaacatcccccccgacggcttcaagcagatcagacagggcatgatcaccctgatcctggccaccgacatggccagacacgccgagatcatggacagcttcaaggagaagatggagaacttcgactacagcaacgaggagcacatgaccctgctgaagatgatcctgatcaagtgctgcgacatcagcaacgaggtgagacccatggaggtggccgagccctgggtggactgcctgctggaggagtacttcatgcagagcgacagagagaagagcgagggcctgcccgtggcccccttcatggacagagacaaggtgaccaaggccaccgcccagatcggcttcatcaagttcgtgctgatccccatgttcgagaccgtgaccaagctgttccccatggtggaggagatcatgctgcagcccctgtgggagagcagagacagatacgaggagctgaagagaatcgacgacgccatgaaggagctgcagaagaagaccgacagcctgaccagcggcgccaccgagaagagcagagagagaagcagagacgtgaagaacagcgagggcgactgcgcctag

SEQ ID NO: 18820 - protein, 465 aa, Artificial Sequence
  derived and/or modified sequence
MGSGSSSYRPKAIYLDIDGRIQKHSVQSETCGHQATLRAFKINELKAEVANHLAVLEKRVELEGLKVVEIEKCKSDIKKMREELAARSSRTNCPCKYSFLDNHKKLTPRRDVPTYPKYLLSPETIEALRKPTFDVWLWEPNEMLSCLEHMYHDLGLVRDFSINPVTLRRWLFCVHDNYRNNPFHNFRHCFCVAQMMYSMVWLCSLQEKFSQTDILILMTAAICHDLDHPGYNNTYQINARTELAVRYNDISPLENHHCAVAFQILAEPECNIFSNIPPDGFKQIRQGMITLILATDMARHAEIMDSFKEKMENFDYSNEEHMTLLKMILIKCCDISNEVRPMEVAEPWVDCLLEEYFMQSDREKSEGLPVAPFMDRDKVTKATAQIGFIKFVLIPMFETVTKLFPMVEEIMLQPLWESRDRYEELKRIDDAMKELQKKTDSLTSGATEKSRERSRDVKNSEGDCA

SEQ ID NO: 18821 - DNA, 1398 bp, Artificial Sequence
  derived and/or modified sequence
atggggtccggatcaagctcctacaggcctaaggcaatttatctggacatcgacggaagaatacagaagcactccgtccagtcagagacatgcggacaccaagctacgctcagggcatttaagatcaacgagctcaaggccgaagtggccaaccatctggcagtcctcgagaagagagtggaactggagggcctgaaggtcgtggagattgagaaatgcaaaagtgacatcaagaaaatgagggaggagttggccgcacgaagttcacgtaccaactgcccctgtaagtattcctttttggacaatcacaaaaagttgactccaaggcgcgatgtaccaacctatcccaagtacctgctctcacccgagaccatcgaggctcttcggaaacctacgtttgatgtctggttgtgggagccaaatgagatgctaagctgcctggaacatatgtaccatgacttaggcttggtcagggactttagtattaatccggtgactctcaggcggtggctgttttgcgtgcacgacaactaccggaataacccatttcacaattttcgtcattgcttttgcgtggcccagatgatgtactctatggtctggctttgcagcttgcaggagaaattctcgcagacagatattctcattctgatgactgctgcaatctgtcatgacctagaccatcctgggtataataacacatatcaaataaatgctcgcacggagctggcagtccgctacaatgatatttcccctctagagaaccatcactgtgcggtagcttttcaaattctggcagagcctgagtgcaatatcttctccaacattccccctgatggttttaagcaaataaggcaggggatgataacactgatcctcgccaccgacatggcaaggcacgcggagattatggattcgtttaaggagaagatggagaacttcgactattctaacgaggagcacatgactctgctgaagatgatcctgataaagtgttgtgacattagcaatgaagtgcgccccatggaagtcgccgagccatgggtcgactgccttctagaagagtacttcatgcaatcagaccgggagaaatctgagggcttgccagtagccccctttatggatagggacaaagtgaccaaggctactgcccagatcgggtttattaagtttgtccttattccaatgttcgagacagtgacaaaattatttccaatggtcgaggagataatgcttcagcctctctgggaaagccgtgaccgctatgaggaattgaaacgcatcgacgatgcaatgaaagagttacagaaaaagactgatagtctgacaagcggtgccaccgagaagagcagggaacgctctagggatgtcaagaactcagagggagactgcgcttag

SEQ ID NO: 18822 - DNA, 1398 bp, Artificial Sequence
  derived and/or modified sequence
atgggcagcggcagcagcagctaccggcccaaggccatctacctggacattgatggccgcatccagaagcacagcgtgcagagcgagacctgtggccaccaggccaccctgcgggccttcaagatcaatgagctgaaggccgaggtggccaaccacctggccgtgctggagaagagggtggagctggagggcctgaaggtggtggagattgagaagtgcaagagtgacatcaagaagatgagggaggagctggccgcccggagcagcaggaccaactgcccctgcaagtacagcttcctggacaaccacaagaagctgaccccaagaagagatgtgcccacctaccccaagtacctgctgagccctgagaccatcgaggccctgaggaagcccacctttgatgtgtggctgtgggagcccaatgagatgctgagctgcctggagcacatgtaccatgacctgggcctggtgcgggacttcagcatcaaccctgtgaccctgcggcgctggctgttctgtgtgcatgacaactacagaaacaaccccttccacaacttccgccactgcttctgtgtggcccagatgatgtacagcatggtgtggctgtgcagcctgcaggagaagttcagccagacagacatcctgatcctgatgacagctgccatctgccacgacctggaccaccctggctacaacaacacctaccagatcaatgccaggacagagctggccgtgcgctacaatgacatcagccccctggagaaccaccactgtgctgtggccttccagatcctggccgagcctgagtgcaacatcttcagcaacatccccccagatggcttcaagcagatccggcagggcatgatcaccctcatcctggccacagacatggcccggcatgctgagatcatggacagcttcaaggagaagatggagaactttgactacagcaatgaggagcacatgaccctgctgaagatgatcctgatcaagtgctgtgacatcagcaatgaggtgcggcccatggaggtggccgagccctgggtggactgcctgctggaggagtacttcatgcagagcgaccgggagaagtctgagggcctgcctgtggcccccttcatggaccgggacaaggtgaccaaggccacagcccagatcggcttcatcaagtttgtgctgatccccatgtttgaaacagtgaccaagctgttccccatggtggaggagatcatgctgcagcccctgtgggagagccgggacagatatgaggagctgaagagaattgatgatgccatgaaggagctgcagaagaagacagacagcctgaccagcggggccacagagaagagccgggagaggagcagagatgtgaagaacagcgagggggactgtgcctag

SEQ ID NO: 18823 - DNA, 1398 bp, Artificial Sequence
  derived and/or modified sequence
atgggcagcggcagcagcagctaccggcccaaggccatctacctggatatcgacggaaggattcagaaacatagtgtccagagtgagacctgcggccaccaagccactttgcgcgctttcaagattaatgaacttaaggccgaggtggcgaatcacctggctgtgctcgaaaagagagtggaactggagggcttgaaagtggtcgagattgaaaagtgcaaaagcgatattaagaagatgcgggaagagctagccgcgcggagcagccgaacgaactgtccttgtaaatacagtttcctggacaatcacaaaaagttgaccccgcggagagatgttccaacctacccaaaatacctactgtcacctgaaacaattgaggccctgcggaagcctacatttgatgtctggttatgggaacccaatgagatgcttagctgcctggagcacatgtaccacgacctggggctagtacgcgacttttcaatcaatcccgtgaccttaagaagatggctgttctgcgtgcatgacaattacaggaacaatccgttccacaactttagacattgcttctgcgtggcccagatgatgtactctatggtgtggctgtgctccttgcaggaaaagttctcccaaaccgacatcctgatcctaatgactgccgctatctgtcacgacctggaccaccccggctataacaatacgtaccagataaacgctcgtacagaacttgccgtgcgctataacgacatcagcccacttgaaaatcaccattgcgctgtggcgtttcagatcctggcagaaccagaatgtaatattttttccaatattccccccgatggatttaagcagatcaggcagggaatgattacactcattctcgcaactgatatggcaaggcacgccgagatcatggattctttcaaggagaagatggaaaatttcgactactcaaacgaggagcacatgacactcctcaagatgattttaatcaagtgctgtgatatctctaacgaagtccgtccgatggaagtcgcagaaccttgggtcgattgtctacttgaggagtatttcatgcagagcgaccgagaaaaaagcgagggacttccggttgcccccttcatggatagggacaaggtgacaaaagccacagcccaaattggattcattaaattcgtacttattccgatgttcgaaactgtcacgaaattgttccccatggtcgaagagattatgcttcagcccttgtgggaatcacgtgaccgatacgaagagctgaagcggattgacgacgcgatgaaggagctccaaaaaaagactgatagcctcacatcaggggcgactgagaaatctagagaaaggtcccgcgatgttaagaatagcgaaggggactgtgcatag

SEQ ID NO: 18824 - DNA, 1616 bp, Artificial Sequence
  derived and/or modified sequence
ggatgggatccggctcctccagctaccggcccaaggccatctacctggacatcgatggacgcattcagaagcactccgtacaaagtgagacctgtggccatcaagcaactctccgagcattcaaaatcaatgaactgaaagctgaagttgcaaatcacttggctgtcctagagaaacgcgtggaattggaaggactaaaagtggtggagattgagaaatgcaagagtgacattaagaagatgagggaggagctggcggccagaagcagcaggaccaactgcccctgtaagtacagttttttggataaccacaagaagttgactcctcgacgcgatgttcccacttaccccaagtacctgctctctccagagaccatcgaggccctgcggaagccgacctttgacgtctggctttgggagcccaatgagatgctgagctgcctggagcacatgtaccacgacctcgggctggtcagggacttcagcatcaaccctgtcaccctcaggaggtggctgttctgcgtccacgacaactacagaaacaaccccttccacaacttccggcactgcttctgcgtggcccagatgatgtacagcatggtctggctctgcagtctccaggagaagttctcacaaacggatatcctgatcctaatgacagcggccatctgccacgatctggaccatcccggctacaacaacacgtaccagatcaatgcccgcacagagctggcggtccgctacaatgacatctcaccgctggagaaccaccactgcgccgtggccttccagatcctcgccgagcctgagtgcaacatcttctccaacatcccacctgatgggttcaagcagatccgacagggaatgatcacattaatcttggccactgacatggcaagacatgcagaaattatggattctttcaaagagaaaatggagaattttgactacagcaacgaggagcacatgaccctgctgaagatgattttgataaaatgctgtgatatctctaacgaggtccgtccaatggaagtcgcagagccttgggtggactgtttattagaggaatattttatgcagagcgaccgtgagaagtcagaaggccttcctgtggcaccgttcatggaccgagacaaagtgaccaaggccacagcccagattgggttcatcaagtttgtcctgatcccaatgtttgaaacagtgaccaagctcttccccatggttgaggagatcatgctgcagccactttgggaatcccgagatcgctacgaggagctgaagcggatagatgacgccatgaaagagttacagaagaagactgacagcttgacgtctggggccaccgagaagtccagagagagaagcagagatgtgaaaaacagtgaaggagactgtgcctgaggaaagcggggggcgtggctgcagttctggacgggctggccgagctgcgcgggatccttgtgcagggaagagctgccctgggcacctggcaccacaagaccatgttttctaagaaccattttgttcactgatacaaaaaaaaaaaaaggaattcatgatgctgtacagaattttatttttaaactgtcttttaaataatatattcttatacggaaa

SEQ ID NO: 18825 - DNA, 1398 bp, Artificial Sequence
  derived and/or modified sequence
atgggcagtggttcttcttcttaccgcccaaaggctatttatctcgatattgatggaagaatccaaaagcactccgtgcagagcgagacatgtggccaccaggccactctgcgggctttcaagattaatgagcttaaagcagaggtcgcaaatcacctagctgtcttggagaaaagagtcgagctcgaaggtcttaaggtagtggagattgaaaagtgcaaaagcgatatcaaaaagatgcgggaagaactggctgcgaggtcctctcggacaaattgtccatgtaagtactcattcctcgataaccataagaagctgacccccagacgagacgtacctacctacccaaaatacctgcttagccccgagactatagaggcgctgagaaaaccaacatttgacgtgtggctttgggagcccaacgaaatgctatcatgcctggaacacatgtatcatgacctgggccttgtaagggatttttccatcaaccctgtcacactccggcgatggctcttctgtgtgcacgataattacaggaataatccatttcacaattttagacattgcttctgtgtggcacaaatgatgtattcaatggtgtggttatgctctttacaggagaagttttcccagaccgacatcttgattctaatgacagccgctatatgtcacgacttagatcatccaggatacaataatacataccagattaatgctcggaccgagttagcagtgcgctacaacgacatctcaccactggaaaatcaccactgcgccgtggccttccaaatcctcgctgagcctgagtgtaacatcttctccaacattccccctgacggtttcaaacagattaggcagggcatgattactctcattctggccaccgatatggcacgccacgcagagatcatggattcgttcaaagagaagatggaaaatttcgactatagcaacgaggagcacatgacattgcttaagatgatcctcattaagtgctgtgacataagtaacgaggtgaggccaatggaggtagccgagccctgggtggactgcctgctggaggagtacttcatgcagagcgatagagaaaaaagtgagggtctgcccgttgcccctttcatggaccgggataaggtgaccaaggcgacagcccagatcggattcattaagtttgtgctgatccccatgttcgaaacagtaacaaaacttttcccaatggtggaggaaattatgcttcagcctttgtgggagtcccgcgatagatacgaagaactgaaaaggatcgacgacgcaatgaaagagctgcagaaaaagacggacagtctaacctccggcgctacggagaaaagtcgggaacgttctcgggacgtcaaaaacagcgaaggggattgcgcttag

SEQ ID NO: 18826 - DNA, 1398 bp, Artificial Sequence
  derived and/or modified sequence
atgggcagcggcagcagcagctacagacccaaggccatctacctggacatcgacggcagaatccagaagcacagcgtgcagagcgagacctgcggccaccaggccaccctgagagccttcaagatcaacgagctgaaggccgaggtggccaaccacctggccgtgctggagaagagagtggagctggagggcctgaaggtggtggagatcgagaagtgcaagagcgacatcaagaagatgagagaggagctggccgccagaagcagcagaaccaactgcccctgcaagtacagcttcctggacaaccacaagaagctgacccccagaagagacgtgcccacctaccccaagtacctgctgagccccgagaccatcgaggccctgagaaagcccaccttcgacgtgtggctgtgggagcccaacgagatgctgagctgcctggagcacatgtaccacgacctgggcctggtgagagacttcagcatcaaccccgtgaccctgagaagatggctgttctgcgtgcacgacaactacagaaacaaccccttccacaacttcagacactgcttctgcgtggcccagatgatgtacagcatggtgtggctgtgcagcctgcaggagaagttcagccagaccgacatcctgatcctgatgaccgccgccatctgccacgacctggaccaccccggctacaacaacacctaccagatcaacgccagaaccgagctggccgtgagatacaacgacatcagccccctggagaaccaccactgcgccgtggccttccagatcctggccgagcccgagtgcaacatcttcagcaacatcccccccgacggcttcaagcagatcagacagggcatgatcaccctgatcctggccaccgacatggccagacacgccgagatcatggacagcttcaaggagaagatggagaacttcgactacagcaacgaggagcacatgaccctgctgaagatgatcctgatcaagtgctgcgacatcagcaacgaggtgagacccatggaggtggccgagccctgggtggactgcctgctggaggagtacttcatgcagagcgacagagagaagagcgagggcctgcccgtggcccccttcatggacagagacaaggtgaccaaggccaccgcccagatcggcttcatcaagttcgtgctgatccccatgttcgagaccgtgaccaagctgttccccatggtggaggagatcatgctgcagcccctgtgggagagcagagacagatacgaggagctgaagagaatcgacgacgccatgaaggagctgcagaagaagaccgacagcctgaccagcggcgccaccgagaagagcagagagagaagcagagacgtgaagaacagcgagggcgactgcgcctag

SEQ ID NO: 18827 - protein, 540 aa, Artificial Sequence
  derived and/or modified sequence
MGSGSSSYRPKAIYLDIDGRIQKVIFSKYCNSSDIMDLFCIATGLPRNTTISLLTTDDAMVSIDPTMPANSERNELILYTSLRNLLFLPSKESWASHQHSVQSETCGHQATLRAFKINELKAEVANHLAVLEKRVELEGLKVVEIEKCKSDIKKMREELAARSSRTNCPCKYSFLDNHKKLTPRRDVPTYPKYLLSPETIEALRKPTFDVWLWEPNEMLSCLEHMYHDLGLVRDFSINPVTLRRWLFCVHDNYRNNPFHNFRHCFCVAQMMYSMVWLCSLQEKFSQTDILILMTAAICHDLDHPGYNNTYQINARTELAVRYNDISPLENHHCAVAFQILAEPECNIFSNIPPDGFKQIRQGMITLILATDMARHAEIMDSFKEKMENFDYSNEEHMTLLKMILIKCCDISNEVRPMEVAEPWVDCLLEEYFMQSDREKSEGLPVAPFMDRDKVTKATAQIGFIKFVLIPMFETVTKLFPMVEEIMLQPLWESRDRYEELKRIDDAMKELQKKTDSLTSGATEKSRERSRDVKNSEGDCA

SEQ ID NO: 18828 - DNA, 1623 bp, Artificial Sequence
  derived and/or modified sequence
atgggcagtgggtcatcgtcctaccgccccaaagccatctacctggacatcgatggacggattcaaaaagtcattttcagtaaatattgtaactcgagtgacatcatggatctcttttgtatcgcaactggacttcccagaaatacgactatttccctcctaacaaccgatgatgctatggtctcaatcgatccgactatgcccgcgaattccgaacggaacgagttgatcttgtacacttcgctgcgtaatctgcttttcctcccaagcaaagagagctgggcttcccatcaacatagcgtccagtcagaaacatgcggacatcaagccaccctgcgggcctttaagataaatgagctgaaggccgaagtggcaaatcacttggctgtgctcgagaaaagggttgagcttgaagggttaaaagtggtggagatcgagaaatgtaaaagcgatatcaaaaagatgcgggaggagcttgccgctcggtcatctaggacaaattgcccgtgcaagtactccttcctcgacaatcacaagaaactaacacccaggcgtgacgttcctacataccccaagtatctgctgagcccagaaacgatcgaggcattgcggaaacccacctttgacgtctggctatgggaaccgaacgagatgttgagttgtctggagcacatgtaccacgatctggggctggtgcgcgacttctctattaaccccgtgacactacggaggtggttgttctgcgtgcacgacaactacagaaacaatcctttccacaacttcagacactgcttctgcgtcgcccagatgatgtattccatggtgtggctatgcagcctgcaagagaaattctctcagacggacatccttatactgatgaccgccgctatttgtcatgacctcgatcacccaggctataacaacacttaccagattaacgcgaggaccgagttggctgtgaggtacaatgacatcagccctctcgaaaaccaccattgcgccgtggcattccagatcttggccgagcccgagtgcaacattttctccaatatcccaccagatggcttcaagcagatacgccagggtatgattactctgatactggctaccgacatggcaagacacgccgagattatggacagttttaaagaaaagatggagaacttcgactactcaaacgaagagcatatgactctcctgaagatgatactgattaaatgttgcgacatctccaatgaggtccgtcccatggaggttgccgagccctgggtggattgtcttctggaggagtactttatgcagtctgatagggaaaagagcgagggtctccctgtcgctccattcatggatcgggataaggtgactaaagcaacagcccagatcggctttattaaatttgtattaatccctatgtttgagacggttacgaaactctttcccatggtcgaggagatcatgctgcagcccctgtgggaaagtagagatcgctacgaggagctgaagaggatcgatgatgctatgaaagagctccagaaaaagactgattctctgacatccggcgccaccgagaagagcagggaaagatctagagacgttaagaacagtgagggagattgcgcttag

SEQ ID NO: 18829 - DNA, 1623 bp, Artificial Sequence
  derived and/or modified sequence
atgggcagcggcagcagcagctaccggcccaaggccatctacctggacattgatggccgcatccagaaggtgatcttcagcaagtactgcaacagcagtgacatcatggacctcttctgcatcgccaccggcctgcccaggaacaccaccatcagcctgctgaccacagatgatgccatggtgtccattgaccccaccatgcctgccaacagcgagagaaatgagctgatcctgtacaccagcctgaggaacctgctcttcctgcccagcaaggagagctgggccagccaccagcacagcgtgcagagcgagacctgtggccaccaggccaccctgcgggccttcaagatcaatgagctgaaggccgaggtggccaaccacctggccgtgctggagaagagggtggagctggagggcctgaaggtggtggagattgagaagtgcaagagtgacatcaagaagatgagggaggagctggccgcccggagcagcaggaccaactgcccctgcaagtacagcttcctggacaaccacaagaagctgacccccaggagagatgtgcccacctaccccaagtacctgctgagccctgagaccatcgaggccctgaggaagcccacctttgatgtgtggctgtgggagcccaatgagatgctgagctgcctggagcacatgtaccatgacctgggcctggtgcgggacttcagcatcaaccctgtgaccctgcggcgctggctgttctgtgtgcatgacaactacagaaacaaccccttccacaacttccgccactgcttctgtgtggcccagatgatgtacagcatggtgtggctgtgcagcctgcaggagaagttcagccagacagacatcctgatcctgatgacagctgccatctgccacgacctggaccaccctggctacaacaacacctaccagatcaatgccaggacagagctggccgtgcgctacaatgacatcagccccctggagaaccaccactgtgctgtggccttccagatcctggccgagcctgagtgcaacatcttcagcaacatccccccagatggcttcaagcagatccggcagggcatgatcaccctcatcctggccacagacatggcccggcatgctgagatcatggacagcttcaaggagaagatggagaactttgactacagcaatgaggagcacatgaccctgctgaagatgatcctgatcaagtgctgtgacatcagcaatgaggtgcggcccatggaggtggccgagccctgggtggactgcctgctggaggagtacttcatgcagagcgaccgggagaagtctgagggcctgcctgtggcccccttcatggaccgggacaaggtgaccaaggccacagcccagatcggcttcatcaagtttgtgctgatccccatgtttgagaccgtgaccaagctgttccccatggtggaggagatcatgctgcagcccctgtgggagagccgggacagatatgaggagctgaagagaattgatgatgccatgaaggagctgcagaagaagacagacagcctgaccagcggggccacagagaagagccgggagaggagcagagatgtgaagaacagcgagggggactgtgcctag

SEQ ID NO: 18830 - DNA, 1623 bp, Artificial Sequence
  derived and/or modified sequence
atgggcagcggcagcagcagctaccggcccaaggccatctacctggacatcgacggccgtatacagaaagtgattttttcaaagtactgcaattcatctgacatcatggatcttttttgtattgctactggtttgccacgtaatacaactattagcctgttgacaactgacgatgccatggtgtccattgaccctactatgccagccaactccgaacggaacgagctcatcttatatacatctttacgaaacctcttgttcctgccaagtaaggagtcatgggcctcccaccagcacagcgttcagagcgaaacgtgtgggcaccaagctactctgcgcgccttcaaaataaacgagctaaaagccgaggtcgccaaccaccttgcggtgctcgagaagcgcgtggaattggagggactgaaagtggtggaaatcgagaaatgtaaatcagacatcaaaaaaatgcgcgaagaactggctgcaaggtcctcaagaacaaactgcccatgcaagtatagctttctggacaaccacaagaagcttacgcctcgaagggatgtgcctacgtatccaaaatacttactttctcctgaaactattgaggctcttcggaaaccgacgttcgacgtatggttatgggagcctaacgagatgctgtcgtgcttggaacacatgtaccacgacctggggttggtgcgcgacttttctataaatccagtgactttacgtcggtggcttttctgcgttcacgataactaccgaaacaatccttttcacaactttaggcactgcttttgcgtggcccagatgatgtacagcatggtgtggttgtgctccctgcaggagaaattttcccagaccgatattttaatccttatgactgccgccatctgccacgatcttgatcacccaggatacaataatacttaccagataaacgcgcgaacagagctggcagtgaggtataacgacatatctccacttgaaaaccatcattgcgctgttgcctttcagattctggctgagcccgaatgcaacatattttctaatatcccccctgacggattcaaacagatacgtcagggcatgattacgttgattttggccacagacatggccaggcatgccgagattatggactccttcaaagaaaagatggagaatttcgattactcaaatgaggaacatatgaccctcctgaagatgatcctaatcaagtgctgcgacattagcaacgaagtcagaccaatggaggtagccgaaccgtgggtcgactgcctcctcgaagagtacttcatgcagtcggaccgcgagaagtcagaaggcttacctgttgcccccttcatggacagagataaggtgacaaaagctaccgcgcagatcggcttcattaaatttgtgctgattcccatgttcgagacagtgactaagctgttccctatggtggaggagataatgctgcagcccctgtgggagtctagggacaggtatgaggaactgaagcgaattgacgatgcgatgaaggagctgcagaaaaagactgatagcctcacaagcggcgcaaccgagaagagtagggagcgctcccgcgatgtgaaaaactccgaaggcgactgcgcttag

SEQ ID NO: 18831 - DNA, 1875 bp, Artificial Sequence
  derived and/or modified sequence
acagtaaaaagtccgagtgcagccgccgggcgcaggatgggatccggctcctccagctaccggcccaaggccatctacctggacatcgatggacgcattcagaaggtaatcttcagcaagtactgcaactccagcgacatcatggacctgttctgcatcgccaccggcctgcctcggaacacgaccatctccctgctgaccaccgacgacgccatggtctccatcgaccccaccatgcccgcgaattcagaacggaatgagctcattctctatacatcactccgtaacttgttgtttttacctagtaaggagtcatgggcgtcccaccagcactccgtacaaagtgagacctgtggccatcaagcaactctccgagcattcaaaatcaatgaactgaaagctgaagttgcaaatcacttggctgtcctagagaaacgcgtggaattggaaggactaaaagtggtggagattgagaaatgcaagagtgacattaagaagatgagggaggagctggcggccagaagcagcaggaccaactgcccctgtaagtacagttttttggataaccacaagaagttgactcctcgacgcgatgttcccacttaccccaagtacctgctctctccagagaccatcgaggccctgcggaagccgacctttgacgtctggctttgggagcccaatgagatgctgagctgcctggagcacatgtaccacgacctcgggctggtcagggacttcagcatcaaccctgtcaccctcaggaggtggctgttctgcgtccacgacaactacagaaacaaccccttccacaacttccggcactgcttctgcgtggcccagatgatgtacagcatggtctggctctgcagtctccaggagaagttctcacaaacggatatcctgatcctaatgacagcggccatctgccacgatctggaccatcccggctacaacaacacgtaccagatcaatgcccgcacagagctggcggtccgctacaatgacatctcaccgctggagaaccaccactgcgccgtggccttccagatcctcgccgagcctgagtgcaacatcttctccaacatcccacctgatgggttcaagcagatccgacagggaatgatcacattaatcttggccactgacatggcaagacatgcagaaattatggattctttcaaagagaaaatggagaattttgactacagcaacgaggagcacatgaccctgctgaagatgattttgataaaatgctgtgatatctctaacgaggtccgtccaatggaagtcgcagagccttgggtggactgtttattagaggaatattttatgcagagcgaccgtgagaagtcagaaggccttcctgtggcaccgttcatggaccgagacaaagtgaccaaggccacagcccagattgggttcatcaagtttgtcctgatcccaatgtttgaaacagtgaccaagctcttccccatggttgaggagatcatgctgcagccactttgggaatcccgagatcgctacgaggagctgaagcggatagatgacgccatgaaagagttacagaagaagactgacagcttgacgtctggggccaccgagaagtccagagagagaagcagagatgtgaaaaacagtgaaggagactgtgcctgaggaaagcggggggcgtggctgcagttctggacgggctggccgagctgcgcgggatccttgtgcagggaagagctgccctgggcacctggcaccacaagaccatgttttctaagaaccattttgttcactgatacaaaaaaaaaaaaaggaattcatgatgctgtacagaattttatttttaaactgtcttttaaataatatattcttatacggaaa

SEQ ID NO: 18832 - DNA, 1623 bp, Artificial Sequence
  derived and/or modified sequence
atgggcagtggtagtagcagttacagaccaaaagccatatatctggatatagatggacggattcagaaagtgatcttttcaaaatactgtaactcctccgacattatggacctgttctgtatcgctacaggcctgcctaggaatacaaccatttcactcctgaccacagatgacgcaatggtgtcaattgatcccacaatgcctgcaaactcagaacggaacgaattaatactctacacaagcctacggaacctgctatttctcccgagtaaagagagctgggccagccatcaacacagcgttcagtcggaaacatgtggtcatcaggccactctgagggcgttcaaaattaatgagctcaaggccgaggtcgccaatcatctagccgtgctggagaagcgtgtcgaattggaggggctgaaggtggtggaaatcgaaaaatgcaagagtgacatcaaaaagatgagggaggaactagcagccaggagcagccggacaaactgtccctgtaaatacagcttcttagacaatcacaaaaaactgacacccagacgggatgtgcctacctatccaaagtacctgctgtctccggagacaattgaggctctcaggaagccaacctttgacgtttggctctgggagcccaatgagatgctgtcttgcctcgaacatatgtaccacgacctagggctagttcgggattttagcattaatcctgttaccttgcgtaggtggctcttttgtgtgcacgataactacaggaataatccattccataacttccgacactgtttttgcgtggcacagatgatgtacagcatggtgtggttgtgctccctgcaggagaaatttagccagacagatatcttgattctgatgacggctgctatatgtcatgatctagaccatcctggttataataatacctatcagattaatgctcgcaccgaactggccgtgcgctacaatgacatctcgccgctggagaaccatcattgtgccgtggcattccaaatcctcgcagagcccgaatgcaacatcttttctaatattcctcctgatggatttaagcaaatccggcagggcatgatcacactgatcctggcaaccgacatggcccgacacgctgagattatggactcttttaaggagaagatggaaaactttgattattctaatgaggagcacatgactctgctcaaaatgatccttatcaaatgttgcgacatcagcaatgaggtcaggcctatggaggtggctgagccttgggtcgactgccttttggaggagtacttcatgcaatcggacagagagaagagcgaggggcttcccgttgcaccctttatggaccgggacaaagtgacaaaggccacagctcagattgggttcattaagtttgtcctgatacccatgttcgagaccgttaccaagcttttccccatggtagaggaaattatgctccagcccctgtgggagtcaagggaccgatatgaagaacttaaaaggatcgacgatgcgatgaaggaactgcaaaagaagacagattcactgactagcggggctactgaaaaatctagggaaaggtccagagacgttaaaaattctgagggggattgtgcgtag

SEQ ID NO: 18833 - DNA, 1623 bp, Artificial Sequence
  derived and/or modified sequence
atgggcagcggcagcagcagctacagacccaaggccatctacctggacatcgacggcagaatccagaaggtgatcttcagcaagtactgcaacagcagcgacatcatggacctgttctgcatcgccaccggcctgcccagaaacaccaccatcagcctgctgaccaccgacgacgccatggtgagcatcgaccccaccatgcccgccaacagcgagagaaacgagctgatcctgtacaccagcctgagaaacctgctgttcctgcccagcaaggagagctgggccagccaccagcacagcgtgcagagcgagacctgcggccaccaggccaccctgagagccttcaagatcaacgagctgaaggccgaggtggccaaccacctggccgtgctggagaagagagtggagctggagggcctgaaggtggtggagatcgagaagtgcaagagcgacatcaagaagatgagagaggagctggccgccagaagcagcagaaccaactgcccctgcaagtacagcttcctggacaaccacaagaagctgacccccagaagagacgtgcccacctaccccaagtacctgctgagccccgagaccatcgaggccctgagaaagcccaccttcgacgtgtggctgtgggagcccaacgagatgctgagctgcctggagcacatgtaccacgacctgggcctggtgagagacttcagcatcaaccccgtgaccctgagaagatggctgttctgcgtgcacgacaactacagaaacaaccccttccacaacttcagacactgcttctgcgtggcccagatgatgtacagcatggtgtggctgtgcagcctgcaggagaagttcagccagaccgacatcctgatcctgatgaccgccgccatctgccacgacctggaccaccccggctacaacaacacctaccagatcaacgccagaaccgagctggccgtgagatacaacgacatcagccccctggagaaccaccactgcgccgtggccttccagatcctggccgagcccgagtgcaacatcttcagcaacatcccccccgacggcttcaagcagatcagacagggcatgatcaccctgatcctggccaccgacatggccagacacgccgagatcatggacagcttcaaggagaagatggagaacttcgactacagcaacgaggagcacatgaccctgctgaagatgatcctgatcaagtgctgcgacatcagcaacgaggtgagacccatggaggtggccgagccctgggtggactgcctgctggaggagtacttcatgcagagcgacagagagaagagcgagggcctgcccgtggcccccttcatggacagagacaaggtgaccaaggccaccgcccagatcggcttcatcaagttcgtgctgatccccatgttcgagaccgtgaccaagctgttccccatggtggaggagatcatgctgcagcccctgtgggagagcagagacagatacgaggagctgaagagaatcgacgacgccatgaaggagctgcagaagaagaccgacagcctgaccagcggcgccaccgagaagagcagagagagaagcagagacgtgaagaacagcgagggcgactgcgcctag

SEQ ID NO: 18834 - protein, 492 aa, Artificial Sequence
  derived and/or modified sequence
MDAFRRNTTISLLTTDDAMVSIDPTMPANSERTPYKVRPVAIKQLSEREELIQSVLAQVAEQFSRAFKINELKAEVANHLAVLEKRVELEGLKVVEIEKCKSDIKKMREELAARSSRTNCPCKYSFLDNHKKLTPRRDVPTYPKYLLSPETIEALRKPTFDVWLWEPNEMLSCLEHMYHDLGLVRDFSINPVTLRRWLFCVHDNYRNNPFHNFRHCFCVAQMMYSMVWLCSLQEKFSQTDILILMTAAICHDLDHPGYNNTYQINARTELAVRYNDISPLENHHCAVAFQILAEPECNIFSNIPPDGFKQIRQGMITLILATDMARHAEIMDSFKEKMENFDYSNEEHMTLLKMILIKCCDISNEVRPMEVAEPWVDCLLEEYFMQSDREKSEGLPVAPFMDRDKVTKATAQIGFIKFVLIPMFETVTKLFPMVEEIMLQPLWESRDRYEELKRIDDAMKELQKKTDSLTSGATEKSRERSRDVKNSEGDCA

SEQ ID NO: 18835 - DNA, 1479 bp, Artificial Sequence
  derived and/or modified sequence
atggacgcatttcggagaaatacgacaatctctttgctaacgactgatgacgcgatggtgagtatcgacccaactatgcctgcgaactctgaacggaccccatacaaagtaaggcctgtagccatcaagcagttaagcgagcgggaggagctcattcagtctgtgctcgcgcaagtggccgaacagtttagccgagcattcaagattaacgagctgaaggcagaggtggccaaccacctcgctgtgctggagaagcgggtcgaactggagggcctgaaagtcgtggaaatcgagaaatgtaaatctgatatcaagaagatgcgcgaagagctcgctgcacgaagctctagaaccaactgcccttgtaagtatagtttcttagacaatcataaaaaacttactcctcgccgcgatgttccgacctatcctaaatatctgctatcccccgaaacaattgaggcactgcggaaaccaacgtttgacgtgtggctgtgggagccaaatgagatgctgagctgtctcgaacatatgtaccatgacctcgggcttgttcgcgactttagcataaatcctgtcactcttcgtagatggctgttttgtgtgcacgacaactacagaaacaatccttttcataatttccgccactgcttctgtgtagcacagatgatgtacagcatggtgtggctctgcagtctccaggaaaagtttagccaaacagacatactcattctgatgaccgccgccatttgccatgatctagatcatcccgggtacaataatacataccaaatcaacgccagaacggagttagccgtccgatacaacgacatctcacctcttgaaaatcatcattgcgcagtggcctttcagatcctcgccgaacccgaatgcaacatctttagtaatatacctcccgatggcttcaaacagattcgacagggaatgattacactgattcttgcaacggatatggcccgacacgccgagatcatggattcatttaaagaaaaaatggagaactttgattatagcaacgaggagcacatgacactgctgaaaatgatcctaattaaatgttgtgacattagtaacgaagtgcggcccatggaagtggccgagccatgggtggattgcctactggaggaatacttcatgcagagcgacagggagaagtcagaaggtttgcccgtggcccctttcatggaccgcgataaggtgactaaggccacggcccagattggatttattaagttcgtactaattcccatgtttgaaacagtgactaagctgtttccaatggtggaggagattatgctccagcccctgtgggaatctagggatcgttatgaggagctcaagagaatcgacgacgccatgaaagagctgcagaagaagacagatagtctgacctctggtgccacagagaaatcgagggaaagatcccgtgatgtgaagaatagcgaaggcgattgtgcctag

SEQ ID NO: 18836 - DNA, 1479 bp, Artificial Sequence
  derived and/or modified sequence
atggatgccttcagaagaaacaccaccatcagcctgctgaccacagatgatgccatggtgtccattgaccccaccatgcctgccaacagcgagaggaccccctacaaggtgcggcctgtggccatcaagcagctgtctgagcgggaggagctgatccagagcgtgctggcccaggtggccgagcagttcagccgggccttcaagatcaatgagctgaaggccgaggtggccaaccacctggccgtgctggagaagagggtggagctggagggcctgaaggtggtggagattgagaagtgcaagagtgacatcaagaagatgagggaggagctggccgcccggagcagcaggaccaactgcccctgcaagtacagcttcctggacaaccacaagaagctgacccccaggagagatgtgcccacctaccccaagtacctgctgagccctgagaccatcgaggccctgaggaagcccacctttgatgtgtggctgtgggagcccaatgagatgctgagctgcctggagcacatgtaccatgacctgggcctggtgcgggacttcagcatcaaccctgtgaccctgcggcgctggctgttctgtgtgcatgacaactacagaaacaaccccttccacaacttccgccactgcttctgtgtggcccagatgatgtacagcatggtgtggctgtgcagcctgcaggagaagttcagccagacagacatcctgatcctgatgacagctgccatctgccacgacctggaccaccctggctacaacaacacctaccagatcaatgccaggacagagctggccgtgcgctacaatgacatcagccccctggagaaccaccactgtgctgtggccttccagatcctggccgagcctgagtgcaacatcttcagcaacatccccccagatggcttcaagcagatccggcagggcatgatcaccctcatcctggccacagacatggcccggcatgctgagatcatggacagcttcaaggagaagatggagaactttgactacagcaatgaggagcacatgaccctgctgaagatgatcctgatcaagtgctgtgacatcagcaatgaggtgcggcccatggaggtggccgagccctgggtggactgcctgctggaggagtacttcatgcagagcgaccgggagaagtctgagggcctgcctgtggcccccttcatggaccgggacaaggtgaccaaggccacagcccagatcggcttcatcaagtttgtgctgatccccatgtttgagaccgtgaccaagctgttccccatggtggaggagatcatgctgcagcccctgtgggagagccgggacagatatgaggagctgaagagaattgatgatgccatgaaggagctgcagaagaagacagacagcctgaccagcggggccacagagaagagccgggagaggagcagagatgtgaagaacagcgagggggactgtgcctag

SEQ ID NO: 18837 - DNA, 1479 bp, Artificial Sequence
  derived and/or modified sequence
atggacgccttccggcggaacaccaccatcagcctgctgaccaccgacgacgccatggtgagtattgaccccactatgcccgccaattctgagaggactccttacaaagttagacctgtggccattaaacaactttcggaaagagaagagctgattcagtcggttctcgcacaggtggctgagcagttcagtagagcttttaagataaacgaactgaaagctgaggtcgctaaccacctcgccgttcttgaaaagcgagtggagctggaaggtctgaaagtagtggaaattgagaagtgcaaatctgatattaagaaaatgcgggaggaactggcagcacgcagttccaggaccaattgcccatgcaaatatagtttcttggataatcacaaaaaattgacccccagaagggatgtccccacgtacccaaagtatctcctgagcccggaaaccatcgaggcccttcggaagccaacatttgatgtgtggctgtgggagccaaatgagatgctttcctgtctggagcacatgtaccatgatctcgggcttgtccgggacttctctatcaaccctgtcactctgcggcggtggcttttctgcgttcatgataactatagaaataatcccttccacaattttaggcactgtttttgcgtcgcccagatgatgtactccatggtgtggctctgtagtctccaggaaaagttcagccagacagatatcctgattctgatgactgccgctatctgtcatgacctggatcacccaggctacaacaatacctatcagattaatgctcgcaccgagctggccgttcgatataatgacatttcacccctggaaaaccatcattgcgctgtcgccttccagatcctggctgagcccgagtgtaacattttcagcaacatacctcctgatggcttcaagcaaatcagacaaggcatgatcacgctaattttggcaacggacatggcacgccacgcagagattatggattcttttaaggagaagatggaaaactttgattatagtaacgaggaacacatgaccctgctcaagatgattctcatcaaatgctgtgacatcagtaacgaagtacggccaatggaggttgccgaaccctgggtggattgccttctcgaggaatacttcatgcagagtgaccgagagaaaagcgaaggccttccggtggcgcctttcatggacagggacaaagtgacgaaggccactgcacagattggattcattaaattcgtactcattccaatgtttgaaacagtgaccaagttgtttcctatggtggaagagataatgttgcagcccctttgggagtcccgggatcgatacgaggagctgaaaaggatcgatgacgcaatgaaggagctgcagaaaaaaacggatagtttgacctctggcgccaccgagaagagccgggaacgctcgagagacgtgaagaattctgaaggtgactgcgcatag

SEQ ID NO: 18838 - DNA, 1783 bp, Artificial Sequence
  derived and/or modified sequence
acagtaaaaagtccgagtgcagccgccgggcgcaggatgggatccggctcctccagctaccggcccaaggccatctacctggacatcgatggacgcattcagaaggaacacgaccatctccctgctgaccaccgacgacgccatggtctccatcgaccccaccatgcccgcgaattcagaacgcactccgtacaaagtgagacctgtggccatcaagcaactctccgagagagaagaattaatccagagcgtgctggcgcaggttgcagagcagttctcaagagcattcaaaatcaatgaactgaaagctgaagttgcaaatcacttggctgtcctagagaaacgcgtggaattggaaggactaaaagtggtggagattgagaaatgcaagagtgacattaagaagatgagggaggagctggcggccagaagcagcaggaccaactgcccctgtaagtacagttttttggataaccacaagaagttgactcctcgacgcgatgttcccacttaccccaagtacctgctctctccagagaccatcgaggccctgcggaagccgacctttgacgtctggctttgggagcccaatgagatgctgagctgcctggagcacatgtaccacgacctcgggctggtcagggacttcagcatcaaccctgtcaccctcaggaggtggctgttctgcgtccacgacaactacagaaacaaccccttccacaacttccggcactgcttctgcgtggcccagatgatgtacagcatggtctggctctgcagtctccaggagaagttctcacaaacggatatcctgatcctaatgacagcggccatctgccacgatctggaccatcccggctacaacaacacgtaccagatcaatgcccgcacagagctggcggtccgctacaatgacatctcaccgctggagaaccaccactgcgccgtggccttccagatcctcgccgagcctgagtgcaacatcttctccaacatcccacctgatgggttcaagcagatccgacagggaatgatcacattaatcttggccactgacatggcaagacatgcagaaattatggattctttcaaagagaaaatggagaattttgactacagcaacgaggagcacatgaccctgctgaagatgattttgataaaatgctgtgatatctctaacgaggtccgtccaatggaagtcgcagagccttgggtggactgtttattagaggaatattttatgcagagcgaccgtgagaagtcagaaggccttcctgtggcaccgttcatggaccgagacaaagtgaccaaggccacagcccagattgggttcatcaagtttgtcctgatcccaatgtttgaaacagtgaccaagctcttccccatggttgaggagatcatgctgcagccactttgggaatcccgagatcgctacgaggagctgaagcggatagatgacgccatgaaagagttacagaagaagactgacagcttgacgtctggggccaccgagaagtccagagagagaagcagagatgtgaaaaacagtgaaggagactgtgcctgaggaaagcggggggcgtggctgcagttctggacgggctggccgagctgcgcgggatccttgtgcagggaagagctgccctgggcacctggcaccacaagaccatgttttctaagaaccattttgttcactgatacaaaaaaaaaaaaaggaattcatgatgctgtacagaattttatttttaaactgtcttttaaataatatattcttatacggaaa

SEQ ID NO: 18839 - DNA, 1479 bp, Artificial Sequence
  derived and/or modified sequence
atggatgctttccggcgtaacactacaatctccctattgactactgacgatgctatggtcagcatcgatcccactatgccagccaacagtgagaggaccccctataaagtgcgaccagtagcgatcaagcagctgagcgagcgggaagagctgatccagagcgtgctcgcccaagttgctgagcagttttctcgagcgtttaaaattaacgagctgaaagcagaggtcgccaaccatttagccgtgctggaaaaaagagttgagctggagggcctgaaggtggtggagattgagaaatgcaagtccgatatcaagaagatgagggaggagctggcagcaaggtcaagtcggaccaactgcccgtgcaaatactcttttctggacaatcataagaagctaacgccccgacgcgatgtgccgacctacccaaaatacttgctgtcacccgagaccatagaggctctgagaaaaccaacctttgatgtttggctgtgggagccaaatgaaatgttgtcctgccttgagcatatgtaccacgacctggggcttgtccgcgacttcagcatcaatcccgtcaccttacgcagatggttattttgtgtgcacgacaactatagaaacaacccttttcacaacttccggcactgtttttgtgtggcacagatgatgtacagcatggtgtggctgtgtagcctgcaggaaaagttctcacagaccgacatcctgatcttaatgacggcagcaatctgccatgacttggatcaccctgggtataacaacacatatcagattaatgcacgtacagaactcgccgtccgatataatgacatcagtcctctggaaaaccaccattgtgctgtggcatttcaaatactcgcggaaccagagtgcaacatattctcaaacattccgccagatgggtttaaacaaattcgacagggaatgattacgttaatccttgcaaccgatatggcccgacacgcggaaatcatggacagtttcaaggagaagatggagaactttgattattccaacgaagaacacatgacgttattgaagatgatcctcatcaaatgttgcgatattagtaacgaagtgcgcccaatggaggtggccgaaccatgggtggactgccttcttgaagagtatttcatgcagtctgacagggaaaagagcgagggtctacccgtggctccgttcatggacagggataaggtgactaaagccacggcccagattgggttcatcaagttcgtgcttataccgatgttcgaaactgttactaagctttttccaatggtcgaggaaattatgttgcagccactatgggagtctcgagatcgctacgaggagcttaagcggatcgatgatgccatgaaggagttacagaagaaaaccgattcgctgacctccggcgctaccgagaaatcacgggagaggtctcgcgacgttaagaattccgaaggagactgtgcgtag

SEQ ID NO: 18840 - DNA, 1479 bp, Artificial Sequence
  derived and/or modified sequence
atggacgccttcagaagaaacaccaccatcagcctgctgaccaccgacgacgccatggtgagcatcgaccccaccatgcccgccaacagcgagagaaccccctacaaggtgagacccgtggccatcaagcagctgagcgagagagaggagctgatccagagcgtgctggcccaggtggccgagcagttcagcagagccttcaagatcaacgagctgaaggccgaggtggccaaccacctggccgtgctggagaagagagtggagctggagggcctgaaggtggtggagatcgagaagtgcaagagcgacatcaagaagatgagagaggagctggccgccagaagcagcagaaccaactgcccctgcaagtacagcttcctggacaaccacaagaagctgacccccagaagagacgtgcccacctaccccaagtacctgctgagccccgagaccatcgaggccctgagaaagcccaccttcgacgtgtggctgtgggagcccaacgagatgctgagctgcctggagcacatgtaccacgacctgggcctggtgagagacttcagcatcaaccccgtgaccctgagaagatggctgttctgcgtgcacgacaactacagaaacaaccccttccacaacttcagacactgcttctgcgtggcccagatgatgtacagcatggtgtggctgtgcagcctgcaggagaagttcagccagaccgacatcctgatcctgatgaccgccgccatctgccacgacctggaccaccccggctacaacaacacctaccagatcaacgccagaaccgagctggccgtgagatacaacgacatcagccccctggagaaccaccactgcgccgtggccttccagatcctggccgagcccgagtgcaacatcttcagcaacatcccccccgacggcttcaagcagatcagacagggcatgatcaccctgatcctggccaccgacatggccagacacgccgagatcatggacagcttcaaggagaagatggagaacttcgactacagcaacgaggagcacatgaccctgctgaagatgatcctgatcaagtgctgcgacatcagcaacgaggtgagacccatggaggtggccgagccctgggtggactgcctgctggaggagtacttcatgcagagcgacagagagaagagcgagggcctgcccgtggcccccttcatggacagagacaaggtgaccaaggccaccgcccagatcggcttcatcaagttcgtgctgatccccatgttcgagaccgtgaccaagctgttccccatggtggaggagatcatgctgcagcccctgtgggagagcagagacagatacgaggagctgaagagaatcgacgacgccatgaaggagctgcagaagaagaccgacagcctgaccagcggcgccaccgagaagagcagagagagaagcagagacgtgaagaacagcgagggcgactgcgcctag

SEQ ID NO: 18841 - protein, 507 aa, Artificial Sequence
  derived and/or modified sequence
MGSGSSSYRPKAIYLDIDGRIQKVIFSKYCNSSDIMDLFCIATGLPRTPYKVRPVAIKQLSEREELIQSVLAQVAEQFSRAFKINELKAEVANHLAVLEKRVELEGLKVVEIEKCKSDIKKMREELAARSSRTNCPCKYSFLDNHKKLTPRRDVPTYPKYLLSPETIEALRKPTFDVWLWEPNEMLSCLEHMYHDLGLVRDFSINPVTLRRWLFCVHDNYRNNPFHNFRHCFCVAQMMYSMVWLCSLQEKFSQTDILILMTAAICHDLDHPGYNNTYQINARTELAVRYNDISPLENHHCAVAFQILAEPECNIFSNIPPDGFKQIRQGMITLILATDMARHAEIMDSFKEKMENFDYSNEEHMTLLKMILIKCCDISNEVRPMEVAEPWVDCLLEEYFMQSDREKSEGLPVAPFMDRDKVTKATAQIGFIKFVLIPMFETVTKLFPMVEEIMLQPLWESRDRYEELKRIDDAMKELQKKTDSLTSGATEKSRERSRDVKNSEGDCA

SEQ ID NO: 18842 - DNA, 1524 bp, Artificial Sequence
  derived and/or modified sequence
atgggttcaggttcgtcctcctatagacccaaggcaatctacctggatattgacgggaggattcagaaagtcattttctctaagtactgtaatagttccgacattatggatctcttctgcatcgccaccggcctgccccggactccttacaaggttcgccccgtggcaattaagcagttatcagaaagggaggagctgattcagtctgtgctagctcaggttgccgagcagttttcacgcgcttttaagataaacgaactgaaagctgaggtggctaatcaccttgccgtgctggagaagagggtggagctggaagggctgaaagtggttgagatcgagaagtgtaagtcggacatcaaaaagatgcgcgaagagctggccgcaaggagcagcaggactaattgtccttgcaagtactcttttttagataaccataagaaactgacccctagacgcgacgtacccacgtatccaaagtacctcctgagtcctgagactattgaggcgttgcgaaaacccaccttcgatgtctggctgtgggagcccaacgagatgctatcctgtctagaacatatgtaccacgacttggggctggtacgcgacttcagcatcaatcccgtgactcttcggagatggttgttctgcgttcatgacaattatagaaataaccccttccacaactttcgccattgtttttgcgtggcccagatgatgtactctatggtttggctgtgctccttgcaggagaaatttagccagaccgacatcttaatcctgatgaccgccgctatctgtcatgatctggaccaccctggatacaacaacacatatcagataaacgcaaggaccgagctggccgtgaggtacaatgatatctccccgctggaaaatcaccattgtgcagtcgcttttcagatcctcgccgaacctgaatgcaatatattcagtaacatccccccggatgggtttaaacagattagacaaggcatgatcacgctgattcttgccacggatatggcccggcatgcggagattatggacagtttcaaagagaaaatggagaacttcgactactctaacgaggaacacatgactcttctgaagatgatccttatcaaatgttgcgacatatcgaatgaagtcagaccgatggaggtggccgaaccctgggtggactgcttactggaagaatactttatgcagtcggacagggagaaatccgaagggcttcctgtggccccctttatggaccgcgacaaggtgactaaggcaacagctcagatcgggttcataaagttcgttcttataccaatgttcgagactgtgactaaacttttcccgatggttgaagagattatgctacagccgctttgggaaagccgcgataggtatgaagagctcaagcggatcgacgatgctatgaaagaattgcagaaaaaaaccgactcgctgacaagcggtgccaccgagaaatctagggaacgctccagggacgtgaaaaactctgaaggcgactgtgcttag

SEQ ID NO: 18843 - DNA, 1524 bp, Artificial Sequence
  derived and/or modified sequence
atgggcagcggcagcagcagctaccggcccaaggccatctacctggacattgatggccgcatccagaaggtgatcttcagcaagtactgcaacagcagtgacatcatggacctcttctgcatcgccaccggcctgcccaggaccccctacaaggtgcggcctgtggccatcaagcagctgtctgagcgggaggagctgatccagagcgtgctggcccaggtggccgagcagttcagccgggccttcaagatcaatgagctgaaggccgaggtggccaaccacctggccgtgctggagaagagggtggagctggagggcctgaaggtggtggagattgagaagtgcaagagtgacatcaagaagatgagggaggagctggccgcccggagcagcaggaccaactgcccctgcaagtacagcttcctggacaaccacaagaagctgaccccaagaagagatgtgcccacctaccccaagtacctgctgagccctgagaccatcgaggccctgaggaagcccacctttgatgtgtggctgtgggagcccaatgagatgctgagctgcctggagcacatgtaccatgacctgggcctggtgcgggacttcagcatcaaccctgtgaccctgcggcgctggctgttctgtgtgcatgacaactacagaaacaaccccttccacaacttccgccactgcttctgtgtggcccagatgatgtacagcatggtgtggctgtgcagcctgcaggagaagttcagccagacagacatcctgatcctgatgacagctgccatctgccacgacctggaccaccctggctacaacaacacctaccagatcaatgccaggacagagctggccgtgcgctacaatgacatcagccccctggagaaccaccactgtgctgtggccttccagatcctggccgagcctgagtgcaacatcttcagcaacatccccccagatggcttcaagcagatccggcagggcatgatcaccctcatcctggccacagacatggcccggcatgctgagatcatggacagcttcaaggagaagatggagaactttgactacagcaatgaggagcacatgaccctgctgaagatgatcctgatcaagtgctgtgacatcagcaatgaggtgcggcccatggaggtggccgagccctgggtggactgcctgctggaggagtacttcatgcagagcgaccgggagaagtctgagggcctgcctgtggcccccttcatggaccgggacaaggtgaccaaggccacagcccagatcggcttcatcaagtttgtgctgatccccatgtttgaaacagtgaccaagctgttccccatggtggaggagatcatgctgcagcccctgtgggagagccgggacagatatgaggagctgaagagaattgatgatgccatgaaggagctgcagaagaagacagacagcctgaccagcggggccacagagaagagccgggagaggagcagagatgtgaagaacagcgagggggactgtgcctag

SEQ ID NO: 18844 - DNA, 1524 bp, Artificial Sequence
  derived and/or modified sequence
atgggcagcggcagcagcagctaccggcccaaggccatctacctggacatagatggccgcatccagaaagtcatttttagcaaatactgtaattctagtgacatcatggacctcttttgtattgcaacagggctccctcggactccctacaaggtccggcctgtggcaatcaagcagctcagcgaacgggaagaactcatacagagcgtcctggcacaagtggcagaacagttttctcgcgctttcaaaatcaatgaacttaaagcagaggtagcgaatcatctggctgtactggagaaacgggtcgagctggaaggccttaaggtggtggagatcgaaaaatgtaaaagcgacatcaaaaaaatgcgagaggagctggcggcgcggagctctcgcactaactgcccttgcaagtattccttcctcgacaatcataaaaaattaactccccgccgcgatgtgcctacataccctaaatatctcctgtctccggagacaatcgaggccctgcggaaaccgacctttgatgtttggctttgggaaccgaacgagatgttaagctgcctggagcacatgtaccacgaccttgggcttgtaagggatttctctataaaccccgtcaccctgagacgttggctattctgtgtgcatgacaactacagaaacaacccctttcacaattttcgtcactgtttctgcgtcgcgcagatgatgtattcaatggtctggctctgctccctgcaggagaagttctcccagacagacattctgattctgatgacggctgctatctgccacgacctggatcaccccggctataacaacacataccaaattaatgcccgaactgaattggccgtacggtataacgacatttcccccttggagaatcaccactgtgccgtggccttccagatcctcgccgagcccgaatgcaacatcttctctaatatccctcctgacgggttcaagcagatacgtcaagggatgattacgttgatcctggcgactgacatggcaaggcacgctgagattatggactccttcaaagaaaagatggagaattttgattattccaacgaagaacatatgacattattgaaaatgattctgatcaagtgttgcgacataagcaatgaggtgagacccatggaagttgctgagccctgggtggattgtctgttggaggagtatttcatgcagtcagaccgcgaaaaaagcgaggggctccctgtggcgccattcatggatagagacaaggtgaccaaagccacagcacagatcggcttcattaaatttgtgctgatccctatgttcgaaaccgttaccaaactgttccctatggtagaagagatcatgctgcagccgctgtgggagtctcgagacaggtacgaagagctcaagaggattgacgatgccatgaaggagctgcaaaagaagactgacagcctcacaagcggtgcaaccgaaaaatcacgtgaacgctctagagacgtcaagaattccgaaggcgattgcgcgtag

SEQ ID NO: 18845 - DNA, 1776 bp, Artificial Sequence
  derived and/or modified sequence
acagtaaaaagtccgagtgcagccgccgggcgcaggatgggatccggctcctccagctaccggcccaaggccatctacctggacatcgatggacgcattcagaaggtaatcttcagcaagtactgcaactccagcgacatcatggacctgttctgcatcgccaccggcctgcctcgcactccgtacaaagtgagacctgtggccatcaagcaactctccgagagagaagaattaatccagagcgtgctggcgcaggttgcagagcagttctcaagagcattcaaaatcaatgaactgaaagctgaagttgcaaatcacttggctgtcctagagaaacgcgtggaattggaaggactaaaagtggtggagattgagaaatgcaagagtgacattaagaagatgagggaggagctggcggccagaagcagcaggaccaactgcccctgtaagtacagttttttggataaccacaagaagttgactcctcgacgcgatgttcccacttaccccaagtacctgctctctccagagaccatcgaggccctgcggaagccgacctttgacgtctggctttgggagcccaatgagatgctgagctgcctggagcacatgtaccacgacctcgggctggtcagggacttcagcatcaaccctgtcaccctcaggaggtggctgttctgcgtccacgacaactacagaaacaaccccttccacaacttccggcactgcttctgcgtggcccagatgatgtacagcatggtctggctctgcagtctccaggagaagttctcacaaacggatatcctgatcctaatgacagcggccatctgccacgatctggaccatcccggctacaacaacacgtaccagatcaatgcccgcacagagctggcggtccgctacaatgacatctcaccgctggagaaccaccactgcgccgtggccttccagatcctcgccgagcctgagtgcaacatcttctccaacatcccacctgatgggttcaagcagatccgacagggaatgatcacattaatcttggccactgacatggcaagacatgcagaaattatggattctttcaaagagaaaatggagaattttgactacagcaacgaggagcacatgaccctgctgaagatgattttgataaaatgctgtgatatctctaacgaggtccgtccaatggaagtcgcagagccttgggtggactgtttattagaggaatattttatgcagagcgaccgtgagaagtcagaaggccttcctgtggcaccgttcatggaccgagacaaagtgaccaaggccacagcccagattgggttcatcaagtttgtcctgatcccaatgtttgaaacagtgaccaagctcttccccatggttgaggagatcatgctgcagccactttgggaatcccgagatcgctacgaggagctgaagcggatagatgacgccatgaaagagttacagaagaagactgacagcttgacgtctggggccaccgagaagtccagagagagaagcagagatgtgaaaaacagtgaaggagactgtgcctgaggaaagcggggggcgtggctgcagttctggacgggctggccgagctgcgcgggatccttgtgcagggaagagctgccctgggcacctggcaccacaagaccatgttttctaagaaccattttgttcactgatacaaaaaaaaaaaaaggaattcatgatgctgtacagaattttatttttaaactgtcttttaaataatatattcttatacggaaa

SEQ ID NO: 18846 - DNA, 1524 bp, Artificial Sequence
  derived and/or modified sequence
atgggctccggtagttccagctatagacccaaggccatttacctcgatatcgacggcagaatacagaaggtgattttttcgaagtactgtaactcatcagatatcatggacctcttttgcatagcaacagggctgcccagaacaccatataaagtacgcccagttgccataaagcagctcagcgaaagggaagagctaattcaatcagtgctagcacaggtcgcggagcagttctccagagcctttaagattaacgagttgaaagcggaggtggcaaatcaccttgccgttcttgagaagagggtggaattggaaggactgaaggttgtggagattgagaagtgtaaatcagacattaagaagatgcgagaagagctggcagccagatcatcccgtactaactgcccatgcaagtactcattcctcgacaaccataagaaactcacccccagacgagacgtcccaacataccctaagtacctgctatcaccggagaccattgaggccttgagaaaaccaacgttcgacgtttggctctgggaacctaacgaaatgctgtcatgcctggaacatatgtaccacgatttgggtctagtcagggatttctctatcaaccctgtcacgttgaggcgttggctcttctgcgtgcatgacaattacagaaataaccccttccacaattttcggcattgtttttgtgtagctcagatgatgtattccatggtgtggctttgttcccttcaggagaaatttagccaaactgacatactcattttaatgaccgccgcaatatgccacgatctggatcatcctgggtacaacaacacttaccagataaacgccaggactgagctggccgttaggtataacgatatttccccactggagaatcaccattgcgccgtcgcattccagattcttgctgagcccgagtgtaatatttttagtaatattccccctgacggttttaagcagatcaggcagggaatgattacacttatcctcgccacggatatggcacgtcatgccgagataatggactcattcaaggagaagatggagaacttcgactattcaaatgaagaacacatgaccctgctaaagatgattctaatcaaatgctgcgatatcagtaacgaggtccgccctatggaggtggccgaaccatgggtggactgtctgctggaagagtactttatgcagagtgaccgggaaaagtccgaaggtctgcccgttgccccattcatggacagggacaaggtcacaaaggctactgcccaaattgggttcattaagttcgttttgattcctatgtttgaaaccgtgaccaaactgttccccatggtggaggaaatcatgctccagcctttgtgggagtctagggacagatacgaggagctgaaacgcattgacgatgctatgaaggaactgcagaagaaaactgattcactgacatcaggcgctacagagaaatcccgcgaaaggagtagagacgtcaaaaattctgaaggagactgtgcttag

SEQ ID NO: 18847 - DNA, 1524 bp, Artificial Sequence
  derived and/or modified sequence
atgggcagcggcagcagcagctacagacccaaggccatctacctggacatcgacggcagaatccagaaggtgatcttcagcaagtactgcaacagcagcgacatcatggacctgttctgcatcgccaccggcctgcccagaaccccctacaaggtgagacccgtggccatcaagcagctgagcgagagagaggagctgatccagagcgtgctggcccaggtggccgagcagttcagcagagccttcaagatcaacgagctgaaggccgaggtggccaaccacctggccgtgctggagaagagagtggagctggagggcctgaaggtggtggagatcgagaagtgcaagagcgacatcaagaagatgagagaggagctggccgccagaagcagcagaaccaactgcccctgcaagtacagcttcctggacaaccacaagaagctgacccccagaagagacgtgcccacctaccccaagtacctgctgagccccgagaccatcgaggccctgagaaagcccaccttcgacgtgtggctgtgggagcccaacgagatgctgagctgcctggagcacatgtaccacgacctgggcctggtgagagacttcagcatcaaccccgtgaccctgagaagatggctgttctgcgtgcacgacaactacagaaacaaccccttccacaacttcagacactgcttctgcgtggcccagatgatgtacagcatggtgtggctgtgcagcctgcaggagaagttcagccagaccgacatcctgatcctgatgaccgccgccatctgccacgacctggaccaccccggctacaacaacacctaccagatcaacgccagaaccgagctggccgtgagatacaacgacatcagccccctggagaaccaccactgcgccgtggccttccagatcctggccgagcccgagtgcaacatcttcagcaacatcccccccgacggcttcaagcagatcagacagggcatgatcaccctgatcctggccaccgacatggccagacacgccgagatcatggacagcttcaaggagaagatggagaacttcgactacagcaacgaggagcacatgaccctgctgaagatgatcctgatcaagtgctgcgacatcagcaacgaggtgagacccatggaggtggccgagccctgggtggactgcctgctggaggagtacttcatgcagagcgacagagagaagagcgagggcctgcccgtggcccccttcatggacagagacaaggtgaccaaggccaccgcccagatcggcttcatcaagttcgtgctgatccccatgttcgagaccgtgaccaagctgttccccatggtggaggagatcatgctgcagcccctgtgggagagcagagacagatacgaggagctgaagagaatcgacgacgccatgaaggagctgcagaagaagaccgacagcctgaccagcggcgccaccgagaagagcagagagagaagcagagacgtgaagaacagcgagggcgactgcgcctag

SEQ ID NO: 18848 - protein, 433 aa, Artificial Sequence
  derived and/or modified sequence
MDAFRRAFKINELKAEVANHLAVLEKRVELEGLKVVEIEKCKSDIKKMREELAARSSRTNCPCKYSFLDNHKKLTPRRDVPTYPKYLLSPETIEALRKPTFDVWLWEPNEMLSCLEHMYHDLGLVRDFSINPVTLRRWLFCVHDNYRNNPFHNFRHCFCVAQMMYSMVWLCSLQEKFSQTDILILMTAAICHDLDHPGYNNTYQINARTELAVRYNDISPLENHHCAVAFQILAEPECNIFSNIPPDGFKQIRQGMITLILATDMARHAEIMDSFKEKMENFDYSNEEHMTLLKMILIKCCDISNEVRPMEVAEPWVDCLLEEYFMQSDREKSEGLPVAPFMDRDKVTKATAQIGFIKFVLIPMFETVTKLFPMVEEIMLQPLWESRDRYEELKRIDDAMKELQKKTDSLTSGATEKSRERSRDVKNSEGDCA

SEQ ID NO: 18849 - DNA, 1302 bp, Artificial Sequence
  derived and/or modified sequence
atggacgccttcagacgggcctttaagatcaacgaattaaaagcagaagttgccaatcatctggcagtgctcgagaaacgtgtggaattggagggcctcaaggttgttgagatcgagaagtgtaagagcgatattaagaaaatgagagaggaactggcagccaggtcctcccggacaaattgcccttgtaaatattccttcttggacaaccacaagaagcttacgcctaggagggacgtgcctacttaccctaagtacttgctgagtccagagacaatcgaggcgctgcgcaaacctaccttcgacgtttggctgtgggagcccaatgagatgcttagctgtctggaacacatgtaccatgatctcgggctcgtgcgagacttctcgatcaaccctgtaaccctgcggcggtggttgttctgtgtacacgacaactacagaaacaatccatttcacaacttccggcattgcttttgcgttgctcagatgatgtactctatggtgtggctgtgtagcctccaagaaaaattctcccagaccgatattctcattctcatgaccgctgccatctgtcacgatctggatcatcccgggtacaacaatacgtatcaaatcaatgctagaacagaactggctgtcagatacaacgatatctcaccgttggaaaatcatcattgtgcagttgcgttccaaatcctggcggaacccgagtgtaacatcttttcgaatattccacccgatggattcaagcagatccgtcagggcatgatcacactcatcctcgctaccgacatggctcggcatgcagaaatcatggatagttttaaggagaagatggagaacttcgactactccaacgaggaacatatgactttgctgaagatgatcctgattaagtgctgcgacatctcgaatgaggttaggccaatggaggtggccgagccctgggttgactgcctgctggaagaatactttatgcagtcggaccgggagaaaagtgaagggttgcctgtggcccctttcatggacagagacaaggttacaaaggccaccgcacagatcgggtttattaagtttgtcctcatccctatgtttgagacagtgacgaagctgttccccatggttgaagaaattatgttacagcccttatgggagtcaagggatcgctatgaagaactcaaacgcattgacgacgcgatgaaagaattgcagaagaaaaccgatagcttgacctccggagccactgaaaagagtcgcgaacgttctagagacgtgaagaattcagaaggcgattgcgcctag

SEQ ID NO: 18850 - DNA, 1302 bp, Artificial Sequence
  derived and/or modified sequence
atggatgccttcagaagagccttcaagatcaatgagctgaaggccgaggtggccaaccacctggccgtgctggagaagagggtggagctggagggcctgaaggtggtggagattgagaagtgcaagagtgacatcaagaagatgagggaggagctggccgcccggagcagcaggaccaactgcccctgcaagtacagcttcctggacaaccacaagaagctgaccccaagaagagatgtgcccacctaccccaagtacctgctgagccctgagaccatcgaggccctgaggaagcccacctttgatgtgtggctgtgggagcccaatgagatgctgagctgcctggagcacatgtaccatgacctgggcctggtgcgggacttcagcatcaaccctgtgaccctgcggcgctggctgttctgtgtgcatgacaactacagaaacaaccccttccacaacttccgccactgcttctgtgtggcccagatgatgtacagcatggtgtggctgtgcagcctgcaggagaagttcagccagacagacatcctgatcctgatgacagctgccatctgccacgacctggaccaccctggctacaacaacacctaccagatcaatgccaggacagagctggccgtgcgctacaatgacatcagccccctggagaaccaccactgtgctgtggccttccagatcctggccgagcctgagtgcaacatcttcagcaacatccccccagatggcttcaagcagatccggcagggcatgatcaccctcatcctggccacagacatggcccggcatgctgagatcatggacagcttcaaggagaagatggagaactttgactacagcaatgaggagcacatgaccctgctgaagatgatcctgatcaagtgctgtgacatcagcaatgaggtgcggcccatggaggtggccgagccctgggtggactgcctgctggaggagtacttcatgcagagcgaccgggagaagtctgagggcctgcctgtggcccccttcatggaccgggacaaggtgaccaaggccacagcccagatcggcttcatcaagtttgtgctgatccccatgtttgaaacagtgaccaagctgttccccatggtggaggagatcatgctgcagcccctgtgggagagccgggacagatatgaggagctgaagagaattgatgatgccatgaaggagctgcagaagaagacagacagcctgaccagcggggccacagagaagagccgggagaggagcagagatgtgaagaacagcgagggggactgtgcctag

SEQ ID NO: 18851 - DNA, 1302 bp, Artificial Sequence
  derived and/or modified sequence
atggacgccttccggcgggccttcaagatcaacgagctgaaggccgaggtggcgaatcacctggccgtgttggagaagagagtggaactcgaaggacttaaggtggtggagatcgagaaatgcaagtctgacataaaaaagatgcgagaggaactggctgctcgctctagcagaacgaattgcccctgtaagtattctttcttagataatcacaaaaagctaacacccagaagagacgtccctacatatcccaagtaccttctttctccagagaccatcgaggctctgcgtaagccaacttttgatgtgtggctgtgggaacccaacgaaatgctgtcatgtctggagcacatgtaccacgacttagggctggtgagggatttctcgatcaatccagtcaccttacgacggtggctgttctgtgtgcatgacaactaccggaataacccctttcacaacttccgccactgcttctgtgtcgctcagatgatgtattctatggtgtggctttgttccttgcaggagaagttttctcagaccgatatcctgattcttatgactgccgcaatctgtcacgatcttgaccatcctggatacaacaatacctatcagattaacgcaaggaccgaactggcagtgaggtataatgatatctcacccctggagaaccatcactgcgcggttgcctttcaaattctcgccgagccagaatgtaacattttttccaacattccaccggacgggtttaagcagattcgacaagggatgataactcttatactcgccaccgacatggcaagacacgcagagataatggacagcttcaaagaaaagatggagaattttgactacagtaatgaggaacatatgaccctcctgaaaatgatactgatcaagtgttgtgacatttctaacgaggttagacccatggaggttgctgaaccttgggtggattgtctgctggaagagtattttatgcagtctgatcgagaaaagagcgagggtttacccgttgcgccctttatggatcgcgataaagtaaccaaagcaaccgcgcaaattggatttatcaaatttgtgcttatcccaatgttcgagactgtgactaagctcttccctatggtggaggagatcatgctgcagcctctgtgggagtcccgcgatcgttatgaagaattgaaacgcattgatgatgccatgaaggagctgcaaaagaagactgattctctcacctccggtgcgaccgaaaagagccgggagaggtcgcgggatgtcaaaaactccgagggagattgcgcctag

SEQ ID NO: 18852 - DNA, 1606 bp, Artificial Sequence
  derived and/or modified sequence
acagtaaaaagtccgagtgcagccgccgggcgcaggatgggatccggctcctccagctaccggcccaaggccatctacctggacatcgatggacgcattcagaagagcattcaaaatcaatgaactgaaagctgaagttgcaaatcacttggctgtcctagagaaacgcgtggaattggaaggactaaaagtggtggagattgagaaatgcaagagtgacattaagaagatgagggaggagctggcggccagaagcagcaggaccaactgcccctgtaagtacagttttttggataaccacaagaagttgactcctcgacgcgatgttcccacttaccccaagtacctgctctctccagagaccatcgaggccctgcggaagccgacctttgacgtctggctttgggagcccaatgagatgctgagctgcctggagcacatgtaccacgacctcgggctggtcagggacttcagcatcaaccctgtcaccctcaggaggtggctgttctgcgtccacgacaactacagaaacaaccccttccacaacttccggcactgcttctgcgtggcccagatgatgtacagcatggtctggctctgcagtctccaggagaagttctcacaaacggatatcctgatcctaatgacagcggccatctgccacgatctggaccatcccggctacaacaacacgtaccagatcaatgcccgcacagagctggcggtccgctacaatgacatctcaccgctggagaaccaccactgcgccgtggccttccagatcctcgccgagcctgagtgcaacatcttctccaacatcccacctgatgggttcaagcagatccgacagggaatgatcacattaatcttggccactgacatggcaagacatgcagaaattatggattctttcaaagagaaaatggagaattttgactacagcaacgaggagcacatgaccctgctgaagatgattttgataaaatgctgtgatatctctaacgaggtccgtccaatggaagtcgcagagccttgggtggactgtttattagaggaatattttatgcagagcgaccgtgagaagtcagaaggccttcctgtggcaccgttcatggaccgagacaaagtgaccaaggccacagcccagattgggttcatcaagtttgtcctgatcccaatgtttgaaacagtgaccaagctcttccccatggttgaggagatcatgctgcagccactttgggaatcccgagatcgctacgaggagctgaagcggatagatgacgccatgaaagagttacagaagaagactgacagcttgacgtctggggccaccgagaagtccagagagagaagcagagatgtgaaaaacagtgaaggagactgtgcctgaggaaagcggggggcgtggctgcagttctggacgggctggccgagctgcgcgggatccttgtgcagggaagagctgccctgggcacctggcaccacaagaccatgttttctaagaaccattttgttcactgatacaaaaaaaaaaaaaggaattcatgatgctgtacagaattttatttttaaactgtcttttaaataatatattcttatacggaaa

SEQ ID NO: 18853 - DNA, 1302 bp, Artificial Sequence
  derived and/or modified sequence
atggatgctttcagacgggcttttaagataaatgagttaaaagccgaggtcgccaatcacctggctgtgctcgaaaaaagggtggaattggagggactgaaagtggtggagatcgagaaatgcaagagcgatattaagaagatgagagaggagctcgcagccaggagttctcggacgaattgtccttgcaaatattcgtttctggacaaccataaaaaactcactcctaggcgtgacgtgccaacataccccaagtatctactcagtccggagactattgaagctctcagaaaacccacttttgacgtttggctgtgggagccgaacgaaatgctgtcatgtttggaacacatgtaccacgaccttggtctggtgagggattttagcatcaacccagtgaccctacgacgttggctgttctgcgtgcacgacaactataggaacaaccctttccacaacttccggcactgcttctgcgttgcgcagatgatgtactctatggtatggctgtgtagcttgcaagaaaaattttcacagactgacattttgattctgatgacagcggctatctgtcatgatctggaccatccgggatacaacaatacttaccagatcaacgctcgtacggagctggccgtccggtataacgatataagcccgctggagaaccaccactgtgctgttgctttccagatactggcggaacctgagtgcaacatcttctctaatataccccctgatggtttcaagcagatccgacaaggtatgatcacattgatccttgccaccgatatggcacgccatgccgagatcatggactctttcaaggaaaaaatggagaacttcgattactctaacgaagagcatatgactctgctgaagatgattttgatcaaatgctgcgacatttctaatgaagtgagacccatggaagttgctgagccatgggttgattgtctccttgaagagtacttcatgcagtcggaccgcgagaagagcgagggactgcccgtagccccttttatggatagggataaggtcaccaaagctaccgcccagattggattcatcaaattcgtgttaataccaatgttcgaaaccgtgaccaagttattccccatggtggaggaaattatgctgcagcccctgtgggaaagtcgcgatcgatacgaagagctcaagcgcatcgatgacgctatgaaggagttgcaaaagaagacagactccttaacatccggcgcaaccgagaaaagtcgggaacgctcccgggacgtcaagaactccgaaggtgactgcgcttag

SEQ ID NO: 18854 - DNA, 1302 bp, Artificial Sequence
  derived and/or modified sequence
atggacgccttcagaagagccttcaagatcaacgagctgaaggccgaggtggccaaccacctggccgtgctggagaagagagtggagctggagggcctgaaggtggtggagatcgagaagtgcaagagcgacatcaagaagatgagagaggagctggccgccagaagcagcagaaccaactgcccctgcaagtacagcttcctggacaaccacaagaagctgacccccagaagagacgtgcccacctaccccaagtacctgctgagccccgagaccatcgaggccctgagaaagcccaccttcgacgtgtggctgtgggagcccaacgagatgctgagctgcctggagcacatgtaccacgacctgggcctggtgagagacttcagcatcaaccccgtgaccctgagaagatggctgttctgcgtgcacgacaactacagaaacaaccccttccacaacttcagacactgcttctgcgtggcccagatgatgtacagcatggtgtggctgtgcagcctgcaggagaagttcagccagaccgacatcctgatcctgatgaccgccgccatctgccacgacctggaccaccccggctacaacaacacctaccagatcaacgccagaaccgagctggccgtgagatacaacgacatcagccccctggagaaccaccactgcgccgtggccttccagatcctggccgagcccgagtgcaacatcttcagcaacatcccccccgacggcttcaagcagatcagacagggcatgatcaccctgatcctggccaccgacatggccagacacgccgagatcatggacagcttcaaggagaagatggagaacttcgactacagcaacgaggagcacatgaccctgctgaagatgatcctgatcaagtgctgcgacatcagcaacgaggtgagacccatggaggtggccgagccctgggtggactgcctgctggaggagtacttcatgcagagcgacagagagaagagcgagggcctgcccgtggcccccttcatggacagagacaaggtgaccaaggccaccgcccagatcggcttcatcaagttcgtgctgatccccatgttcgagaccgtgaccaagctgttccccatggtggaggagatcatgctgcagcccctgtgggagagcagagacagatacgaggagctgaagagaatcgacgacgccatgaaggagctgcagaagaagaccgacagcctgaccagcggcgccaccgagaagagcagagagagaagcagagacgtgaagaacagcgagggcgactgcgcctag

SEQ ID NO: 18855 - protein, 459 aa, Artificial Sequence
  derived and/or modified sequence
MDAFRRNTTISLLTTDDAMVSIDPTMPANSERAFKINELKAEVANHLAVLEKRVELEGLKVVEIEKCKSDIKKMREELAARSSRTNCPCKYSFLDNHKKLTPRRDVPTYPKYLLSPETIEALRKPTFDVWLWEPNEMLSCLEHMYHDLGLVRDFSINPVTLRRWLFCVHDNYRNNPFHNFRHCFCVAQMMYSMVWLCSLQEKFSQTDILILMTAAICHDLDHPGYNNTYQINARTELAVRYNDISPLENHHCAVAFQILAEPECNIFSNIPPDGFKQIRQGMITLILATDMARHAEIMDSFKEKMENFDYSNEEHMTLLKMILIKCCDISNEVRPMEVAEPWVDCLLEEYFMQSDREKSEGLPVAPFMDRDKVTKATAQIGFIKFVLIPMFETVTKLFPMVEEIMLQPLWESRDRYEELKRIDDAMKELQKKTDSLTSGATEKSRERSRDVKNSEGDCA

SEQ ID NO: 18856 - DNA, 1380 bp, Artificial Sequence
  derived and/or modified sequence
atggacgcgttccgtcgtaacacgacaatctcactgctgacgaccgatgacgcaatggtgtccatcgatcccaccatgccagcaaactcagagcgcgcattcaaaattaacgaattgaaggccgaagtggcgaaccacctcgctgttctggaaaaacgcgtggagcttgaaggcttaaaagttgtggaaattgaaaagtgcaaaagcgatattaagaagatgagggaagagctagccgctagaagttcacgaacgaattgtccatgtaagtacagcttcctcgacaaccataaaaagcttaccccaaggagagatgtcccgacttaccccaagtacctgctgtcaccggagaccatagaggccctgcgaaagcccacgttcgacgtttggctttgggagccgaacgagatgttatcctgtcttgagcatatgtatcacgatctgggtcttgtcagggacttcagtataaacccggtgacactgaggcgctggttgttttgcgtgcacgacaactacaggaataacccattccataatttcagacattgcttctgtgtggcccaaatgatgtactctatggtgtggctctgctcgctccaagagaaatttagccaaacggatatcctgatcctcatgaccgcggccatatgccacgacctggatcatcccggttataataatacctaccagatcaacgcccggactgaactggcagttcggtataacgacatttcgccattggagaatcaccactgcgcagtggcctttcagattctggccgagcctgaatgtaatattttttcaaacattccgcctgatgggtttaagcagattcgacagggtatgataacactcattcttgctaccgatatggctcggcacgccgaaattatggactccttcaaggaaaaaatggagaatttcgactatagcaacgaggagcacatgacactgctgaaaatgatactcatcaagtgctgcgatatttcaaatgaagttaggcccatggaggtggcagagccctgggtggattgcctgctggaagagtacttcatgcagtccgaccgcgagaaatcggagggtttgcctgtggctccttttatggatcgtgataaggtgaccaaagcaaccgctcagattggatttattaagttcgtgcttatccccatgtttgaaactgtgactaagctcttcccaatggtcgaagagataatgctgcagcccttatgggagtcaagggataggtatgaagaactgaaacgaatcgacgatgcaatgaaggagctccagaagaaaaccgattccctcaccagtggggcgactgagaagagtcgggagaggtctagagatgtgaaaaattccgagggagattgtgcctag

SEQ ID NO: 18857 - DNA, 1380 bp, Artificial Sequence
  derived and/or modified sequence
atggatgccttcagaagaaacaccaccatcagcctgctgaccacagatgatgccatggtgtccattgaccccaccatgcctgccaacagcgagcgggccttcaagatcaatgagctgaaggccgaggtggccaaccacctggccgtgctggagaagagggtggagctggagggcctgaaggtggtggagattgagaagtgcaagagtgacatcaagaagatgagggaggagctggccgcccggagcagcaggaccaactgcccctgcaagtacagcttcctggacaaccacaagaagctgaccccaagaagagatgtgcccacctaccccaagtacctgctgagccctgagaccatcgaggccctgaggaagcccacctttgatgtgtggctgtgggagcccaatgagatgctgagctgcctggagcacatgtaccatgacctgggcctggtgcgggacttcagcatcaaccctgtgaccctgcggcgctggctgttctgtgtgcatgacaactacagaaacaaccccttccacaacttccgccactgcttctgtgtggcccagatgatgtacagcatggtgtggctgtgcagcctgcaggagaagttcagccagacagacatcctgatcctgatgacagctgccatctgccacgacctggaccaccctggctacaacaacacctaccagatcaatgccaggacagagctggccgtgcgctacaatgacatcagccccctggagaaccaccactgtgctgtggccttccagatcctggccgagcctgagtgcaacatcttcagcaacatccccccagatggcttcaagcagatccggcagggcatgatcaccctcatcctggccacagacatggcccggcatgctgagatcatggacagcttcaaggagaagatggagaactttgactacagcaatgaggagcacatgaccctgctgaagatgatcctgatcaagtgctgtgacatcagcaatgaggtgcggcccatggaggtggccgagccctgggtggactgcctgctggaggagtacttcatgcagagcgaccgggagaagtctgagggcctgcctgtggcccccttcatggaccgggacaaggtgaccaaggccacagcccagatcggcttcatcaagtttgtgctgatccccatgtttgaaacagtgaccaagctgttccccatggtggaggagatcatgctgcagcccctgtgggagagccgggacagatatgaggagctgaagagaattgatgatgccatgaaggagctgcagaagaagacagacagcctgaccagcggggccacagagaagagccgggagaggagcagagatgtgaagaacagcgagggggactgtgcctag

SEQ ID NO: 18858 - DNA, 1380 bp, Artificial Sequence
  derived and/or modified sequence
atggacgccttccggcggaacaccaccatcagcctgctgaccaccgatgacgctatggtctcaatagaccctacaatgcccgctaattctgagcgcgcattcaaaattaatgagttgaaagccgaagtggctaaccacctggctgtgctcgaaaagagagtggagctggagggcctgaaggtggtggaaatcgaaaagtgtaagagtgatatcaagaaaatgcgagaagaacttgccgccagatcatccaggactaattgcccctgtaaatactctttccttgataaccacaagaaactgacacctcgccgggatgtaccaacctatcctaaatatttgctctcccctgagaccattgaggcactgagaaaaccaacattcgacgtctggctgtgggaacctaatgaaatgctgtcctgtctcgagcatatgtaccacgacttgggtctcgtgcgcgatttctcaatcaacccggtgacccttcgtcgctggctattctgtgttcacgacaactatcgtaataacccgttccataatttccggcattgcttctgtgttgctcagatgatgtacagtatggtttggctatgtagcttacaagaaaagttcagtcagaccgacatccttatcctgatgaccgcggcaatatgccacgacttagatcatccgggctataacaatacttatcagattaacgcccgaacggaactagccgtgcgctacaatgacataagtcctctcgaaaaccatcactgtgcagtggccttccagatattggctgagcccgaatgtaacatcttctctaatattccacccgacggattcaagcagattcgtcaagggatgataaccttgatcctggccactgacatggcaaggcacgccgaaatcatggacagtttcaaagagaaaatggaaaattttgactatagtaatgaagagcatatgacgctactgaaaatgatcttgataaaatgttgtgacattagtaacgaagtgaggcccatggaggtcgctgaaccctgggtcgattgcttacttgaagagtactttatgcagagcgatcgtgagaaatcggaggggctcccagtggccccctttatggatcgagacaaggtaactaaggccaccgctcaaattggattcatcaagtttgtcttaatcccgatgtttgaaaccgttacaaaactgtttccaatggtggaggagatcatgctgcagccgttatgggagtccagagatcgctacgaagagctgaagcgcatcgatgatgcaatgaaagaattacagaagaaaactgactctttaaccagtggcgctacagagaagagtcgagagcgttccagggacgtaaaaaattccgaaggggactgcgcatag

SEQ ID NO: 18859 - DNA, 1684 bp, Artificial Sequence
  derived and/or modified sequence
acagtaaaaagtccgagtgcagccgccgggcgcaggatgggatccggctcctccagctaccggcccaaggccatctacctggacatcgatggacgcattcagaaggaacacgaccatctccctgctgaccaccgacgacgccatggtctccatcgaccccaccatgcccgcgaattcagaacgagcattcaaaatcaatgaactgaaagctgaagttgcaaatcacttggctgtcctagagaaacgcgtggaattggaaggactaaaagtggtggagattgagaaatgcaagagtgacattaagaagatgagggaggagctggcggccagaagcagcaggaccaactgcccctgtaagtacagttttttggataaccacaagaagttgactcctcgacgcgatgttcccacttaccccaagtacctgctctctccagagaccatcgaggccctgcggaagccgacctttgacgtctggctttgggagcccaatgagatgctgagctgcctggagcacatgtaccacgacctcgggctggtcagggacttcagcatcaaccctgtcaccctcaggaggtggctgttctgcgtccacgacaactacagaaacaaccccttccacaacttccggcactgcttctgcgtggcccagatgatgtacagcatggtctggctctgcagtctccaggagaagttctcacaaacggatatcctgatcctaatgacagcggccatctgccacgatctggaccatcccggctacaacaacacgtaccagatcaatgcccgcacagagctggcggtccgctacaatgacatctcaccgctggagaaccaccactgcgccgtggccttccagatcctcgccgagcctgagtgcaacatcttctccaacatcccacctgatgggttcaagcagatccgacagggaatgatcacattaatcttggccactgacatggcaagacatgcagaaattatggattctttcaaagagaaaatggagaattttgactacagcaacgaggagcacatgaccctgctgaagatgattttgataaaatgctgtgatatctctaacgaggtccgtccaatggaagtcgcagagccttgggtggactgtttattagaggaatattttatgcagagcgaccgtgagaagtcagaaggccttcctgtggcaccgttcatggaccgagacaaagtgaccaaggccacagcccagattgggttcatcaagtttgtcctgatcccaatgtttgaaacagtgaccaagctcttccccatggttgaggagatcatgctgcagccactttgggaatcccgagatcgctacgaggagctgaagcggatagatgacgccatgaaagagttacagaagaagactgacagcttgacgtctggggccaccgagaagtccagagagagaagcagagatgtgaaaaacagtgaaggagactgtgcctgaggaaagcggggggcgtggctgcagttctggacgggctggccgagctgcgcgggatccttgtgcagggaagagctgccctgggcacctggcaccacaagaccatgttttctaagaaccattttgttcactgatacaaaaaaaaaaaaaggaattcatgatgctgtacagaattttatttttaaactgtcttttaaataatatattcttatacggaaa

SEQ ID NO: 18860 - DNA, 1380 bp, Artificial Sequence
  derived and/or modified sequence
atggatgcctttagacgtaacactaccattagcttactcacaactgacgatgccatggtgtctattgacccgacaatgccagcaaactccgagagggcctttaagatcaacgagttgaaggcagaggtggctaatcaccttgccgtgctcgagaaaagggttgagctggagggcttgaaggtggtggagatcgagaaatgcaaatcagatatcaagaagatgcgggaggagctggcggcacgcagctctagaacgaattgtccttgcaagtattcattcttggacaaccacaaaaagctgacaccacgtcgcgacgtgcccacgtacccaaagtacctgctttcccccgaaactattgaggccctgcggaaaccgacatttgacgtctggttatgggaacctaacgagatgctctcttgcctggaacatatgtaccacgacctgggtctggtgcgggacttcagtatcaaccctgtcacactgcgaaggtggctcttctgcgtgcacgataactataggaataacccttttcacaattttaggcactgcttttgcgtggcccaaatgatgtacagtatggtctggttatgcagcctgcaggagaagttttcccagacagacattctcattctgatgacagccgctatctgccacgatttggaccaccctgggtacaataacacataccagatcaacgcccgaacagaactggctgtacgttacaacgacatttcaccgctggagaaccatcattgcgctgtcgcttttcaaattctggccgagccagagtgtaacatcttctcgaatatccccccagacggctttaaacagatcaggcagggaatgatcacccttatcctggccaccgatatggcgagacatgccgaaatcatggacagctttaaagaaaaaatggagaacttcgactattcaaacgaagagcacatgacccttttaaagatgatccttatcaagtgctgtgatatcagcaacgaggtgcgacctatggaggtcgctgaaccctgggtggattgcttactagaggagtatttcatgcagtccgacagggaaaaatctgagggcctccccgtcgccccatttatggatagagacaaagtaactaaggctactgcccagatcggtttcattaagttcgtgctgatcccgatgttcgaaacggtgacaaaactattcccaatggtggaagaaataatgttgcagccgctttgggaaagcagggatcgatacgaagagctcaaaagaatagatgacgcaatgaaggaattgcagaagaagaccgactcccttacttcaggggctacggaaaagagcagagagaggagtagagatgttaagaatagcgagggtgattgtgcatag

SEQ ID NO: 18861 - DNA, 1380 bp, Artificial Sequence
  derived and/or modified sequence
atggacgccttcagaagaaacaccaccatcagcctgctgaccaccgacgacgccatggtgagcatcgaccccaccatgcccgccaacagcgagagagccttcaagatcaacgagctgaaggccgaggtggccaaccacctggccgtgctggagaagagagtggagctggagggcctgaaggtggtggagatcgagaagtgcaagagcgacatcaagaagatgagagaggagctggccgccagaagcagcagaaccaactgcccctgcaagtacagcttcctggacaaccacaagaagctgacccccagaagagacgtgcccacctaccccaagtacctgctgagccccgagaccatcgaggccctgagaaagcccaccttcgacgtgtggctgtgggagcccaacgagatgctgagctgcctggagcacatgtaccacgacctgggcctggtgagagacttcagcatcaaccccgtgaccctgagaagatggctgttctgcgtgcacgacaactacagaaacaaccccttccacaacttcagacactgcttctgcgtggcccagatgatgtacagcatggtgtggctgtgcagcctgcaggagaagttcagccagaccgacatcctgatcctgatgaccgccgccatctgccacgacctggaccaccccggctacaacaacacctaccagatcaacgccagaaccgagctggccgtgagatacaacgacatcagccccctggagaaccaccactgcgccgtggccttccagatcctggccgagcccgagtgcaacatcttcagcaacatcccccccgacggcttcaagcagatcagacagggcatgatcaccctgatcctggccaccgacatggccagacacgccgagatcatggacagcttcaaggagaagatggagaacttcgactacagcaacgaggagcacatgaccctgctgaagatgatcctgatcaagtgctgcgacatcagcaacgaggtgagacccatggaggtggccgagccctgggtggactgcctgctggaggagtacttcatgcagagcgacagagagaagagcgagggcctgcccgtggcccccttcatggacagagacaaggtgaccaaggccaccgcccagatcggcttcatcaagttcgtgctgatccccatgttcgagaccgtgaccaagctgttccccatggtggaggagatcatgctgcagcccctgtgggagagcagagacagatacgaggagctgaagagaatcgacgacgccatgaaggagctgcagaagaagaccgacagcctgaccagcggcgccaccgagaagagcagagagagaagcagagacgtgaagaacagcgagggcgactgcgcctag

SEQ ID NO: 18862 - protein, 491 aa, Artificial Sequence
  derived and/or modified sequence
MGSGSSSYRPKAIYLDIDGRIQKEHDHLPADHRRRHGLHRPHHAREFRTHSVQSETCGHQATLRAFKINELKAEVANHLAVLEKRVELEGLKVVEIEKCKSDIKKMREELAARSSRTNCPCKYSFLDNHKKLTPRRDVPTYPKYLLSPETIEALRKPTFDVWLWEPNEMLSCLEHMYHDLGLVRDFSINPVTLRRWLFCVHDNYRNNPFHNFRHCFCVAQMMYSMVWLCSLQEKFSQTDILILMTAAICHDLDHPGYNNTYQINARTELAVRYNDISPLENHHCAVAFQILAEPECNIFSNIPPDGFKQIRQGMITLILATDMARHAEIMDSFKEKMENFDYSNEEHMTLLKMILIKCCDISNEVRPMEVAEPWVDCLLEEYFMQSDREKSEGLPVAPFMDRDKVTKATAQIGFIKFVLIPMFETVTKLFPMVEEIMLQPLWESRDRYEELKRIDDAMKELQKKTDSLTSGATEKSRERSRDVKNSEGDCA

SEQ ID NO: 18863 - DNA, 1476 bp, Artificial Sequence
  derived and/or modified sequence
atgggcagcggaagctcaagttacagaccaaaggccatttatcttgatatcgacgggcgaatccagaaggaacatgaccatctcccagcggaccacaggagacggcacggtttgcaccgcccacaccatgccagagaatttcggactcactccgtccagtcggaaacctgtggccatcaggccaccctccgggcatttaagataaacgagctcaaggccgaagttgctaaccacctggcagtactagaaaagagagtggaactggagggcctcaaagtggttgaaatcgaaaagtgcaagtcagatattaagaaaatgcgcgaagaactggcggcgaggagctcacgtacgaactgtccttgcaagtattcttttctggacaaccataaaaaacttaccccaagacgagatgtgcctacttatcccaaatatttgctgtccccggaaacaatcgaagctcttagaaagcccactttcgacgtgtggctgtgggagccaaatgaaatgctgagttgtttagaacatatgtatcacgacctcgggcttgtcagggatttctcaatcaaccctgtaaccctccgtcgttggttattttgcgtgcatgacaactatcgcaacaatccctttcataatttccgtcattgtttttgcgtggctcaaatgatgtacagtatggtctggctgtgtagcctgcaggagaagttttcacaaactgacattcttatcctcatgactgcagctatctgccacgatctcgaccatccgggctacaataatacataccagattaacgccagaactgaactggcagtcaggtacaatgacatttcccccttggagaatcatcactgtgccgtggcatttcagattttggcggagcccgagtgtaacattttctcaaacatccctccagacggattcaagcaaatacgccagggcatgattaccctgattctggccaccgacatggctaggcacgcggaaatcatggacagtttcaaggagaaaatggagaacttcgactattcgaatgaggaacacatgacccttctgaaaatgatcttgatcaaatgctgcgacatcagtaatgaggttcgaccaatggaggttgcagagccctgggttgactgtttactcgaggaatactttatgcagagcgatagagagaaatccgaaggtctgcctgtggcaccattcatggacagagacaaagttaccaaggctacagcccagatcgggtttataaagttcgtgctcattcccatgttcgagaccgttacaaagctcttccctatggtggaagaaatcatgctccagcctctctgggagagtagagaccggtacgaggagcttaaacggatcgacgatgcaatgaaggagctgcagaaaaagacggatagtctcacgtccggcgccaccgagaaatcacgcgaacgcagtcgggatgttaaaaattcagaaggagattgcgcctag

SEQ ID NO: 18864 - DNA, 1476 bp, Artificial Sequence
  derived and/or modified sequence
atgggcagcggcagcagcagctaccggcccaaggccatctacctggacattgatggccgcatccagaaggagcatgaccacctgcctgctgaccacagaagaagacatggcctgcaccggccccaccacgcccgggagttccgcacccacagcgtgcagagcgagacctgtggccaccaggccaccctgcgggccttcaagatcaatgagctgaaggccgaggtggccaaccacctggccgtgctggagaagagggtggagctggagggcctgaaggtggtggagattgagaagtgcaagagtgacatcaagaagatgagggaggagctggccgcccggagcagcaggaccaactgcccctgcaagtacagcttcctggacaaccacaagaagctgaccccaagaagagatgtgcccacctaccccaagtacctgctgagccctgagaccatcgaggccctgaggaagcccacctttgatgtgtggctgtgggagcccaatgagatgctgagctgcctggagcacatgtaccatgacctgggcctggtgcgggacttcagcatcaaccctgtgaccctgcggcgctggctgttctgtgtgcatgacaactacagaaacaaccccttccacaacttccgccactgcttctgtgtggcccagatgatgtacagcatggtgtggctgtgcagcctgcaggagaagttcagccagacagacatcctgatcctgatgacagctgccatctgccacgacctggaccaccctggctacaacaacacctaccagatcaatgccaggacagagctggccgtgcgctacaatgacatcagccccctggagaaccaccactgtgctgtggccttccagatcctggccgagcctgagtgcaacatcttcagcaacatccccccagatggcttcaagcagatccggcagggcatgatcaccctcatcctggccacagacatggcccggcatgctgagatcatggacagcttcaaggagaagatggagaactttgactacagcaatgaggagcacatgaccctgctgaagatgatcctgatcaagtgctgtgacatcagcaatgaggtgcggcccatggaggtggccgagccctgggtggactgcctgctggaggagtacttcatgcagagcgaccgggagaagtctgagggcctgcctgtggcccccttcatggaccgggacaaggtgaccaaggccacagcccagatcggcttcatcaagtttgtgctgatccccatgtttgaaacagtgaccaagctgttccccatggtggaggagatcatgctgcagcccctgtgggagagccgggacagatatgaggagctgaagagaattgatgatgccatgaaggagctgcagaagaagacagacagcctgaccagcggggccacagagaagagccgggagaggagcagagatgtgaagaacagcgagggggactgtgcctag

SEQ ID NO: 18865 - DNA, 1476 bp, Artificial Sequence
  derived and/or modified sequence
atgggcagcggcagcagcagctaccggcccaaggccatctacctggacattgacggcagaattcaaaaggagcacgaccatctcccagccgatcatcgcaggcgccatgggcttcataggccgcatcatgctcgagagttcagaacccacagcgtacagagcgaaacctgcggtcaccaagccaccctccgggcattcaagattaacgaattgaaggccgaggtcgccaatcacctggctgtccttgagaagcgtgtggagctagaggggctcaaagtggtggagatcgagaaatgtaaaagcgatattaagaagatgcgtgaggagctggccgcccggagctctcgaaccaactgtccctgcaaatacagttttctggacaatcacaaaaaattgacccccaggcgagacgtgcccacatatccgaagtatcttttatctcctgagaccatcgaggccctgagaaagccaacatttgatgtctggctctgggagcctaacgaaatgctcagttgtctcgaacatatgtatcatgacttgggccttgtgagggacttctctatcaaccctgtcaccctgcggagatggcttttctgtgtgcacgataattacagaaataacccctttcataactttcgtcattgcttctgtgtcgctcagatgatgtactccatggtctggctgtgtagtttgcaggagaagtttagccagactgacatactgatactgatgaccgcagcaatctgtcatgacctcgatcatccaggctacaataacacataccagattaatgcacgcaccgaattagccgttcggtataatgatatctcaccactggaaaatcatcattgcgctgtcgccttccaaatcctagctgaacccgagtgtaacattttctccaacattccccccgacggattcaaacagattagacaaggcatgatcacacttattcttgctacagacatggcccggcacgctgagatcatggacagcttcaaggagaagatggaaaattttgattattctaatgaagaacacatgactctgctgaaaatgatcttaataaagtgttgcgacatttctaatgaggtcaggcctatggaagtcgccgagccgtgggttgactgcctgctggaggagtactttatgcaatccgaccgtgagaaatctgagggactgcccgtggcccccttcatggaccgggacaaggtgaccaaggccaccgcacagataggtttcatcaagttcgtattgattccaatgttcgagaccgttacaaaattgttcccgatggtcgaggaaatcatgctgcagccgttgtgggagagtcgagaccgatatgaggaactgaagaggatcgacgacgcgatgaaagaactgcaaaagaaaaccgactcgctcacctctggtgcaactgagaagtcccgagaaagatcaagggacgtaaaaaacagcgaaggcgactgcgcttag

SEQ ID NO: 18866 - DNA, 1728 bp, Artificial Sequence
  derived and/or modified sequence
acagtaaaaagtccgagtgcagccgccgggcgcaggatgggatccggctcctccagctaccggcccaaggccatctacctggacatcgatggacgcattcagaaggaacacgaccatctccctgctgaccaccgacgacgccatggtctccatcgaccccaccatgcccgcgaattcagaacgcactccgtacaaagtgagacctgtggccatcaagcaactctccgagcattcaaaatcaatgaactgaaagctgaagttgcaaatcacttggctgtcctagagaaacgcgtggaattggaaggactaaaagtggtggagattgagaaatgcaagagtgacattaagaagatgagggaggagctggcggccagaagcagcaggaccaactgcccctgtaagtacagttttttggataaccacaagaagttgactcctcgacgcgatgttcccacttaccccaagtacctgctctctccagagaccatcgaggccctgcggaagccgacctttgacgtctggctttgggagcccaatgagatgctgagctgcctggagcacatgtaccacgacctcgggctggtcagggacttcagcatcaaccctgtcaccctcaggaggtggctgttctgcgtccacgacaactacagaaacaaccccttccacaacttccggcactgcttctgcgtggcccagatgatgtacagcatggtctggctctgcagtctccaggagaagttctcacaaacggatatcctgatcctaatgacagcggccatctgccacgatctggaccatcccggctacaacaacacgtaccagatcaatgcccgcacagagctggcggtccgctacaatgacatctcaccgctggagaaccaccactgcgccgtggccttccagatcctcgccgagcctgagtgcaacatcttctccaacatcccacctgatgggttcaagcagatccgacagggaatgatcacattaatcttggccactgacatggcaagacatgcagaaattatggattctttcaaagagaaaatggagaattttgactacagcaacgaggagcacatgaccctgctgaagatgattttgataaaatgctgtgatatctctaacgaggtccgtccaatggaagtcgcagagccttgggtggactgtttattagaggaatattttatgcagagcgaccgtgagaagtcagaaggccttcctgtggcaccgttcatggaccgagacaaagtgaccaaggccacagcccagattgggttcatcaagtttgtcctgatcccaatgtttgaaacagtgaccaagctcttccccatggttgaggagatcatgctgcagccactttgggaatcccgagatcgctacgaggagctgaagcggatagatgacgccatgaaagagttacagaagaagactgacagcttgacgtctggggccaccgagaagtccagagagagaagcagagatgtgaaaaacagtgaaggagactgtgcctgaggaaagcggggggcgtggctgcagttctggacgggctggccgagctgcgcgggatccttgtgcagggaagagctgccctgggcacctggcaccacaagaccatgttttctaagaaccattttgttcactgatacaaaaaaaaaaaaaggaattcatgatgctgtacagaattttatttttaaactgtcttttaaataatatattcttatacggaaa

SEQ ID NO: 18867 - DNA, 1476 bp, Artificial Sequence
  derived and/or modified sequence
atggggagcggctccagtagttataggcctaaggccatctatctggacatagacggaaggatacagaaagagcacgatcacctgcccgcagatcacagacggaggcatggccttcaccgccctcaccatgcaagggagttcaggactcattccgttcagagtgagacgtgtgggcaccaggccactctgagagccttcaagatcaatgagctgaaggccgaggtcgcaaatcacttggcagtgctggagaagagggtggagctagaaggattgaaggtggtagagattgagaagtgcaaatcagacatcaagaagatgagggaggaactggccgctagaagttctcgaacgaactgtccctgcaagtatagctttctggacaaccataaaaagctgacaccgagaagggacgtcccaacatatcctaagtatttgcttagtcctgaaacgattgaggcgctaaggaaaccaaccttcgacgtctggctgtgggagcctaatgaaatgcttagctgcctggagcacatgtaccatgatcttggccttgtccgggatttttctattaatcctgtgactcttcgcagatggcttttttgcgtgcatgataattaccgaaataatccatttcataacttccgccactgtttctgcgtagcccaaatgatgtacagcatggtgtggctgtgtagtctgcaggagaaattttctcaaaccgatattctgatccttatgactgcagccatctgccacgacttagatcatccaggctacaacaacacctaccagattaacgcaaggacggagttggccgtgcgatacaacgatatatcccccctggagaaccaccattgtgccgtagcattccagatcctggccgagcccgagtgcaacattttcagcaatatccctccagatggttttaagcagattagacaggggatgatcacactcattctggccactgacatggcgagacacgccgagattatggacagctttaaggaaaaaatggaaaactttgattattccaacgaagaacatatgacgttgttgaaaatgatcttgataaaatgttgtgacatctccaatgaggtgcgccctatggaggtagccgaaccctgggtggactgccttctcgaagaatattttatgcagtccgaccgtgaaaagagcgagggactccctgtggcgcctttcatggatagagacaaggtgactaaggccacagcccagattgggttcatcaaatttgtgctgataccgatgttcgagaccgttacgaaacttttccccatggtggaagagattatgcttcagccactgtgggagtctagagacaggtacgaggagctcaagcgcattgacgatgcaatgaaagagctccagaagaagactgactcgctgacttccggagcaactgagaagagcagggagagatcgcgagacgtgaaaaattcagaaggcgattgcgcctag

SEQ ID NO: 18868 - DNA, 1476 bp, Artificial Sequence
  derived and/or modified sequence
atgggcagcggcagcagcagctacagacccaaggccatctacctggacatcgacggcagaatccagaaggagcacgaccacctgcccgccgaccacagaagaagacacggcctgcacagaccccaccacgccagagagttcagaacccacagcgtgcagagcgagacctgcggccaccaggccaccctgagagccttcaagatcaacgagctgaaggccgaggtggccaaccacctggccgtgctggagaagagagtggagctggagggcctgaaggtggtggagatcgagaagtgcaagagcgacatcaagaagatgagagaggagctggccgccagaagcagcagaaccaactgcccctgcaagtacagcttcctggacaaccacaagaagctgacccccagaagagacgtgcccacctaccccaagtacctgctgagccccgagaccatcgaggccctgagaaagcccaccttcgacgtgtggctgtgggagcccaacgagatgctgagctgcctggagcacatgtaccacgacctgggcctggtgagagacttcagcatcaaccccgtgaccctgagaagatggctgttctgcgtgcacgacaactacagaaacaaccccttccacaacttcagacactgcttctgcgtggcccagatgatgtacagcatggtgtggctgtgcagcctgcaggagaagttcagccagaccgacatcctgatcctgatgaccgccgccatctgccacgacctggaccaccccggctacaacaacacctaccagatcaacgccagaaccgagctggccgtgagatacaacgacatcagccccctggagaaccaccactgcgccgtggccttccagatcctggccgagcccgagtgcaacatcttcagcaacatcccccccgacggcttcaagcagatcagacagggcatgatcaccctgatcctggccaccgacatggccagacacgccgagatcatggacagcttcaaggagaagatggagaacttcgactacagcaacgaggagcacatgaccctgctgaagatgatcctgatcaagtgctgcgacatcagcaacgaggtgagacccatggaggtggccgagccctgggtggactgcctgctggaggagtacttcatgcagagcgacagagagaagagcgagggcctgcccgtggcccccttcatggacagagacaaggtgaccaaggccaccgcccagatcggcttcatcaagttcgtgctgatccccatgttcgagaccgtgaccaagctgttccccatggtggaggagatcatgctgcagcccctgtgggagagcagagacagatacgaggagctgaagagaatcgacgacgccatgaaggagctgcagaagaagaccgacagcctgaccagcggcgccaccgagaagagcagagagagaagcagagacgtgaagaacagcgagggcgactgcgcctag

SEQ ID NO: 18869 - protein, 526 aa, Artificial Sequence
  derived and/or modified sequence
MDAFRSTPYKVRPVAIKQLSAGVEDKRTTSRGQSAERPLRDRRVVGLEQPRREGAFESGQVEPRPREPQGCYQEGQRIPPEREELIQSVLAQVAEQFSRAFKINELKAEVANHLAVLEKRVELEGLKVVEIEKCKSDIKKMREELAARSSRTNCPCKYSFLDNHKKLTPRRDVPTYPKYLLSPETIEALRKPTFDVWLWEPNEMLSCLEHMYHDLGLVRDFSINPVTLRRWLFCVHDNYRNNPFHNFRHCFCVAQMMYSMVWLCSLQEKFSQTDILILMTAAICHDLDHPGYNNTYQINARTELAVRYNDISPLENHHCAVAFQILAEPECNIFSNIPPDGFKQIRQGMITLILATDMARHAEIMDSFKEKMENFDYSNEEHMTLLKMILIKCCDISNEVRPMEVAEPWVDCLLEEYFMQSDREKSEGLPVAPFMDRDKVTKATAQIGFIKFVLIPMFETVTKLFPMVEEIMLQPLWESRDRYEELKRIDDAMKELQKKTDSLTSGATEKSRERSRDVKNSEGDCA

SEQ ID NO: 18870 - DNA, 1581 bp, Artificial Sequence
  derived and/or modified sequence
atggatgcgttcagatctaccccctacaaggtgcgccctgtcgctattaagcagctgagtgccggcgtggaggataagaggactacctcccggggccagtcagctgagcgacctttgcgtgatagacgtgtcgttggacttgaacagccacggcgagaaggtgctttcgaaagtggtcaggtggaacctaggccacgcgaaccacaaggctgttaccaagaggggcagcgcataccccccgaacgcgaagaacttatacagagtgtcctggcacaggtcgctgaacaattctcacgcgcattcaagatcaacgagctcaaagctgaggtcgcgaatcacctggccgtcttggagaaacgggtggaattagagggactgaaggtcgttgaaatcgagaagtgcaagtctgatataaagaaaatgcgcgaggagcttgccgctcgcagtagccgaacgaattgtccctgcaagtatagcttcctggacaaccacaaaaaattgactccccgtcgcgacgtgccgacttaccccaagtatctcctgagcccagaaactatagaggcacttcggaagcctacgttcgatgtgtggctgtgggaacctaacgagatgctgagctgcctggagcacatgtaccatgacttggggcttgtcagggactttagcattaaccctgtgactctgcgtagatggctattttgtgtgcacgacaactataggaacaacccatttcataattttaggcattgcttctgcgtggcccagatgatgtactccatggtttggttgtgttcactccaagaaaaatttagccagacggacatacttatcctgatgactgctgctatctgccacgacctggaccaccccggatataacaacacctatcaaattaacgcccggaccgagctggccgtcagatacaatgatatctccccgttagagaaccaccattgcgcagtcgccttccagatcctggctgaaccagaatgtaacattttctctaacatccctcccgacggctttaaacagatccggcagggaatgatcaccttgatcctggcaaccgacatggcccggcatgccgagataatggatagcttcaaggaaaagatggaaaactttgactacagcaacgaagaacatatgaccctacttaagatgatcctgattaaatgctgcgatatcagcaatgaggttcgccctatggaggtggccgagccgtgggtcgattgtttactagaagagtacttcatgcaatcggatcgcgaaaaatccgaagggcttcctgtggcacccttcatggacagagataaagtcaccaaagctactgcacagattgggttcatcaagttcgtacttatacctatgttcgagacagtgaccaaactttttcctatggtggaagagatcatgctgcagccactgtgggaatcccgagataggtacgaggagttgaagagaattgacgatgcaatgaaggaacttcagaaaaaaaccgacagtctgacttcaggcgccacagaaaagagtcgcgaacggtctagggatgtgaaaaatagcgaaggcgactgcgcatag

SEQ ID NO: 18871 - DNA, 1581 bp, Artificial Sequence
  derived and/or modified sequence
atggatgccttccgcagcaccccctacaaggtgcggcctgtggccatcaagcagctgtctgctggggtggaggacaagaggaccaccagccggggccagagcgctgagcggcccctgcgggaccggcgggtggtgggcctggagcagccccggcgggagggcgcctttgagagcggccaggtggagccccggccccgggagccccagggctgctaccaggagggccagagaattcctcctgagcgggaggagctgatccagagcgtgctggcccaggtggccgagcagttcagccgggccttcaagatcaatgagctgaaggccgaggtggccaaccacctggccgtgctggagaagagggtggagctggagggcctgaaggtggtggagattgagaagtgcaagagtgacatcaagaagatgagggaggagctggccgcccggagcagcaggaccaactgcccctgcaagtacagcttcctggacaaccacaagaagctgacccccaggagagatgtgcccacctaccccaagtacctgctgagccctgagaccatcgaggccctgaggaagcccacctttgatgtgtggctgtgggagcccaatgagatgctgagctgcctggagcacatgtaccatgacctgggcctggtgcgggacttcagcatcaaccctgtgaccctgcggcgctggctgttctgtgtgcatgacaactacagaaacaaccccttccacaacttccgccactgcttctgtgtggcccagatgatgtacagcatggtgtggctgtgcagcctgcaggagaagttcagccagacagacatcctgatcctgatgacagctgccatctgccacgacctggaccaccctggctacaacaacacctaccagatcaatgccaggacagagctggccgtgcgctacaatgacatcagccccctggagaaccaccactgtgctgtggccttccagatcctggccgagcctgagtgcaacatcttcagcaacatccccccagatggcttcaagcagatccggcagggcatgatcaccctcatcctggccacagacatggcccggcatgctgagatcatggacagcttcaaggagaagatggagaactttgactacagcaatgaggagcacatgaccctgctgaagatgatcctgatcaagtgctgtgacatcagcaatgaggtgcggcccatggaggtggccgagccctgggtggactgcctgctggaggagtacttcatgcagagcgaccgggagaagtctgagggcctgcctgtggcccccttcatggaccgggacaaggtgaccaaggccacagcccagatcggcttcatcaagtttgtgctgatccccatgtttgagaccgtgaccaagctgttccccatggtggaggagatcatgctgcagcccctgtgggagagccgggacagatatgaggagctgaagagaattgatgatgccatgaaggagctgcagaagaagacagacagcctgaccagcggggccacagagaagagccgggagaggagcagagatgtgaagaacagcgagggggactgtgcctag

SEQ ID NO: 18872 - DNA, 1581 bp, Artificial Sequence
  derived and/or modified sequence
atggacgccttccggagcaccccctacaaggtgcggcccgtggccataaagcagctctccgccggggttgaagacaagagaaccacctctcgggggcagtcggctgagaggcctttgcgagataggcgtgtggtgggcctggaacaaccaagacgcgagggagcattcgagtctgggcaggtggaacctcggccccgtgaaccacagggctgctatcaggaagggcagagaattccccctgagcgcgaagagctgattcagagtgtcttggcccaggtcgccgagcagttctctcgcgcattcaagatcaacgaattgaaagccgaggtggctaatcacctggctgtgctcgagaagcgagtggaattggaaggcctcaaagtggtcgagattgaaaaatgtaaaagtgacatcaaaaagatgagggaggaacttgccgctcgatcaagccggaccaactgtccctgtaagtacagttttctcgataaccacaagaaactgacgccccggagggacgtgcccacctaccctaaatacttgctgtctccagaaactattgaggctctccggaagcccactttcgacgtgtggttgtgggagccaaatgaaatgctatcatgcctcgaacatatgtatcatgatctgggacttgtgagggacttctccatcaatccggttacattgagaaggtggttgttttgtgtccatgacaactaccggaacaacccttttcataattttaggcattgcttctgcgtcgcacagatgatgtacagcatggtgtggctgtgcagtctccaagaaaaattttctcagaccgacattctgattctaatgacagcagccatttgccacgatctggatcatcctgggtataacaatacatatcaaataaacgcacggacagagctggccgtccggtataacgacatcagccctttggagaaccaccactgcgcggtcgctttccaaatccttgcagaaccagaatgtaacatcttcagtaatatcccaccagacggtttcaagcagatcaggcagggcatgattacactgatcctcgccactgatatggccaggcatgcggagatcatggattcattcaaagagaagatggaaaatttcgattattccaatgaagaacatatgaccctcctcaaaatgatactaattaagtgttgcgacatttcaaatgaagtaaggccgatggaagtggcagagccgtgggtggactgtcttctcgaagaatactttatgcaaagcgaccgagaaaagtctgagggcttgccagtggctcccttcatggatagggataaggttaccaaggccaccgcccagatcggcttcatcaaatttgtgctcatccctatgttcgagacagttactaaactgtttccaatggtggaggagatcatgctgcagccactgtgggagagtcgagatcggtacgaggaattaaagcgcatcgacgatgcgatgaaggaactgcaaaagaagacagattcattgactagcggcgcaacagaaaagagtcgagaacgctccagggatgtgaagaacagcgagggcgactgcgcttag

SEQ ID NO: 18873 - DNA, 1885 bp, Artificial Sequence
  derived and/or modified sequence
acagtaaaaagtccgagtgcagccgccgggcgcaggatgggatccggctcctccagctaccggcccaaggccatctacctggacatcgatggacgcattcagaagcactccgtacaaagtgagacctgtggccatcaagcaactctccgctggtgtcgaggacaagagaaccacaagccgtggccagtctgctgagagaccactgagggacagacgggttgtgggcctggagcagccccggagggaaggagcatttgaaagtggacaggtagagcccaggcccagagagccccagggctgctaccaggaaggccagcgcatccctccagagagagaagaattaatccagagcgtgctggcgcaggttgcagagcagttctcaagagcattcaaaatcaatgaactgaaagctgaagttgcaaatcacttggctgtcctagagaaacgcgtggaattggaaggactaaaagtggtggagattgagaaatgcaagagtgacattaagaagatgagggaggagctggcggccagaagcagcaggaccaactgcccctgtaagtacagttttttggataaccacaagaagttgactcctcgacgcgatgttcccacttaccccaagtacctgctctctccagagaccatcgaggccctgcggaagccgacctttgacgtctggctttgggagcccaatgagatgctgagctgcctggagcacatgtaccacgacctcgggctggtcagggacttcagcatcaaccctgtcaccctcaggaggtggctgttctgcgtccacgacaactacagaaacaaccccttccacaacttccggcactgcttctgcgtggcccagatgatgtacagcatggtctggctctgcagtctccaggagaagttctcacaaacggatatcctgatcctaatgacagcggccatctgccacgatctggaccatcccggctacaacaacacgtaccagatcaatgcccgcacagagctggcggtccgctacaatgacatctcaccgctggagaaccaccactgcgccgtggccttccagatcctcgccgagcctgagtgcaacatcttctccaacatcccacctgatgggttcaagcagatccgacagggaatgatcacattaatcttggccactgacatggcaagacatgcagaaattatggattctttcaaagagaaaatggagaattttgactacagcaacgaggagcacatgaccctgctgaagatgattttgataaaatgctgtgatatctctaacgaggtccgtccaatggaagtcgcagagccttgggtggactgtttattagaggaatattttatgcagagcgaccgtgagaagtcagaaggccttcctgtggcaccgttcatggaccgagacaaagtgaccaaggccacagcccagattgggttcatcaagtttgtcctgatcccaatgtttgaaacagtgaccaagctcttccccatggttgaggagatcatgctgcagccactttgggaatcccgagatcgctacgaggagctgaagcggatagatgacgccatgaaagagttacagaagaagactgacagcttgacgtctggggccaccgagaagtccagagagagaagcagagatgtgaaaaacagtgaaggagactgtgcctgaggaaagcggggggcgtggctgcagttctggacgggctggccgagctgcgcgggatccttgtgcagggaagagctgccctgggcacctggcaccacaagaccatgttttctaagaaccattttgttcactgatacaaaaaaaaaaaaaggaattcatgatgctgtacagaattttatttttaaactgtcttttaaataatatattcttatacggaaa

SEQ ID NO: 18874 - DNA, 1581 bp, Artificial Sequence
  derived and/or modified sequence
atggatgcattccggtcaactccctacaaagtccggcctgtggcaattaaacaactcagtgcaggcgtcgaagacaaacgaactacgagcagaggacagtccgcggaacgaccacttcgggatcggcgtgtcgtgggcttagaacagccccgtcgcgagggagctttcgagagcggccaggtggagccacgcccacgggaaccacaggggtgctaccaggagggacaaagaatccctccagaacgggaggagcttattcaaagcgtgttagcgcaggtggccgaacagtttagccgggcatttaaaataaatgaactgaaggctgaagtggccaaccacctggcggttctggaaaagagagtggaactggagggcttaaaggtggtcgaaatcgaaaagtgtaagtccgatatcaagaagatgcgcgaagaacttgcagccaggagctcccgcacgaactgtccatgtaagtacagcttcttggacaatcacaaaaagctaacaccaaggagggacgtgcccacctaccccaagtacttgctgtctcccgaaaccatcgaggcacttaggaagcctaccttcgacgtttggttatgggagcctaacgaaatgcttagctgcctggaacacatgtatcatgacttaggactggtgcgcgatttctcaattaatcccgttaccttgagacgctggcttttctgcgtccatgataattacaggaataaccctttccacaactttcggcattgtttttgcgttgcccagatgatgtactcaatggtttggctctgtagcctacaagagaagtttagccagacagatatcctaatcctcatgaccgccgctatttgtcatgatctggaccatcccggttacaataacacatatcagattaacgcacgaactgagctggcagtgcgctataatgacatttctccacttgagaatcatcactgcgcagttgccttccagatcttggccgagcccgagtgtaacatcttctcaaatataccacccgacgggtttaaacaaatccggcagggaatgatcacactgatcttggccactgacatggctcggcatgccgagatcatggactctttcaaggagaagatggagaactttgattacagcaatgaagagcacatgacactcctgaaaatgatcctcatcaagtgttgcgatatctccaacgaggtcaggcctatggaagtggctgagccatgggtcgattgcttgctggaagaatactttatgcaatccgaccgggaaaagtcggagggccttccagttgccccttttatggaccgtgataaagtaactaaagcaactgctcagatcgggttcattaaattcgtgttgatccccatgttcgaaacggtgacaaagttgttccccatggtagaggaaattatgctacagcctttatgggaatctagagaccgctacgaggagctgaaacgcatagatgacgcaatgaaagaacttcagaaaaagactgactcattaacgtctggagctaccgagaagtcacgggagcggagcagggacgttaagaattccgaaggggactgtgcttag

SEQ ID NO: 18875 - DNA, 1581 bp, Artificial Sequence
  derived and/or modified sequence
atggacgccttcagaagcaccccctacaaggtgagacccgtggccatcaagcagctgagcgccggcgtggaggacaagagaaccaccagcagaggccagagcgccgagagacccctgagagacagaagagtggtgggcctggagcagcccagaagagagggcgccttcgagagcggccaggtggagcccagacccagagagccccagggctgctaccaggagggccagagaatcccccccgagagagaggagctgatccagagcgtgctggcccaggtggccgagcagttcagcagagccttcaagatcaacgagctgaaggccgaggtggccaaccacctggccgtgctggagaagagagtggagctggagggcctgaaggtggtggagatcgagaagtgcaagagcgacatcaagaagatgagagaggagctggccgccagaagcagcagaaccaactgcccctgcaagtacagcttcctggacaaccacaagaagctgacccccagaagagacgtgcccacctaccccaagtacctgctgagccccgagaccatcgaggccctgagaaagcccaccttcgacgtgtggctgtgggagcccaacgagatgctgagctgcctggagcacatgtaccacgacctgggcctggtgagagacttcagcatcaaccccgtgaccctgagaagatggctgttctgcgtgcacgacaactacagaaacaaccccttccacaacttcagacactgcttctgcgtggcccagatgatgtacagcatggtgtggctgtgcagcctgcaggagaagttcagccagaccgacatcctgatcctgatgaccgccgccatctgccacgacctggaccaccccggctacaacaacacctaccagatcaacgccagaaccgagctggccgtgagatacaacgacatcagccccctggagaaccaccactgcgccgtggccttccagatcctggccgagcccgagtgcaacatcttcagcaacatcccccccgacggcttcaagcagatcagacagggcatgatcaccctgatcctggccaccgacatggccagacacgccgagatcatggacagcttcaaggagaagatggagaacttcgactacagcaacgaggagcacatgaccctgctgaagatgatcctgatcaagtgctgcgacatcagcaacgaggtgagacccatggaggtggccgagccctgggtggactgcctgctggaggagtacttcatgcagagcgacagagagaagagcgagggcctgcccgtggcccccttcatggacagagacaaggtgaccaaggccaccgcccagatcggcttcatcaagttcgtgctgatccccatgttcgagaccgtgaccaagctgttccccatggtggaggagatcatgctgcagcccctgtgggagagcagagacagatacgaggagctgaagagaatcgacgacgccatgaaggagctgcagaagaagaccgacagcctgaccagcggcgccaccgagaagagcagagagagaagcagagacgtgaagaacagcgagggcgactgcgcctag

SEQ ID NO: 18876 - protein, 552 aa, Artificial Sequence
  derived and/or modified sequence
MDAFRRNTTISLLTTDDAMVSIDPTMPANSERTPYKVRPVAIKQLSAGVEDKRTTSRGQSAERPLRDRRVVGLEQPRREGAFESGQVEPRPREPQGCYQEGQRIPPEREELIQSVLAQVAEQFSRAFKINELKAEVANHLAVLEKRVELEGLKVVEIEKCKSDIKKMREELAARSSRTNCPCKYSFLDNHKKLTPRRDVPTYPKYLLSPETIEALRKPTFDVWLWEPNEMLSCLEHMYHDLGLVRDFSINPVTLRRWLFCVHDNYRNNPFHNFRHCFCVAQMMYSMVWLCSLQEKFSQTDILILMTAAICHDLDHPGYNNTYQINARTELAVRYNDISPLENHHCAVAFQILAEPECNIFSNIPPDGFKQIRQGMITLILATDMARHAEIMDSFKEKMENFDYSNEEHMTLLKMILIKCCDISNEVRPMEVAEPWVDCLLEEYFMQSDREKSEGLPVAPFMDRDKVTKATAQIGFIKFVLIPMFETVTKLFPMVEEIMLQPLWESRDRYEELKRIDDAMKELQKKTDSLTSGATEKSRERSRDVKNSEGDCA

SEQ ID NO: 18877 - DNA, 1659 bp, Artificial Sequence
  derived and/or modified sequence
atggatgcatttcggcggaatacaacaatttcactactgaccaccgacgatgccatggtatcgattgaccctaccatgcccgcaaattccgagcggacaccttataaagtgcgaccagtggctatcaagcagttgtctgctggggtggaagataagcgcaccacaagccgcggccagtcagccgagaggccattgcgtgacagacgcgtagtcgggctggagcagccccgaagagagggggcctttgaatccggccaggtcgagcctagaccgagagagccgcaggggtgttatcaagaaggccagagaatacctccggaacgcgaggagttgatccagagtgttctggctcaagtagcggaacagttttctcgggcatttaagatcaatgagctcaaggctgaggtggctaatcatcttgccgtcttagaaaaacgtgtcgaattggaaggcctgaaagtggtggagattgagaaatgcaaatccgacattaaaaagatgcgcgaagaactcgcggccagatcatcaagaaccaactgtccttgtaagtatagcttcctggacaaccataagaaattaactccaagacgggacgtgcccacatacccaaagtatctcctgtctcccgaaactatagaggccctgcggaaacctacctttgatgtatggctgtgggagcctaacgaaatgctatcatgcctcgaacacatgtaccatgatctaggacttgttcgcgatttttctatcaatccggtcacactgaggcgctggctattttgcgtgcacgataattaccgcaacaacccgtttcataacttccggcactgcttttgtgtggcacagatgatgtatagcatggtgtggctgtgcagcctgcaggagaagtttagtcagacggacatactaatactcatgacagccgctatatgtcatgatctcgaccacccagggtataataatacatatcagattaacgcacggacagagctcgcggtgcgttacaatgatatctcccccctggaaaatcatcactgcgctgttgcctttcagatattagccgaacctgagtgcaacatctttagtaacattcctcctgacggatttaagcaaatcaggcagggtatgatcacgctgatactggccactgacatggcccgccatgctgagatcatggattcatttaaggaaaagatggaaaattttgattattcaaacgaggaacatatgacgctgcttaaaatgattttaataaagtgctgtgacatcagcaacgaagtgagacccatggaagtcgccgaaccatgggtcgactgcctgctggaggagtactttatgcagtcagacagggagaagagcgaaggactaccggtcgcccctttcatggacagagataaggttactaaggccaccgctcagatcggctttatcaaatttgtcctcatcccaatgttcgaaacagtcaccaaactatttcccatggtagaagagatcatgctgcagccgctctgggaaagtcgggacagatacgaagagctcaaaagaatcgacgacgccatgaaggagctccagaagaaaacggattccctgactagtggggccactgagaaatctcgcgaacgatcgcgtgatgtcaagaactcagagggggattgcgcctag

SEQ ID NO: 18878 - DNA, 1659 bp, Artificial Sequence
  derived and/or modified sequence
atggatgccttcagaagaaacaccaccatcagcctgctgaccacagatgatgccatggtgtccattgaccccaccatgcctgccaacagcgagaggaccccctacaaggtgcggcctgtggccatcaagcagctgtctgctggggtggaggacaagaggaccaccagccggggccagagcgctgagcggcccctgcgggaccggcgggtggtgggcctggagcagccccggcgggagggcgcctttgagagcggccaggtggagccccggccccgggagccccagggctgctaccaggagggccagagaattcctcctgagcgggaggagctgatccagagcgtgctggcccaggtggccgagcagttcagccgggccttcaagatcaatgagctgaaggccgaggtggccaaccacctggccgtgctggagaagagggtggagctggagggcctgaaggtggtggagattgagaagtgcaagagtgacatcaagaagatgagggaggagctggccgcccggagcagcaggaccaactgcccctgcaagtacagcttcctggacaaccacaagaagctgacccccaggagagatgtgcccacctaccccaagtacctgctgagccctgagaccatcgaggccctgaggaagcccacctttgatgtgtggctgtgggagcccaatgagatgctgagctgcctggagcacatgtaccatgacctgggcctggtgcgggacttcagcatcaaccctgtgaccctgcggcgctggctgttctgtgtgcatgacaactacagaaacaaccccttccacaacttccgccactgcttctgtgtggcccagatgatgtacagcatggtgtggctgtgcagcctgcaggagaagttcagccagacagacatcctgatcctgatgacagctgccatctgccacgacctggaccaccctggctacaacaacacctaccagatcaatgccaggacagagctggccgtgcgctacaatgacatcagccccctggagaaccaccactgtgctgtggccttccagatcctggccgagcctgagtgcaacatcttcagcaacatccccccagatggcttcaagcagatccggcagggcatgatcaccctcatcctggccacagacatggcccggcatgctgagatcatggacagcttcaaggagaagatggagaactttgactacagcaatgaggagcacatgaccctgctgaagatgatcctgatcaagtgctgtgacatcagcaatgaggtgcggcccatggaggtggccgagccctgggtggactgcctgctggaggagtacttcatgcagagcgaccgggagaagtctgagggcctgcctgtggcccccttcatggaccgggacaaggtgaccaaggccacagcccagatcggcttcatcaagtttgtgctgatccccatgtttgagaccgtgaccaagctgttccccatggtggaggagatcatgctgcagcccctgtgggagagccgggacagatatgaggagctgaagagaattgatgatgccatgaaggagctgcagaagaagacagacagcctgaccagcggggccacagagaagagccgggagaggagcagagatgtgaagaacagcgagggggactgtgcctag

SEQ ID NO: 18879 - DNA, 1659 bp, Artificial Sequence
  derived and/or modified sequence
atggacgccttccggcggaacaccaccatcagcctgctgaccaccgacgatgcaatggtttctatagatccgacgatgcccgcaaacagcgaaagaactccatacaaagtgagaccggttgcgatcaagcagctcagcgcaggggtagaggataaaagaacaacaagtcggggacagagcgccgaacgccccctgagggacagacgcgtcgtgggtcttgagcagcctcgcagggagggcgcctttgagtcaggtcaggtcgaaccccgcccccgtgagccacaggggtgttaccaagaggggcagcgaatcccccctgaacgggaagagctgattcagagcgtgctggcacaggttgcagaacaattcagccgtgccttcaagatcaacgaacttaaagcagaagtggctaatcatttggccgtcctagaaaagagggtcgaactggaaggcttgaaggtggtggaaatcgagaagtgcaagagcgatatcaagaagatgcgggaagagctggccgctcggtcctcaaggacgaattgcccttgtaagtactcgttcttggacaaccacaagaagctcacacctagacgcgatgtgcctacgtatccaaagtacttgttaagccccgagactatcgaagccctgcgaaaacctacctttgacgtgtggctgtgggagcccaatgagatgctcagctgtctggagcacatgtatcatgacctcggactagtccgagacttttctataaacccagtaactttaaggcgctggctgttctgtgttcacgacaattacagaaacaatccctttcataacttcaggcattgcttctgtgtagcccagatgatgtactctatggtgtggctctgcagtctgcaagagaaattctcccagacagatatactgatcctgatgaccgctgccatttgtcacgatctagatcaccccggatataataacacatatcaaataaatgccaggacggaattagctgtccgctacaacgacatatccccattggagaatcatcactgtgctgtggctttccagatcctggctgaaccagagtgcaatattttctccaacatccctccagacgggtttaagcagataagacagggtatgatcacactgatcctcgccaccgatatggcaagacacgctgaaataatggatagcttcaaagaaaagatggaaaacttcgattattctaacgaggagcatatgactttacttaagatgatcttaatcaaatgctgcgacatatccaacgaggtacgccccatggaagttgccgagccttgggtcgactgtttgttagaagaatacttcatgcaatcggaccgggagaaaagtgagggcctgccggttgcaccctttatggaccgcgataaggtgacaaaggccacagctcagatcggcttcattaaattcgtattgatcccaatgttcgagacagttacaaaattgttccctatggtggaggagattatgctgcagcccctgtgggaatcccgggatcgctatgaggaactgaagcgaattgacgatgccatgaaggaactgcagaaaaagactgatagtctgaccagtggggcaaccgagaagtcccgagagagatctagggatgtgaaaaattctgaaggcgattgcgcatag

SEQ ID NO: 18880 - DNA, 1963 bp, Artificial Sequence
  derived and/or modified sequence
acagtaaaaagtccgagtgcagccgccgggcgcaggatgggatccggctcctccagctaccggcccaaggccatctacctggacatcgatggacgcattcagaaggaacacgaccatctccctgctgaccaccgacgacgccatggtctccatcgaccccaccatgcccgcgaattcagaacgcactccgtacaaagtgagacctgtggccatcaagcaactctccgctggtgtcgaggacaagagaaccacaagccgtggccagtctgctgagagaccactgagggacagacgggttgtgggcctggagcagccccggagggaaggagcatttgaaagtggacaggtagagcccaggcccagagagccccagggctgctaccaggaaggccagcgcatccctccagagagagaagaattaatccagagcgtgctggcgcaggttgcagagcagttctcaagagcattcaaaatcaatgaactgaaagctgaagttgcaaatcacttggctgtcctagagaaacgcgtggaattggaaggactaaaagtggtggagattgagaaatgcaagagtgacattaagaagatgagggaggagctggcggccagaagcagcaggaccaactgcccctgtaagtacagttttttggataaccacaagaagttgactcctcgacgcgatgttcccacttaccccaagtacctgctctctccagagaccatcgaggccctgcggaagccgacctttgacgtctggctttgggagcccaatgagatgctgagctgcctggagcacatgtaccacgacctcgggctggtcagggacttcagcatcaaccctgtcaccctcaggaggtggctgttctgcgtccacgacaactacagaaacaaccccttccacaacttccggcactgcttctgcgtggcccagatgatgtacagcatggtctggctctgcagtctccaggagaagttctcacaaacggatatcctgatcctaatgacagcggccatctgccacgatctggaccatcccggctacaacaacacgtaccagatcaatgcccgcacagagctggcggtccgctacaatgacatctcaccgctggagaaccaccactgcgccgtggccttccagatcctcgccgagcctgagtgcaacatcttctccaacatcccacctgatgggttcaagcagatccgacagggaatgatcacattaatcttggccactgacatggcaagacatgcagaaattatggattctttcaaagagaaaatggagaattttgactacagcaacgaggagcacatgaccctgctgaagatgattttgataaaatgctgtgatatctctaacgaggtccgtccaatggaagtcgcagagccttgggtggactgtttattagaggaatattttatgcagagcgaccgtgagaagtcagaaggccttcctgtggcaccgttcatggaccgagacaaagtgaccaaggccacagcccagattgggttcatcaagtttgtcctgatcccaatgtttgaaacagtgaccaagctcttccccatggttgaggagatcatgctgcagccactttgggaatcccgagatcgctacgaggagctgaagcggatagatgacgccatgaaagagttacagaagaagactgacagcttgacgtctggggccaccgagaagtccagagagagaagcagagatgtgaaaaacagtgaaggagactgtgcctgaggaaagcggggggcgtggctgcagttctggacgggctggccgagctgcgcgggatccttgtgcagggaagagctgccctgggcacctggcaccacaagaccatgttttctaagaaccattttgttcactgatacaaaaaaaaaaaaaggaattcatgatgctgtacagaattttatttttaaactgtcttttaaataatatattcttatacggaaa

SEQ ID NO: 18881 - DNA, 1659 bp, Artificial Sequence
  derived and/or modified sequence
atggacgcgttccgtaggaacacaacaatatcattgctcaccactgacgatgcaatggtgagcattgatcctactatgcccgcaaattcggaaaggactccatataaggtccggcctgtggcaattaagcagctctccgcaggcgtggaagataaaaggaccaccagtcgtgggcaatccgcggagagacctctgcgcgaccgaagagtggtcgggttagaacagcccaggcgtgaaggtgcttttgaaagtggccaggtcgagcccaggcccagggaacctcaggggtgttaccaggagggacagcgcatccctccagagcgggaggaactgatccagtcagtcttggcgcaggttgcagagcagttctctagggccttcaagatcaatgaactgaaggctgaggtggcaaatcatctggcggtactcgaaaagcgggtcgagctagagggacttaaagtcgttgaaattgaaaaatgcaaatccgacataaaaaaaatgcgggaggagctggcggctcgtagtagccgcactaactgcccctgtaagtactctttcctggataatcataaaaagcttactccacgtcgggacgttcccacctatccaaagtatctgctgtctcccgaaactatagaagccctgcgcaaacctaccttcgatgtgtggttgtgggaaccgaacgagatgctttcttgtctggaacacatgtatcatgatcttgggcttgtgagggatttctctattaaccctgtcacccttcggaggtggctcttctgcgtgcacgacaattatcggaataatccctttcacaatttccgccattgcttttgtgtggcgcaaatgatgtactctatggtttggttgtgtagtctgcaagagaaattctcacaaaccgatatcttaatcctgatgaccgcagctatttgtcacgatctagaccaccccggatacaataacacttaccagatcaacgcccgaaccgaactggctgtgaggtacaatgatatttccccacttgagaaccatcactgtgctgtagcttttcaaatcctggccgagcccgaatgcaacattttctccaatattccgcctgacgggttcaagcagatcaggcaggggatgattactctaattcttgccactgacatggcgaggcatgctgaaataatggatagctttaaagaaaagatggaaaacttcgactactctaacgaggagcatatgacactcctcaaaatgatcctgatcaaatgctgcgatatcagtaacgaggtcaggccaatggaagtggccgagccttgggtggattgcttgctagaagaatattttatgcaatctgaccgtgaaaagtccgagggactgcccgtggccccatttatggaccgcgacaaggtgacgaaagcgacggcacagatcggcttcataaagttcgtgttgatacctatgttcgagaccgtaaccaagctgtttccaatggtggaggagataatgctgcagcctctttgggagtctagggaccggtacgaggagctgaaaagaattgacgacgctatgaaagaactccagaaaaaaactgatagcctcaccagtggggctaccgagaaatcccgagagcgcagtagggacgttaaaaatagcgaaggagactgtgcatag

SEQ ID NO: 18882 - DNA, 1659 bp, Artificial Sequence
  derived and/or modified sequence
atggacgccttcagaagaaacaccaccatcagcctgctgaccaccgacgacgccatggtgagcatcgaccccaccatgcccgccaacagcgagagaaccccctacaaggtgagacccgtggccatcaagcagctgagcgccggcgtggaggacaagagaaccaccagcagaggccagagcgccgagagacccctgagagacagaagagtggtgggcctggagcagcccagaagagagggcgccttcgagagcggccaggtggagcccagacccagagagccccagggctgctaccaggagggccagagaatcccccccgagagagaggagctgatccagagcgtgctggcccaggtggccgagcagttcagcagagccttcaagatcaacgagctgaaggccgaggtggccaaccacctggccgtgctggagaagagagtggagctggagggcctgaaggtggtggagatcgagaagtgcaagagcgacatcaagaagatgagagaggagctggccgccagaagcagcagaaccaactgcccctgcaagtacagcttcctggacaaccacaagaagctgacccccagaagagacgtgcccacctaccccaagtacctgctgagccccgagaccatcgaggccctgagaaagcccaccttcgacgtgtggctgtgggagcccaacgagatgctgagctgcctggagcacatgtaccacgacctgggcctggtgagagacttcagcatcaaccccgtgaccctgagaagatggctgttctgcgtgcacgacaactacagaaacaaccccttccacaacttcagacactgcttctgcgtggcccagatgatgtacagcatggtgtggctgtgcagcctgcaggagaagttcagccagaccgacatcctgatcctgatgaccgccgccatctgccacgacctggaccaccccggctacaacaacacctaccagatcaacgccagaaccgagctggccgtgagatacaacgacatcagccccctggagaaccaccactgcgccgtggccttccagatcctggccgagcccgagtgcaacatcttcagcaacatcccccccgacggcttcaagcagatcagacagggcatgatcaccctgatcctggccaccgacatggccagacacgccgagatcatggacagcttcaaggagaagatggagaacttcgactacagcaacgaggagcacatgaccctgctgaagatgatcctgatcaagtgctgcgacatcagcaacgaggtgagacccatggaggtggccgagccctgggtggactgcctgctggaggagtacttcatgcagagcgacagagagaagagcgagggcctgcccgtggcccccttcatggacagagacaaggtgaccaaggccaccgcccagatcggcttcatcaagttcgtgctgatccccatgttcgagaccgtgaccaagctgttccccatggtggaggagatcatgctgcagcccctgtgggagagcagagacagatacgaggagctgaagagaatcgacgacgccatgaaggagctgcagaagaagaccgacagcctgaccagcggcgccaccgagaagagcagagagagaagcagagacgtgaagaacagcgagggcgactgcgcctag

SEQ ID NO: 18883 - protein, 567 aa, Artificial Sequence
  derived and/or modified sequence
MGSGSSSYRPKAIYLDIDGRIQKVIFSKYCNSSDIMDLFCIATGLPRTPYKVRPVAIKQLSAGVEDKRTTSRGQSAERPLRDRRVVGLEQPRREGAFESGQVEPRPREPQGCYQEGQRIPPEREELIQSVLAQVAEQFSRAFKINELKAEVANHLAVLEKRVELEGLKVVEIEKCKSDIKKMREELAARSSRTNCPCKYSFLDNHKKLTPRRDVPTYPKYLLSPETIEALRKPTFDVWLWEPNEMLSCLEHMYHDLGLVRDFSINPVTLRRWLFCVHDNYRNNPFHNFRHCFCVAQMMYSMVWLCSLQEKFSQTDILILMTAAICHDLDHPGYNNTYQINARTELAVRYNDISPLENHHCAVAFQILAEPECNIFSNIPPDGFKQIRQGMITLILATDMARHAEIMDSFKEKMENFDYSNEEHMTLLKMILIKCCDISNEVRPMEVAEPWVDCLLEEYFMQSDREKSEGLPVAPFMDRDKVTKATAQIGFIKFVLIPMFETVTKLFPMVEEIMLQPLWESRDRYEELKRIDDAMKELQKKTDSLTSGATEKSRERSRDVKNSEGDCA

SEQ ID NO: 18884 - DNA, 1704 bp, Artificial Sequence
  derived and/or modified sequence
atgggctctgggtccagcagttacaggccaaaggctatctacttagacatagatggaagaatacaaaaggtcatatttagcaaatattgcaactcatccgacattatggacctcttctgcattgccacagggctgcccagaacgccttacaaggtgaggcctgttgcaattaagcaactgagcgctggcgtggaggacaaaaggaccacatcacgaggtcagtctgcggaaagaccactcagagaccgccgggtcgtcggactggagcagccaaggagagagggggctttcgagtccgggcaggtggagccaaggccacgcgaaccgcagggatgctaccaagagggtcaacggattcccccggagcgtgaggagctgattcagtcagttctggcccaggtggcagaacaattctctagagcatttaagatcaatgagctgaaggccgaggtagcaaaccacctcgcagtactcgaaaaaagagtagagttggaaggtctgaaagtcgtcgaaatagagaaatgtaagtctgatatcaagaagatgcgcgaggagcttgccgctcgctcatccagaacaaactgtccatgtaagtattctttcctagacaatcacaagaagttgacaccacggagggatgtacccacttaccctaaatacctgcttagtccagaaaccatagaggctctccgaaaacccactttcgacgtgtggctttgggagcccaatgagatgctcagctgcctagaacacatgtatcacgacctgggtttggtccgcgatttctctattaaccccgtaacacttaggagatggttattttgtgtgcatgacaactacagaaataaccctttccacaactttcgtcattgcttctgtgtggctcagatgatgtactcaatggtgtggctttgctctctccaggagaagttctcacagactgacattttgatcctgatgacggcagccatttgccacgatctggaccaccccgggtataacaatacctatcaaatcaatgcacggacagagcttgccgtccggtataatgacatctcgccactggagaatcaccattgcgcggtagctttccagattctggcagagcctgagtgcaacatattttcgaacatcccaccagatgggtttaagcagatccgccaggggatgattaccctgattctggccaccgatatggctagacacgctgagatcatggactcatttaaagaaaagatggagaacttcgactatagcaacgaggaacatatgaccctcctgaaaatgatcttgatcaaatgctgcgatatttctaatgaagtgagaccgatggaggtagccgaaccttgggtggattgccttcttgaagagtattttatgcagtctgatagggagaagagtgaggggctgccagttgcaccattcatggatagagacaaggtgacgaaggctacagcccagataggtttcattaagttcgttcttatcccaatgtttgagaccgtgacgaagttattccccatggtggaggagatcatgttacaacccctgtgggagtcacgagatcgatatgaagagctcaaaaggatagacgatgccatgaaagagctgcagaaaaagactgacagtctcaccagcggggccactgagaagagcagggaaaggagtcgagatgtaaaaaactctgaaggagattgtgcatag

SEQ ID NO: 18885 - DNA, 1704 bp, Artificial Sequence
  derived and/or modified sequence
atgggcagcggcagcagcagctaccggcccaaggccatctacctggacattgatggccgcatccagaaggtgatcttcagcaagtactgcaacagcagtgacatcatggacctcttctgcatcgccaccggcctgcccaggaccccctacaaggtgcggcctgtggccatcaagcagctgtctgctggggtggaggacaagaggaccaccagccggggccagagcgctgagcggcccctgcgggacagaagagtggtgggcctggagcagccccggcgggagggcgcctttgaaagtggccaggtggagccccggccccgggagccccagggctgctaccaggagggccagaggatccccccagagcgggaggagctgatccagagcgtgctggcccaggtggccgagcagttcagccgggccttcaagatcaatgagctgaaggccgaggtggccaaccacctggccgtgctggagaagagggtggagctggagggcctgaaggtggtggagattgagaagtgcaagagtgacatcaagaagatgagggaggagctggccgcccggagcagcaggaccaactgcccctgcaagtacagcttcctggacaaccacaagaagctgaccccaagaagagatgtgcccacctaccccaagtacctgctgagccctgagaccatcgaggccctgaggaagcccacctttgatgtgtggctgtgggagcccaatgagatgctgagctgcctggagcacatgtaccatgacctgggcctggtgcgggacttcagcatcaaccctgtgaccctgcggcgctggctgttctgtgtgcatgacaactacagaaacaaccccttccacaacttccgccactgcttctgtgtggcccagatgatgtacagcatggtgtggctgtgcagcctgcaggagaagttcagccagacagacatcctgatcctgatgacagctgccatctgccacgacctggaccaccctggctacaacaacacctaccagatcaatgccaggacagagctggccgtgcgctacaatgacatcagccccctggagaaccaccactgtgctgtggccttccagatcctggccgagcctgagtgcaacatcttcagcaacatccccccagatggcttcaagcagatccggcagggcatgatcaccctcatcctggccacagacatggcccggcatgctgagatcatggacagcttcaaggagaagatggagaactttgactacagcaatgaggagcacatgaccctgctgaagatgatcctgatcaagtgctgtgacatcagcaatgaggtgcggcccatggaggtggccgagccctgggtggactgcctgctggaggagtacttcatgcagagcgaccgggagaagtctgagggcctgcctgtggcccccttcatggaccgggacaaggtgaccaaggccacagcccagatcggcttcatcaagtttgtgctgatccccatgtttgaaacagtgaccaagctgttccccatggtggaggagatcatgctgcagcccctgtgggagagccgggacagatatgaggagctgaagagaattgatgatgccatgaaggagctgcagaagaagacagacagcctgaccagcggggccacagagaagagccgggagaggagcagagatgtgaagaacagcgagggggactgtgcctag

SEQ ID NO: 18886 - DNA, 1704 bp, Artificial Sequence
  derived and/or modified sequence
atgggcagcggcagcagcagctaccggcccaaggccatctacctggacatcgacggcagaattcagaaggtcattttctccaaatactgcaactcctcggatattatggatctgttttgcatcgctaccggcttgccccgaacgccttataaggtgcggcccgttgccattaaacagttatctgcaggggttgaggacaaaaggacaacctctcgcggacagtctgctgaacgccccctgagagatcggagagttgtgggcctggaacagccaagacgagagggtgcatttgagtctggacaggttgaaccacgcccgagggagccacagggctgttaccaggagggccagagaatcccacccgagcgcgaagagctgatccaaagcgtcctcgcacaggtcgcggaacaattctctagggcctttaagattaatgagctgaaggcagaagtagcaaaccatctggcagtgctggaaaagcgcgtggagttggaggggctgaaggttgtggagatagagaagtgtaagtccgacataaaaaagatgcgagaagagttagctgcacgttctagcaggaccaactgcccctgtaagtatagtttcctggacaatcataagaagttgaccccccgccgggacgtaccgacgtacccaaaatacctcctatcaccagagacaatcgaagcactgagaaagcccactttcgacgtctggttgtgggaaccaaacgagatgctgtcctgcctggagcacatgtatcacgatcttggcctcgttagggactttagcatcaatcctgttacgctgcgccggtggcttttttgcgtgcatgataattaccgaaataaccctttccataactttcgccactgcttctgcgttgcccagatgatgtacagcatggtttggctgtgctcgttgcaggaaaagttctcccagacggatatcctcattcttatgactgctgctatctgccacgatctcgatcatcccgggtacaataacacataccaaataaatgccaggacagagctggccgtcaggtataacgatatatccccattggagaaccaccattgtgccgtcgcattccagatcctcgccgaacccgaatgcaacatttttagcaacatcccacccgatggcttcaagcagatcaggcagggtatgattaccctcattctggctactgacatggcaagacacgccgagatcatggactcgttcaaagagaagatggagaattttgattattccaatgaagagcatatgaccctcctaaagatgatcctgatcaaatgttgtgacatttctaatgaagtgcggcccatggaggttgccgaaccctgggttgactgcctcctggaggaatattttatgcaaagcgatagggagaagtctgaaggcctgcctgtggctccattcatggaccgggacaaggtgaccaaggcaaccgctcaaattggtttcattaaattcgtgctgattccaatgttcgagaccgtcacaaaactctttcccatggttgaagaaatcatgctccagcccctctgggaatcccgcgatcgatatgaggaactgaaaaggattgatgacgctatgaaggagttgcaaaaaaagaccgactcccttacttctggggcaaccgaaaaatctagagagcgttcgagggacgtgaaaaacagtgagggggattgcgcctag

SEQ ID NO: 18887 - DNA, 1956 bp, Artificial Sequence
  derived and/or modified sequence
acagtaaaaagtccgagtgcagccgccgggcgcaggatgggatccggctcctccagctaccggcccaaggccatctacctggacatcgatggacgcattcagaaggtaatcttcagcaagtactgcaactccagcgacatcatggacctgttctgcatcgccaccggcctgcctcgcactccgtacaaagtgagacctgtggccatcaagcaactctccgctggtgtcgaggacaagagaaccacaagccgtggccagtctgctgagagaccactgagggacagacgggttgtgggcctggagcagccccggagggaaggagcatttgaaagtggacaggtagagcccaggcccagagagccccagggctgctaccaggaaggccagcgcatccctccagagagagaagaattaatccagagcgtgctggcgcaggttgcagagcagttctcaagagcattcaaaatcaatgaactgaaagctgaagttgcaaatcacttggctgtcctagagaaacgcgtggaattggaaggactaaaagtggtggagattgagaaatgcaagagtgacattaagaagatgagggaggagctggcggccagaagcagcaggaccaactgcccctgtaagtacagttttttggataaccacaagaagttgactcctcgacgcgatgttcccacttaccccaagtacctgctctctccagagaccatcgaggccctgcggaagccgacctttgacgtctggctttgggagcccaatgagatgctgagctgcctggagcacatgtaccacgacctcgggctggtcagggacttcagcatcaaccctgtcaccctcaggaggtggctgttctgcgtccacgacaactacagaaacaaccccttccacaacttccggcactgcttctgcgtggcccagatgatgtacagcatggtctggctctgcagtctccaggagaagttctcacaaacggatatcctgatcctaatgacagcggccatctgccacgatctggaccatcccggctacaacaacacgtaccagatcaatgcccgcacagagctggcggtccgctacaatgacatctcaccgctggagaaccaccactgcgccgtggccttccagatcctcgccgagcctgagtgcaacatcttctccaacatcccacctgatgggttcaagcagatccgacagggaatgatcacattaatcttggccactgacatggcaagacatgcagaaattatggattctttcaaagagaaaatggagaattttgactacagcaacgaggagcacatgaccctgctgaagatgattttgataaaatgctgtgatatctctaacgaggtccgtccaatggaagtcgcagagccttgggtggactgtttattagaggaatattttatgcagagcgaccgtgagaagtcagaaggccttcctgtggcaccgttcatggaccgagacaaagtgaccaaggccacagcccagattgggttcatcaagtttgtcctgatcccaatgtttgaaacagtgaccaagctcttccccatggttgaggagatcatgctgcagccactttgggaatcccgagatcgctacgaggagctgaagcggatagatgacgccatgaaagagttacagaagaagactgacagcttgacgtctggggccaccgagaagtccagagagagaagcagagatgtgaaaaacagtgaaggagactgtgcctgaggaaagcggggggcgtggctgcagttctggacgggctggccgagctgcgcgggatccttgtgcagggaagagctgccctgggcacctggcaccacaagaccatgttttctaagaaccattttgttcactgatacaaaaaaaaaaaaaggaattcatgatgctgtacagaattttatttttaaactgtcttttaaataatatattcttatacggaaa

SEQ ID NO: 18888 - DNA, 1704 bp, Artificial Sequence
  derived and/or modified sequence
atgggctccgggagctctagttatcggcctaaggctatctacctcgatatagatggaagaattcaaaaggtgatattcagcaagtattgcaacagtagcgatatcatggatctcttttgtatcgctacaggcctgcccaggaccccatataaggtacgtcccgtggccatcaagcagctgtccgcaggggtggaagataaacgtaccacgagtaggggccaatctgcggaaaggccactgcgcgataggcgcgttgtgggcctcgaacagcctcgtcgagaaggagcatttgaatcaggacaggtggaaccacgcccaagggagccacaaggttgttatcaggagggccagagaatccccccagaaagggaggaactgattcagtccgttctggcccaggtggccgagcaatttagcagggcctttaagatcaatgagcttaaggccgaggtagctaatcaccttgcagttctagagaagcgcgtcgaactcgagggcctgaaggtagtcgaaattgagaagtgcaagagtgatatcaagaagatgagggaagagctcgctgccagaagcagcagaacaaattgtccttgcaagtatagctttctcgataaccataaaaagctcacacccaggagggacgtacctacatacccaaagtacctcctgtcaccagaaaccatagaggccctgcgcaagcccacatttgacgtctggctttgggagcctaatgaaatgctctcatgcctggaacatatgtaccacgacctgggtctcgtgagagatttttccatcaatcccgtgacattgcgccgatggctcttctgcgtccacgataattatagaaataacccatttcacaactttagacactgcttttgcgtcgcccagatgatgtattctatggtgtggctgtgttcccttcaggagaaatttagtcaaacagatatattgatcctcatgaccgcagcaatctgccacgatctggaccacccgggttacaacaacacgtaccagatcaatgctaggactgaattggccgtgcgttacaacgatatctcaccattggagaatcaccattgtgccgtagcttttcaaatcctagccgaacctgagtgtaatattttttcaaacataccgccagatggatttaaacaaattaggcagggaatgatcactctgatcctagccaccgacatggccaggcacgcagaaataatggacagctttaaggaaaaaatggagaatttcgattactccaacgaggagcatatgaccctgctcaaaatgatcctcattaaatgttgtgatatttccaatgaagttaggcccatggaggtagcagaaccgtgggtggactgtctactcgaggaatatttcatgcagagcgatcgcgaaaagagcgagggactgcctgttgccccattcatggatcgggataaagtgacaaaggctactgctcagattggcttcattaaatttgtgctcatcccgatgttcgagacagtgaccaaactgtttcctatggtggaagagattatgctccagcccttgtgggagagtagagacagatatgaggagctcaagcgtattgacgacgcaatgaaggagctgcagaaaaaaactgacagcctgacttccggtgccaccgagaaatcccgggaaaggtcgagggatgtgaagaattctgagggtgactgcgcatag

SEQ ID NO: 18889 - DNA, 1704 bp, Artificial Sequence
  derived and/or modified sequence
atgggcagcggcagcagcagctacagacccaaggccatctacctggacatcgacggcagaatccagaaggtgatcttcagcaagtactgcaacagcagcgacatcatggacctgttctgcatcgccaccggcctgcccagaaccccctacaaggtgagacccgtggccatcaagcagctgagcgccggcgtggaggacaagagaaccaccagcagaggccagagcgccgagagacccctgagagacagaagagtggtgggcctggagcagcccagaagagagggcgccttcgagagcggccaggtggagcccagacccagagagccccagggctgctaccaggagggccagagaatcccccccgagagagaggagctgatccagagcgtgctggcccaggtggccgagcagttcagcagagccttcaagatcaacgagctgaaggccgaggtggccaaccacctggccgtgctggagaagagagtggagctggagggcctgaaggtggtggagatcgagaagtgcaagagcgacatcaagaagatgagagaggagctggccgccagaagcagcagaaccaactgcccctgcaagtacagcttcctggacaaccacaagaagctgacccccagaagagacgtgcccacctaccccaagtacctgctgagccccgagaccatcgaggccctgagaaagcccaccttcgacgtgtggctgtgggagcccaacgagatgctgagctgcctggagcacatgtaccacgacctgggcctggtgagagacttcagcatcaaccccgtgaccctgagaagatggctgttctgcgtgcacgacaactacagaaacaaccccttccacaacttcagacactgcttctgcgtggcccagatgatgtacagcatggtgtggctgtgcagcctgcaggagaagttcagccagaccgacatcctgatcctgatgaccgccgccatctgccacgacctggaccaccccggctacaacaacacctaccagatcaacgccagaaccgagctggccgtgagatacaacgacatcagccccctggagaaccaccactgcgccgtggccttccagatcctggccgagcccgagtgcaacatcttcagcaacatcccccccgacggcttcaagcagatcagacagggcatgatcaccctgatcctggccaccgacatggccagacacgccgagatcatggacagcttcaaggagaagatggagaacttcgactacagcaacgaggagcacatgaccctgctgaagatgatcctgatcaagtgctgcgacatcagcaacgaggtgagacccatggaggtggccgagccctgggtggactgcctgctggaggagtacttcatgcagagcgacagagagaagagcgagggcctgcccgtggcccccttcatggacagagacaaggtgaccaaggccaccgcccagatcggcttcatcaagttcgtgctgatccccatgttcgagaccgtgaccaagctgttccccatggtggaggagatcatgctgcagcccctgtgggagagcagagacagatacgaggagctgaagagaatcgacgacgccatgaaggagctgcagaagaagaccgacagcctgaccagcggcgccaccgagaagagcagagagagaagcagagacgtgaagaacagcgagggcgactgcgcctag

SEQ ID NO: 18890 - protein, 261 aa, Artificial Sequence
  derived and/or modified sequence
MDRFLVKGAQGGLLRKQEEQEPTGEEPAVLGGDKESTRKRPRREAPGNGGHSAGPSWRHIRAEGLDCSYTVLFGKAEADEIFQELEKEVEYFTGALARVQVFGKWHSVPRKQATYGDAGLTYTFSGLTLSPKPWIPVLERIRDHVSGVTGQTFNFVLINRYKDGCDHIGEHRDDERELAPGSPIASVSFGACRDFVFRHKDSRGKSPSRRVAVVRLPLAHGSLLMMNHPTNTHWYHSLPVRKKVLAPRVNLTFRKILLTKK

SEQ ID NO: 18891 - protein, 150 aa, Artificial Sequence
  derived and/or modified sequence
MDRFLVKGAQGGLLRKQEEQEPTGEEPAVLGGDKESTRKRPRREAPGNGGHSAGPSWRHIRAEGLDCSYTVLFGKAEADEIFQELEKEVEYFTGALARVQVFGKWHSVPRKQATYGDAGLTYTFSGLTLSPKPWIPVLERIRDHVSGVTG

SEQ ID NO: 18892 - protein, 121 aa, Artificial Sequence
  derived and/or modified sequence
MDRFLVKGAQGGLLRKQEEQEPTGEEPAVLGGDKESTRKRPRREAPGNGGHSAGPSWRHIRAEGLDCSYTVLFGKAEADEIFQELEKEVEYFTGALARVQVFGKWHSVPRKQATYGDAGLT

SEQ ID NO: 18893 - protein, 160 aa, Artificial Sequence
  derived and/or modified sequence
MDRFLVKGAQGGLLRKQEEQEPTGEEPAVLGGDKESTRKRPRREAPGNGGHSAGPSWRHIRAEGLDCSYTVLFGKAEADEIFQELEKEVEYFTGALARVQVFGKWHSVPRKQATYGDAGLTYTFSGLTLSPKPWIPVLERIRDHVSGVTGQTFNFVLINR

SEQ ID NO: 18894 - DNA, 786 bp, Artificial Sequence
  derived and/or modified sequence
atggacaggttcctggtaaaaggagcccaggggggactcttaagaaagcaagaagaacaagagcccaccggggaggaacccgccgtgctcgggggggataaagaatccactagaaagcgtccccggcgcgaggcccccggcaacggaggccatagtgccgggccaagttggaggcacattcgagcggagggacttgattgcagctatacggtgttatttggaaaggcggaggcagacgaaattttccaggaactggagaaagaggtcgagtactttacgggcgcactggcccgggtgcaggtcttcgggaaatggcattcagtcccgcggaagcaagctacatacggggatgcaggcctgacctacacgtttagtggtcttacgttatctcccaagccctggatccccgtcttagaacggatacgcgaccatgtgtccggtgtaacgggccagaccttcaacttcgtcttaatcaaccgctacaaagacgggtgcgatcacattggcgagcacagggacgatgagcgagagctggcacccgggagtccaatcgcttcagtcagttttggtgcctgccgcgacttcgttttcagacataaggattctcgtggtaaatcgccaagcagaagggtcgccgtggtgcgcctcccactggcccatggctctcttctgatgatgaatcaccccaccaatacgcactggtatcactccctgccagtacgtaagaaagtccttgctcccagagtgaatctaacattcagaaaaatcctcctgaccaaaaaatag

SEQ ID NO: 18895 - DNA, 786 bp, Artificial Sequence
  derived and/or modified sequence
atggaccgcttcctcgtgaagggcgcacaggggggactgctccgcaagcaggaggagcaggagcctactggggaagaacccgctgtgttgggaggagataaagagtcgacacgcaaacggccacggcgcgaagctcccggcaacggcggccacagcgcaggcccctcttggagacacattagagccgaaggacttgattgctcttataccgtgctattcgggaaagcggaagcggacgagatattccaggagctagagaaggaggtggagtattttacaggggctctcgcccgagttcaggtctttggtaagtggcatagcgttccacggaaacaggccacatacggggatgccggtctgacgtacactttctctggcctcacactatcccctaagccatggataccggtgctggagcgcattagagaccatgtgagcggagttacgggacagaccttcaactttgtgttgatcaacaggtacaaggacggttgtgatcatatcggcgaacaccgagacgacgagcgcgaactggcccccggcagcccaatcgcctctgtgagttttggcgcatgtcgcgactttgtgttcaggcacaaggattcacgcggtaagtccccctcgagacgcgtcgccgtggtccgtttgccgctagcccatggcagcctgcttatgatgaatcacccgaccaatactcactggtaccactcactcccagttagaaagaaagtgctggcaccccgagtcaatctgacttttcgcaaaatccttttaaccaaaaaatag

SEQ ID NO: 18896 - DNA, 786 bp, Artificial Sequence
  derived and/or modified sequence
atggatcgtttcctggtcaagggcgcccaaggcggcctactgcggaagcaagaagagcaggagcctaccggggaggaacccgccgtcttgggtggagacaaggaaagcactagaaagcggcctagacgcgaggcgcctggcaacggagggcattccgctggcccgtcttggaggcatatccgagccgaggggctcgactgcagctacactgtgctctttggaaaggcagaagcagacgaaatttttcaagagttggaaaaagaggtcgagtactttacaggggctctcgcacgggtccaggtgttcgggaagtggcacagtgtcccccgcaagcaggctacctacggagacgccggccttacctacactttctccggccttaccctttccccgaagccttggatacctgttttagagcggatccgggaccatgtgagcggggtgacggggcagacattcaatttcgttcttatcaaccggtacaaagacgggtgcgaccacataggcgaacaccgagacgatgagagggagttggcccccggctcccccatcgcctcggttagtttcggagcctgccgggatttcgtcttccgccataaagatagcagaggcaaatcgcccagccggcgtgtcgctgttgtacggcttcccctcgcccacgggtccctactgatgatgaatcatcctacaaatacacactggtatcactcattgccagtccggaagaaagtcctggcccctcgagtaaacctgacattccggaagatcttactaactaagaagtag

SEQ ID NO: 18897 - DNA, 453 bp, Artificial Sequence
  derived and/or modified sequence
atggataggtttctggtgaagggcgcccagggcggtttattgcgcaaacaggaggagcaggaaccaacaggagaagagccagccgtgctgggaggagacaaagagtctaccagaaaacgccctagacgcgaagcgcctggaaatggtgggcactccgctggcccaagctggcgtcatatcagggccgaaggactcgactgttcttacaccgtgctgttcggaaaggccgaggctgatgaaatcttccaagagctggagaaggaagtggagtacttcaccggcgcgcttgccagggtacaggtcttcggcaaatggcattcagtgccacggaaacaggccacgtacggagacgccgggctcacatacactttttctggactgactctatctcctaagccttggatccctgtcctggagaggatccgggatcatgtgagtggggtgaccggctag

SEQ ID NO: 18898 - DNA, 366 bp, Artificial Sequence
  derived and/or modified sequence
atggacaggtttcttgtgaagggagcccagggaggcctgctaagaaagcaggaagagcaggaacccaccggagaggagcccgcggtgcttggcggcgataaggagagcacacgcaaaaggccccgtcgcgaagcccctggtaatggcggacactccgctggccctagctggaggcacatcagggctgagggtctagactgctcttacactgtactctttggaaaggccgaggctgacgagatctttcaggagttggaaaaagaagtcgaatatttcacgggggcactggctagagtccaggtcttcggaaagtggcactcagttccaagaaaacaggctacctacggggacgccggtctaacttag

SEQ ID NO: 18899 - DNA, 483 bp, Artificial Sequence
  derived and/or modified sequence
atggatcggttcttagtgaaaggcgcacagggcgggctgctgagaaaacaggaagagcaggaacccacaggagaagagccagctgtacttggaggcgacaaggaatctacccgcaaacggccccggcgcgaagcccctggaaacggtggtcacagtgccgggccatcttggcgccatatccgcgccgagggacttgattgcagttacaccgttctttttggaaaagccgaagccgacgagatttttcaggaactcgagaaagaagtagaatacttcaccggcgcccttgcacgcgtgcaggttttcggaaagtggcattcagtcccccgaaaacaggccacgtacggagatgccgggctaacatatacattctccgggttgactctcagccctaagccatggatccccgtcctggaaagaatcagagatcatgtatcaggtgtgaccggccagaccttcaacttcgtattgatcaaccggtag

SEQ ID NO: 18900 - DNA, 786 bp, Artificial Sequence
  derived and/or modified sequence
atggaccgcttcctggtgaagggggcccagggcggcctgctgaggaagcaggaggagcaggagcccactggagaggagcctgctgtgctgggcggggacaaggagagcaccaggaagaggccccggcgggaggcccctggaaatggaggccacagcgctggccccagctggaggcacatccgggcagagggcctggactgcagctacacagtgctgtttgggaaggccgaggctgatgagatcttccaggagctggagaaggaggtggagtacttcaccggggccctggcccgggtgcaggtgtttgggaagtggcacagcgtgcccaggaagcaggccacctatggagatgctggcctgacctacaccttcagcggcctgaccctgagccccaagccctggatccctgtgctggagcgcatccgggaccacgtgtctggagtgacaggccagaccttcaactttgtgctgatcaaccgctacaaggatggctgtgaccacatcggggagcacagagatgatgagcgggagctggcccctggcagccccatcgcctctgtgtcctttggagcctgccgggactttgtgttccgccacaaggacagccggggcaagagccccagcagaagagtggccgtggtgcggctgcccctggcccacggcagcctgctgatgatgaaccaccccaccaacacccactggtaccacagcctgcctgtgaggaagaaggtgctggccccccgggtgaacctgaccttcaggaagatcctgctgaccaagaagtag

SEQ ID NO: 18901 - DNA, 453 bp, Artificial Sequence
  derived and/or modified sequence
atggaccgcttcctggtgaagggggcccagggcggcctgctgaggaagcaggaggagcaggagcccactggagaggagcctgctgtgctgggcggggacaaggagagcaccaggaagaggccccggcgggaggcccctggaaatggaggccacagcgctggccccagctggaggcacatccgggcagagggcctggactgcagctacacagtgctgtttgggaaggccgaggctgatgagatcttccaggagctggagaaggaggtggagtacttcaccggggccctggcccgggtgcaggtgtttgggaagtggcacagcgtgcccaggaagcaggccacctatggagatgctggcctgacctacaccttcagcggcctgaccctgagccccaagccctggatccctgtgctggagcgcatccgggaccacgtgtctggagtgactggatag

SEQ ID NO: 18902 - DNA, 366 bp, Artificial Sequence
  derived and/or modified sequence
atggaccgcttcctggtgaagggggcccagggcggcctgctgaggaagcaggaggagcaggagcccactggagaggagcctgctgtgctgggcggggacaaggagagcaccaggaagaggccccggcgggaggcccctggaaatggaggccacagcgctggccccagctggaggcacatccgggcagagggcctggactgcagctacacagtgctgtttgggaaggccgaggctgatgagatcttccaggagctggagaaggaggtggagtacttcaccggggccctggcccgggtgcaggtgtttgggaagtggcacagcgtgcccaggaagcaggccacctatggagatgctggcctgacctag

SEQ ID NO: 18903 - DNA, 483 bp, Artificial Sequence
  derived and/or modified sequence
atggaccgcttcctggtgaagggggcccagggcggcctgctgaggaagcaggaggagcaggagcccactggagaggagcctgctgtgctgggcggggacaaggagagcaccaggaagaggccccggcgggaggcccctggaaatggaggccacagcgctggccccagctggaggcacatccgggcagagggcctggactgcagctacacagtgctgtttgggaaggccgaggctgatgagatcttccaggagctggagaaggaggtggagtacttcaccggggccctggcccgggtgcaggtgtttgggaagtggcacagcgtgcccaggaagcaggccacctatggagatgctggcctgacctacaccttcagcggcctgaccctgagccccaagccctggatccctgtgctggagcgcatccgggaccacgtgtctggagtgacaggccagaccttcaactttgtgctgatcaacagatag

SEQ ID NO: 18904 - DNA, 1028 bp, Artificial Sequence
  derived and/or modified sequence
gtctttcccaccacgaggccaccagggtgactgcgggattccgatctgcgccggagctgcgatgctagagcactcttgccacccccaccccacggacgtgttgcagtgatatcagaattttgcgtgcggtttacccgtgtttaacctctttgcgtctcgcttctgaatcgtatccacttgagcatcactagactgatctattttaacactggtggggggcagcgaggatggacagattcctggtgaaaggggctcaagggggccttttgaggaagcaggaggagcaagagccaactggagaagagccagctgtgttgggaggagacaaagaaagcacaaggaagaggcccaggagagaggccccagggaatggaggccactcagcaggccctagctggcggcacattcgggctgagggcctggactgcagttacacagtcctgtttggcaaagctgaggcagatgagattttccaagagttggagaaagaagtagaatattttacaggagcactggccagagtccaggtattcgggaagtggcacagtgtgcccaggaagcaggcaacgtatggcgacgctgggctgacctacacattttcaggcctcacgctgtctccaaagccctggatcccagttctagagcgcatccgggatcacgtctctggggtgactggacagaccttcaactttgtgctcatcaacaggtataaagatggctgtgaccacatcggggagcaccgagatgatgaaagagaactggcccctgggagccccattgcctctgtctccttcggtgcctgcagagactttgtcttccggcataaggattcccgtgggaaaagcccctccaggagggtggcggtggtcaggctgccgctggcccacgggagcttactaatgatgaaccacccgaccaacacgcactggtaccacagtcttcccgtgagaaagaaggttctggctccacgggtgaatctgacttttcgtaaaattttgcttactaaaaaataaaaacatttttaacag

SEQ ID NO: 18905 - DNA, 1197 bp, Artificial Sequence
  derived and/or modified sequence
cgattcgctggggcgcgtctttcccaccacgaggccaccagggtgactgcgggattccgatctgcgccggagctgcgatgctagagcactcttgccacccccaccccacggacgtgttgcagtgatatcagaattttgcgtgcggtttacccgtgtttaacctctttgcgtctcgcttctgaatcgtatccacttgagcatcactagactgatctattttaacactggtggggggcagcgaggacatggttttaaactttaaaatgaaaatgtgaaactaggaatgttgctgtgagaccccttggacaaacagatttttgcactggggatagaacttgagcaatttctgtcttggcctcgccactgacgtcccttctttcctgtggggacaggatggacagattcctggtgaaaggggctcaagggggccttttgaggaagcaggaggagcaagagccaactggagaagagccagctgtgttgggaggagacaaagaaagcacaaggaagaggcccaggagagaggccccagggaatggaggccactcagcaggccctagctggcggcacattcgggctgagggcctggactgcagttacacagtcctgtttggcaaagctgaggcagatgagattttccaagagttggagaaagaagtagaatattttacaggagcactggccagagtccaggtattcgggaagtggcacagtgtgcccaggaagcaggcaacgtatggcgacgctgggctgacctacacattttcaggcctcacgctgtctccaaagccctggatcccagttctagagcgcatccgggatcacgtctctggggtgactggacagaccttcaactttgtgctcatcaacaggtataaagatggctgtgaccacatcggggagcaccgagatgatgaaagagaactggcccctgggagccccattgcctctgtctccttcggtgcctgcagagactttgtcttccggcataaggattcccgtgggaaaagcccctccaggagggtggcggtggtcaggctgccgctggcccacgggagcttactaatgatgaaccacccgaccaacacgcactggtaccacagtcttcccgtgagaaagaaggttctggctccacgggtgaatctgacttttcgtaaaattttgcttactaaaaaataaaaacatttttaacagttt

SEQ ID NO: 18906 - DNA, 939 bp, Artificial Sequence
  derived and/or modified sequence
ttttaaactttaaaatgaaaatgtgaaactaggaatgttgctgtgagaccccttggacaaacagatttttgcactggggatagaacttgagcaatttctgtcttggcctcgccactgacgtcccttctttcctgtggggacaggatggacagattcctggtgaaaggggctcaagggggccttttgaggaagcaggaggagcaagagccaactggagaagagccagctgtgttgggaggagacaaagaaagcacaaggaagaggcccaggagagaggccccagggaatggaggccactcagcaggccctagctggcggcacattcgggctgagggcctggactgcagttacacagtcctgtttggcaaagctgaggcagatgagattttccaagagttggagaaagaagtagaatattttacaggagcactggccagagtccaggtattcgggaagtggcacagtgtgcccaggaagcaggcaacgtatggcgacgctgggctgacctacacattttcaggcctcacgctgtctccaaagccctggatcccagttctagagcgcatccgggatcacgtctctggggtgactggacagaccttcaactttgtgctcatcaacaggtataaagatggctgtgaccacatcggggagcaccgagatgatgaaagagaactggcccctgggagccccattgcctctgtctccttcggtgcctgcagagactttgtcttccggcataaggattcccgtgggaaaagcccctccaggagggtggcggtggtcaggctgccgctggcccacgggagcttactaatgatgaaccacccgaccaacacgcactggtaccacagtcttcccgtgagaaagaaggttctggctccacgggtgaatctgacttttcgtaaaattttgcttactaaaaaataaaaacatttt

SEQ ID NO: 18907 - DNA, 572 bp, Artificial Sequence
  derived and/or modified sequence
tttcccaccacgaggccaccagggtgactgcgggattccgatctgcgccggagctgcgatgctagagcactcttgccacccccaccccacggacgtgttgcagtgatatcagaattttgcgatggacagattcctggtgaaaggggctcaagggggccttttgaggaagcaggaggagcaagagccaactggagaagagccagctgtgttgggaggagacaaagaaagcacaaggaagaggcccaggagagaggccccagggaatggaggccactcagcaggccctagctggcggcacattcgggctgagggcctggactgcagttacacagtcctgtttggcaaagctgaggcagatgagattttccaagagttggagaaagaagtagaatattttacaggagcactggccagagtccaggtattcgggaagtggcacagtgtgcccaggaagcaggcaacgtatggcgacgctgggctgacctacacattttcaggcctcacgctgtctccaaagccctggatcccagttctagagcgcatccgggatcacgtctctggggtgactggac

SEQ ID NO: 18908 - DNA, 1049 bp, Artificial Sequence
  derived and/or modified sequence
gtctttcccaccacgaggccaccagggtgactgcgggattccgatctgcgccggagctgcgatgctagagcactcttgccacccccaccccacggacgtgttgcagtgatatcagaattttgcgtgcggtttacccgtgtttaacctctttgcgtctcgcttctgaatcgtatccacttgagcatcactagactgatctattttaacactggtggggggcagcgaggtcagttatgggtccttcctccttaaaggggtggacagttgactttgggcaaacctcttcgcctctgtgggcaacagtttccccttctgcaaaatgagggtttggattgtagtttctaagtttagctgtggcgtgcgaattcccaggaggtagttctttaaaaattcaggtgctcaggcgtggagtgcagacctctgggtttttgcaagctagccagctgattctgatgcacaggtggacgtgggagaccctggatcagattgtccctagggtcccttccggctttaacatcttctgtttcctttctaggacatggttttaaactttaaaatgaaaatgtgaaactaggaatgttgctgtgagaccccttggacaaacagatttttgcactggggatagaacttgagcaatttctgtcttggcctcgccactgacgtcccttctttcctgtggggacaggatggacagattcctggtgaaaggggctcaagggggccttttgaggaagcaggaggagcaagagccaactggagaagagccagctgtgttgggaggagacaaagaaagcacaaggaagaggcccaggagagaggccccagggaatggaggccactcagcaggccctagctggcggcacattcgggctgagggcctggactgcagttacacagtcctgtttggcaaagctgaggcagatgagattttccaagagttggagaaagaagtagaatattttacaggagcactggccagagtccaggtattcgggaagtggcacagtgtgcccaggaagcaggcaacgtatggcgacgctgggctgacc

SEQ ID NO: 18909 - DNA, 845 bp, Artificial Sequence
  derived and/or modified sequence
cgaggccaccagggtgactgcgggattccgatctgcgccggagctgcgatgctagagcactcttgccacccccaccccacggacgtgttgcagtgatatcagaattttgcgtgcggtttacccgtgtttaacctctttgcgtctcgcttctgaatcgtatccacttgagcatcactagactgatctattttaacactggtggggggcagcgaggacatggttttaaactttaaaatgaaaatgtgaaactaggaatgttgctgtgagaccccttggacaaacagatttttgcactggggatagaacttgagcaatttctgtcttggcctcgccactgacgtcccttctttcctgtggggacaggatggacagattcctggtgaaaggggctcaagggggccttttgaggaagcaggaggagcaagagccaactggagaagagccagctgtgttgggaggagacaaagaaagcacaaggaagaggcccaggagagaggccccagggaatggaggccactcagcaggccctagctggcggcacattcgggctgagggcctggactgcagttacacagtcctgtttggcaaagctgaggcagatgagattttccaagagttggagaaagaagtagaatattttacaggagcactggccagagtccaggtattcgggaagtggcacagtgtgcccaggaagcaggcaacgtatggcgacgctgggctgacctacacattttcaggcctcacgctgtctccaaagccctggatcccagttctagagcgcatccgggatcacgtctctggggtgactggacagaccttcaactttgtgctcatcaacaggt

SEQ ID NO: 18910 - DNA, 786 bp, Artificial Sequence
  derived and/or modified sequence
atggaccggttcctggtgaagggcgcccagggcggcctgctgcggaaacaagaggagcaggagcctactggcgaagaacccgctgtactgggtggcgataaagaatctacacgcaaacgtccacggagagaagctcccggaaacggaggacattcagcagggccgagttggagacacatccgcgccgaggggctggattgcagctatactgtgctcttcgggaaggctgaggctgatgagatcttccaagagctggagaaagaagtggagtattttacaggcgctctggccagggttcaggtttttggcaaatggcatagcgtgccgcgtaagcaagctacctatggggatgccggattgacctacaccttttccggtctaacgctgtcacccaaaccttggataccggtgctggagcggatacgcgatcatgtatcaggggtaaccggacagacgttcaactttgttcttataaacaggtacaaggacggttgcgaccacatcggtgagcacagagacgacgagcgtgaattggcaccaggctctcccatcgcttccgtcagcttcggcgcttgtagagactttgtatttagacataaggactcccgcggcaagagtcctagtcggagagtggccgtggtgcgccttccactggcacacggcagcctgctgatgatgaaccaccctaccaatactcattggtaccactctctgcctgtgagaaagaaagtcttggcgccaagagttaatctcacatttagaaagatcttgctgactaagaagtag

SEQ ID NO: 18911 - DNA, 786 bp, Artificial Sequence
  derived and/or modified sequence
atggaccggttcctggtgaagggcgcccagggcggcctgctgcggaaacaggaggaacaggaaccaactggagaagaaccggccgtgctgggcggagataaggagagcacccggaagcgtcccagacgtgaagcacctggaaacggaggccattcagctggcccctcgtggaggcacatccgcgcagagggcctcgactgctcctatactgtgctgttcggcaaagcggaagcagacgagattttccaggagctggagaaggaggttgagtacttcacaggagccctggcccgtgtccaagtctttggtaaatggcactctgttcctaggaagcaggcgacgtacggcgatgcaggtttgacctacacattttccggcttaaccttgagccctaagccttggataccggtactggaaaggattagagaccatgtctctggggtgactgggcagaccttcaacttcgtcttaataaaccgttacaaggacgggtgtgaccatataggcgagcaccgagatgacgaacgtgagctcgctcccggctcacccatcgcttctgttagcttcggagcctgtcgggactttgtgttcaggcacaaggactcacgcggcaagtcgccttcacggcgtgtggccgtcgtgagactgccgcttgcgcacggatcgctcctgatgatgaatcacccaaccaacacgcattggtaccacagcctgccggtgcgtaagaaagttctggcgccgagagtaaacctcactttcaggaaaatactgctgacgaagaaatag

SEQ ID NO: 18912 - DNA, 786 bp, Artificial Sequence
  derived and/or modified sequence
atggaccggttcctggtgaagggcgcccagggcggcctgctgcggaaacaggaggagcaagagcctactggcgaggagcctgcagtgcttggcggggacaaggaaagtacccgcaagcgtcctagacgcgaagccccaggtaacggcggacattcagcaggacccagctggcggcacatccgggcggagggacttgattgcagctacacagtgctcttcggaaaggctgaagctgacgaaatcttccaggaattggagaaggaggtcgagtattttaccggcgcgcttgctcgagtccaggtttttgggaagtggcattctgttcctcgaaaacaggccacatatggagacgcagggctgacctatacctttagcggactaactcttagtccaaaaccctggatccctgtgcttgaaagaataagggatcacgttagcggcgtcacaggacaaacattcaactttgtgctgatcaataggtataaggacgggtgcgatcatatcggcgaacaccgtgatgacgagagagagctggcgcctgggtccccgatcgcctccgtgtcctttggcgcatgccgggatttcgtctttcggcacaaggattctcgagggaagtccccatctcggagagtggctgtggtgcggctgccgttagcacatggctccctcttgatgatgaaccatcccacaaatacccactggtaccatagtctgcctgtccgtaaaaaagttctggccccacgcgtaaatctgacattccgcaaaatcctgctcacaaaaaaatag

SEQ ID NO: 18913 - DNA, 453 bp, Artificial Sequence
  derived and/or modified sequence
atggaccggttcctggtgaagggcgcccagggcggcctgctgcggaagcaggaagaacaggagcccacgggggaagaacccgctgtgctagggggtgacaaggagtcgaccaggaaaaggccccggcgggaagctcccggtaacggtggacactctgccggcccctcctggcgccatattagggcagaaggactggactgcagttacaccgtcctgttcggaaaagccgaggccgatgagatttttcaggaattagaaaaggaggtggagtacttcactggagccttggcacgtgtccaggtctttggcaaatggcactccgtcccaaggaaacaggccacttatggcgacgccgggctgacctacacattctctggcctgaccttgtctcctaagccctggatacccgtgttagagcgaattcgagatcacgtgagcggcgtgactggatag

SEQ ID NO: 18914 - DNA, 366 bp, Artificial Sequence
  derived and/or modified sequence
atggaccggttcctggtgaagggcgcccagggcggcctgctgcggaagcaggaggagcaggagcctacgggcgaggaaccagccgtgttaggcggcgataaagagagcacaaggaaaaggcctaggagggaggccccagggaatggtggtcactcagcaggaccctcttggcgccacatccgggccgagggactcgattgctcctacacagtgttgtttggtaaggccgaagcagacgaaatatttcaggaactcgaaaaagaggttgaatatttcactggagcccttgccagggtacaggtgttcggcaaatggcacagtgttcctcgcaagcaggctacctatggcgacgctggcttaacctag

SEQ ID NO: 18915 - DNA, 483 bp, Artificial Sequence
  derived and/or modified sequence
atggaccggttcctggtgaagggcgcccagggcggcctgctgcggaagcaagaggagcaggaacccactggcgaggaacctgccgtgcttggcggagataaagagtccactagaaaaagacccagaagggaggccccggggaatggggggcactctgcaggcccaagctggaggcacatcagagctgaggggttagactgctcatataccgttctgttcgggaaggccgaggcagacgagatattccaagaactggagaaagaggtggaatatttcacaggagccctggctagggtgcaggtctttggtaagtggcactccgtgccaagaaagcaggccacatatggagacgctggacttacatataccttctccggtcttactcttagtcccaagccctggatacccgtgttggaaaggatacgggaccacgtgtccggcgtcacaggacagacgttcaacttcgttttgatcaatagatag

SEQ ID NO: 18916 - DNA, 786 bp, Artificial Sequence
  derived and/or modified sequence
atggaccggtttctcgtaaagggtgctcagggtgggcttctgaggaagcaggaggaacaggaacctacgggtgaagaaccggctgtccttggaggcgataaagagtcaacgcgtaagaggccacgaagagaggcacccggtaacggaggtcacagtgccggtccttcttggagacatatcagggcagaaggcctcgattgctcatacactgtcctcttcgggaaggccgaggccgacgagatatttcaagaactagagaaagaggtggagtacttcaccggggctctagccagagtgcaagtctttggaaaatggcattcagtgcctaggaaacaggctacctacggagatgctggcctcacctacaccttcagtgggctgacactgtcacctaagccttggattcctgtgctcgagcgaatccgagatcacgtgtcaggcgtcacagggcagacttttaactttgtcctcatcaatagatataaagacggttgcgaccatattggcgaacaccgcgacgacgagcgcgagctggcaccagggagccctattgcctccgtttcattcggcgcatgccgcgatttcgtctttcgccacaaggattctagagggaagagcccctcccgcagagtggctgtggttcgcctaccactggcacatggctctctgttaatgatgaaccaccccactaacacacattggtaccactcactgcccgtccgaaaaaaggtattagcacccagagtaaacctgacatttcgaaaaattcttttaaccaagaaatag

SEQ ID NO: 18917 - DNA, 786 bp, Artificial Sequence
  derived and/or modified sequence
atggacagattcctggtgaagggagcccaaggtggcctgttgagaaagcaggaggagcaggaaccaacgggcgaagagcccgctgttcttggaggagacaaagagtccacccgcaagagaccgaggagagaggcacctggtaatggcggacactctgccggaccatcatggaggcacatccgcgctgaaggattggattgttcatataccgtattattcggaaaagcagaagcagacgagatcttccaggaactggagaaagaagtcgagtattttacaggcgcactggccagggtgcaagtatttggtaagtggcactcagttccgagaaagcaagctacctacggggatgcaggccttacatacaccttctcgggactcactctctccccaaaaccctggattcctgttctggaacggatccgcgaccatgtctctggtgtgaccggccagacctttaatttcgttctgataaacagatataaggacggctgtgatcatatcggcgagcatagagacgacgaacgcgagctggctcccggaagccccatcgcctctgtctcatttggagcttgccgcgactttgtttttcgccataaggactcacgaggtaagtctccaagtcggcgagtcgccgtggtgcgtctgccactggcccatgggagcctgctgatgatgaatcatcccacgaacacccattggtaccactccctccccgtcagaaaaaaggtcctggctcccagagtcaatttaacattcagaaagatcctgctgaccaaaaagtag

SEQ ID NO: 18918 - DNA, 786 bp, Artificial Sequence
  derived and/or modified sequence
atggaccgctttctcgtcaaaggcgctcagggaggtttgttgagaaaacaggaagaacaggagcccacgggtgaagagccggcagtgttagggggagacaaggaaagcacacgcaagcgccctcgaagggaggcaccgggtaatggcggacattccgcgggacctagctggagacatattcgggcagaggggttagactgctcctacacagtgctgttcgggaaagcagaggcggatgagatcttccaggaactcgagaaggaagtcgaatatttcacgggcgctcttgcccgagtccaggtgtttggtaagtggcatagcgtgcctcgcaaacaagccacttatggggatgccggtctcacctacaccttcagtggccttactttaagtccaaaaccttggatccccgtgcttgagcggatccgggaccacgtgtcaggcgtcacgggccagaccttcaactttgtattaatcaatcggtataaagacgggtgcgaccatattggtgagcatagagacgatgaaagagagctggctcctggttctcccatcgcgagtgtgtcttttggggcatgtcgcgactttgtctttcgccacaaggacagccgtggtaagtccccaagccgaagagtggctgtggtgcgcctccccctcgctcatgggtcgctcctgatgatgaaccatccaacgaatacacattggtatcactctctcccagtgcgcaagaaagtgctcgctccgagggttaatcttacctttagaaaaattctactgaccaagaaatag

SEQ ID NO: 18919 - DNA, 453 bp, Artificial Sequence
  derived and/or modified sequence
atggatagattcctggtgaaaggagctcagggaggactcctgcggaagcaggaggagcaagagccaaccggagaggagcccgctgtgctgggaggcgacaaggagtccactaggaaaagaccacgtagggaagccccaggaaacggtggacacagcgccggtccaagctggcgacatattcgggctgaaggcctggattgttcttataccgtcctcttcggtaaggcggaggctgacgagatttttcaagagctagagaaggaagtggagtatttcacaggcgctttagccagagtgcaagtgtttggtaagtggcactcagtccctagaaagcaggccacctacggagacgcaggtctgacctacaccttcagtgggctgacactgtctccaaagccgtggatacctgttctcgaacggattagggatcatgtcagcggcgtgaccggatag

SEQ ID NO: 18920 - DNA, 366 bp, Artificial Sequence
  derived and/or modified sequence
atggacaggttcctggtgaaaggggctcagggcggactcttaagaaagcaggaagagcaggagcctaccggggaggaacccgcagtgctgggaggcgataaggagagcactcgaaaaaggccaaggcgcgaagccccaggcaacggcggtcactccgccggtcctagctggaggcacattagagctgagggattagattgctcgtataccgtgctctttgggaaagcagaagcagacgagatcttccaagagctggagaaagaagtcgaatactttacaggggcactcgctcgagtgcaggtgtttggtaagtggcattccgtcccaagaaaacaggcaacttacggtgacgccggtctcacctag

SEQ ID NO: 18921 - DNA, 483 bp, Artificial Sequence
  derived and/or modified sequence
atggatcggttcctggtgaagggggcacaaggaggccttctaagaaagcaggaagagcaagagccgacgggggaagaacccgctgttcttgggggagataaggagagtactcgcaagcgcccacggagagaggcccctggtaatggaggacacagtgcaggtccttcctggcgacatatccgtgctgagggattggactgcagttacactgttctgttcggaaaggcagaagccgacgagatcttccaggagctcgaaaaagaagtggaatacttcaccggcgcactggctcgtgtacaagtgtttggtaaatggcactcagtgcctcgaaagcaggcaacatatggtgatgcaggcctgacctatacgttctctggtttaacactttctcccaagccatggattcccgtccttgagcgcattcgcgatcacgtttcgggggttactggccagacctttaacttcgttctgatcaataggtag

SEQ ID NO: 18922 - DNA, 786 bp, Artificial Sequence
  derived and/or modified sequence
atggacagattcctggtgaagggcgcccagggcggcctgctgagaaagcaggaggagcaggagcccaccggcgaggagcccgccgtgctgggcggcgacaaggagagcaccagaaagagacccagaagagaggcccccggcaacggcggccacagcgccggccccagctggagacacatcagagccgagggcctggactgcagctacaccgtgctgttcggcaaggccgaggccgacgagatcttccaggagctggagaaggaggtggagtacttcaccggcgccctggccagagtgcaggtgttcggcaagtggcacagcgtgcccagaaagcaggccacctacggcgacgccggcctgacctacaccttcagcggcctgaccctgagccccaagccctggatccccgtgctggagagaatcagagaccacgtgagcggcgtgaccggccagaccttcaacttcgtgctgatcaacagatacaaggacggctgcgaccacatcggcgagcacagagacgacgagagagagctggcccccggcagccccatcgccagcgtgagcttcggcgcctgcagagacttcgtgttcagacacaaggacagcagaggcaagagccccagcagaagagtggccgtggtgagactgcccctggcccacggcagcctgctgatgatgaaccaccccaccaacacccactggtaccacagcctgcccgtgagaaagaaggtgctggcccccagagtgaacctgaccttcagaaagatcctgctgaccaagaagtag

SEQ ID NO: 18923 - DNA, 453 bp, Artificial Sequence
  derived and/or modified sequence
atggacagattcctggtgaagggcgcccagggcggcctgctgagaaagcaggaggagcaggagcccaccggcgaggagcccgccgtgctgggcggcgacaaggagagcaccagaaagagacccagaagagaggcccccggcaacggcggccacagcgccggccccagctggagacacatcagagccgagggcctggactgcagctacaccgtgctgttcggcaaggccgaggccgacgagatcttccaggagctggagaaggaggtggagtacttcaccggcgccctggccagagtgcaggtgttcggcaagtggcacagcgtgcccagaaagcaggccacctacggcgacgccggcctgacctacaccttcagcggcctgaccctgagccccaagccctggatccccgtgctggagagaatcagagaccacgtgagcggcgtgaccggctag

SEQ ID NO: 18924 - DNA, 366 bp, Artificial Sequence
  derived and/or modified sequence
atggacagattcctggtgaagggcgcccagggcggcctgctgagaaagcaggaggagcaggagcccaccggcgaggagcccgccgtgctgggcggcgacaaggagagcaccagaaagagacccagaagagaggcccccggcaacggcggccacagcgccggccccagctggagacacatcagagccgagggcctggactgcagctacaccgtgctgttcggcaaggccgaggccgacgagatcttccaggagctggagaaggaggtggagtacttcaccggcgccctggccagagtgcaggtgttcggcaagtggcacagcgtgcccagaaagcaggccacctacggcgacgccggcctgacctag

SEQ ID NO: 18925 - DNA, 483 bp, Artificial Sequence
  derived and/or modified sequence
atggacagattcctggtgaagggcgcccagggcggcctgctgagaaagcaggaggagcaggagcccaccggcgaggagcccgccgtgctgggcggcgacaaggagagcaccagaaagagacccagaagagaggcccccggcaacggcggccacagcgccggccccagctggagacacatcagagccgagggcctggactgcagctacaccgtgctgttcggcaaggccgaggccgacgagatcttccaggagctggagaaggaggtggagtacttcaccggcgccctggccagagtgcaggtgttcggcaagtggcacagcgtgcccagaaagcaggccacctacggcgacgccggcctgacctacaccttcagcggcctgaccctgagccccaagccctggatccccgtgctggagagaatcagagaccacgtgagcggcgtgaccggccagaccttcaacttcgtgctgatcaacagatag

SEQ ID NO: 18926 - protein, 311 aa, Artificial Sequence
  derived and/or modified sequence
MGSFNTSFEDGFILVGFSDWPQLEPILFVFIFIFYSLTLFGNTIIIALSWLDLRLHTPMYFFLSHLSLLDLCFTTSTVPQLLINLCGVDRTITRGGCVAQLFIYLALGSTECVLLVVMAFDRYAAVCRPLHYMAIMHPHLCQTLAIASWGAGFVNSLIQTGLAMAMPLCGHRLNHFFCEMPVFLKLACADTEGTEAKMFVARVIVVAVPAALILGSYVHIAHAVLRVKSTAGRRKAFGTCGSHLLVVFLFYGSAIYTYLQSIHNYSEREGKFVALFYTIITPILNPLIYTLRNKDVKGALWKVLWRGRDSG

SEQ ID NO: 18927 - DNA, 936 bp, Artificial Sequence
  derived and/or modified sequence
atgggcagcttcaacaccagcttcgaggacggcttcatcctggtgggcttcagcgactggccccagctggagcccatcctgttcgtgttcatcttcatcttctacagcctgaccctgttcggcaacaccatcatcatcgccctgagctggctggacctgagactgcacacccccatgtacttcttcctgagccacctgagcctgctggacctgtgcttcaccaccagcaccgtgccccagctgctgatcaacctgtgcggcgtggacagaaccatcaccagaggcggctgcgtggcccagctgttcatctacctggccctgggcagcaccgagtgcgtgctgctggtggtgatggccttcgacagatacgccgccgtgtgcagacccctgcactacatggccatcatgcacccccacctgtgccagaccctggccatcgccagctggggcgccggcttcgtgaacagcctgatccagaccggcctggccatggccatgcccctgtgcggccacagactgaaccacttcttctgcgagatgcccgtgttcctgaagctggcctgcgccgacaccgagggcaccgaggccaagatgttcgtggccagagtgatcgtggtggccgtgcccgccgccctgatcctgggcagctacgtgcacatcgcccacgccgtgctgagagtgaagagcaccgccggcagaagaaaggccttcggcacctgcggcagccacctgctggtggtgttcctgttctacggcagcgccatctacacctacctgcagagcatccacaactacagcgagagagagggcaagttcgtggccctgttctacaccatcatcacccccatcctgaaccccctgatctacaccctgagaaacaaggacgtgaagggcgccctgtggaaggtgctgtggagaggcagagacagcggctag

SEQ ID NO: 18928 - DNA, 936 bp, Artificial Sequence
  derived and/or modified sequence
atgggatcatttaacaccagttttgaggatggcttcattctggtcggatttagcgattggccacagttggaacccatcttgttcgtgtttatttttattttctattcactgacactgttcgggaacacgattattattgcgctgagttggctggacctgaggctgcacactccaatgtacttttttttgagtcatctctccctgctagatctgtgctttaccacgagtactgtgccccagctcctgattaacctgtgcggagttgatcgcacaattaccagaggtggctgcgtggcgcagttattcatatatcttgctctgggctctacagagtgtgttttattggttgtgatggccttcgacaggtacgccgccgtatgtaggcctttgcactatatggccataatgcaccctcatctttgccagacgctggccattgcctcttggggcgctggattcgtcaattccctcattcagacgggactggcaatggcaatgcccttatgcggccatagactgaatcattttttctgtgagatgcccgtgttcctcaaactggcctgcgcagataccgaaggcacggaagccaagatgttcgtcgccagagtcatagtggtagccgtccccgctgctttgatcctcggaagctatgtacatatcgctcatgctgtcctgcgcgttaagtcaacagccggcagacgtaaggcattcggaacatgcggctcccacttgcttgtggttttcctcttctatggaagtgcaatttacacctatctacaatcaatccacaattatagcgaacgtgaggggaaatttgtggcactgttctacactatcatcactcccattctgaacccactgatttatacacttagaaacaaggacgtgaagggtgccctgtggaaagtgttgtggcgtggcagagactcagggtag

SEQ ID NO: 18929 - DNA, 936 bp, Artificial Sequence
  derived and/or modified sequence
atgggcagcttcaacaccagctttgaagatggcttcatcctggtgggcttcagtgactggccccagctggagcccatcctgtttgtgttcatcttcatcttctacagcctgaccctgtttggaaacaccatcatcatcgccctgtcctggctggacctgcggctgcacacccccatgtacttcttcctgagccacctgagcctgctggacctgtgcttcaccaccagcacagtgccccagctgctgatcaacctgtgtggggtggacaggaccatcacccggggcggctgtgtggcccagctgttcatctacctggccctgggcagcacagaatgtgtgctgctggtggtgatggcctttgacagatatgctgctgtgtgccggcccctgcactacatggccatcatgcacccccacctgtgccagaccctggccatcgcctcctggggcgccggctttgtgaacagcctcatccagacaggcctggccatggccatgcccctgtgtggccaccggctgaaccacttcttctgtgagatgcctgtgttcctgaagctggcctgtgccgacacagagggcacagaggccaagatgtttgtggcccgggtcatcgtggtggccgtgcctgctgccctgatcctgggcagctatgtgcacatcgcccatgctgtgctgcgggtgaagagcacagctggaagaaggaaggccttcggcacctgtggcagccacctgctggtggtgttcctgttctacggcagcgccatctacacctacctgcagagcatccacaactacagcgagcgggagggcaagtttgtggccctcttctacaccatcatcacccccatcctgaaccccctcatctacaccctgaggaacaaggatgtgaagggggccctgtggaaggtgctgtggaggggccgggacagcggctag

SEQ ID NO: 18930 - DNA, 936 bp, Artificial Sequence
  derived and/or modified sequence
atgggcagcttcaacaccagcttcgaggacggcttcatcctggtgggcttttccgattggccccagttggaacccattctattcgtctttatcttcatcttctacagtctaactctttttggtaatacgatcatcatcgccctgtcctggctggatcttcgattacacacacctatgtattttttcctgagtcatctgagcctgctcgatctgtgcttcacaacatctacggtgccccagttgctgattaacctgtgcggggtggatagaactatcacccgggggggttgtgtcgcccagctgttcatttacttggcattaggatcaaccgagtgcgtgctcttagtggttatggcattcgaccgctatgccgccgtgtgtagacctctccattacatggcgattatgcatccccacctgtgtcaaacattggccatcgcctcgtggggtgctggtttcgtcaatagcctcatccagacagggctggctatggcaatgcccttgtgcgggcatcgacttaatcattttttctgtgagatgcctgtgtttcttaagctcgcatgtgccgacacagaagggacagaagccaaaatgttcgtggcccgcgtaatcgtcgttgccgttcccgccgctctgatcctgggtagctatgtgcatatcgcccacgccgtgctgcgggtaaagtccaccgcagggcgcaggaaagccttcgggacgtgtggaagccatttattggtggtctttctcttttacggatccgcaatctacacatacctccagtctattcataattacagtgagcgggaggggaagttcgtggcacttttctacactattataactcccatactcaatcctttgatctataccctccggaacaaggacgtcaaaggggccctgtggaaagtcctttggcggggccgcgactccggctag

SEQ ID NO: 18931 - DNA, 1058 bp, Artificial Sequence
  derived and/or modified sequence
ggcattgcacttccttctgctgttcagacaggcaaaaggccatgggaagtttcaacaccagttttgaagatggcttcattttggtgggattctcagattggccgcaactggagcccatcctgtttgtctttatttttattttctactccctaactctctttggcaacaccatcatcatcgctctctcctggctagaccttcggctgcacacacctatgtacttctttctctctcatctgtccctcctggacctctgcttcaccaccagcaccgtgccccagctcctgatcaacctttgcggggtggaccgcaccatcacccgtggagggtgtgtggctcagctcttcatctacctagccctgggctccacagagtgtgtgctcctggtggtgatggcctttgaccgctatgctgctgtctgtcgtccactccactacatggccatcatgcacccccatctctgccagaccctggctatcgcctcctggggtgcgggtttcgtgaactctctgatccagacaggtctcgcaatggccatgcctctctgtggccatcgactgaatcacttcttctgtgagatgcctgtatttctgaagttggcttgtgcggacacagaaggaacagaggccaagatgtttgtggcccgagtcatagtcgtggctgttcctgcagcacttattctaggctcctatgtgcacattgctcatgcagtgctgagggtgaagtcaacggctgggcgcagaaaggcttttgggacttgtgggtcccacctcctagtagttttccttttttatggctcagccatctacacatatctccaatccatccacaattattctgagcgtgagggaaaatttgttgcccttttttatactataattacccccattctcaatcctctcatttatacactaagaaacaaggacgtgaagggggctctgtggaaagtactatggaggggcagggactcagggtaggaggtgaaaaaatgagcagtaaaattttctgtaatagctcttcaatcacagatctttccctgttccttggagggcagttgg

SEQ ID NO: 18932 - DNA, 936 bp, Artificial Sequence
  derived and/or modified sequence
atgggatcatttaatacctcatttgaggatggttttatcctcgtcggctttagcgactggccacagctggagccaatcctgttcgtgtttatttttattttctattcacttactctgttcggaaatacaataattatcgccctgtcttggttggatctgaggctgcatacaccaatgtacttcttcctctcgcatttgagtctcctggatctttgctttactaccagtacagtgccgcagctgctcatcaatctttgcggtgtggatcggactatcacacgcggtgggtgtgtggcgcagctctttatatatttggccctcggcagtacggaatgcgtgttgctagtagtgatggcctttgacagatatgctgccgtatgccgcccactgcattacatggccattatgcaccctcatctttgtcaaacactggccattgcaagctggggcgctggttttgtgaatagcctcattcagaccgggctggccatggccatgccactgtgtggccaccgattgaatcatttcttttgcgaaatgcctgtgttcctcaaactcgcctgtgctgacaccgagggcaccgaggcaaaaatgtttgtggctcgagtcattgtcgtcgccgtcccagctgcgttgattctgggctcatacgtacatatcgctcatgcagtgcttagagtgaagtctaccgcgggtcgtaggaaggctttcggaacgtgtggatctcatttacttgtggtcttcctgttctatggcagcgccatatatacctacttacagtcaattcacaactattcagagcgtgagggcaagttcgtggctctattctatactatcataactccaatcctgaatcctctgatttataccctgcggaataaagacgtcaagggcgctttgtggaaagtgctttggcggggtcgggacagtggatag

SEQ ID NO: 18933 - protein, 372 aa, Artificial Sequence
  derived and/or modified sequence
MRSVLRQRILKPKDVAIYSGEVNQVIADLIKRIYLLRSQAEDGETVTNVNDLFFKYSMEGVATILYESRLGCLENSIPQLTVEYIEALELMFSMFKTSMYAGAIPRWLRPFIPKPWREFCRSWDGLFKFSQIHVDNKLRDIQYQMDRGRRVSGGLLTYLFLSQALTLQEIYANVTEMLLAGVDTTSFTLSWTVYLLARHPEVQQTVYREIVKNLGERHVPTAADVPKVPLVRALLKETLRLFPVLPGNGRVTQEDLVIGGYLIPKGTQLALCHYATSYQDENFPRAKEFRPERWLRKGDLDRVDNFGSIPFGHGVRSCIGRRIAELEIHLVVIQLLQHFEIKTSSQTNAVHAKTHGLLTPGGPIHVRFVNRK

SEQ ID NO: 18934 - DNA, 1119 bp, Artificial Sequence
  derived and/or modified sequence
atgagaagcgtgctgagacagagaatcctgaagcccaaggacgtggccatctacagcggcgaggtgaaccaggtgatcgccgacctgatcaagagaatctacctgctgagaagccaggccgaggacggcgagaccgtgaccaacgtgaacgacctgttcttcaagtacagcatggagggcgtggccaccatcctgtacgagagcagactgggctgcctggagaacagcatcccccagctgaccgtggagtacatcgaggccctggagctgatgttcagcatgttcaagaccagcatgtacgccggcgccatccccagatggctgagacccttcatccccaagccctggagagagttctgcagaagctgggacggcctgttcaagttcagccagatccacgtggacaacaagctgagagacatccagtaccagatggacagaggcagaagagtgagcggcggcctgctgacctacctgttcctgagccaggccctgaccctgcaggagatctacgccaacgtgaccgagatgctgctggccggcgtggacaccaccagcttcaccctgagctggaccgtgtacctgctggccagacaccccgaggtgcagcagaccgtgtacagagagatcgtgaagaacctgggcgagagacacgtgcccaccgccgccgacgtgcccaaggtgcccctggtgagagccctgctgaaggagaccctgagactgttccccgtgctgcccggcaacggcagagtgacccaggaggacctggtgatcggcggctacctgatccccaagggcacccagctggccctgtgccactacgccaccagctaccaggacgagaacttccccagagccaaggagttcagacccgagagatggctgagaaagggcgacctggacagagtggacaacttcggcagcatccccttcggccacggcgtgagaagctgcatcggcagaagaatcgccgagctggagatccacctggtggtgatccagctgctgcagcacttcgagatcaagaccagcagccagaccaacgccgtgcacgccaagacccacggcctgctgacccccggcggccccatccacgtgagattcgtgaacagaaagtag

SEQ ID NO: 18935 - DNA, 2092 bp, Artificial Sequence
  derived and/or modified sequence
agcctcgccgccatgccggggccgaggaccctcgccaacctggcggagttcttctgcagggacggcttcagccgcatccacgagatccagggagggtgaacagtggctcaagatgagaagcgtattgagacaaagaattctgaaaccgaaagatgtggccatttattctggagaagtcaaccaagttattgctgacttaattaaaagaatctacctcctcaggagccaggcagaagatggagaaaccgtgaccaatgtcaatgatcttttcttcaaatattcaatggaaggagtggccaccatcctttatgagagtcgtttgggctgcctggaaaacagcatcccacagctgactgtggaatacatcgaggccctggagctcatgtttagcatgttcaagacctccatgtatgcaggcgccatccccagatggcttcgccccttcatcccaaagccctggcgggaattctgcaggtcctgggatggactcttcaaattcagccaaattcatgttgacaacaagttgagggacatacagtaccaaatggaccgaggccggagggtgagcgggggacttctcacatacctcttccttagccaggctctgacgctgcaggagatctacgccaacgtgactgagatgctgctggccggcgtcgacacgacgtccttcaccttgtcttggactgtgtacctcctggcaaggcacccagaagtgcagcagacggtgtaccgggagattgtgaagaatttaggggaaaggcatgttccaactgcagctgatgtccccaaggtcccgctggtcagagctctccttaaggaaaccctgaggctgtttccagtgctgccagggaacggccgggtcacccaggaagacctggttattggcgggtatctgattccgaaaggcacccagctggccctttgccactatgccacatcgtaccaggatgagaacttccctcgggccaaggagttccggcctgagcgctggctgcggaaaggagacttagatagagttgacaattttggatccatcccctttggtcatggggttcgcagctgcatagggcggagaattgcagaactggagattcacctcgtcgtgatccagttgcttcaacattttgagatcaaaacatcttctcagaccaatgctgttcatgcaaaaacccacgggctcctgacgccaggggggcccatccacgtgcgatttgttaacagaaagtaagcctagattttaaacctgggctgatgtagcagaccagctcgccgacacacagtgggtatttgtgttcgctgatcaccgtggagaaggaaagcgatgtcgctaaaggctgtcttgttatagactggcctcccaggtcctgggacacttgtaaatctttatgcaaagtaatgtaaaaaggttgctattttactggtgcataccagaagttgccctttctttgggggaaacagctgtttaaaaaccagtggcagtgaatttttatgcttcatacattgtgctagactcaatatttaatgactggcagtatcctgtgcatttacttgtacagggaaatggtggtttacttacaaattcagttcttcaatatatgttctctaatactggcatctgggctcaaattgccatcaacagtaagttgaaggcaatttcaacttactgtttctaatttgaagagggaacattaagaatgcctctgtaatactgtaattatgggaagaaagcaccagaggcaacattttatcctgagcaccagatttagatcctgttaaagggctcaaacttaaaagggctggccgggtgcggtggctcacgcctgtaatcccagcactttgggaggtcaaggtgggaggattgcttgagccagaagttcgagaccagcctgagcaacatggtgaaaccctgtctctaccaaaaatacaaaaattagccgggcgtggtggtgcacacctatggtcctagttactcggaagactgaggcaggaggatcgtttgagctcaggaggttgggtctgcagtgagctatctatgatggcaccactgcacttcagcctgggtgacagagtgagaccctttctcaaaaat

SEQ ID NO: 18936 - DNA, 1119 bp, Artificial Sequence
  derived and/or modified sequence
atgcggagtgtgttgcgtcagagaatcttaaagcccaaggatgtggccatttacagcggcgaggtcaaccaggtcattgctgatcttataaagaggatttatctgcttcgctctcaagccgaagacggtgagactgttactaacgttaatgaccttttctttaagtattccatggaaggcgtggctacgattctgtacgaatcccggttagggtgtctggagaacagcattccacagcttaccgtggagtatattgaggcgctggagctcatgttctcaatgttcaaaacatcgatgtacgcaggcgcgataccgcgctggctcagaccttttatcccaaaaccttggagggagttttgcaggagctgggatggcttattcaaattttctcaaattcacgtggacaacaagctgcgggatatacagtaccagatggaccgcggtcggagggtgtcgggggggctgctgacatacctgtttcttagtcaggcccttaccttacaggaaatctacgctaacgtaacagaaatgctgcttgctggggtggacacaacctcctttactctgagttggactgtctacctccttgcgcggcaccccgaggtacagcagacagtctatcgtgaaatcgtaaagaacctgggcgagaggcacgtgcccacagctgccgacgtgcctaaagtgccccttgttagggcactactcaaagaaacactgcgtctgtttccagtgctaccaggcaatggacgcgtgacccaagaagatctcgtgataggtggctatttgattcccaagggtacccagctggcactgtgccactatgcaacgtcttatcaggatgaaaattttcccagagctaaagagtttcgccccgaaagatggctaaggaagggcgacttagacagagtggacaactttggctcaatacctttcggacacggcgtccgctcatgcatcggacgcaggattgctgagctggagatccaccttgttgtgattcagttactccagcacttcgaaatcaaaaccagctctcagacaaacgccgtacatgcaaagacgcacggcctcctcacgccgggcggccccatacatgtgaggtttgtaaacagaaagtag

SEQ ID NO: 18937 - DNA, 1119 bp, Artificial Sequence
  derived and/or modified sequence
atgagatcagttttacggcagagaatcctgaagccaaaagacgtcgctatttatagtggcgaggtgaaccaggtaattgccgacctaatcaagcggatctacctgcttaggagccaggctgaggacggagagacggtcacaaacgttaatgatctgttcttcaaatacagtatggagggagtggccactattctgtatgagtctcgcctgggctgcctcgaaaatagtattcctcagctaactgtggaatatatcgaagccctggagctcatgttctcaatgtttaagaccagcatgtatgcaggcgcaattccacggtggctcagaccatttatcccaaagccgtggagggagttttgtaggtcatgggacggtctctttaagttttcacagatccatgtcgacaataagttacgcgatattcagtatcagatggaccgcgggcggagggtttccggcgggttactgacctatctgttcctatcccaagccctgaccctccaggagatttacgccaacgttaccgaaatgctgttagcaggcgtggataccacctctttcacattgtcatggacagtctatctcttggcccgccaccctgaggtgcagcagactgtgtatcgtgagattgtcaagaacctgggagagaggcacgtcccaaccgcagctgatgtgcccaaagtgccccttgtcagggccctcttaaaggaaactctgcgccttttccccgtgctaccaggcaatgggagagtcacccaagaagatctggttatcgggggttacctgatacctaaaggcacacaattggccctctgccactatgccacctcatatcaggatgaaaattttccaagagccaaagagttcaggcccgagaggtggttgcgcaagggggacctagatagagtggacaactttggatctatccccttcggccatggagttcgctcgtgcattgggaggaggatcgcagagttagagattcacctggttgtgatccaactgctacaacacttcgaaatcaaaacctcttctcagactaatgcagtgcatgctaaaacccacggccttctcacgccaggagggccgattcatgtgaggttcgtgaatcgcaagtag

SEQ ID NO: 18938 - DNA, 1119 bp, Artificial Sequence
  derived and/or modified sequence
atgaggtctgtgctgcggcagaggatcctgaagcccaaggatgtggccatctacagcggggaggtgaaccaggtgattgctgacctgatcaagaggatctacctgctgcggagccaggctgaagatggagaaacagtgaccaacgtgaatgacctcttcttcaagtacagcatggagggcgtggccaccatcctgtatgagagccggctgggctgcctggagaacagcatcccccagctgactgtggagtacatcgaggccctggagctgatgttctccatgttcaagacctccatgtatgctggggccatcccccgctggctgcggcccttcatccccaagccctggagggagttctgccgctcctgggatggcctcttcaagttcagccagatccacgtggacaacaagctgcgggacatccagtaccagatggaccggggcagaagagtgtctgggggcctgctgacctacctgttcctgagccaggccctgaccctgcaggagatctatgccaacgtgacagagatgctgctggccggcgtggacaccaccagcttcaccctgtcctggacagtgtacctgctggcccggcaccctgaggtgcagcagacagtgtaccgggagatcgtgaagaacctgggggagcggcacgtgcccacagctgctgatgtgcccaaggtgcccctggtgcgggccctgctgaaggagaccctgcggctcttccctgtgctgcctggaaatggccgggtgacccaggaggacctggtgattggaggctacctgatccccaagggcacccagctggccctgtgccactacgccaccagctaccaggatgagaacttcccccgggccaaggagttccggcctgagcgctggctgaggaaaggagacctggacagagtggacaactttggcagcatcccctttggacatggagtgcgcagctgcattggaagaagaattgctgagctggagatccacctggtggtgatccagctgctgcagcactttgagatcaagaccagcagccagaccaatgctgtgcacgccaagacccacggcctgctgacccctgggggccccatccacgtgcgctttgtgaacaggaagtag

SEQ ID NO: 18939 - DNA, 1119 bp, Artificial Sequence
  derived and/or modified sequence
atgcggagcgtgctgcggcagcggatcctgaagcccaaggacgtggccatctactctggcgaggttaaccaggtgattgccgacctgattaaacgaatctaccttctgagaagtcaggctgaagatggggagaccgtgactaatgttaatgacctgttctttaagtattccatggaaggtgtggccacaatcctgtacgagtcccggctggggtgcctagagaattctatcccgcagttgaccgtagagtacatcgaagccctggagctgatgttctcgatgttcaagacttcaatgtacgccggtgccattcctcgatggctgcgcccatttattcccaagccttggcgcgagttctgcaggtcatgggacggcctctttaaattcagtcaaatccacgttgacaacaagcttcgtgacatccaataccagatggaccggggaaggagggtcagtggcggcctcctgacatacctgtttttgtcacaggcacttacactgcaagaaatttatgcgaacgttactgagatgctgctcgctggggtcgatacaacctccttcaccctgagctggaccgtgtaccttttggcgcgacatcctgaagtacaacagacagtctaccgggaaatcgtcaagaacctaggcgaacgccatgtgcctactgctgcagacgtaccaaaggtgcccctggtgagagccctactaaaggagaccctgcgtctgttcccggttctacctggtaacggtagagttacacaagaggatctggtgatcgggggctatttaattccaaaaggaacacagcttgccctgtgtcactacgcaacaagctatcaggatgagaactttccacgcgctaaggagtttcggccggaacgctggttgcgcaagggcgatctggaccgcgtggataacttcggctctattccattcggccatggtgtgaggtcctgtattggacgtcggatagccgagttggagatacacctggtcgtgattcagttgctccagcattttgaaattaaaacctcgtcccagacaaacgccgtccacgccaaaactcatggactgctcacacctggaggccctattcacgtgcgttttgtgaatagaaagtag

SEQ ID NO: 18940 - DNA, 1119 bp, Artificial Sequence
  derived and/or modified sequence
atgcggagcgtgctgcggcagcggatcctgaagcccaaggacgtggctatctatagcggcgaggtgaaccaggtcattgccgaccttatcaagcggatctatctgctcagaagtcaggccgaggatggcgagactgtcacaaacgttaacgacctgttcttcaagtattctatggaaggagtggccacaatcctatatgaaagccgcctgggctgcctggaaaactctattcctcagctgacagtggaatatattgaagctctagagctgatgttttctatgtttaagacatcaatgtacgccggagcaatccccaggtggctgcgcccatttattccgaagccctggagggaattctgcaggagctgggatggactgttcaaattctctcagattcacgtggacaacaaactgcgcgatatccagtatcagatggaccgggggcggcgcgttagtggaggactgctaacgtaccttttcctgtcacaggctctgaccctgcaggagatttatgccaatgtgacggagatgctgcttgccggcgtcgacacaacgagttttaccctctcatggaccgtttacctactagcccgccaccccgaagtgcaacaaaccgtctaccgagagattgtaaaaaatctcggcgaacgtcacgtccctactgcagcagacgtcccgaaggtgccgctggtgagggcactgctcaaggagacactccgactgtttcctgtattaccaggaaacggacgtgtaacacaagaggacctcgttattggcgggtacctgatcccgaaggggacccagctggcactttgccactacgctacctcataccaagacgagaacttccctcgagcgaaggaatttcgccccgaaagatggctgaggaagggggatcttgaccgcgtggacaacttcgggagcatccctttcgggcacggcgtgcgttcttgcataggccgcaggatagctgagctcgagatccatctagtggtgattcagttgctgcaacactttgagatcaagacgtctagtcaaacaaacgcggtacacgcgaaaacccatgggctcctgaccccgggaggccccattcacgtccgtttcgttaatcgcaagtag

SEQ ID NO: 18941 - DNA, 1119 bp, Artificial Sequence
  derived and/or modified sequence
atgcgcagcgtcctccgtcagcgaatcctaaaaccaaaagatgtggccatttacagtggggaggtcaatcaagttattgctgatcttatcaaacgtatctacctgttaagatctcaggctgaggatggtgaaaccgtgacaaatgtgaacgacttattcttcaagtattctatggaaggagtggcaaccatcctctacgagtcccggctggggtgcctggagaattccattccacaacttacagtggaatacatcgaggctttggagctcatgttctcgatgtttaagacctccatgtacgcaggcgcaattcctcggtggctgaggccatttatacctaaaccatggcgcgagttctgcagatcctgggatggattgttcaagttttctcagatccacgtggataataagttgcgggacattcagtatcaaatggaccgtgggaggcgggtgtccggagggctgctcacgtacctgttccttagccaagccttaacgctccaagaaatatacgccaatgtaacagaaatgctgcttgccggtgttgacaccacttccttcacactgagttggactgtttacctgcttgctaggcatcccgaggtgcaacagaccgtgtacagggaaatcgtcaagaacctgggcgaacgccacgtgcctactgcagctgacgtaccaaaggtaccccttgtaagggcactactgaaggaaactctccgcttattcccagttctgcctggaaacggcagagtcacgcaggaagacttagtaattggtgggtacctcattcccaagggcacccagcttgccttgtgccattacgcgaccagttatcaggacgagaattttcctcgcgctaaagagttcagaccagaaagatggctccgtaaaggagatctggatcgtgtggataactttggtagcattccttttggccatggggtgcgaagctgcataggcagaaggattgccgagctggagattcatctggtagtaatacaactcctccagcacttcgagattaaaactagctcccagaccaatgcggtacatgctaagacccatggtcttttaacgccaggcggtcccatccacgttcgctttgtgaacaggaaatag

SEQ ID NO: 18942 - DNA, 1119 bp, Artificial Sequence
  derived and/or modified sequence
atgcgatctgtcctgaggcagcgaatccttaagcccaaggacgtcgcaatttactcaggagaggtcaatcaggtgatagctgacctcataaaacgcatctatcttctgagaagccaagcagaggacggagagacagttactaatgtgaacgacctgttttttaaatatagtatggagggcgtggctacaattttatacgaatcacgactggggtgcctcgaaaattccatcccccagctgacagttgaatacattgaagctctagagctcatgttctctatgttcaaaaccagtatgtatgcaggcgctattccacgttggcttcgccctttcattcccaagccgtggagagaattctgccggagctgggatggtctgtttaaattcagccagattcatgtggacaacaagctgcgggacatccagtaccagatggatcggggaagaagggtgtctggtgggttgctgacatacctatttttgagtcaggccttgacactacaggagatctacgccaatgtgacagaaatgctccttgctggtgtcgatactacctcattcactctgagttggaccgtatatctactggctaggcatccagaagtgcaacagaccgtgtatcgggagatcgtgaagaatcttggcgagagacacgtgcccactgccgcagacgtgccgaaagtcccactggttagggcgctgcttaaggagaccctgcggctcttccccgtgctgccagggaacgggagggtgacccaggaggacctggtcatcggtggctacctgattcctaagggtacgcagctagcactgtgccattacgcaacaagttatcaggacgaaaacttcccccgagccaaagagttccgacctgaacggtggttgaggaaaggtgatctcgatcgcgtagataattttgggtctataccttttggacacggagtaagatcctgtataggacgaagaatcgctgagcttgaaatccacctggttgttatacaattgctgcagcactttgagatcaagacttcatcccagaccaacgcagtgcacgctaaaacacatggcttactcactccgggtggacccatacacgttaggttcgtcaaccggaagtag

SEQ ID NO: 18943 - protein, 179 aa, Artificial Sequence
  derived and/or modified sequence
MRMAATAWAGLQGPPLPTLCPAVRTGLYCRDQAHAERWAMTSETSSGSHCARSRMLRRRAQEEDSTVLIDVSPPEAEKRGSYGSTAHASEPGGQQAAACRAGSPAKPRIDFVLVWEEDLKLDRQQDSAARDRTDMHRTWRETFLDNLRAAGLCVDQVRGGCHGQGPRPCIHSVTHDLAA

SEQ ID NO: 18944 - DNA, 540 bp, Artificial Sequence
  derived and/or modified sequence
atgagaatggccgccaccgcctgggccggcctgcagggcccccccctgcccaccctgtgccccgccgtgagaaccggcctgtactgcagagaccaggcccacgccgagagatgggccatgaccagcgagaccagcagcggcagccactgcgccagaagcagaatgctgagaagaagagcccaggaggaggacagcaccgtgctgatcgacgtgagcccccccgaggccgagaagagaggcagctacggcagcaccgcccacgccagcgagcccggcggccagcaggccgccgcctgcagagccggcagccccgccaagcccagaatcgacttcgtgctggtgtgggaggaggacctgaagctggacagacagcaggacagcgccgccagagacagaaccgacatgcacagaacctggagagagaccttcctggacaacctgagagccgccggcctgtgcgtggaccaggtgagaggcggctgccacggccagggccccagaccctgcatccacagcgtgacccacgacctggccgcctag

SEQ ID NO: 18945 - DNA, 540 bp, Artificial Sequence
  derived and/or modified sequence
atgaggatggctgctaccgcttgggcgggattacaaggcccacctctgcctacgctctgccccgcggttcggactggcttatattgtcgggaccaggctcacgcagagagatgggcgatgactagtgagacatccagcggttctcactgtgcacgcagtcgtatgttaagacgcagggctcaggaggaagactctacggtgctgatcgatgtaagcccccctgaagctgaaaaacgcggttcttatggaagtacagcccacgcatccgaaccgggtggccagcaggccgcagcgtgtcgggctggcagtccggcgaaaccaaggattgacttcgtcctcgtgtgggaggaagacctcaagctcgacagacagcaggattctgcggcacgcgaccggactgacatgcacagaacttggcgggagacattcctcgataaccttagagcggccggcctctgtgtggatcaggtccgaggaggttgtcacggccaagggccccgcccatgtatacactccgtcacacacgatctggcagcatag

SEQ ID NO: 18946 - DNA, 540 bp, Artificial Sequence
  derived and/or modified sequence
atgaggatggccgccacagcctgggccggcctgcagggcccccccctgcccaccctgtgcccagctgtgaggacaggcctgtactgccgggaccaggcccatgctgagcgctgggccatgaccagcgagaccagcagcggcagccactgtgcccggagcaggatgctgcggcggcgggcccaggaggaggacagcacagtgctgattgatgtgtccccacctgaggccgagaagaggggcagctatggcagcacagcccacgccagcgagcccggcggccagcaggccgccgcctgcagagctggcagccctgccaagcccagaattgactttgtgctggtgtgggaggaggacctgaagctggaccggcagcaggacagcgctgcccgggacagaacagacatgcacaggacctggagggagaccttcctggacaacctgcgggccgccggcctgtgtgtggaccaggtgcggggcggctgccacggccagggcccccggccctgcatccacagcgtgacccatgacctggccgcctag

SEQ ID NO: 18947 - DNA, 540 bp, Artificial Sequence
  derived and/or modified sequence
atgcggatggccgccaccgcctgggccggcctgcagggcccccccttgcctacgctctgtcctgctgtgcggacgggcctctactgcagagaccaggcgcacgctgagagatgggctatgacctctgagacctcctctgggtcccattgcgctaggagtaggatgttgcgaagacgggctcaggaggaggatagcacagtgttgattgacgtgtccccccccgaggctgagaagcggggatcatatggatccactgcacacgcgtctgagcctgggggccaacaggccgctgcgtgtcgcgctggatctccggccaagcctcgaatagactttgtcctcgtgtgggaggaggatctgaaactagaccgtcagcaagattcagccgccagagaccgaaccgatatgcacaggacctggcgggaaaccttccttgacaacctgcgcgcggcaggcttatgcgtagaccaagtgcgcgggggctgtcatggacaagggcctcgaccctgcatccatagcgttacacatgacctggccgcctag

SEQ ID NO: 18948 - DNA, 894 bp, Artificial Sequence
  derived and/or modified sequence
aaagatagatcctgctccaggagccgggaagccttgccctggccagctgtgctgggcacctcccctgcctgcttcctggcccacttgcaggcaaggtgagggcatgcgaatggctgccactgcctgggcggggctccaagggccacccctccccaccctctgtcccgcagtgaggacgggactctactgccgagaccaggctcacgctgagaggtgggccatgacctccgagacctcttccggaagccactgtgccaggagcaggatgctgcggcgacgggcccaggaagaggacagcaccgtcctgatcgatgtgagcccccctgaggcagagaagaggggctcttacgggagcacagcccacgcctcggagccaggtggacagcaagcggccgcctgcagagctgggagtcctgccaagccccggatcgacttcgtcctcgtttgggaggaggacctgaagctagacaggcagcaggacagtgccgcccgggacagaacagacatgcacaggacctggcgggagacttttctggataatcttcgtgcggctgggctgtgtgtagaccaggtacgtggaggctgtcatgggcagggccctaggccctgcatccactcagtgacccatgaccttgccgcatgaggcctgagggcatggtgtccagagtcccagagcagatcaggccccaaagtcctgctggaccccccagccaccgtgagctcctccgtgtggctagggagctgctgtccagaggcggaggtaaacattgatccctcctgcacactcagctctctcatggaagtcggagccctcagggtcacctgaaaactctgacactacctttgccattcacctgtcccgtctccaacattaaagcttttgggtaggcgtgt

SEQ ID NO: 18949 - DNA, 540 bp, Artificial Sequence
  derived and/or modified sequence
atgcggatggctgcgaccgcatgggctggcctccaaggaccgccactgccaacattgtgccctgcagtccggactgggctgtactgtcgagatcaggcccatgccgaacgctgggctatgaccagtgaaacatcaagcggctctcattgcgctaggtcgagaatgctccgcaggcgagcacaggaggaagacagcacagttctcattgacgtcagccctcctgaggctgagaagcggggatcatatggcagtaccgctcatgcttccgagcctggaggacagcaggccgctgcctgccgcgctgggtcaccggcaaaaccccgaattgacttcgttctggtgtgggaagaggacttaaagcttgacagacagcaggactccgcagcaagagaccggaccgacatgcaccggacatggcgcgaaacattcctcgataatcttcgcgctgcaggcctctgcgtcgaccaggtcaggggcggatgccatgggcagggcccaaggccatgcattcactcggtgactcacgatctggcagcttag

SEQ ID NO: 18950 - protein, 336 aa, Artificial Sequence
  derived and/or modified sequence
MSRSVLEALTSSTAMQCVPSDGCAMLLRVRASITLHERLRGLEACAMSLDTQETQCQSVWVARASHRQQGGQQLQVHFGCFAVSVAQHLYVTLRTIPHFCGVQLDQRHLVEAGKLSYWVDRRRKAILVQVPRASGSPDYYLRLCLKRFTCEDAGAPVRVTANSVSQAVFLPYSQELPCLCLEGWSATPDAVRIQICPFENDTEALEVLWDTVYYHPESQTLSWEPACPVSGHVSLCWRPGPGAGCRKLQQSSQLVHRRVQYPLVDTQPQLCLKFSTSWGSWVRCPFEQRRFPTPPTSRCTCVTGGSHSSLPANAHSRPARSLQPQVTWQPPLLLPS

SEQ ID NO: 18951 - DNA, 1011 bp, Artificial Sequence
  derived and/or modified sequence
atgagcagaagcgtgctggaggccctgaccagcagcaccgccatgcagtgcgtgcccagcgacggctgcgccatgctgctgagagtgagagccagcatcaccctgcacgagagactgagaggcctggaggcctgcgccatgagcctggacacccaggagacccagtgccagagcgtgtgggtggccagagccagccacagacagcagggcggccagcagctgcaggtgcacttcggctgcttcgccgtgagcgtggcccagcacctgtacgtgaccctgagaaccatcccccacttctgcggcgtgcagctggaccagagacacctggtggaggccggcaagctgagctactgggtggacagaagaagaaaggccatcctggtgcaggtgcccagagccagcggcagccccgactactacctgagactgtgcctgaagagattcacctgcgaggacgccggcgcccccgtgagagtgaccgccaacagcgtgagccaggccgtgttcctgccctacagccaggagctgccctgcctgtgcctggagggctggagcgccacccccgacgccgtgagaatccagatctgccccttcgagaacgacaccgaggccctggaggtgctgtgggacaccgtgtactaccaccccgagagccagaccctgagctgggagcccgcctgccccgtgagcggccacgtgagcctgtgctggagacccggccccggcgccggctgcagaaagctgcagcagagcagccagctggtgcacagaagagtgcagtaccccctggtggacacccagccccagctgtgcctgaagttcagcaccagctggggcagctgggtgagatgccccttcgagcagagaagattccccaccccccccaccagcagatgcacctgcgtgaccggcggcagccacagcagcctgcccgccaacgcccacagcagacccgccagaagcctgcagccccaggtgacctggcagccccccctgctgctgcccagctag

SEQ ID NO: 18952 - DNA, 1011 bp, Artificial Sequence
  derived and/or modified sequence
atgagtcgctctgtcttagaggctcttacctccagtactgccatgcagtgtgttccctccgacggctgtgccatgctgctccgagtccgcgcctcgattaccctgcacgagagactgcggggtcttgaggcatgtgccatgtccctggacacgcaggaaacacagtgtcagtcagtatgggtggccagagcgagccataggcagcaaggtggccagcaactgcaggtgcacttcggatgttttgccgtttctgtggcacagcacctgtatgtgaccctgcgcacaatcccccacttctgcggcgtccaattagatcagcggcatttggtggaagcaggaaaacttagttattgggtggatagaaggcgcaaagctattctggttcaagttccccgggcctccggcagccccgactattaccttaggctgtgtcttaagcgctttacctgcgaagacgctggggctccagtccgtgtcactgctaacagtgtcagccaggcagtgtttctaccttactcccaggagttaccctgtctctgtctagagggctggagtgctacacctgacgccgtccggatccagatttgtccgtttgagaacgacacggaggccctggaggtgctctgggacacagtgtattaccacccagagtcccagactctttcttgggaaccagcttgcccagtttctggacatgtgtccctgtgttggagacctggacctggcgccggatgccgcaagctgcagcagagctcccaactggttcacaggcgggtgcaatatcctctggtcgacactcaaccccaattgtgcctcaaattttctacaagttggggatcctgggtccgttgtccctttgaacagagacgctttccgacccctcccacttctcgctgcacttgcgtgacaggggggtcacattcctccctcccagccaacgctcacagccgccccgctaggtcacttcaacctcaggttacctggcagccccccctactgctgccttcatag

SEQ ID NO: 18953 - DNA, 1011 bp, Artificial Sequence
  derived and/or modified sequence
atgtcaagatctgtcttagaagcactgaccagctcaactgccatgcagtgcgtgccttcggatggctgtgctatgttactgagggtgagagctagcatcacactgcacgaacgcctgcgcggattagaagcctgcgccatgtccctggatacgcaggagacacagtgtcagagcgtctgggtggccagagcgtcacaccgccagcagggcggccagcaattgcaggttcatttcggatgtttcgcggtaagtgtcgcacaacacctctacgtcaccctaaggactataccccacttctgtggagtgcagctggatcaaagacacttagtcgaagcaggcaaattgagttactgggtcgatcgtaggcgaaaagcaatactggtccaggttcctcgcgctagtggctctccggactattacctgcgactctgccttaaacgtttcacttgtgaggacgcaggagcacctgtgcgagtcaccgcaaactctgttagtcaagctgtgtttttgccctatagccaggaactgccctgcctgtgcctcgaaggatggtcggccacccctgacgcggtgcgaatacagatttgcccttttgagaatgataccgaggcactcgaagtcctgtgggatactgtgtactaccacccagagtcgcagactctatcatgggaacctgcatgccccgtgagtggtcatgtcagtctgtgttggagacctggtccaggagccggatgcaggaagttgcagcagtcctctcaactggtccataggagagtgcagtacccactggtggacacccagccacagctttgtctgaaatttagtacatcttggggctcctgggtccgctgcccatttgagcagcgccggttcccaacaccgcccacatcacgttgcacctgtgtcacaggagggagtcactccagcctcccagccaatgcacactccaggcctgccaggtcactccagcctcaagtcacctggcaacctcctcttttactcccttcatag

SEQ ID NO: 18954 - DNA, 1011 bp, Artificial Sequence
  derived and/or modified sequence
atgagccgctctgtgctggaggccctgaccagcagcacagccatgcagtgtgtgcccagtgatggctgtgccatgctgctgcgggtgcgggccagcatcaccctgcacgagcggctgcggggcctggaggcctgtgccatgagcctggacacccaggagacccagtgccagagcgtgtgggtggcccgggccagccaccggcagcagggcggccagcagctgcaggtgcacttcggctgctttgctgtgtctgtggcccagcacctgtatgtgaccctgcggaccatcccccacttctgtggggtgcagctggaccagaggcacctggtggaggccggcaagctgagctactgggtggacagaagaaggaaggccatcctggtgcaggtgccccgggccagcggcagcccagactactacctgcggctgtgcctgaagcgcttcacctgtgaagatgctggggcccctgtgcgggtgacagccaacagcgtgtcccaggccgtgttcctgccctacagccaggagctgccctgcctgtgcctggagggctggagcgccaccccagatgctgtgcgcatccagatctgcccctttgaaaatgacacagaggccctggaggtgctgtgggacacagtgtactaccaccctgagagccagaccctgtcctgggagcccgcctgccctgtgtctggccacgtgtccctgtgctggaggcctggccctggagctggctgcaggaagctgcagcagagcagccagctggtgcacagaagagtgcagtaccccctggtggacacccagccccagctgtgcctgaagttcagcacctcctggggctcctgggtgcgctgcccctttgagcagaggcgcttccccaccccacccaccagccgctgcacctgtgtgactggaggcagccacagcagcctgcctgccaatgcccacagcaggcctgcccggagcctgcagccccaggtgacctggcagccccccctgctgctgcccagctag

SEQ ID NO: 18955 - DNA, 1011 bp, Artificial Sequence
  derived and/or modified sequence
atgagccggagcgtgctggaggccctgaccagcagcaccgccatgcaatgcgtgccttctgatggctgcgccatgctgctacgcgtgcgtgcgtccattactctccacgagcggctgcgaggactggaggcatgcgccatgagtcttgatacccaggagactcagtgtcagagtgtgtgggtggcgagagcatctcacaggcaacagggaggccagcaacttcaggtgcacttcggctgttttgccgtatcagtggcacaacatctctatgtgaccctgagaaccatcccgcacttttgcggcgttcaactagatcagcggcacctcgtagaggctggcaaattgtcatactgggtggacagaaggcggaaagctatactggtgcaagtaccccgcgcctcaggctcccccgactactacctgcgcttatgtttaaaacgtttcacttgcgaggacgctggggccccagtgagagtgaccgctaatagcgtcagtcaggcggtgttcctgccctactctcaggaacttccatgcttatgcctcgagggctggtcggccaccccggatgctgtgcggattcagatatgtcctttcgagaatgatactgaggcactggaggtcctctgggacaccgtctattatcacccggagtcacaaaccctgtcctgggagccagcatgccccgtgagcggccatgttagtctttgctggagacccggcccaggagctgggtgtaggaaactgcagcaatcttcgcagctggtccataggcgggtccagtacccactcgtagacactcagccacagctttgtctgaaattttccacaagctggggatcatgggtcaggtgtccatttgaacaacggaggttccctactccacctacctctcggtgcacctgtgtcactgggggcagccatagcagcctgcccgccaacgcccactctagacccgcccgttcccttcagccgcaggtcacttggcaaccaccacttctgctcccatcctag

SEQ ID NO: 18956 - DNA, 1011 bp, Artificial Sequence
  derived and/or modified sequence
atgagccggagcgtgctggaggccctgaccagcagcaccgccatgcagtgtgtgccttctgacggatgtgcaatgcttctgagggtccgggcatcaatcactctccatgaacggctgaggggcttggaggcctgtgcaatgagtctggacactcaggaaacacagtgtcagagcgtgtgggtggcccgagcttcacatcggcaacagggagggcagcagctgcaggtccattttggttgttttgcagtttccgttgctcagcacttatacgttaccctgaggacgattccccacttctgtggcgtgcaacttgaccaaagacacctggtagaggcagggaaactgtcctactgggtggaccgacggcggaaggccattctcgtccaagtgccccgtgcctcaggctcgcctgactactaccttcgtctgtgtctcaagagatttacgtgcgaggacgctggagcccctgtaagggtgacagccaatagcgtgagccaagccgtattcttgccatatagccaagaactcccatgcctctgcctggaaggctggtcggccactcccgatgcggtgcgaatccagatttgtccctttgaaaatgacacagaggccctggaggtcctctgggacactgtgtactaccaccctgagtcccagacgctgagttgggaaccagcgtgcccagttagcggccatgtatccctgtgctggcgccctggtccgggcgctgggtgtcggaagctccaacaaagtagtcagctagtccatcgccgcgtccagtatccactcgttgatacccaaccccagttatgtctgaagttctccacttcttggggcagttgggtccgttgtccattcgagcaacgccgatttcctacaccacctacaagtcggtgtacttgtgttacgggcggttcgcactcctcccttccagcaaacgcacattctcggccagctcgatccctccaaccccaggtcacatggcagcctccactattactgcccagctag

SEQ ID NO: 18957 - DNA, 1011 bp, Artificial Sequence
  derived and/or modified sequence
atgagccggtctgtacttgaagccttaaccagtagtactgcaatgcaatgcgtgcctagcgatggctgcgctatgctactaagagtgagagcatcaataacactgcacgaacgtcttagaggactcgaggcctgcgccatgtctttagacacacaggagacccagtgtcagagtgtctgggtggcgagagcgtcccaccgtcagcaggggggtcagcagttacaggtgcacttcggttgttttgccgtgagcgttgcgcagcatctgtatgttaccttgagaacaattccccatttctgcggcgttcagctggaccagaggcatcttgttgaagccggtaaactctcgtattgggtggatagacggaggaaggccatcctggttcaggtgccccgtgcaagcgggtctccagattactaccttaggctatgtctgaaaagattcacgtgtgaagacgccggtgctccagtgagggtgaccgctaattctgtatcccaggctgtttttctcccttacagtcaggaattaccctgtttgtgtttggaaggatggagcgcaactcctgatgccgttagaattcagatatgcccctttgaaaatgatactgaagcccttgaagttttgtgggatacggtctactaccaccccgaatcacagactctctcttgggagccagcgtgccctgtgtcaggccatgtgagcctgtgctggcggccagggcctggcgctggatgcagaaagttacaacagtcttcgcagttggttcatcgcagagtgcagtatcctttggtggacacgcaacctcaactctgcctcaaattcagcacttcatgggggagttgggtcaggtgcccttttgagcaaaggcgattccccacgccacccacctcccgatgtacatgcgtcaccgggggttcccacagtagcctgccagcaaacgcccattcccggccagcccgttctctgcaaccacaggtaacatggcaacccccattgctgctgccttcctag

SEQ ID NO: 18958 - DNA, 1011 bp, Artificial Sequence
  derived and/or modified sequence
atgagtcggtctgtcttagaagcccttacatcatcgactgccatgcagtgcgtaccctccgatggctgcgcaatgctgttaagggtgcgcgcatcaataacacttcacgagaggctgcggggattagaagcctgcgccatgtccctggacacccaggaaacacaatgccaaagtgtttgggtggcacgcgcaagccatcggcaacaaggcggtcagcagctgcaggtgcatttcggctgcttcgccgtttccgtggcacagcacctttatgtgacgctccgcacaataccgcacttctgcggggtgcagttggatcagcggcatctggtggaggccggtaagctgagttactgggtggaccgcagaagaaaggcaatcttggtccaggtccctcgcgcatctgggtcacctgactattacttaaggctgtgtctcaaacgattcacttgcgaagatgccggtgcccctgtgcgtgttactgccaactctgtgagtcaggcggtgtttttgccttacagtcaagaactaccttgtttgtgccttgaggggtggagcgccactcctgacgccgtgagaatccagatctgtccctttgaaaacgatactgaagccttggaagtgctttgggacacagtgtactatcatcctgaatctcagacgctgtcttgggaaccagcttgccccgttagcggacacgtgtccctctgctggcgccctggccctggtgccggatgtagaaagctgcagcagtcatcccagctcgttcacaggcgcgtccagtacccactggtggatacccaaccacagctgtgcctgaagttctccacgagttggggctcatgggtgaggtgtccattcgaacagaggaggttccccacaccccctacttctaggtgcacttgtgtgacagggggaagccactcatcactacctgcaaatgcccactccaggcctgctcgatccctacagccgcaggtcacctggcaaccgccactgctgctgccctcctag

SEQ ID NO: 18959 - protein, 121 aa, Artificial Sequence
  derived and/or modified sequence
MWSRRGLGVSRAPLHLLLGVWGPSGRTGGQRKGASLARPGRGGLASCSVGANGKRDVLFLRKTLTNTVEDIQIDNFRRKSDLGVGSPDWKNLLIDVTREDHENSQNNSKRRCKVNCETDQR

SEQ ID NO: 18960 - DNA, 366 bp, Artificial Sequence
  derived and/or modified sequence
atgtggagcagaagaggcctgggcgtgagcagagcccccctgcacctgctgctgggcgtgtggggccccagcggcagaaccggcggccagagaaagggcgccagcctggccagacccggcagaggcggcctggccagctgcagcgtgggcgccaacggcaagagagacgtgctgttcctgagaaagaccctgaccaacaccgtggaggacatccagatcgacaacttcagaagaaagagcgacctgggcgtgggcagccccgactggaagaacctgctgatcgacgtgaccagagaggaccacgagaacagccagaacaacagcaagagaagatgcaaggtgaactgcgagaccgaccagagatag

SEQ ID NO: 18961 - DNA, 3239 bp, Artificial Sequence
  derived and/or modified sequence
gcggcagccagcgagaggggagaaacagattcacacccaggggcctccgggcagggcccacgggactcaggccgtgtcccgcttggaatgtggagcaggcgcggcctcggcgtcagcagagctcccctgcatctcctcctgggggtgtgggggccgagtgggagaactggcggacagaggaaaggggcctcgctcgcaaggcccgggcggggaggcctggcctcctgctcagtcggtgcaaatggaaaaagagacgttctgtttctccggaaaaccctgactaatacagtagaggatatccagattgacaacttcaggagaaagtctgatttaggagtcggaagcccagattggaaaaacctcttgatagatgtcactcgggaagaccatgaaaacagccaaaataattcaaagagaagatgcaaagtgaactgtgaaacagaccaaagatgaatctctttggtaaatcccctgcctaaatcccctgccatggaatagctgcctaaacttgggcaaataacttgacatttctcagtttccacattccaaaaatggatttttatgagaattaaatgttatgatgcattccagctacctgtcctagaacctggcataagagctcagtacatgctggggagggttatcatcatcgtcatcatcatcttattaacattcatgttgaagggatgatgggctgctgagaagttcatgaagaaggtgaaaaactattacagaggtgggaggaaaaagagaggactatcacagaagcagaagagctgagagtattgagaaagggtgacgggttagggggactagcaagtaccctctggcgttggcaatattcagtttgttgaaggccttgatgaactttaatgaagtggtgagagttaaacaaagctgagataggatatgaatctcagggaggatatgaggactcattgattaccattccaagaaacttgtctgaaaaggaaagaagagatggtggtaatcagagcagagtggcaggatgcagggagtttttatttatttatttgttcttgttgctgacattgttttcatactattttttgtttgttaaagagggagagttgtgagtataaaataacctataaatagggaaaaccaggaacagattcatgtgaaagcccttgactgagaacagaattaattacccgtgcagaggtagtcttcaagccttggcaggtaagcaactgtctgagacacagctggctcgggaacagggcctttctttggctggcaggcttgaggcagcataatttggaagcggatatgagaaagggcataataatgtgaaatttgactgcctagtgggggagaaactttgaatattatgaggcggttatgaaagtatttccttcttatggcttcaatggcactgcctctgagcattagtgtttgtcctcaggaggtaagtgtggggactgtatcagcagttactacctagataagcacggtgtataggggtaacatggtttatagagcatgcaagccttcacctctttgctagatgagatatggaacctaaattcggagaccacgtgacccctgaggcatggggaggtggggtcagaaagcgttactggccatgatccagacccaggcgtggagaaacgacctactggggttttcagggagcaggaaggtggggcaggtacagagtatattctgggggacagtttcataaaaagtgagtagatctccacaacttagtttctagactaaatggactaagcatgttccgccctattcttcctactaacaataacaaaaagctctggacaaaatttataaagcaacccacagaagactccgaagttggaaaaagaaataaaaactggcgatttcctccatactcaaggcatcatgtagcagggagtgccttgggtgttgtttatgtgtttgttttcttttgttcattaatttttttctcccgtgtatggcagtgtgggctctagcaatgcctaccacccggaaacacagatgggtacaaatttaaaaaccccaagaaaactctttttagccaaatgaccagtgtttccagcagagcaaaaacattttgaccacatctgcccttttgtgctggctaaccccttcccctgccaccatgtgctgctggggggacattgtggatgaagcccactcatttattcctcctcctgcagtaatgtgaccatacccttcccactcctaactagaggctgggggaggactatgtgggggagagaactggagaaagcaattttctaaatttgtgtatgaaatcctggttagaactctgagtgccccatgcacaaaacagacaagaaacaacacagcaaaaagattcaagggtcagaaaaactgaacactggtctgaaacactgcccgggtttcagattggcatcagggtagcacccaagtggggcagattgaaatagcactgtaaaggctttgaaaatgaaatgacttttgagccacagctcacaaagtgaaccggaacaagcattctgaacttaaacaggtcaagtgcctgctaaaatcaaagactgaaatgggaaccagaataatataacatactactgaaaatgtctaggatgcaatccaaaatctcatcacactgaaaaccataaaaatctcaacttgaaagagaaaaggcaattgtaagcattgagattacacagatgttgaaactatccagcaagaatcataaagcagctattatacaaatgccctgattttaaagcaagtatgaatgctcgaaacaaatgacaaagtggaaagtcacagcagagaaatagaaaatgtaaggaagaaccaaatggaaattttaaaactgaaaaatacaataaccagtttttaaaaattactagattcagagggaaagaccaacaactcagaaaaaatgggcaaaggatatgaagagtttacggaaaaggaaatgtagataactcttacccatataaaaatatgttcagcctcactcatataagaaaaatcaaaattgaaattacactgagacactgcttttcacctgtcagaatggcaaaactcaaagtgtgaatatacgctatgagaatgtggaaaattctcatagattgcttgtgggcatctagaacaatttggttgaatcactaaaatccacatgccatttggccctgcaattctacttttagaaatttatcatataggaaacctgcatatgagtgaaatgacatacgtggagtgttactcctggc

SEQ ID NO: 18962 - DNA, 366 bp, Artificial Sequence
  derived and/or modified sequence
atgtggtctcgccgcgggctgggcgtgagtcgcgctccactccatcttcttctgggtgtatggggcccgtccggacggaccggtgggcagaggaaaggcgccagcttagctcgccctggtaggggaggcctagcgtcttgttctgtcggcgcaaacggcaagagagatgtgctgtttttgcggaagactctaactaataccgtagaggacattcagatcgacaatttccgcagaaagtcagacttgggagtcgggtcccccgattggaagaacctcttaattgacgtgaccagggaagatcacgagaatagccagaataattccaagcgcaggtgtaaagtcaattgtgaaacggaccagagatag

SEQ ID NO: 18963 - DNA, 366 bp, Artificial Sequence
  derived and/or modified sequence
atgtggagccggcggggcctgggcgtgtcccgggcccccctgcacctgctgctgggcgtgtggggccccagcggccgcactggaggccagaggaagggggccagcctggcccggcccggccggggcggcctggccagctgcagcgtgggcgccaacgggaagagagatgtgctcttcctgaggaagaccctgaccaacacagtggaggacatccagattgacaacttccggaggaagagtgacctgggcgtgggcagcccagactggaagaacctgctgattgatgtgaccagagaagatcatgagaacagccagaacaacagcaagaggcgctgcaaggtgaactgtgaaacagaccagaggtag

SEQ ID NO: 18964 - DNA, 366 bp, Artificial Sequence
  derived and/or modified sequence
atgtggagccggcggggcctgggcgtgagccgggcccccctgcaccttttgctgggagtgtgggggccttccgggagaacaggcggccagcggaagggtgcctctttggctcgcccgggcagaggtggcttggcaagctgttctgttggcgcaaacggaaagcgcgatgtgctcttcttaagaaagacactgaccaataccgttgaggacatacaaattgacaacttccgtagaaaatcggatcttggagtgggcagccccgattggaaaaatctgctgatcgacgtaaccagggaagatcacgagaacagccagaacaatagtaagcggcggtgtaaagttaactgtgaaactgatcaaagatag

SEQ ID NO: 18965 - DNA, 366 bp, Artificial Sequence
  derived and/or modified sequence
atgtggtccagacgcggtctcggtgtgtcccgcgcaccgctgcaccttcttttaggtgtgtggggccctagcggacgcactggcggacagagaaagggggcttcattggccaggcccggacgcggtgggctcgcttcctgtagtgtcggagcaaacgggaaacgcgatgtcctcttcctgagaaagactctgactaataccgtggaggatatacaaatcgataactttcgacgcaagtccgatttgggggtgggtagccccgactggaaaaatcttttgatcgacgtgacccgtgaggatcacgaaaacagccagaataacagtaaacggaggtgcaaggtaaattgcgaaaccgaccaacggtag

SEQ ID NO: 18966 - protein, 396 aa, Artificial Sequence
  derived and/or modified sequence
MLITVYCVRRDLSEVTFSLQVSPDFELRNFKVLCEAESRVPVEEIQIIHMERLLIEDHCSLGSYGLKDGDIVVLLQKDNVGPRAPGRAPNQPRVDFSGIAVPGTSSSRPQHPGQQQQRTPAAQRSQGLASGEKVAGLQGLGSPALIRSMLLSNPHDLSLLKERNPPLAEALLSGSLETFSQVLMEQQREKALREQERLRLYTADPLDREAQAKIEEEIRQQNIEENMNIAIEEAPESFGQVTMLYINCKVNGHPLKAFVDSGAQMTIMSQACAERCNIMRLVDRRWAGVAKGVGTQRIIGRVHLAQIQIEGDFLQCSFSILEDQPMDMLLGLDMLRRHQCSIDLKKNVLVIGTTGTQTYFLPEGELPLCSRMVSGQDESSDKEITHSVMDSGRKEH

SEQ ID NO: 18967 - DNA, 1191 bp, Artificial Sequence
  derived and/or modified sequence
atgctgatcaccgtgtactgcgtgagaagagacctgagcgaggtgaccttcagcctgcaggtgagccccgacttcgagctgagaaacttcaaggtgctgtgcgaggccgagagcagagtgcccgtggaggagatccagatcatccacatggagagactgctgatcgaggaccactgcagcctgggcagctacggcctgaaggacggcgacatcgtggtgctgctgcagaaggacaacgtgggccccagagcccccggcagagcccccaaccagcccagagtggacttcagcggcatcgccgtgcccggcaccagcagcagcagaccccagcaccccggccagcagcagcagagaacccccgccgcccagagaagccagggcctggccagcggcgagaaggtggccggcctgcagggcctgggcagccccgccctgatcagaagcatgctgctgagcaacccccacgacctgagcctgctgaaggagagaaacccccccctggccgaggccctgctgagcggcagcctggagaccttcagccaggtgctgatggagcagcagagagagaaggccctgagagagcaggagagactgagactgtacaccgccgaccccctggacagagaggcccaggccaagatcgaggaggagatcagacagcagaacatcgaggagaacatgaacatcgccatcgaggaggcccccgagagcttcggccaggtgaccatgctgtacatcaactgcaaggtgaacggccaccccctgaaggccttcgtggacagcggcgcccagatgaccatcatgagccaggcctgcgccgagagatgcaacatcatgagactggtggacagaagatgggccggcgtggccaagggcgtgggcacccagagaatcatcggcagagtgcacctggcccagatccagatcgagggcgacttcctgcagtgcagcttcagcatcctggaggaccagcccatggacatgctgctgggcctggacatgctgagaagacaccagtgcagcatcgacctgaagaagaacgtgctggtgatcggcaccaccggcacccagacctacttcctgcccgagggcgagctgcccctgtgcagcagaatggtgagcggccaggacgagagcagcgacaaggagatcacccacagcgtgatggacagcggcagaaaggagcactag

SEQ ID NO: 18968 - DNA, 1191 bp, Artificial Sequence
  derived and/or modified sequence
atgttgattacggtgtactgcgtgcgtcgagatctctctgaagtgacttttagcctgcaggtgagtcccgacttcgaactgcgtaatttcaaggttctgtgtgaagcagaatcgcgggtgccagttgaagagatccaaattatccacatggagagactgttaatagaggatcattgctccctgggatcgtacggactaaaggacggcgatattgtcgttttattgcagaaggacaatgtggggcctcgcgcccctgggagggctccgaatcagccccgcgtggacttctcaggcatagctgttccgggcacatctagttcccgtccacaacatcctggtcagcagcagcaaaggacacccgccgcacaaagaagccagggtttagcgagcggcgagaaggtcgccgggctccagggacttggttcccctgccctgataagaagtatgttactgagcaatccccatgacctcagcttattgaaagagaggaatcctcccctggctgaagcactgctgagcgggtccctagagacatttagtcaagttctcatggaacaacagagagagaaagcactgagagaacaagagcgactgagactatataccgcggacccccttgatagagaagcgcaagccaaaatcgaggaggaaatcaggcaacaaaatatcgaagaaaacatgaatatcgccatcgaggaggcaccagaatcttttggacaggtgacgatgctgtatattaactgtaaggtgaacggacaccctctgaaggcattcgtggacagtggggcccagatgaccattatgagccaggcctgcgctgagcggtgtaatattatgcggctggtcgaccggcgctgggccggcgtggcaaaaggagtgggaactcaacggattatcgggagagtgcatctggcacagatccagattgagggtgacttcctccaatgtagtttctccatcctggaggaccagccaatggacatgttgctggggctggatatgctgcggagacaccaatgctccatagaccttaagaaaaatgtgctggtcataggcactaccggtacacaaacctatttcctgccagaaggcgagttacccctctgcagcagaatggtttccggccaagacgaatcttcagacaaagagatcacgcattcagtgatggacagcgggaggaaagaacactag

SEQ ID NO: 18969 - DNA, 2615 bp, Artificial Sequence
  derived and/or modified sequence
agaaatggactttggaacacaacgtgctacctcaaggctccacctggccacacagcaggcactgaggctgggagacagcccccagacagatgagtgtccgcgcctctctgagaggtgaatgagcccggacggtccctacctaccaagtcctgaggagcagcggcaccaacgacgcaggcccgccccagcccgccagtgagccgcccatgccctctgctagcccggcccgcccgggcccccgccatgctgatcaccgtgtactgcgtgcggagggacctctccgaggtcaccttctctctccaggtcagccccgactttgagctccgaaacttcaaggtcctctgcgaagcggagtccagagtccccgtcgaagagatccagatcatccacatggagcgactcctcatcgaggaccactgttccctgggctcctacggcctcaaagatggcgatatcgtggttttactgcagaaggacaatgtgggacctcgggctccagggcgtgccccgaaccagcctcgtgtagacttcagtggcattgcggtgcctgggacgtccagctcccgtccacagcaccctggacagcagcagcagcgcacacccgctgcccagcggtcacagggcttggcgtcaggagagaaggtggccggcctgcaaggtctgggcagccccgccctgatccgcagcatgctgctctccaacccccacgatctgtccctgctcaaggaacgcaaccctcccttggcggaagccctgctcagcggaagccttgagaccttttctcaggtgctgatggagcagcaaagggaaaaggccttgagagagcaagagaggcttcgtctctacacagccgacccactggatcgggaagctcaggccaaaatagaagaggaaatccggcagcaaaacattgaagaaaacatgaatatagcgatagaagaggcccccgagagttttggacaagtgacgatgctctacattaactgcaaagtgaatgggcatcctttgaaggcttttgttgactcgggcgcccagatgaccattatgagccaggcttgtgccgagcgatgtaacatcatgaggctggtggaccgacggtgggctggggttgctaaaggagtgggcacacagagaattattggccgtgttcatctagctcagattcaaattgaaggtgatttcttacagtgctctttctccatacttgaggatcaacccatggatatgcttctaggcctagatatgctccggagacatcaatgttccatcgatttgaagaaaaatgtgctggtcatcggcaccactggcacgcagacttattttcttcctgagggagagttgcccttatgctctaggatggtaagtgggcaagatgagtcttcggacaaggaaattacacattcagtcatggattcaggacgaaaagagcattaaagcacgttataaatatgttaccaccttgagggagcctcaggtccccggcaattataagttaagagcttactggcaatgtaatcattaaaaaacatcagtaacaactaaacctggccttgggactacgttctcagatgggtaactaacgtcaatcctgattccttggtcttggtccctcttccatttcccttgtccagagatcactgaaaggcatcctgggaaggctctggaggctccagctgatttccagataatccatgaaaaagaaaaccagcttcttcctttagagacactatcctatcagattacaggtggcttatccaaatcattgctattttgcagaattccctggaaaaatgctatggctgcagaccttacaaggcatccacataaaactatttcacatcagcactaataattctttctactgagagaaatatgcccattttcacaggttttgttttctttgggaagggtattagaaatggtaggtcagttacactatgatgttaactaatacttatacatgtctgtttggggcagcataaagaccaatttcctcatatttacaccttcccttcccctggatcccctgcagtcaccctgcaatccacagctaaagactatttttgccatatttgagaaagtggatttatctccaaggatgctacattaattttctatttctcctgcattcaaagaaactctggctataaaacaaaggcaataaattagattttttaaaaaagaaattatggtacttcttgggagtcaagttgtacagtggtgggaatgagaggtggggacaggcagtggtccaggttctctaatagtcattgcaactagatcatctctctctctttttcaaagtaaaaatctgctttatacattaagctgctgctacatcagtattgtttgaacaaaggttttcactgttaaaataacatttgaaaacttttgaatgagaagatctctaaggcctcattcagaattatccattctgacaatgttagtgtttattacaactgacagtgggtaatggaagatcctagacttaattacaacccatggctaaagcacctgagagaaaagtttcagcttcctgaggccatcagatgcaggggaaatgtttcaggacaataatttatcaaaactagtattaaaacagcggattcaaaatc

SEQ ID NO: 18970 - DNA, 1191 bp, Artificial Sequence
  derived and/or modified sequence
atgctgatcaccgtgtactgtgtgagaagagacctgtctgaggtgaccttcagcctgcaggtgtccccagactttgagctgaggaacttcaaggtgctgtgtgaggccgagagccgggtgcctgtggaggagatccagatcatccacatggagcggctgctgattgaggaccactgcagcctgggcagctatggcctgaaggatggagacatcgtggtgctgctgcagaaggacaacgtgggcccccgggcccctggccgggcccccaaccagccccgggtggacttctctggaattgctgtgcccggcaccagcagcagccggccccagcaccctggccagcagcagcagaggaccccagctgcccagaggagccagggcctggccagcggggagaaggtggccggcctgcagggcctgggcagccctgccctgatccgctccatgctgctgagcaacccccatgacctgagcctgctgaaggagagaaatccacccctggccgaggccctgctgagcggcagcctggagaccttcagccaggtgctgatggagcagcagcgggagaaggccctgcgggagcaggagcggctgcggctgtacacagctgaccccctggaccgggaggcccaggccaagattgaggaggagatccggcagcagaacatcgaggagaacatgaacatcgccatcgaggaggcccctgagagctttggccaggtgaccatgctgtacatcaactgcaaggtgaatggccaccccctgaaggcctttgtggacagcggggcccagatgaccatcatgagccaggcctgtgccgagcgctgcaacatcatgaggctggtggaccggcgctgggccggcgtggccaagggcgtgggcacccagaggatcatcggccgggtgcacctggcccagatccagattgaaggagacttcctgcagtgcagcttcagcatcctggaggaccagcccatggacatgctgctgggcctggacatgctgcggcggcaccagtgcagcattgacctgaagaagaatgtgctggtgattggcaccaccggcacccagacctacttcctgcctgagggggagctgcccctgtgcagcaggatggtgtctggccaggatgagagcagtgacaaggagatcacccacagcgtgatggattctggcaggaaggagcactag

SEQ ID NO: 18971 - DNA, 1191 bp, Artificial Sequence
  derived and/or modified sequence
atgctgatcaccgtgtactgcgtgcggcgggacctgagcgaggtgacattttccctgcaagtgtctcctgacttcgaactgaggaatttcaaggttttgtgcgaagcagagtcacgcgtcccagtagaagagattcaaatcattcatatggaacgcctgctgattgaggaccactgtagcctcgggagctacggactgaaggacggcgatatcgtagtcctcctgcaaaaggacaacgtgggtcctagagccccaggccgtgcaccgaaccagccccgggtcgacttctctggcatcgctgtacccggcacgtctagtagtaggccccaacaccccgggcagcagcaacagcgcacaccagctgctcaacgttcacaaggtctggcttctggcgagaaggtggcaggactccagggcctggggagccctgccttgatacgatcgatgctgctatctaatccccacgacctgagtctgttaaaggaacggaaccccccgcttgccgaagcgttgctctcaggtagcctggagaccttcagtcaggttctgatggaacagcaaagggagaaagcacttcgcgagcaggaacgcctgcggttgtacaccgcagacccacttgaccgagaagcccaggcaaagatcgaagaggagatcaggcagcaaaacattgaagaaaatatgaatattgccatcgaggaagcccccgaaagcttcggccaagtcaccatgttgtatatcaactgcaaggttaacggacaccccctcaaggccttcgtggacagtggcgcccaaatgaccatcatgtcccaggcttgtgccgagaggtgcaatatcatgagacttgtggaccgaagatgggccggcgtagctaaaggcgtgggcacccagcgcatcattggtcgggtgcatctggcacagatccagattgagggcgatttcctccagtgttctttctctatacttgaagaccagccaatggatatgctactgggcttggatatgcttagacggcatcagtgctccatagatctgaagaaaaatgtcttggtgatcgggaccacaggcactcagacatattttttgcccgagggagaactccccctgtgttccagaatggtgtccgggcaggatgagagttctgataaggaaattactcatagcgtgatggacagcggcagaaaagaacattag

SEQ ID NO: 18972 - DNA, 1191 bp, Artificial Sequence
  derived and/or modified sequence
atgctgatcaccgtttactgcgtgagaagagatctatcagaagtcacattctccctccaagtcagccccgattttgaactcaggaactttaaggttctttgcgaagcagagagccgcgttcctgtggaagaaatccagattatccacatggagagactgctaattgaagaccactgcagtttgggaagctatgggctgaaggatggcgacatagtggtgttgctccagaaggataacgtcgggccacgcgctcctggcagagcacctaatcagccacgagtggacttctcaggcatcgctgtccctggtacctctagcagcaggccccaacatcctgggcagcagcagcaacgtacaccagctgcacaaaggagccagggtctggcgtcgggagagaaggtggctggcctgcagggactaggtagcccagccttgataaggtcaatgctcttgagcaatccccacgatttgtctttactcaaggagcgcaacccaccgctggcagaggccctcctaagcggaagcctggagaccttctcccaggtactcatggagcagcagcgtgaaaaggccttgcgcgagcaggagagactcagactgtatactgctgatcccctagatagggaggcgcaagctaagattgaggaggagatcagacagcagaacatcgaagagaacatgaacatagccattgaggaggcaccagagagctttggtcaggtcactatgctgtatataaactgcaaggtcaacggacaccccttgaaggcattcgttgactccggagcacagatgaccatcatgtctcaggcttgtgcggaaagatgtaacattatgcggctggtcgacagaaggtgggccggtgttgcaaagggcgtcggcacccagcgaatcattggcagagtacatctggcccaaattcagattgaaggcgatttccttcaatgttcattctcaattctagaagatcagcctatggatatgcttctgggcctggatatgttacgcaggcaccaatgttctattgatctgaaaaaaaacgtgcttgtcataggaaccactggaacgcagacatactttctcccagagggtgaactgccgctttgcagccgcatggtatctggacaagacgaatcttctgataaggagattacgcactccgtcatggactcaggcaggaaggaacattag

SEQ ID NO: 18973 - DNA, 387 bp, Artificial Sequence
  derived and/or modified sequence
atgcgggaaaacgtcccaggggaaaagaagccccagaacggcatccccctgcctccacaaattttcaacgaggaacaatactgcggtgacttcgacagttttttcagcgctaaggaggaaaacataatttactcctttctaggactcgcgcctccccctgatagcaaaggtagcgagaaggccgaggagggtggcgagaccgaagcacagaaagaaggctctgaggacgtgggcaaccttcctgaagcacaagagaagaacgaggaagagggggagaccgccacagaggaaaccgaggaaatcgctatggaaggggccgagggagaagccgaagaagaagaggaaactgcggagggtgaagaacccggcgaggacgaggactcttag

SEQ ID NO: 18974 - DNA, 387 bp, Artificial Sequence
  derived and/or modified sequence
atgagagagaatgtgccgggggagaagaaacctcagaatgggataccactccctcctcagatcttcaacgaagagcagtattgcggggatttcgatagcttcttcagtgccaaagaagaaaatattatttactcattccttggcctggcacccccaccggactccaaaggttctgagaaggccgaggagggaggcgagacggaggcccagaaagagggcagtgaagatgtgggcaatctgcctgaggctcaggagaagaacgaggaggaaggtgagactgctaccgaggagactgaggaaatagcaatggagggagctgagggcgaggctgaagaggaggaagagaccgccgaaggagaagagcctggagaagatgaagacagctag

SEQ ID NO: 18975 - DNA, 387 bp, Artificial Sequence
  derived and/or modified sequence
atgcgagaaaacgtccctggcgagaagaaaccacaaaacgggattcctttgccaccgcaaatctttaacgaggagcagtattgcggcgactttgacagcttcttttccgcgaaggaggagaacataatatattctttcctcgggctggctcctccccctgattccaaggggtctgagaaggctgaggaggggggtgagaccgaggctcagaaagaaggcagcgaggatgttggaaacctccccgaggctcaggagaagaacgaagaagaaggcgagactgcaacggaagagactgaggaaatcgccatggagggcgctgagggggaggcggaagaggaggaagagactgctgaaggcgaggaacctggcgaggacgaggactcctag

SEQ ID NO: 18976 - DNA, 321 bp, Artificial Sequence
  derived and/or modified sequence
atgcgagagaacgtccctggggaaaagaagccacaaaatggcatcccactccctccgcaaatatttaacgaagaacaatactgcggagacttcgactcctttttttccgccaaagaagagaacatcatctacagttttcttggcctggctcccccacctgatagtaaaggttctgaaaaagctgaagagggcggcgagacagaggcgcagaaagagggatcggaggacgttggaaatctccctgaggcacaggaaaaaaacgaggaggagggcgagactgcaactgaggagacggaggagatcgcgatggagggagcatag

SEQ ID NO: 18977 - DNA, 387 bp, Artificial Sequence
  derived and/or modified sequence
atgagagaaaatgtgcctggagagaagaagccccagaatggcatccccctgcccccccagatcttcaatgaggagcagtactgtggggactttgacagcttcttcagcgccaaggaggagaacatcatctacagcttcctgggcctggcccctcctccagacagcaagggcagcgagaaggccgaggagggcggggagacagaggcccagaaggagggctctgaagatgtgggcaacctgcctgaggcccaggagaagaatgaggaggagggggagacagccacagaggagacagaggagatcgccatggagggcgctgagggggaggccgaggaggaggaggagacagctgagggggaggagcccggggaggatgaggacagctag

SEQ ID NO: 18978 - DNA, 321 bp, Artificial Sequence
  derived and/or modified sequence
atgagagaaaatgtgcctggagagaagaagccccagaatggcatccccctgcccccccagatcttcaatgaggagcagtactgtggggactttgacagcttcttcagcgccaaggaggagaacatcatctacagcttcctgggcctggcccctcctccagacagcaagggcagcgagaaggccgaggagggcggggagacagaggcccagaaggagggctctgaagatgtgggcaacctgcctgaggcccaggagaagaatgaggaggagggggagacagccacagaggagacagaggagatcgccatggagggcgcctag

SEQ ID NO: 18979 - DNA, 387 bp, Artificial Sequence
  derived and/or modified sequence
atgcgggagaacgtgcccggcgagaagaagccccagaacggcatcccactaccaccccaaattttcaatgaggagcaatattgtggggacttcgacagtttctttagtgcgaaggaagagaacattatatactcctttttagggttagctccgccccccgatagtaaggggagtgagaaagctgaggaagggggcgaaactgaagcccaaaaagagggaagtgaagacgtgggtaatctgccagaggctcaggaaaaaaacgaagaagaaggagaaactgcgaccgaagagactgaggagatcgctatggaaggagcggaaggagaagccgaggaggaagaggagaccgcagagggcgaggaacccggggaagacgaagactcttag

SEQ ID NO: 18980 - DNA, 387 bp, Artificial Sequence
  derived and/or modified sequence
atgcgggagaacgtgcccggcgagaagaagccccagaacggcatccccctgcctcctcaaatctttaacgaggagcaatattgtggcgacttcgattcattcttctccgctaaggaagagaatataatctattctttcctgggtcttgctccaccccccgactcaaaagggtctgagaaggcagaagaaggaggagagacagaagctcaaaaggagggttctgaggacgtcggcaacctgcctgaagctcaggagaagaatgaagaagaaggggaaaccgccactgaggagactgaagaaatcgctatggagggtgcagagggcgaggccgaggaggaagaggaaactgcagagggggaagagcctggtgaagatgaagattcctag

SEQ ID NO: 18981 - DNA, 387 bp, Artificial Sequence
  derived and/or modified sequence
atgcgggagaacgtgcccggcgagaagaagccccagaacggcatccctcttccacctcaaatttttaacgaggaacagtactgcggcgactttgactcatttttctccgcaaaagaagagaatattatctactcctttctgggcctggctccacctccagatagcaagggcagtgaaaaagccgaggaaggtggcgagactgaagctcagaaagagggatccgaagacgtcggtaacctccccgaagcgcaggaaaaaaatgaggaagaaggggagactgcaacagaggagaccgaggagattgcgatggaaggagcagagggcgaagccgaggaggaagaggagacggctgagggcgaggagccaggagaagatgaggactcctag

SEQ ID NO: 18982 - DNA, 321 bp, Artificial Sequence
  derived and/or modified sequence
atgcgggagaacgtgcccggcgagaagaagccccagaacggcatcccactgccacctcaaatattcaatgaggagcagtattgtggagattttgattctttttttagcgccaaggaagaaaatattatctactcgtttttgggcttggcccctcccccagatagcaagggatccgaaaaggctgaagagggtggagaaacagaggcccagaaagaggggagtgaggacgtaggcaatctgcccgaggcgcaagagaagaatgaagaagaaggagagaccgctactgaagaaacagaggagatcgccatggagggggcatag

SEQ ID NO: 18983 - DNA, 387 bp, Artificial Sequence
  derived and/or modified sequence
atgcgtgagaacgttcccggtgaaaaaaaaccacagaacggaattcccttgccccctcagatcttcaatgaggaacaatactgcggggacttcgattcattcttcagtgcaaaagaagagaacattatttacagctttttggggctcgccccaccacctgattccaaaggttctgaaaaggctgaggagggcggagaaacagaagcccaaaaagagggaagcgaggacgtcgggaatctccctgaagcccaggagaagaatgaggaggaaggcgaaaccgccacagaggaaacggaagagatcgcaatggagggcgctgaaggcgaggctgaggaggaggaggagacagccgaaggcgaagagcctggagaggatgaagattcctag

SEQ ID NO: 18984 - DNA, 387 bp, Artificial Sequence
  derived and/or modified sequence
atgagagagaatgtgccgggtgagaagaaacctcaaaacggtatcccgctgccacctcagatctttaatgaggaacagtattgtggggatttcgacagttttttcagtgctaaagaggaaaacattatttactcttttctaggattggcccctccccctgattccaaaggcagtgagaaagccgaggagggaggcgaaactgaggctcagaaagaaggttcggaggatgtgggaaacctgcctgaagcccaggagaaaaatgaggaggaaggagagacagccaccgaggaaacagaagagatagccatggagggcgctgagggtgaggccgaagaggaagaggagacggctgaaggtgaagagcctggcgaggacgaggacagctag

SEQ ID NO: 18985 - DNA, 387 bp, Artificial Sequence
  derived and/or modified sequence
atgagggaaaacgtcccaggagagaagaaaccacagaacggcatacctctgcctccgcagatctttaacgaggaacagtattgtggcgactttgatagcttcttttcggctaaagaagagaatatcatctattcctttctgggattagcccctccccctgactcgaaagggtctgagaaagctgaagaaggaggggagactgaggcacagaaagagggcagtgaggatgtgggaaacctgccagaagcccaggaaaaaaatgaagaagagggagaaactgcgacagaggagacagaggagatcgctatggagggtgctgagggtgaggctgaagaggaggaggagaccgctgaaggcgaagagcctggcgaggatgaagattcttag

SEQ ID NO: 18986 - DNA, 321 bp, Artificial Sequence
  derived and/or modified sequence
atgcgcgaaaacgttccaggcgaaaagaaaccacagaatggtattccacttccaccgcagatctttaatgaggagcaatattgcggcgactttgactcctttttttctgcgaaagaagagaacataatctatagcttccttgggcttgcacctcccccagattccaaggggtcggaaaaggccgaggaaggcggagagaccgaggcccagaaagaaggaagtgaggacgtcggtaacctgcccgaggcccaggaaaaaaatgaggaagagggcgagacggcaaccgaagaaaccgaagaaattgccatggagggagcttag

SEQ ID NO: 18987 - DNA, 387 bp, Artificial Sequence
  derived and/or modified sequence
atgagagagaacgtgcccggcgagaagaagccccagaacggcatccccctgcccccccagatcttcaacgaggagcagtactgcggcgacttcgacagcttcttcagcgccaaggaggagaacatcatctacagcttcctgggcctggcccccccccccgacagcaagggcagcgagaaggccgaggagggcggcgagaccgaggcccagaaggagggcagcgaggacgtgggcaacctgcccgaggcccaggagaagaacgaggaggagggcgagaccgccaccgaggagaccgaggagatcgccatggagggcgccgagggcgaggccgaggaggaggaggagaccgccgagggcgaggagcccggcgaggacgaggacagctag

SEQ ID NO: 18988 - DNA, 321 bp, Artificial Sequence
  derived and/or modified sequence
atgagagagaacgtgcccggcgagaagaagccccagaacggcatccccctgcccccccagatcttcaacgaggagcagtactgcggcgacttcgacagcttcttcagcgccaaggaggagaacatcatctacagcttcctgggcctggcccccccccccgacagcaagggcagcgagaaggccgaggagggcggcgagaccgaggcccagaaggagggcagcgaggacgtgggcaacctgcccgaggcccaggagaagaacgaggaggagggcgagaccgccaccgaggagaccgaggagatcgccatggagggcgcctag

SEQ ID NO: 18989 - protein, 129 aa, Artificial Sequence
  derived and/or modified sequence
MGEIEQRPTPGSRLGAPENSGISTLERGQKPPPTPSGKLVSIKIQMLDDTQEAFEVPMVSSSSFLKATGSSWTGWVLRCSMKPKHHSHLIEKFGEDRILTHLTGSISYTNWAGSRSLAVTVTEELLNLF

SEQ ID NO: 18990 - DNA, 390 bp, Artificial Sequence
  derived and/or modified sequence
atgggcgagatcgagcagagacccacccccggcagcagactgggcgcccccgagaacagcggcatcagcaccctggagagaggccagaagcccccccccacccccagcggcaagctggtgagcatcaagatccagatgctggacgacacccaggaggccttcgaggtgcccatggtgagcagcagcagcttcctgaaggccaccggcagcagctggaccggctgggtgctgagatgcagcatgaagcccaagcaccacagccacctgatcgagaagttcggcgaggacagaatcctgacccacctgaccggcagcatcagctacaccaactgggccggcagcagaagcctggccgtgaccgtgaccgaggagctgctgaacctgttctag

SEQ ID NO: 18991 - DNA, 1321 bp, Artificial Sequence
  derived and/or modified sequence
gcggccgctgcccgctttgcgccgctcctccctgcgcgagtagcgctggccccggcgtcgaggcggccatggcgacccggagcccgctccccacccaccccgcctgctccgccctcccctccgccccgcgccacctttgatggctcggacctcagccggccaccgccagccctgctcgcgcgcccgcgccgccgccgcccgcgggtattaatagccggcgccgccgcgccctcggccgccgggggcttgggagccgccgatcccggagcccgagccgggagagggagccgccgcagccgccggcgctgtggagatattctctaagccgctttcatcatgggagaaatagagcagaggccgaccccaggatcacgactgggggccccggaaaattcggggatcagtaccttggaacgtggacagaagccgcccccaacaccttcaggaaaactcgtgtccatcaaaatccagatgctggatgacacccaggaggcatttgaagttccaatggtgtcctcatcctccttcctcaaagccaccggctcctcctggacgggttgggtactgagatgctccatgaagcccaagcaccattcacatctaattgagaagtttggagaggacagaattctcactcatcttacaggctctatttcttacacaaactgggctggaagtagaagcttagcggtcacagtcactgaagagcttcttaatcttttttgagtcaggacttgaagtcctgtttcattatttcattcaaagaaattgattggcaatggccagagttaaattcaaaggtgacattaacacatttcagtgcccaataagtgatttttctgctgggtaggagtagatacagatgtgatctcagatacgtgaagctgcatacagaggggcccatccactcctaaacgggtctccaggaggcttggtttgatctactagatttggtgcctcttaaagggaagcaatacagcttttctgctgtgggttgtttgccactaggggaagattcatttctattccagccataaattagaccaaagagagggatttggtttattgctagtgcagaagttaaaaaccatcttcctttcctgagtggtctcttaattagattctttagtttttaaatgttaactggaattgctgaagtttaattcctgaaagggtttagtttttaaaaggagtacctcatttaccatattactgtgttctgagaaatctacagtaatttttgtgtaacttttttattcaaagaatggattgttaattgtaaagccatttagaaaggcgaataaagtcagatctactttaa

SEQ ID NO: 18992 - DNA, 390 bp, Artificial Sequence
  derived and/or modified sequence
atgggagagattgaacagagacccactcccggttcaaggttaggtgcccctgaaaattccggcatatcaacgctcgagcgcgggcaaaagccgccccccacaccgtctggcaagctcgtaagcataaaaatacaaatgctggacgatacacaggaggctttcgaagttccaatggttagctcttcctcttttcttaaagccacaggcagtagctggaccgggtgggtgctgcgatgttccatgaagccgaaacaccactcccacctcatcgagaagttcggcgaggatagaatcctgactcatctgaccggctctatcagctatactaattgggccggatcccggtccctggcagtgacagtgacagaggagttgttgaatctcttctag

SEQ ID NO: 18993 - DNA, 390 bp, Artificial Sequence
  derived and/or modified sequence
atgggagaaattgagcagaggcccaccccaggcagccggctgggcgcccctgagaacagcggcatcagcaccctggagcggggccagaagcccccacccacccccagcggcaagctggtgtccatcaagatccagatgctggatgacacccaggaggcctttgaggtgcccatggtgagcagcagcagcttcctgaaggccaccggcagctcctggacaggctgggtgctgcgctgcagcatgaagcccaagcaccacagccacctgattgagaagtttggagaagatcgcatcctgacccacctgaccggcagcatctcctacaccaactgggccggcagccgcagcctggccgtgacagtgacagaggagctgctgaacctcttctag

SEQ ID NO: 18994 - DNA, 390 bp, Artificial Sequence
  derived and/or modified sequence
atgggcgagatcgagcagcggcccacccccggcagccggctgggcgccccggaaaattcagggatcagcaccctggaaaggggtcagaaaccaccacccacaccctccggtaaacttgtgagtatcaagatccagatgctggatgacacccaggaggccttcgaggttccaatggtgtcaagtagctcctttttaaaggccacaggcagcagctggactgggtgggtgctgcgatgctcaatgaagccaaagcaccacagccatctcatcgagaaatttggggaagacaggatcttgactcatctcaccggcagtatctcatacacaaactgggctggctcaagaagcttagccgtgaccgtcacagaggagttgttaaatctgttctag

SEQ ID NO: 18995 - DNA, 390 bp, Artificial Sequence
  derived and/or modified sequence
atgggcgagattgagcagcggcctacccctggctcacggctcggagcccctgagaatagcggcatctcaacccttgagagaggccaaaagcccccacctacaccttcaggtaagctagtgtccatcaaaattcaaatgttagacgacacacaggaagccttcgaagtgcctatggtgagctccagctcattcctgaaagcaaccggaagcagctggactggatgggtactgcgttgtagcatgaagcctaagcaccattctcatttaattgagaaattcggcgaagataggatcctgacacacctaacagggagcattagttacaccaactgggccggttcccgttccctcgctgtgacagtaactgaggaactactgaacttattctag

SEQ ID NO: 18996 - protein, 541 aa, Artificial Sequence
  derived and/or modified sequence
MASQEFEVEAIVDKRQDKNGNTQYLVRWKGYDKQDDTWEPEQHLMNCEKCVHDFNRRQTEKQKKLTWTTTSRIFSNNARRRTSRSTKANYSKNSPKTPVTDKHHRSKNCKLFAASKNVRRKAASTLSDTKNMEIINSTIETLAPDSPFDHKKTVSGFQKLEKLDPIAADQQDTVVFKVTEGKLLRDPLSHPGAEQTGIQNKTQMHPLMSQMSGSVTASMATGSATRKGIVVLIDPLAANGTTDMHTSVPRVKGGQRNITDDSRGQPFIKKMHFTIRLTESAITYRDIVVKKEDGFTQIVLSTRSTEKNALNTEVIKEMVNALNSAAADDSKLVLFSAAGSVFCCGLDFGYFVRHLRNDRNTASLEMVDTIKNFVNTFIQFKKPIVVSVNGPAIGLGASILPLCDLVWANEKAWFQTPYTTFGQSPDGCSSITFPKMMGKASANEMLIAGRKLTAREACAKGLVSQVFLTGTFTQEVMIQIKELASYNAIVLEECKALVRCNIKLELEQANERECEVLRKIWSSAQGIESMLKYVENKIDEF

SEQ ID NO: 18997 - DNA, 1960 bp, Artificial Sequence
  derived and/or modified sequence
gtaacaggcaggaagaaagctttctgtactacaccagagggttggggctgtggatttagctactctcacctgaggctactgagcaagctgtcatgcaccatgagacaaagcccaagctgtcccaccaggcagtaagtgtggagaggttcaggcacatggcatagctgctatttcgcacaattttcactacaccagtggtgaccaaatagaagaggttcatccatacacagaacctggtgaagagctggaggcagaaagaagtgtctatgtggagacgcaactgaaacaaaggtggcacagcaactgttccaatcccgtgtctttcctcatggcttcccaggagtttgaggttgaagctattgttgacaaaagacaggataaaaatgggaatacacagtatttggttcggtggaaaggttatgacaaacaggatgacacttgggaaccagagcagcacctcatgaactgtgaaaaatgtgtacatgattttaatagacgacagactgaaaaacagaaaaaactgacatggactacaaccagtagaattttttcaaacaatgccagaagaagaacttccagatctacaaaagcaaactattctaagaactctcctaaaactccagtgactgataaacaccacaggtccaaaaactgcaagttatttgctgccagcaagaacgttaggagaaaggcagcttcaactctctccgacacaaagaatatggagataataaattcaactattgagacccttgcacctgacagcccctttgaccacaagaaaactgtgagtggctttcagaaacttgagaaactggaccctattgcagcagatcagcaggacacggtggtcttcaaggtgacagaagggaaactcctccgggaccctttgtcacatcctggtgcagaacagactggaatacagaacaagactcagatgcacccactaatgtcgcagatgtctggctcagttactgcttctatggccacaggttcagctacccgaaagggtatagtggtattaatagacccattagcagccaatgggacaacagacatgcatacctcagttccaagagtgaaaggtgggcaaagaaatattactgatgacagcagaggccagccttttatcaagaagatgcacttcaccataaggctaacagaaagtgccatcacatacagagacattgtagtgaagaaagaggatggattcacccagatagtgctatcaactagatcgacagaaaaaaatgcactgaatacagaagtaattaaagaaatggttaatgctctgaatagcgctgctgcagatgacagcaagctcgtgctgttcagtgcagctggaagtgtcttttgctgcggtcttgattttgggtactttgtgaggcacttaaggaatgacagaaacacagcaagccttgaaatggtggacaccatcaagaactttgtgaatacttttattcaatttaaaaagcctattgttgtatcagtcaatggccctgccattggactaggtgcatccatcctgcctctttgtgatctcgtgtgggctaatgaaaaggcttggttccaaaccccttatacgacctttggacagagtccagatggctgttcttctattacattccccaaaatgatgggtaaagcatctgccaatgaaatgttaattgctgggcgaaagctgacagcacgggaggcatgcgccaaaggcctggtctctcaggtatttttgactggaactttcacccaagaggttatgattcaaattaaggagcttgcctcatacaatgcaattgtactggaagaatgtaaggccctcgttcgctgtaatattaagttggagttggaacaggccaatgagagagagtgtgaggtgctgaggaagatctggagctcagcccaagggatagaatccatgttaaagtatgttgaaaataaaattgatgagttttaattgtca

SEQ ID NO: 18998 - DNA, 1626 bp, Artificial Sequence
  derived and/or modified sequence
atggccagccaggagttcgaggtggaggccatcgtggacaagagacaggacaagaacggcaacacccagtacctggtgagatggaagggctacgacaagcaggacgacacctgggagcccgagcagcacctgatgaactgcgagaagtgcgtgcacgacttcaacagaagacagaccgagaagcagaagaagctgacctggaccaccaccagcagaatcttcagcaacaacgccagaagaagaaccagcagaagcaccaaggccaactacagcaagaacagccccaagacccccgtgaccgacaagcaccacagaagcaagaactgcaagctgttcgccgccagcaagaacgtgagaagaaaggccgccagcaccctgagcgacaccaagaacatggagatcatcaacagcaccatcgagaccctggcccccgacagccccttcgaccacaagaagaccgtgagcggcttccagaagctggagaagctggaccccatcgccgccgaccagcaggacaccgtggtgttcaaggtgaccgagggcaagctgctgagagaccccctgagccaccccggcgccgagcagaccggcatccagaacaagacccagatgcaccccctgatgagccagatgagcggcagcgtgaccgccagcatggccaccggcagcgccaccagaaagggcatcgtggtgctgatcgaccccctggccgccaacggcaccaccgacatgcacaccagcgtgcccagagtgaagggcggccagagaaacatcaccgacgacagcagaggccagcccttcatcaagaagatgcacttcaccatcagactgaccgagagcgccatcacctacagagacatcgtggtgaagaaggaggacggcttcacccagatcgtgctgagcaccagaagcaccgagaagaacgccctgaacaccgaggtgatcaaggagatggtgaacgccctgaacagcgccgccgccgacgacagcaagctggtgctgttcagcgccgccggcagcgtgttctgctgcggcctggacttcggctacttcgtgagacacctgagaaacgacagaaacaccgccagcctggagatggtggacaccatcaagaacttcgtgaacaccttcatccagttcaagaagcccatcgtggtgagcgtgaacggccccgccatcggcctgggcgccagcatcctgcccctgtgcgacctggtgtgggccaacgagaaggcctggttccagaccccctacaccaccttcggccagagccccgacggctgcagcagcatcaccttccccaagatgatgggcaaggccagcgccaacgagatgctgatcgccggcagaaagctgaccgccagagaggcctgcgccaagggcctggtgagccaggtgttcctgaccggcaccttcacccaggaggtgatgatccagatcaaggagctggccagctacaacgccatcgtgctggaggagtgcaaggccctggtgagatgcaacatcaagctggagctggagcaggccaacgagagagagtgcgaggtgctgagaaagatctggagcagcgcccagggcatcgagagcatgctgaagtacgtggagaacaagatcgacgagttctag

SEQ ID NO: 18999 - DNA, 1626 bp, Artificial Sequence
  derived and/or modified sequence
atggcatcccaggagtttgaagtggaggccatagtggacaagaggcaggataagaatggaaatactcaatatctcgtgcggtggaagggctatgacaagcaagacgatacctgggaaccagaacagcacctgatgaactgcgagaagtgcgttcatgacttcaacaggagacagactgagaaacaaaagaaactgacctggacaacaacctctaggatctttagcaataatgccagaaggcgcaccagccggagcaccaaggctaattactccaagaactccccaaaaactccagtgacggacaagcatcaccggtcaaaaaattgcaagctgttcgctgcctcaaaaaacgttcggaggaaggccgcctccacattgtccgacaccaagaatatggagatcatcaatagcaccatcgaaaccctggccccagattcacctttcgaccacaagaaaactgttagtggttttcagaagctggagaagctggaccctattgctgctgaccaacaggataccgtcgtatttaaagtaacggaaggaaagcttctgcgcgaccccctttctcaccccggggcagaacagacagggatccagaataagacacagatgcatccactcatgtctcagatgtccggatctgtcacagcctccatggccaccggctctgctaccagaaagggcatcgttgtgttaatcgatccgctcgctgccaatggtaccactgatatgcatacctcagtaccgcgggtcaagggggggcaacgaaacatcacagacgacagccgaggccagccattcatcaagaaaatgcatttcactatacgcctgacagaaagtgctattacgtacagggacatagtagtaaagaaagaggatggctttactcaaattgtgttgagcacacgttccaccgagaagaatgctctaaatacagaggtgatcaaggaaatggtgaacgccctgaactccgccgcagctgacgatagcaaactggttctcttcagcgcggccggcagcgttttttgttgtggactcgactttgggtatttcgtgcggcatctgaggaacgatcgaaataccgcaagcctggaaatggtcgataccatcaagaacttcgtcaatactttcatccaatttaaaaagcccatcgtcgtttccgtcaatgggcccgctattggcctcggcgcttccatcctacctctgtgcgaccttgtgtgggccaatgaaaaagcgtggtttcaaaccccatataccaccttcggccaaagcccagatggctgctcgtccatcaccttcccgaagatgatgggaaaagccagtgctaatgagatgctgatcgccggacggaagttgactgcgcgagaggcgtgcgccaagggtctggtctcccaggttttcctcacaggaactttcacacaggaggtgatgatacagatcaaggagctggcctcttataatgccatcgtcctggaggaatgcaaggcactcgtcaggtgtaacatcaagctggaactggaacaagctaacgagagggagtgcgaggtgctgaggaagatatggtccagcgctcagggcattgagagtatgctgaaatacgtcgagaacaagatagacgagttctag

SEQ ID NO: 19000 - DNA, 1626 bp, Artificial Sequence
  derived and/or modified sequence
atggccagccaggagtttgaggtggaggccatcgtggacaagaggcaggacaagaatggaaacacccagtacctggtgcgctggaagggctatgacaagcaggatgacacctgggagcctgagcagcacctgatgaactgtgagaagtgtgtgcatgacttcaacagacggcagacagagaagcagaagaagctgacctggaccaccaccagccgcatcttcagcaacaatgcccggcggaggaccagccgcagcaccaaggccaactacagcaagaacagccccaagacccctgtgacagacaagcaccacaggagcaagaactgcaagctgtttgctgccagcaagaatgtgcggaggaaggccgccagcaccctgagtgacaccaagaacatggagatcatcaacagcaccatcgagaccctggccccagacagcccctttgaccacaagaagacagtgtctggcttccagaagctggagaagctggaccccatcgctgctgaccagcaggacacagtggtgttcaaggtgacagagggcaagctgctgcgggaccccctgagccaccctggagctgagcagacaggcatccagaacaagacccagatgcaccccctgatgagccagatgagcggctctgtgacagcctccatggccactggaagtgccaccaggaaaggaattgtggtgctgattgaccccctggccgccaacggcaccacagacatgcacacctctgtgccccgggtgaagggcggccagaggaacatcacagatgacagccggggccagcccttcatcaagaagatgcacttcaccatccggctgacagagagcgccatcacctacagagacatcgtggtgaagaaggaggatggcttcacccagatcgtgctgagcaccaggagcacagagaagaatgccctgaacacagaggtgatcaaggagatggtgaatgccctgaacagcgctgctgctgatgacagcaagctggtgctcttctctgctgctggcagcgtcttctgctgcggcctggactttggctactttgtgcgccacctgagaaatgacaggaacacagccagcctggagatggtggacaccatcaagaactttgtgaacaccttcatccagttcaagaagcccatcgtggtgtctgtgaatggacctgccatcggcctgggcgccagcatcctgcccctgtgtgacctggtgtgggccaatgagaaggcctggttccagaccccctacaccaccttcggccagagcccagatggctgcagcagcatcaccttccccaagatgatgggcaaggccagcgccaatgagatgctgattgctggcaggaagctgacagcccgggaggcctgtgccaagggcctggtgtcccaggtgttcctgaccggcaccttcacccaggaggtgatgatccagatcaaggagctggccagctacaatgccatcgtgctggaggagtgcaaggccctggtgcgctgcaacatcaagctggagctggagcaggccaatgaaagagaatgtgaggtgctgaggaagatctggagcagcgcccagggcattgaatccatgctgaagtatgtggagaacaagattgatgagttctag

SEQ ID NO: 19001 - DNA, 1626 bp, Artificial Sequence
  derived and/or modified sequence
atggccagccaggagttcgaggtggaggccatcgtggacaagcggcaggacaagaacggcaacactcaatacctcgttcggtggaaaggctacgataagcaggatgatacctgggagcccgagcagcatctaatgaattgtgagaagtgtgtgcacgacttcaatagacgtcagactgaaaaacaaaagaagctgacatggaccactacctcgagaattttctctaataacgcccgaaggagaaccagtaggagtacaaaagccaattacagcaagaactccccaaaaacaccagttacggacaagcaccatcgcagcaagaactgcaaactgtttgccgctagcaagaacgtccgacgcaaggccgcttccacgctgtccgacaccaagaacatggagataataaacagcactattgagaccctagcaccagacagcccttttgaccacaagaagacggtctcaggtttccagaaactagagaaacttgatcccatcgccgctgaccaacaggacacggtagtctttaaggttacggagggaaagttgctgagagaccccctctcacaccccggggccgagcagaccggcatacagaataagacccaaatgcaccctctgatgtctcaaatgtcagggagcgtcaccgcatctatggctacaggttccgcgaccaggaaggggattgtggtactgattgatccccttgcggcaaacggcacaacggatatgcacacgtccgttccaagggtcaaaggaggacagcgcaatatcactgacgactcgcggggccagccattcattaagaagatgcatttcacaatcagattaaccgagtccgccataacttacagagacattgtcgtgaaaaaggaagatggctttacacagatcgtgctgtcaaccaggtctactgaaaaaaacgcactcaataccgaagtgataaaagagatggtgaatgccctcaacagtgcggcagcagatgacagtaagctggtgctcttttctgccgccggaagcgtgttctgctgcgggcttgattttggctatttcgtcagacatctgagaaacgacagaaatacagccagcctggagatggtggatactataaagaactttgtgaacacgttcatccaatttaagaagcccatagtggtttccgtgaatggcccggcaattggtctgggtgccagcatacttccattgtgcgatctggtatgggccaatgaaaaagcatggttccagactccttacacaactttcggtcagtcccctgatggatgttcctctatcacatttcccaagatgatgggcaaagcctccgcaaacgaaatgcttattgccggccggaaacttactgccagagaggcctgcgccaagggcctagttagccaggtattcctgaccggtactttcacacaggaagttatgatacaaatcaaagagttggccagctacaacgcgatcgtgctcgaagaatgcaaagcccttgttaggtgcaacatcaagttggagcttgaacaggccaacgagcgggagtgcgaggtgctaaggaagatctggagtagtgcccagggcatcgagtccatgcttaaatatgttgaaaataagatcgacgaattctag

SEQ ID NO: 19002 - DNA, 1626 bp, Artificial Sequence
  derived and/or modified sequence
atggcctcacaagagttcgaggtggaagccatcgtggacaagcgccaggataaaaacggcaacacgcagtacctggtccggtggaaaggctacgataaacaagacgacacgtgggaacctgagcagcacctcatgaattgcgaaaaatgtgttcacgatttcaacaggcggcaaaccgaaaagcagaagaaactgacttggactactacttctcgcatcttcagcaataatgcacgacgcagaacatcccggtccactaaagctaactacagcaaaaatagccccaagacacctgtgaccgacaaacaccacaggtcgaaaaattgcaagctgtttgccgcaagcaaaaatgttcggcgaaaggctgccagtaccctgagcgacaccaaaaacatggagatcatcaattcaaccatagaaacacttgccccagacagtcccttcgatcataagaaaacagtgtctggattccagaagttggagaagctggacccgattgctgcagaccagcaggacaccgttgtcttcaaggttactgagggcaaattgctgcgtgatccattgtcgcatcccggagccgaacaaacaggaattcagaacaagactcaaatgcacccgctgatgtcgcagatgtccggaagcgtcaccgcatctatggccaccggcagcgcgacccgcaagggaattgtcgtactcatcgaccccttggccgcaaacggcactacagatatgcataccagtgtgccgagggttaagggtgggcagcgaaatattaccgacgactcgagagggcagcccttcattaagaaaatgcacttcacaattaggctgacagaaagcgcaatcacatacagagacattgtagtcaaaaaagaggatggatttactcagattgttctgagcacccgctctacggagaagaacgccctgaacacagaagtgatcaaagagatggtaaacgctttaaactccgccgctgccgatgactctaaactggtgcttttttccgccgctgggtccgttttctgctgtggcctggattttggctatttcgtaagacacctgcgaaacgataggaatacagcgtctctcgagatggtcgacaccattaagaatttcgtgaatacattcatacagtttaagaaaccaattgttgtatccgtcaatggacccgctatagggctgggagcaagcatactcccactgtgtgatctcgtctgggccaacgagaaggcctggttccagacaccatatactacatttggccaatcacctgatggctgttcttccataacatttcccaaaatgatgggaaaagcctcagccaatgaaatgcttattgctggcaggaagctaacggcacgagaggcctgcgccaagggcttagtgtcccaagtgttcttaactggcacatttacccaggaagtgatgattcaaatcaaggaactcgctagctataacgccattgttctggaggagtgtaaggcccttgtccgctgcaacattaaactcgaactggaacaggctaacgaacgcgagtgtgaagtgttaagaaaaatttggtcgtctgcacaaggcattgagtccatgttgaagtacgtcgagaataagatcgatgagttctag

SEQ ID NO: 19003 - DNA, 1626 bp, Artificial Sequence
  derived and/or modified sequence
atggcctcccaggagttcgaagtcgaagcaatcgtcgataagcgacaggacaaaaacggcaacacacagtacctagtccgttggaaaggttatgataaacaagacgacacctgggaaccggaacagcaccttatgaattgcgaaaaatgcgtccatgacttcaaccggcgccaaactgaaaaacaaaagaagcttacctggacaaccacatccagaatatttagtaataacgcacgccggcggacatctcggtcaactaaagcaaactactccaagaacagtccaaaaactccagtgaccgataagcaccatcggtccaagaattgcaaactttttgcggcctcaaaaaatgtgagaaggaaggccgcatcgaccctgagtgatacaaagaacatggagatcattaactcgaccatcgagacattggccccagacagccccttcgaccataagaaaaccgtcagtggtttccagaagctggagaagttggatcccattgctgctgaccagcaggatacagtggtctttaaggtgacggagggcaaactgcttagggatccactgtcccaccccggtgccgagcaaactgggattcagaataagacccagatgcacccactgatgagccagatgagcggatccgtgactgcatctatggctactggctctgctactcgaaaagggatcgttgtgcttatagatccactggctgccaatggcaccacagatatgcacacttcagttcctcgtgtcaaaggggggcagcggaacatcacagatgatagcaggggacagccttttatcaagaagatgcacttcaccatcagacttactgaaagcgcgataacctatcgcgacatcgtggtcaaaaaagaggatggtttcacacagatagtactttctacgcggagtacagagaagaatgccctgaacaccgaggtgatcaaggaaatggtcaatgcgttgaattccgctgccgctgacgactccaagttggtgctcttcagcgcagctggttccgttttctgctgcggtctcgattttggatactttgtgcggcacctaagaaacgacaggaacacggctagtcttgaaatggtcgacaccatcaagaatttcgtgaacactttcatccaattcaagaagcccatagtcgtgtctgtcaacgggcccgctatcggcttaggagcatccatcctccccctgtgtgatctcgtgtgggcaaatgagaaagcttggttccagacgccatatacaacctttggccaaagtcccgacgggtgttctagtataaccttcccgaaaatgatggggaaagcatcagcaaatgaaatgcttatcgccggcaggaaactgaccgctagagaagcctgcgccaagggcctcgtcagtcaggtttttttaaccgggacttttacacaggaggtgatgatccagatcaaggaactggctagctacaacgccattgtgctggaagaatgcaaagccctcgtccgctgcaatataaaacttgaactggaacaggctaacgagagagaatgcgaagttttacgcaagatatggagtagcgcccaaggtatcgagtcaatgttgaaatacgtggaaaataagatcgacgagttctag

SEQ ID NO: 19004 - DNA, 1626 bp, Artificial Sequence
  derived and/or modified sequence
atggccagccaggagttcgaggtggaggccatcgtggacaagcggcaggacaaaaacggaaacactcaataccttgtgagatggaaaggctacgacaagcaggatgatacgtgggaacccgaacagcacttgatgaactgtgaaaaatgtgtgcacgatttcaaccgaagacaaaccgagaaacagaagaaactcacttggactaccacctcgcgaatcttcagcaataatgcccggcgtagaacgtccaggtcaacaaaggccaattactcaaagaattcacccaagactccggtcacagataagcaccatcggtcaaagaactgcaaactattcgccgcaagtaagaacgttaggagaaaggctgcatctaccttgagtgacacaaagaatatggaaatcatcaacagcacaatcgaaacgttggctcccgactcgccatttgaccataaaaagacagtatccggattccagaaactggaaaaactggatcctatcgcggccgatcagcaggacaccgtagtatttaaagtgacggaggggaagttactccgcgaccctttaagccacccaggcgccgaacagacgggcatccagaacaaaacgcagatgcaccctctaatgagtcagatgtccggcagcgtcacagcgagcatggctacgggttccgcaaccaggaaaggcattgtggttctgatcgacccacttgcagctaatggcaccaccgacatgcacaccagcgtgccgagggtaaagggagggcaacggaacataacggacgattcccgcgggcagccttttataaaaaaaatgcacttcaccatcaggctcactgagagcgcaatcacgtaccgcgatatcgtggttaaaaaagaagatggcttcacccagatcgtcttgagcacccgatccacggagaaaaatgctctgaacactgaagtgattaaagagatggttaacgcccttaattctgccgctgcggatgatagtaaacttgtgctattctctgccgcaggcagcgtgttttgctgcggcctggatttcggctactttgtacgccacttgcggaacgatcgtaataccgctagtctggagatggtggatacgataaaaaactttgtgaacactttcattcagttcaaaaagcctattgtcgtgagtgtcaacggccctgcaattggtctaggcgccagtattcttccattatgcgatttagtctgggctaatgagaaagcatggtttcagacaccgtacacgaccttcggccagtcgccagacggatgttccagcataacattccctaagatgatgggaaaagcctccgctaatgaaatgctgatagctggtcgcaaactcaccgcgcgggaggcctgtgctaagggattggtttctcaggtgttcctgacaggaacgttcacacaggaggtcatgattcagattaaggaattagcttcctacaacgccattgtcctcgaagagtgcaaagcactggtgagatgcaatattaagctggagctggagcaggcaaatgagcgagagtgcgaagtccttagaaaaatttggagctccgcacaggggatagagagcatgctcaaatacgtggaaaataaaatcgacgaattctag

SEQ ID NO: 19005 - DNA, 1626 bp, Artificial Sequence
  derived and/or modified sequence
atggcgagtcaggagtttgaagtggaagccattgtggataagcggcaggacaagaacggtaatacacagtacttggttcgttggaaagggtatgacaaacaggacgatacctgggagccagaacaacatttaatgaactgtgaaaagtgtgtgcacgactttaaccgtagacaaaccgaaaagcaaaagaaattgacttggactaccacttcgcgaatattttcaaacaatgccagacggagaacttcaagatccactaaagcgaactactccaagaacagtcctaaaaccccagtaaccgacaagcaccacagaagcaagaattgtaaactcttcgccgcatcaaagaacgttcgccgtaaggccgcttccaccttgtcggacaccaagaacatggagattataaacagcaccatcgaaactctcgcccctgacagcccgttcgaccacaaaaagacagtctctggcttccaaaaactggagaagctcgatccaatcgctgccgaccaacaggacaccgtggtatttaaggtgacagaaggcaagttactgcgggatcctctgtctcatcctggtgccgaacaaactggtatccagaataaaacacagatgcaccctttgatgtcgcagatgtcaggcagcgtgactgcaagcatggccacaggatcggccactagaaaggggatcgtggtgcttattgaccctcttgccgcaaatgggaccaccgatatgcacacgtccgtcccccgtgtgaagggaggacaaaggaacataacagacgattctaggggtcagcctttcataaagaagatgcacttcaccatccgcctgaccgagtcggcgatcacttaccgcgacatcgtcgtcaagaaggaagacggtttcacccaaatagttctgtccactagatcaaccgaaaaaaacgccctcaatacagaggtgatcaaggagatggtcaacgccctgaactcggctgcagcagatgactctaagcttgtgctgttctccgctgccggatccgttttttgttgcggactggatttcggctactttgtgagacacctgaggaacgatcgaaataccgccagtctggagatggtggacacaataaagaacttcgttaataccttcattcaatttaaaaagcctatcgtggtgtccgtgaacggccctgcaatcggactcggcgcttctatcctgcccctgtgtgacctcgtttgggccaacgagaaggcgtggttccaaacaccctatactactttcggccagtctcccgatggttgcagttcaattacatttcctaagatgatggggaaagcaagtgctaatgagatgttaatcgcgggaagaaagcttaccgcacgggaggcctgtgccaagggtctggttagccaggtattcctgactggcaccttcactcaggaggtgatgattcagattaaggaactggcctcctacaacgccattgtgctggaggagtgcaaagcccttgtgcgctgcaatatcaagttagagcttgagcaggctaacgaacgggagtgcgaggtgctccggaagatctggagctcagcacaaggaatcgaatccatgctcaagtatgttgagaataaaatcgatgagttctag

SEQ ID NO: 19006 - DNA, 1954 bp, Artificial Sequence
  derived and/or modified sequence
gtaacaggcaggaagaaagctttctgtactacaccagagggttggggctgtggatttagctactctcacctgaggctactgagcaagctgtcatgcaccacgagacaaagcccaagctgtcccaccaggcagtaagtgtggagaggttcaggcacatggcatagctgctatttcgcacaattttcactacaccagtggtgaccaaatagaagaggttcatccatacacagaacctggtgaagagctggaggcagaaagaagtgtctatgtggagacgcaactgaaacaaaggtggcacagcaactgttccaatcccgtgtctttcctcatggcttcccaggagtttgaggttgaagctattgttgacaaaagacaggataaaaatgggaatacacagtatttggttcggtggaaaggttatgacaaacaggatgacacttgggaaccagagcagcacctcatgaactgtgaaaaatgtgtacatgattttaatagacgacagactgaaaaacagaaaaaactgacatggactacaaccagtagaattttttcaaacaatgccagaagaagaacttccagatctacaaaagcaaactattctaagaactctcctaaaactccagtgactgataaacaccacaggtccaaaaactgcaagttatttgctgccagcaagaacgttaggagaaaggcagcttcaactctctccgacacaaagaatatggagataataaattcaactattgagacccttgcacctgacagcccctttgaccacaagaaaactgtgagtggctttcagaaacttgagaaactggaccctattgcagcagatcagcaggacacggtggtcttcaaggtgacagaagggaaactcctccgggaccctttgtcacatcctggtgcagaacagactggaatacagaacaagactcagatgcacccactaatgtcgcagatgtctggctcagttactgcttctatggccacaggttcagctacccgaaagggtatagtggtattaatagacccattagcagccaatgggacaacagacatgcatacctcagttccaagagtgaaaggtgggcaaagaaatattactgatgacagcagaggccagccttttatcaagaagatgcacttcaccataaggctaacagaaagtgccatcacatacagagacattgtagtgaagaaagaggatggattcacccagatagtgctatcaactagatcgacagaaaaaaatgcactgaatacagaagtaattaaagaaatggttaatgctctgaatagcgctgctgcagatgacagcaagctcgtgctgttcagtgcagctggaagtgtcttttgctgcggtcttgattttgggtactttgtgaggcacttaaggaatgacagaaacacagcaagccttgaaatggtggacaccatcaagaactttgtgaatacttttattcaatttaaaaagcctattgttgtatcagtcaatggccctgccattggactaggtgcatccatcctgcctctttgtgatctcgtgtgggctaatgaaaaggcttggttccaaaccccttatacgacctttggacagagtccagatggctgttcttctattacattccccaaaatgatgggtaaagcatctgccaatgaaatgttaattgctgggcgaaagctgacagcacgggaggcatgcgccaaaggcctggtctctcaggtatttttgactggaactttcacccaagaggttatgattcaaattaaggagcttgcctcatacaatgcaattgtactggaagaatgtaaggccctcgttcgctgtaatattaagttggagttggaacaggccaatgagagagagtgtgaggtgctgaggaagatctggagctcagcccaagggatagaatccatgttaaagtatgttgaaaataaaattgatgagttttaa

SEQ ID NO: 19007 - DNA, 498 bp, Artificial Sequence
  derived and/or modified sequence
atgatacaggcgctagcaggattttttacttactttgtcatactggcagaaaatggctttagacccgtagaccttctgggaatcaggctccactgggaagacaaatacttgaatgatctagaggattcatacggccagcagtggacttatgaacagcgaaaggtcgtcgagtttacctgtcagaccgccttcttcgtcaccatcgtagtggtccagtgggccgacctcatcatatcgaaaacaagaaggaactcactttttcagcagggcatgagaaacaaagtgcttatttttggtatcctcgaagagacgcttttggcggcattcttatcctatacccctgggatggacgtcgcactgagaatgtaccctcttaaaatcacttggtggctgtgtgcaatcccatatagtatcttgatctttgtgtacgatgaaattcgaaagctgctgattaggcaacacccagacggatgggtggaaagagaaacatactattag

SEQ ID NO: 19008 - DNA, 498 bp, Artificial Sequence
  derived and/or modified sequence
atgatccaggccctggccggcttcttcacctacttcgtcatcctggctgaaaatggcttccggcctgtggacctgctgggcatccggctgcactgggaggacaagtacctgaatgacctggaggacagctatggccagcagtggacctatgagcagaggaaggtggtggagttcacctgccagacagccttctttgtgaccatcgtggtggtgcagtgggccgacctgatcatcagcaagaccaggaggaacagcctcttccagcagggcatgaggaacaaggtgctgatcttcggcatcctggaggagaccctgctggccgccttcctgagctacaccccaggcatggatgtggccctgaggatgtaccccctgaagatcacctggtggctgtgtgccatcccctacagcatcctgatctttgtgtatgatgagatcaggaagctgctgatccggcagcacccagatggctgggtggagcgggagacctactactag

SEQ ID NO: 19009 - DNA, 498 bp, Artificial Sequence
  derived and/or modified sequence
atgatccaggccctggccggcttcttcacctacttcgtgatcctggcagaaaacggatttcgacctgtcgacctgctggggatccgcttgcattgggaggacaaatacctcaacgacctggaagacagctacggacagcagtggacatatgaacaacgcaaggttgtggaattcacatgccagacagccttcttcgtgaccatcgtggtagtgcaatgggccgacctgatcattagcaaaactcggcggaacagtctgttccaacaaggtatgaggaacaaagtactgatttttggaattttagaagagacgcttctcgccgctttcttaagctacaccccagggatggatgtggccctgcgcatgtatcccctcaaaattacctggtggctatgtgccatcccttacagcatcctcatcttcgtgtatgatgagattagaaaattattaattcgacagcatcctgatgggtgggtggaaagggagacctattattag

SEQ ID NO: 19010 - DNA, 498 bp, Artificial Sequence
  derived and/or modified sequence
atgatccaggctctggctggatttttcacatattttgtgatcctggcggaaaacggctttagacccgtcgacttactaggcatacgtctgcattgggaggataaatacctcaacgacctcgaggacagttatggccagcagtggacctatgaacaacgcaaagtcgtggagtttacctgccaaaccgctttttttgtgaccatcgtggtggttcagtgggcggatcttattatctccaagacaagaagaaactccctcttccagcaggggatgcggaataaagtgttgattttcggaatcttggaggaaactcttctggccgcattcctctcatatacccccggtatggacgtcgccctgagaatgtaccccctaaagattacctggtggctttgtgcgattccttacagtatacttatattcgtgtacgatgaaatccgcaagctgctaattaggcagcacccggatgggtgggtagagagagagacttactactag

SEQ ID NO: 19011 - DNA, 886 bp, Artificial Sequence
  derived and/or modified sequence
caccagcccagccagaagcaagtcccagcccccagccctcccctggcctaccttttggggcccttctctgaaccaggctcccctgtcctgcaactctgtcattcacagggatgatccaggctctggctggattctttacctactttgtaatcctggctgagaatggttttaggcctgttgatctgctgggcatccgcctccactgggaagataaatacttgaatgacctggaggacagctacggacagcagtggacctatgagcaacgaaaagttgtggagttcacatgccaaacggccttttttgtcaccatcgtggttgtgcagtgggcggatctcatcatctccaagactcgccgcaactcacttttccagcagggcatgagaaacaaagtcttaatatttgggatcctggaggagacactcttggctgcatttctgtcctacactccaggcatggacgtggccctgcgaatgtacccactcaagataacctggtggctctgtgccattccctacagtattctcatcttcgtctatgatgaaatcagaaaactcctcatccgtcagcacccggatggctgggtggaaagggagacgtactactaaactcagcagatgaagagcttcatgtgacacaggggtgttgtgagagctgggatggggccagagattataagtttgacacaacatctgagacactaggatgaattatcttggatgagaaagatgggcaatcctgggctggcttgagggaatcatgggcagaggatgaggtgggctgaagggaagcccagcctgcatctagctggagccccgcagggaggggcatggtcctgctgaatcccgtagccagtctagacagtaaatgtctggaaaagccctca

SEQ ID NO: 19012 - DNA, 498 bp, Artificial Sequence
  derived and/or modified sequence
atgatccaggccctggccggcttcttcacctacttcgtgatcctggccgagaacggcttcagacccgtggacctgctgggcatcagactgcactgggaggacaagtacctgaacgacctggaggacagctacggccagcagtggacctacgagcagagaaaggtggtggagttcacctgccagaccgccttcttcgtgaccatcgtggtggtgcagtgggccgacctgatcatcagcaagaccagaagaaacagcctgttccagcagggcatgagaaacaaggtgctgatcttcggcatcctggaggagaccctgctggccgccttcctgagctacacccccggcatggacgtggccctgagaatgtaccccctgaagatcacctggtggctgtgcgccatcccctacagcatcctgatcttcgtgtacgacgagatcagaaagctgctgatcagacagcaccccgacggctgggtggagagagagacctactactag

SEQ ID NO: 19013 - protein, 707 aa, Artificial Sequence
  derived and/or modified sequence
MSGSRQAGSGSAGTSPGSSAASSVTSASSSLSSSPSPPSVAVSAAALVSGGVAQAAGSGGLGGPVRPVLVAPAVSGSGGGAVSTGLSRHSCAARPSAGVGGSSSSLGSGSRKRPLLAPLCNGLINSYEDKSNDFVCPICFDMIEEAYMTKCGHSFCYKCIHQSLEDNNRCPKCNYVVDNIDHLYPNFLVNELILKQKQRFEEKRFKLDHSNGHRWQIFQDWLGTDQDNLDLANVNLMLELLVQKKKQLEAESHAAQLQILMEFLKVARRNKREEMSGLYSPVSEDSTVPQFEAPSPSHSSIIDSTEYSQPPGFSGSSQTKKQPWYNSTLASRRKRLTAHFEDLEQCYFSTRMSRISDDSRTASQLDEFQECLSKFTRYNSVRPLATLSYASDLYNGSSIVSSIEFDRDCDYFAIAGVTKKIKVYEYDTVIQDAVDIHYPENEMTCNSKISCISWSSYHKNLLASSDYEGTVILWDGFTGQRSKVYQEHEKRCWSVDFNLMDPKLLASGSDDAKVKLWSTNLDNSVASIEAKANVCCVKFSPSSRYHLAFGCADHCVHYYDLRNTKQPIMVFKGHRKAVSYAKFVSGEEIVSASTDSQLKLWNVGKPYCLRSFKGHINEKNFVGLASNGDYIACGSENNSLYLYYKGLSKTLLTFKFDTVKSVLDKDRKEDDTNEFVSAVCWRALPDGESNVLIAANSQGTIKVLELV

SEQ ID NO: 19014 - DNA, 2124 bp, Artificial Sequence
  derived and/or modified sequence
atgagtggctccagacaggcagggtccgggagcgctggaacgtcaccaggcagcagcgcagcctctagtgtgacaagcgcatcctccagcttaagctctagtccttccccaccatctgtggctgtaagcgccgcagctttagtctccggaggggtagctcaagctgccggtagtggagggctcggcggccccgtgcgcccagtattagtggctccggccgtgtccggatccggagggggtgctgttagtacagggctaagtaggcattcttgcgcggccagacccagcgctggagtcggggggtcttcaagttccttgggatcaggcagtcgcaagcgtcctctcctggctcccttatgtaacgggttaatcaactcgtacgaagacaagtcgaatgactttgtgtgcccgatttgtttcgatatgattgaggaagcctatatgacaaaatgtggtcacagcttttgttacaagtgtatccaccagtcattggaagataataatagatgccctaagtgtaattatgtggttgacaacatcgaccacctgtatcccaattttctcgtaaacgagttgattctgaaacagaagcagcgcttcgaggagaaaaggtttaaactcgatcactctaatggccaccgctggcagatattccaggactggttagggacagaccaggacaacttggacctggctaacgtcaatctaatgctggaactgctggtgcaaaaaaagaaacagttggaagccgagtcacacgccgcccaattgcaaattctaatggaatttctcaaagtggcacgaaggaataaacgggaggagatgtccgggctatatagccctgtgtcggaggacagtacagtcccgcagttcgaggcaccctccccctcacactcttctatcattgactctactgaatattctcaaccccccggtttcagcggaagctcacagaccaagaaacagccctggtataactccactctggcttcccgtcgaaaacggctgacagcccacttcgaggaccttgagcagtgctatttcagtacccgcatgtcgcgtattagtgacgactcacgaactgcatcacaattagacgaattccaggaatgcctatccaaattcaccagatacaactcagtccgacctcttgctaccctctcctatgcgagcgatctgtataatggcagtagcatcgtatcctctatcgagtttgaccgcgattgcgattacttcgcaattgcgggggtgaccaaaaagattaaggtgtatgagtacgacacagtcatccaggacgccgttgacatccactaccctgagaacgaaatgacttgcaatagcaaaataagttgcatttcttggtctagttatcataagaacctccttgcgtccagcgattacgaggggacagtcattctgtgggacggctttacgggacagagatctaaggtttatcaagaacacgagaaacgatgttggtcggtggactttaatctcatggatcctaagctcctcgcgagtggctccgatgacgccaaggtcaagctgtggtccaccaaccttgacaattcagtcgcttcaatcgaagccaaagccaatgtgtgctgcgtgaaattctctccatccagtcggtaccacttagcctttggttgtgccgatcattgtgtccactattatgatctgagaaataccaaacaaccgatcatggtttttaagggtcacagaaaggcagtctcatatgctaaattcgtgagcggagaggaaatcgtcagcgccagcactgacagccagttgaagctgtggaacgtgggcaagccgtattgcttgaggtctttcaaaggccatataaatgaaaaaaattttgtcggactagcttcaaatggtgattatatcgcatgtggaagcgagaacaattctctctatctgtattacaaagggctctcgaaaacacttctgacctttaagttcgacaccgtcaaatccgtcctggacaaagatcgcaaagaagatgacaccaacgagtttgttagcgccgtctgttggcgagctctccccgacggggaatctaacgtcctcatagcggcgaactcacagggaactattaaagttttagaacttgtctag

SEQ ID NO: 19015 - DNA, 2124 bp, Artificial Sequence
  derived and/or modified sequence
atgagcggcagccggcaggccggcagcggcagcgctggcaccagccctggcagcagcgctgccagctctgtgaccagcgccagcagcagcctgagcagcagccccagccccccatctgtggccgtgtctgctgctgccctggtgtctggaggagtggcccaggccgccggcagcggcggcctgggcggccctgtgcggcctgtgctggtggccccagctgtgtctggcagcggcggcggcgctgtgtccacaggcctgagccgccacagctgtgccgcccggcccagcgctggggtgggcggcagcagcagcagcctgggcagcggcagcaggaagaggcccctgctggcccccctgtgcaatggcctcatcaacagctatgaggacaagagcaatgactttgtgtgccccatctgctttgacatgattgaggaggcctacatgaccaagtgtggccacagcttctgctacaagtgcatccaccagagcctggaggacaacaaccgctgccccaagtgcaactacgtggtggacaacatcgaccacctgtaccccaacttcctggtgaatgagctgatcctgaagcagaagcagagatttgaggagaagcgcttcaagctggaccacagcaatggccaccgctggcagatcttccaggactggctgggcacagaccaggacaacctggacctggccaacgtgaacctgatgctggagctgctggtgcagaagaagaagcagctggaggccgagagccacgccgcccagctgcagatcctgatggagttcctgaaggtggcccggaggaacaagcgggaggagatgagcggcctgtacagccctgtgtctgaggacagcacagtgccccagtttgaggcccccagccccagccacagcagcatcatcgacagcacagagtacagccagcccccaggcttcagcggcagcagccagaccaagaagcagccctggtacaacagcaccctggccagcaggaggaagaggctgacagcccactttgaggacctggagcagtgctacttcagcaccaggatgagccgcatcagtgatgacagcaggacagccagccagctggatgagttccaggagtgcctgagcaagttcacccgctacaacagcgtgcggcccctggccaccctgtcctatgccagtgacctgtacaacggcagcagcatcgtgagcagcattgaatttgaccgggactgtgactactttgccatcgccggcgtgaccaagaagatcaaggtgtatgaatatgacaccgtcatccaggatgctgtggacatccactacccagaaaatgagatgacctgcaacagcaagatcagctgcatctcctggagcagctaccacaagaacctgctggccagcagtgactatgagggcaccgtcatcctgtgggatggcttcaccggccagaggagcaaggtgtaccaggagcacgagaagcgctgctggagcgtggacttcaacctgatggaccccaagctgctggccagcggcagtgatgatgccaaggtgaagctgtggagcaccaacctggacaacagcgtggccagcattgaggccaaggccaacgtgtgctgcgtgaagttcagccccagcagccgctaccacctggccttcggctgtgccgaccactgtgtgcactactatgacctgaggaacaccaagcagcccatcatggtgttcaagggccacaggaaggctgtgtcctatgccaagtttgtgtctggagaggagatcgtgtctgccagcacagacagccagctgaagctgtggaatgtgggcaagccctactgcctgcgctccttcaagggccacatcaatgagaagaactttgtgggcctggccagcaatggagactacatcgcctgtggcagcgagaacaacagcctgtacctgtactacaagggcctgagcaagaccctgctgaccttcaagtttgacacagtgaagtctgtgctggacaaggacagaaaagaagatgacaccaatgaatttgtgtctgctgtgtgctggagggccctgcctgatggagagagcaatgtgctgattgctgccaacagccagggcaccatcaaggtgctggagctggtgtag

SEQ ID NO: 19016 - DNA, 2124 bp, Artificial Sequence
  derived and/or modified sequence
atgagcggcagccggcaggccggcagcggcagcgccggcaccagcccagggtcctctgccgcctccagcgtgacctctgcgagtagttcattgagttcctcaccaagcccaccaagcgtcgctgtgtccgccgcagctcttgtgtccggtggcgtggcccaagctgctggctccgggggtctgggggggccagtgcgtccagtgctggtcgcccctgccgtttccgggagcggcggaggtgccgtgagcactggcctatccagacacagctgcgcagccaggccttccgccggtgtcgggggttcttcatcatcactgggctccggatcacgtaaacgacctcttctggcacccctgtgtaacggcctgattaacagctacgaggataagagtaacgattttgtgtgtcctatctgcttcgatatgatcgaggaagcatacatgacgaaatgcggccattctttctgctacaagtgcatccatcaatccctggaagacaacaatcgctgtcccaagtgtaattatgtagtcgataacatcgaccacctgtatccaaactttctggtgaacgaattaattctgaaacagaagcagagatttgaggagaaacgctttaaacttgaccatagcaacggccaccgttggcagatttttcaggattggctgggtacagatcaggacaatctggacctcgctaacgtcaacctcatgttggaactccttgtccaaaaaaagaagcagctcgaagccgagagccatgcagctcagctgcagatcctgatggaatttctcaaggtggcccgccgtaacaagcgggaggagatgtcggggctgtattcacccgttagcgaagatagtaccgtgccccaatttgaggcaccttccccatctcactcaagtatcattgactctacagagtacagccagccacctggattctccggaagcagtcaaacaaaaaagcaaccgtggtacaactccacccttgcttcacggcggaagagactgacagcacactttgaagacctggagcagtgctatttcagtacgcgcatgtcacgtatcagcgatgactcacgcaccgccagtcaattagacgagtttcaggagtgtctatctaagttcacacgctataactccgtccggccgttggctaccctcagttatgcctctgacctgtacaatggctcttccatagtgagcagtattgagttcgaccgtgactgtgactattttgcaattgcgggtgtaacgaagaaaatcaaagtgtacgagtatgataccgtgattcaggacgccgtcgacatacattatcccgagaacgaaatgacttgcaattcaaagatcagctgcatctcgtggagcagttaccacaaaaacctgctcgcctccagcgattacgagggcactgtgattctttgggacggctttactgggcagcggagcaaggtctatcaggaacatgagaaacgctgttggtctgttgactttaacctcatggatcccaaactgctcgcgtctggcagcgacgatgcaaaagtgaagctgtggtctacaaacttagataactctgtcgcgtccattgaggcaaaagctaatgtgtgttgcgtgaaattcagtccatcttctagataccacctcgcattcggttgcgcggatcactgtgtacactattatgacttgaggaacaccaaacagcctatcatggtgtttaagggccataggaaggcagtcagttatgccaaattcgtaagcggagaggagatcgtctctgcgtctaccgattctcagcttaaattgtggaacgtgggcaagccatattgcttgagaagtttcaagggtcatatcaatgagaaaaatttcgtgggactggctagtaatggtgactacattgcatgcgggtctgaaaataattccctatatctgtattacaagggcttaagcaagactctgttaacctttaaattcgatacggtcaaatctgtgcttgacaaagaccgaaaggaggacgacaccaacgaattcgtctcggcagtgtgttggagggcgcttccagatggggagagtaatgtactgattgcggccaattcccaaggcaccattaaggtgctcgagctcgtctag

SEQ ID NO: 19017 - DNA, 2124 bp, Artificial Sequence
  derived and/or modified sequence
atgtcaggctccaggcaggctggctcaggctcagcaggaactagtccaggaagcagtgctgcgtcatcggtcacatctgcatcctcaagcctttcaagctcaccaagtcccccttcggtggcggtgtccgccgcagcccttgtctccgggggtgttgcacaagccgctggcagtggcggtctgggcggacccgtgcggcctgtcctggtcgctccggctgtttccgggtctggcggtggcgcagtttccacagggctgagcaggcatagctgtgcagctcgcccttcagcgggagttggaggcagctcatcctcactaggaagtgggtcccgcaaacggccattactcgccccactgtgcaacgggctcatcaactcgtacgaagacaagagcaacgattttgtgtgtcccatttgctttgatatgattgaggaagcctatatgacgaaatgcggtcactcattttgctacaaatgcatccatcagtcactcgaagacaataacaggtgccccaagtgcaactatgtagtggataacatagaccacttgtaccctaattttcttgtgaacgaactgatccttaagcagaagcaacgctttgaggagaaaagattcaagctagaccattcgaacggacacaggtggcaaatttttcaggactggctggggactgaccaggacaacctggacctggccaatgtcaatctgatgttagagctgttagtccagaagaagaaacagttggaggctgaatcccacgctgcacagctgcaaatattgatggagttcttaaaagtggcccgaaggaataagcgcgaggagatgtcaggtctgtactctcctgtaagtgaagatagcacggttccacaattcgaagcccctagcccctctcatagctcaatcatagatagcactgagtatagtcagcccccaggcttttcgggctctagccagacaaagaaacaaccctggtacaactccaccctggcctctcgtcggaagcgccttacagctcattttgaagacctcgaacagtgctacttcagcactaggatgtcaaggatcagcgacgatagccgaaccgcgtcacaactggacgaattccaagaatgtttaagcaaatttacccgctataacagtgtgcgcccactggctaccttgtcttatgcatcagacctatataacggcagtagtatcgtaagctctattgaatttgatcgcgattgtgattatttcgccatcgcgggagttacaaagaaaataaaggtttatgaatatgatacagtaattcaggatgcagtcgacatccactatcctgaaaatgaaatgacatgtaactccaagatttcctgcatttcctggtctagttaccacaaaaatctgctcgcttcctcagactacgagggaaccgtgatactctgggatgggtttacaggccaacgctcaaaagtctatcaggaacacgaaaaacgatgctggagcgtggacttcaatcttatggatcccaaactacttgcaagcggatcagacgacgccaaggtgaaactgtggtcaacaaacctcgacaactctgtggccagtattgaggccaaggccaacgtttgttgcgtgaaattttcgccctcgtctaggtaccatctggcattcgggtgtgccgatcactgcgtgcactactatgacctcaggaatactaaacagcccatcatggtgtttaagggacaccggaaagctgtcagctacgcaaagttcgtgtctggagaagagattgtttccgcctcaacagactcccagttaaaactgtggaatgtgggcaaaccatactgcctccggagtttcaaagggcatatcaatgagaagaactttgtgggcctcgcaagtaacggggactatatcgcctgcggaagtgagaacaacagcctttacctgtattacaaaggcctgtcaaagacactgctaacatttaagtttgatactgtgaaatccgttctggacaaagatcggaaggaggacgacactaatgaatttgtatctgctgtgtgttggagggcattgccagacggggaaagtaatgtgcttatcgcggctaactcacaaggcacgattaaggtgctggaattggtgtag

SEQ ID NO: 19018 - DNA, 2124 bp, Artificial Sequence
  derived and/or modified sequence
atgtctggtagccgccaggccgggtcgggctccgctgggacaagccccgggtcctcggcggcctcctcggtgacttccgcctcctcgtctttatcctcttccccgtcgccgccttccgtggcggtttcggcggcagcgctggtgtccggcggggtggcccaggccgccggctcgggcggcctcgggggcccggtgcggcctgtgttggtggcgcccgccgtatcgggtagcggcggcggggcggtgtccacgggcctgtcccggcacagctgcgcggccaggcccagcgccggcgtaggaggcagcagctccagcctaggcagcggcagcaggaagcgacctctcctcgcccccctctgcaacgggctcatcaactcctacgaggacaaaagcaacgacttcgtatgccccatctgctttgatatgattgaagaagcatacatgacaaaatgtggccacagcttttgctacaagtgtattcatcagagtttggaggacaataatagatgtcccaagtgtaactatgttgtggacaatattgaccatctgtatcctaatttcttggtgaatgaactcattcttaaacagaagcaaagatttgaggaaaagaggttcaaattggaccactcaaatggccacaggtggcagatatttcaagattggttgggaactgaccaagataaccttgatttggccaatgtcaatcttatgttggagttactagtgcagaagaagaaacaactggaagcagaatcacatgcagcccaactacagattcttatggaattcctcaaggttgcaagaagaaataagagagaggaaatgagtggcttatactctcctgtcagtgaggatagcacagtgcctcaatttgaagctccttctccatcacacagtagtattattgattccacagaatacagccaacctccaggtttcagtggcagttctcagacaaagaaacagccttggtataatagcacgttagcatcaagacgaaaacgacttactgctcattttgaagacttggagcagtgttacttttctacaaggatgtctcgtatctcagatgacagtcgaactgcaagccagttggatgaatttcaggaatgcttgtccaagtttactcgatataattcagtacgacctttagccacattgtcatatgctagtgatctctataatggttccagtatagtctctagtattgaatttgaccgggattgtgactattttgcgattgctggagttacaaagaagattaaagtctatgaatatgacactgtcatccaggatgcagtggatattcattaccctgagaatgaaatgacctgcaattcgaaaatcagctgtatcagttggagtagttaccataagaacctgttagctagcagtgattatgaaggcactgttattttatgggatggattcacaggacagaggtcaaaggtctatcaggagcatgagaagaggtgttggagtgttgactttaatttgatggatcctaaactcttggcttcaggttctgatgatgcaaaagtgaagctgtggtctaccaatctagacaactcagtggcaagcattgaggcaaaggctaatgtgtgctgtgttaaattcagcccctcttccagataccatttggctttcggctgtgcagatcactgtgtccactactatgatcttcgtaacactaaacagccaatcatggtattcaaaggacaccgtaaagcagtctcttatgcaaagtttgtgagtggtgaggaaattgtctctgcctcaacagacagtcagctaaaactgtggaatgtagggaaaccatactgcctacgttccttcaagggtcatatcaatgaaaaaaactttgtaggcctggcttccaatggagattatatagcttgtggaagtgaaaataactctctctacctgtactataaaggactttctaagactttgctaacttttaagtttgatacagtcaaaagtgttctcgacaaagaccgaaaagaagatgatacaaatgaatttgttagtgctgtgtgctggagggcactaccagatggggagtccaatgtgctgattgctgctaacagtcagggtacaattaaggtgctagaattggtatga

SEQ ID NO: 19019 - DNA, 2124 bp, Artificial Sequence
  derived and/or modified sequence
atgagcggcagcagacaggccggcagcggcagcgccggcaccagccccggcagcagcgccgccagcagcgtgaccagcgccagcagcagcctgagcagcagccccagcccccccagcgtggccgtgagcgccgccgccctggtgagcggcggcgtggcccaggccgccggcagcggcggcctgggcggccccgtgagacccgtgctggtggcccccgccgtgagcggcagcggcggcggcgccgtgagcaccggcctgagcagacacagctgcgccgccagacccagcgccggcgtgggcggcagcagcagcagcctgggcagcggcagcagaaagagacccctgctggcccccctgtgcaacggcctgatcaacagctacgaggacaagagcaacgacttcgtgtgccccatctgcttcgacatgatcgaggaggcctacatgaccaagtgcggccacagcttctgctacaagtgcatccaccagagcctggaggacaacaacagatgccccaagtgcaactacgtggtggacaacatcgaccacctgtaccccaacttcctggtgaacgagctgatcctgaagcagaagcagagattcgaggagaagagattcaagctggaccacagcaacggccacagatggcagatcttccaggactggctgggcaccgaccaggacaacctggacctggccaacgtgaacctgatgctggagctgctggtgcagaagaagaagcagctggaggccgagagccacgccgcccagctgcagatcctgatggagttcctgaaggtggccagaagaaacaagagagaggagatgagcggcctgtacagccccgtgagcgaggacagcaccgtgccccagttcgaggcccccagccccagccacagcagcatcatcgacagcaccgagtacagccagccccccggcttcagcggcagcagccagaccaagaagcagccctggtacaacagcaccctggccagcagaagaaagagactgaccgcccacttcgaggacctggagcagtgctacttcagcaccagaatgagcagaatcagcgacgacagcagaaccgccagccagctggacgagttccaggagtgcctgagcaagttcaccagatacaacagcgtgagacccctggccaccctgagctacgccagcgacctgtacaacggcagcagcatcgtgagcagcatcgagttcgacagagactgcgactacttcgccatcgccggcgtgaccaagaagatcaaggtgtacgagtacgacaccgtgatccaggacgccgtggacatccactaccccgagaacgagatgacctgcaacagcaagatcagctgcatcagctggagcagctaccacaagaacctgctggccagcagcgactacgagggcaccgtgatcctgtgggacggcttcaccggccagagaagcaaggtgtaccaggagcacgagaagagatgctggagcgtggacttcaacctgatggaccccaagctgctggccagcggcagcgacgacgccaaggtgaagctgtggagcaccaacctggacaacagcgtggccagcatcgaggccaaggccaacgtgtgctgcgtgaagttcagccccagcagcagataccacctggccttcggctgcgccgaccactgcgtgcactactacgacctgagaaacaccaagcagcccatcatggtgttcaagggccacagaaaggccgtgagctacgccaagttcgtgagcggcgaggagatcgtgagcgccagcaccgacagccagctgaagctgtggaacgtgggcaagccctactgcctgagaagcttcaagggccacatcaacgagaagaacttcgtgggcctggccagcaacggcgactacatcgcctgcggcagcgagaacaacagcctgtacctgtactacaagggcctgagcaagaccctgctgaccttcaagttcgacaccgtgaagagcgtgctggacaaggacagaaaggaggacgacaccaacgagttcgtgagcgccgtgtgctggagagccctgcccgacggcgagagcaacgtgctgatcgccgccaacagccagggcaccatcaaggtgctggagctggtgtag

SEQ ID NO: 19020 - protein, 108 aa, Artificial Sequence
  derived and/or modified sequence
MVTLLPIEGQEIHFFEILESECVLYTGWIERASGSSIYPEAKARLPLEALLGSNKEPMLPKETVLSLKRYNLGSSAMKRNVPGHVLQRPSYLTRIQVTLLCNSSAEAL

SEQ ID NO: 19021 - DNA, 327 bp, Artificial Sequence
  derived and/or modified sequence
atggttaccttgctgccaatcgaaggccaagagattcactttttcgagatcttagaatcggaatgtgtgctgtatacaggatggattgagcgcgcaagcggctcctccatctatccggaagcaaaggcccgccttccgctcgaagctctccttggctcaaataaagaacccatgttacccaaagaaaccgtgctgagcctgaagagatataacctcggatctagtgctatgaaacgaaatgtccccggtcacgtgctgcagcgccccagctacctgacgcgcattcaggtgaccctgctttgtaacagttccgctgaagccctatag

SEQ ID NO: 19022 - DNA, 327 bp, Artificial Sequence
  derived and/or modified sequence
atggtgaccctgctgcccatcgagggccaggagatccacttctttgagatcctggagagtgaatgtgtgctgtacacaggctggattgagcgggccagcggcagcagcatctacccagaggccaaggcccggctgcccctggaggccctgctgggcagcaacaaggagcccatgctgcccaaggagaccgtgctgagcctgaagcgctacaacctgggcagcagcgccatgaagagaaatgtgcccggccacgtgctgcagaggcccagctacctgacccgcatccaggtgaccctgctgtgcaacagcagcgctgaggccctgtag

SEQ ID NO: 19023 - DNA, 327 bp, Artificial Sequence
  derived and/or modified sequence
atggtgaccctgctgcccatcgagggccaggagatccacttcttcgagatcctggagtcggagtgcgtgttgtacacgggttggatcgagagagctagtggctctagtatttacccagaagcgaaggccagactgccattggaagctttgctcggctccaataaggaaccaatgctgccaaaggagacagtgttgagtctgaaacggtacaacttgggtagcagtgctatgaagagaaatgtgcctgggcatgtcctgcagcggcccagctacctgacaaggatccaggtgacccttctgtgtaactctagcgccgaagcactgtag

SEQ ID NO: 19024 - DNA, 327 bp, Artificial Sequence
  derived and/or modified sequence
atggtcacattactgccaatagagggtcaggaaatccatttctttgagatactagagtcagaatgcgtgctatacaccggctggatcgagcgggcatccggctcctctatttaccctgaggctaaagcccgactccccctggaggcactcctggggagcaacaaagagcctatgcttcctaaagagaccgttttgtcactcaagaggtataatttgggctccagcgccatgaagcgcaatgtgcccggacatgtcctgcagcgcccttcctacctcacaaggatacaagtcacactcttatgcaatagctctgctgaggcgctgtag

SEQ ID NO: 19025 - DNA, 862 bp, Artificial Sequence
  derived and/or modified sequence
atgatgttgtgtttggagaaaagagagaagagaattgaataagtacatgaccccttggaagctgttttcagttgaggattttggtgagtagccacttgaaatcaagggaaattccatgaatagcaggagctgggaagaaaggaagaggaggaaggatcccaccacttttttcttcccatctaacaccgtgcttatgcaaagcatagtccatatgagatctgccttataaaaacttgctgaataaagcgaatggaagttaaattttggactttcttccataatagcttcaaattatggtgactttgttgcctatagagggccaggaaatacatttctttgagatcctagaatctgagtgtgtgctctacacaggatggatagagcgagcctctggcagttccatttatccagaggcaaaagcacgcctgccactggaggcgctcttgggttccaacaaagaacctatgttgcctaaggaaacagtgctttctcttaaaaggtacaatcttggctcctctgccatgaagcggaatgttcctggacatgtgcttcagagaccttcctatttaaccaggatacaagttacattgttatgcaattcctctgctgaggccctgtaaaaggagtgagttaggacagatgcagcaagatattaggacagatttcgcccattattcaggctgcacaacacagaaggaaacttgatttcaataagacccaattcttaacagtcttttctacccacttttacccataacttttccaaatttggttcaaattgtgcagagaaacaataaaatttttaaaaaggataaactggctagttaaaagtaaatggcatttaattaaaacaaatcttgca

SEQ ID NO: 19026 - DNA, 327 bp, Artificial Sequence
  derived and/or modified sequence
atggtgaccctgctgcccatcgagggccaggagatccacttcttcgagatcctggagagcgagtgcgtgctgtacaccggctggatcgagagagccagcggcagcagcatctaccccgaggccaaggccagactgcccctggaggccctgctgggcagcaacaaggagcccatgctgcccaaggagaccgtgctgagcctgaagagatacaacctgggcagcagcgccatgaagagaaacgtgcccggccacgtgctgcagagacccagctacctgaccagaatccaggtgaccctgctgtgcaacagcagcgccgaggccctgtag

SEQ ID NO: 19027 - protein, 702 aa, Artificial Sequence
  derived and/or modified sequence
MLLLLGLCLGLSLCVGSQEEAQSWGHSSEQDGLRVPRQVRLLQRLKTKPLMTEFSVKSTIISRYAFTTVSCRMLNRASEDQDIEFQMQIPAAAFITNFTMLIGDKVYQGEITEREKKSGDRVKEKRNKTTEENGEKGTEIFRASAVIPSKDKAAFFLSYEELLQRRLGKYEHSISVRPQQLSGRLSVDVNILESAGIASLEVLPLHNSRQRGSGRGEDDSGPPPSTVINQNETFANIIFKPTVVQQARIAQNGILGDFIIRYDVNREQSIGDIQVLNGYFVHYFAPKDLPPLPKNVVFVLDSSASMVGTKLRQTKDALFTILHDLRPQDRFSIIGFSNRIKVWKDHLISVTPDSIRDGKVYIHHMSPTGGTDINGALQRAIRLLNKYVAHSGIGDRSVSLIVFLTDGKPTVGETHTLKILNNTREAARGQVCIFTIGIGNDVDFRLLEKLSLENCGLTRRVHEEEDAGSQLIGFYDEIRTPLLSDIRIDYPPSSVVQATKTLFPNYFNGSEIIIAGKLVDRKLDHLHVEVTASNSKKFIILKTDVPVRPQKAGKDVTGSPRPGGDGEGDTNHIERLWSYLTTKELLSSWLQSDDEPEKERLRQRAQALAVSYRFLTPFTSMKLRGPVPRMDGLEEAHGMSAAMGPEPVVQSVRGAGTQPGPLLKKPYQPRIKISKTSVRGFRREEQIFSNVMKFPFASILEL

SEQ ID NO: 19028 - protein, 695 aa, Artificial Sequence
  derived and/or modified sequence
MLLLLGLCLGLSLCVGSQEEAQSWGHSSEQDGLRVPRQVRLLQRLKTKPLMTEFSVKSTIISRYAFTTVSCRMLNRASEDQDIEFQMQIPAAAFITNFTMLIGDKVYQGEITEREKKSGDRVKEKRNKTTEENGEKGTEIFRASAVIPSKDKAAFFLSYEELLQRRLGKYEHSISVRPQQLSGRLSVDVNILESAGIASLEVLPLHNSRQRGSGRGEDDSGPPPSTVINQNETFANIIFKPTVVQQARIAQNGILGDFIIRYDVNREQSIGDIQVLNGYFVHYFAPKDLPPLPKNVVFVLDSSASMVGTKLRQTKDALFTILHDLRPQDRFSIIGFSNRIKVWKDHLISVTPDSIRDGKVYIHHMSPTGGTDINGALQRAIRLLNKYVAHSGIGDRSVSLIVFLTDGKPTVGETHTLKILNNTREAARGQVCIFTIGIGNDVDFRLLEKLSLENCGLTRRVHEEEDAGSQLIGFYDEIRTPLLSDIRIDYPPSSVVQATKTLFPNYFNGSEIIIAGKLVDRKLDHLHVEVTASNSKKFIILKTDVPVRPQKAGKDVTGSPRPGGDGEGDTNHIERLWSYLTTKELLSSWLQSDDEPEKERLRQRAQALAVSYRFLTPFTSMKLRGPVPRMDGLEEAHGMSAAMGPEPVVQSVRGAGTQPGPLLKKPPNSVKKKQNKTKKRHGRDGVFPLHHLGIR

SEQ ID NO: 19029 - DNA, 2109 bp, Artificial Sequence
  derived and/or modified sequence
atgctactgctgctgggattatgcctcggcctctccctgtgtgtgggctcccaggaggaagcacaatcctggggtcactcatctgaacaggatggactgcgtgtgcccaggcaggtgcgtttgctgcagcggctgaagaccaagccactcatgaccgagttttctgtgaagtccacgatcatttcaagatatgcttttaccactgtgtcttgccgcatgttgaatagagcctccgaggatcaggacatagagttccaaatgcagatccctgctgccgccttcatcacaaacttcacaatgctgatcggagataaggtgtaccaaggggaaatcacagagagagaaaagaagtccggagatcgggtgaaggagaaacgcaataaaaccacggaagagaatggcgaaaagggtactgagatcttcagggcatctgctgtcatcccatccaaggacaaggctgcctttttcctctcttacgaggagctcctccagaggcgactgggaaaatatgagcactcaatatcagtacgcccgcaacaattgtccggaagactctccgttgatgttaacatcttagaatcagctggcattgctagcctcgaagtgctccctctgcataactcacgccaacgcggctctgggagaggcgaggatgatagcgggccacccccatccaccgtaataaaccagaacgaaacgttcgcgaatatcatctttaaaccaacggtcgttcagcaggcaagaattgctcagaatggaatactgggggattttataatcagatatgacgtaaatcgggagcagagtatcggtgatattcaagtgttgaatggatatttcgtccactactttgccccgaaggatttaccaccgctgcccaagaacgtggtcttcgtgttagactcatctgcctctatggttggaaccaaactgcggcagaccaaggatgcgttgttcacaatcctccacgacctgcgacctcaggatcggttctccatcattgggttttctaaccgaataaaggtttggaaagatcacctgatctctgtcacaccggattctatccgcgacgggaaggtttacatccatcatatgtctcccaccggcgggacggacatcaacggggcgcttcaacgtgccatcagacttcttaataaatatgtcgctcatagtggcatcggggaccgaagcgtgtcccttatcgttttcttgactgacgggaagcccaccgttggcgagacacataccctgaagatactcaacaacactagggaggcagctcgaggccaggtgtgtatctttacaattgggattggaaacgatgtggactttcgcctgctcgagaagctgagcctggagaattgtggtttaactagacgggtccacgaggaggaggatgctggtagtcagctcattgggttttacgatgaaatccggactcctctgttgtcagatataaggatcgattaccccccgtcatctgttgttcaagccaccaagacgctcttccccaattatttcaatggatctgaaatcatcatcgctggcaaactggtggatcgaaagttggaccatcttcatgtcgaggtgaccgcctccaactccaaaaaattcattattctgaaaaccgatgtgcccgtgaggccacagaaagccggaaaggacgtgaccgggtccccgcggcctggcggggatggggaaggagatactaatcacattgagaggctttggtcttatctcacaacaaaagagctcttgagctcatggttacagtcagacgacgaaccagagaaagagcgattgaggcagagggcgcaggcgctggccgtatcctaccgattcctcacccccttcacttctatgaagttaaggggtcccgtgccgcggatggatggcctagaggaggctcatggtatgtctgccgcaatgggtcccgaacccgtcgttcagtcggtccggggcgccggcacgcaaccaggaccactcttgaaaaaaccctaccaacctagaattaaaatatctaaaaccagtgttagaggattccggcgggaagaacagatattctctaatgtcatgaaatttccattcgcttcaatattggagctttag

SEQ ID NO: 19030 - DNA, 2088 bp, Artificial Sequence
  derived and/or modified sequence
atgttgcttctcttgggtctttgtctcggactttctctgtgcgtaggcagccaagaagaagctcagtcatggggacactcgtctgagcaagacggcctgcgggttcctcgacaggtgagactactgcagagactaaaaaccaagcccctcatgacggagttctccgtgaaaagcacgatcatctcacgatatgcttttactacggtctcctgtcggatgttgaatcgagcctccgaggaccaggacattgaattccagatgcagatacctgccgcggcattcatcaccaactttaccatgctcatcggggataaagtgtaccagggcgaaattactgagcgggagaaaaagagcggcgatagagtcaaggagaaacgtaataaaactaccgaagagaatggcgaaaagggaacagaaatcttccgagcgtcagctgtcattccatccaaggataaagctgcattttttctgtcctatgaagagctcctccaacgacggctggggaaatatgagcactctatctcagttcgcccgcagcaactttctgggcgtctgtctgtggatgtgaacattctcgaatctgccggcatcgcttcgttggaggtacttcctctccacaacagtcgacagcggggaagcggacgaggagaggatgactctggacctcctccaagcaccgtcatcaaccaaaatgaaacattcgctaatataatcttcaaacctacagtggtacaacaggcacggatcgcccagaacgggattttgggggactttattattcgctatgacgtgaacagggagcaatccattggtgatatccaggtgctgaatgggtatttcgtccactatttcgcacccaaagatctgccaccactgccaaagaatgtggtatttgtgcttgactcaagcgcctctatggtcggtaccaaacttcgacagaccaaggatgcactcttcaccattctgcacgatttgagaccgcaggaccgtttcagcatcatcggtttcagcaacagaatcaaggtctggaaagatcacctcatctctgtaacccctgattccattagggacggcaaagtgtacatacaccacatgtctccaacgggcggtaccgatattaatggtgccctacagagagccatccgactcctgaataagtatgtggcccactctggcatcggcgacagatctgtgagcttgatcgttttcctgactgatggtaagcccacagtaggagagacacacacgcttaagattctcaataacaccagggaagctgctcgcggacaagtctgtattttcacaattgggatcggtaacgatgttgatttcagactcttagaaaaattgtcgctagaaaactgcggcctcacaaggagggtgcacgaggaagaggacgcggggtcacagctcattggcttttatgacgagatccgcacaccccttctgtctgacattcgtattgactatcctccatctagcgttgttcaggccacaaagacattgtttccaaactactttaacgggtctgaaatcataatagccgggaagttggtcgatcgcaagctggaccacctgcacgtggaagtgactgcttcaaactcaaagaagtttatcatcctcaaaacagacgtgcctgtgcggccacagaaagcagggaaagacgtgacaggctccccacgcccagggggcgacggagaaggtgacaccaatcacattgagagattgtggtcctatttgaccactaaagaactgctgagttcctggctgcagagtgacgatgagcccgaaaaagagagattgcgccagcgcgctcaagccctggctgtctcttatagattcctaacaccttttacgtccatgaaactgcgaggacccgtgccacgaatggatggcctggaagaggcccatgggatgtcagcggcgatgggccccgaacctgtggttcagtcagtccgcggagccgggactcagccaggtcccctgctgaagaaacccccaaactctgttaaaaagaagcagaataagacaaagaaacgacacggcagggatggagtctttcccctccaccatctgggaatccgctag

SEQ ID NO: 19031 - DNA, 3132 bp, Artificial Sequence
  derived and/or modified sequence
gaccgcggggtgggcggccccgagagcgtcccgcagtggctggagccctgggcgctgcaaagcgtgtcccgccgggtccccgagcgtcccgcgccctcgccccgccatgctcctgctgctggggctgtgcctggggctgtccctgtgtgtggggtcgcaggaagaggcgcagagctggggccactcttcggagcaggatggactcagggtcccgaggcaagtcagactgttgcagaggctgaaaaccaaacctttgatgacagaattctcagtgaagtctaccatcatttcccgttatgccttcactacggtttcctgcagaatgctgaacagagcttctgaagaccaggacattgagttccagatgcagattccagctgcagctttcatcaccaacttcactatgcttattggagacaaggtgtatcagggcgaaattacagagagagaaaagaagagtggtgatagggtaaaagagaaaaggaataaaaccacagaagaaaatggagagaaggggactgaaatattcagagcttctgcagtgattcccagcaaggacaaagccgcctttttcctgagttatgaggagcttctgcagaggcgcctgggcaagtacgagcacagcatcagcgtgcggccccagcagctgtccgggaggctgagcgtggacgtgaatatcctggagagcgcgggcatcgcatccctggaggtgctgccgcttcacaacagcaggcagaggggcagtgggcgcggggaagatgattctgggcctcccccatctactgtcattaaccaaaatgaaacatttgccaacataatttttaaacctactgtagtacaacaagccaggattgcccagaatggaattttgggagactttatcattagatatgacgtcaatagagaacagagcattggggacatccaggttctaaatggctattttgtgcactactttgctcctaaagaccttcctcctttacccaagaatgtggtattcgtgcttgacagcagtgcttctatggtgggaaccaaactccggcagaccaaggatgccctcttcacaattctccatgacctccgaccccaggaccgtttcagtatcattggattttccaaccggatcaaagtatggaaggaccacttgatatcagtcactccagacagcatcagggatgggaaagtgtacattcaccatatgtcacccactggaggcacagacatcaacggggccctgcagagggccatcaggctcctcaacaagtacgtggcccacagtggcattggagaccggagcgtgtccctcatcgtcttcctgacggatgggaagcccacggtcggggagacgcacaccctcaagatcctcaacaacacccgagaggccgcccgaggccaagtctgcatcttcaccattggcatcggcaacgacgtggacttcaggctgctggagaaactgtcgctggagaactgtggcctcacacggcgcgtgcacgaggaggaggacgcaggctcgcagctcatcgggttctacgatgaaatcaggaccccgctcctctctgacatccgcatcgattatccccccagctcagtggtgcaggccaccaagaccctgttccccaactacttcaacggctcggagatcatcattgcggggaagctggtggacaggaagctggatcacctgcacgtggaggtcaccgccagcaacagtaagaaattcatcatcctgaagacagatgtgcctgtgcggcctcagaaggcagggaaagatgtcacaggaagccccaggcctggaggcgatggagagggggacaccaaccacatcgagcgtctctggagctacctcaccacaaaggagctgctgagctcctggctgcaaagtgacgatgaaccggagaaggagcggctgcggcagcgggcccaggccctggctgtgagctaccgcttcctcactcccttcacctccatgaagctgagggggccggtcccacgcatggatggcctggaggaggcccacggcatgtcggctgccatgggacccgaaccggtggtgcagagcgtgcgaggagctggcacgcagccaggacctttgctcaagaagccataccagccaagaattaaaatctctaaaacatcagttcgtggcttcagaagggaagaacagattttttcaaatgtcatgaaatttccttttgccagcatcctggaactataataaaaattcagaggaaagaacaacctatgactgggttttgttctgctgtgtccagatcatcctctggaagtcttgattgttgcctttctgctgctgtgctgtacgtgcaagttcctaaagccagggacatcccggagatgagctgtggatatagagtccgcacagcctgcgggagacagaatgtaattccttccaacacacacacacaggctttatggaatgccagaaaagcttcctcttggatgctgcctggagtaatgactttttgaccctcccctcttttttggagcaagcactatctttccttgtaaagaaatttggacaatttgagtagaaatggtgtggtatgtgcacatagaaactctcagaaaactgtcagatgagctagacagttgtcctctatctccatgggtcccgcatcccaaggatcgaaccaacaacagatcaaaaatacgtgaaaaaggaattgcatctgtattgaatgtgtacggactttttttcttgtctttgttccttaaacaatgtagtgtaacaactatttacatcgcatctcctttgcattcattattataagtaaactagagatgatttaaagtgtatagaaaggctgcgtgcagtggctaatgtctgtaatcccagcactttgagaggccgaggcaggtggatcacctgaggtcaggagttcgagaccagcctggccaacgtggtgaaaccccatctctactaaaaatacaataattagctgggcatggtggtgcacgcctgtaatcccagctattcgggaggctgaggcaggagaatcgcttgaacccaggaggcagagattgcagtgaaccgagattgcaccattgcactccagcctgggtgacagagtgaacctccgtctcaaaaacaaaataaataaataagaataaatt

SEQ ID NO: 19032 - DNA, 2194 bp, Artificial Sequence
  derived and/or modified sequence
gaccgcggggtgggcggccccgagagcgtcccgcagtggctggagccctgggcgctgcaaagcgtgtcccgccgggtccccgagcgtcccgcgccctcgccccgccatgctcctgctgctggggctgtgcctggggctgtccctgtgtgtggggtcgcaggaagaggcgcagagctggggccactcttcggagcaggatggactcagggtcccgaggcaagtcagactgttgcagaggctgaaaaccaaacctttgatgacagaattctcagtgaagtctaccatcatttcccgttatgccttcactacggtttcctgcagaatgctgaacagagcttctgaagaccaggacattgagttccagatgcagattccagctgcagctttcatcaccaacttcactatgcttattggagacaaggtgtatcagggcgaaattacagagagagaaaagaagagtggtgatagggtaaaagagaaaaggaataaaaccacagaagaaaatggagagaaggggactgaaatattcagagcttctgcagtgattcccagcaaggacaaagccgcctttttcctgagttatgaggagcttctgcagaggcgcctgggcaagtacgagcacagcatcagcgtgcggccccagcagctgtccgggaggctgagcgtggacgtgaatatcctggagagcgcgggcatcgcatccctggaggtgctgccgcttcacaacagcaggcagaggggcagtgggcgcggggaagatgattctgggcctcccccatctactgtcattaaccaaaatgaaacatttgccaacataatttttaaacctactgtagtacaacaagccaggattgcccagaatggaattttgggagactttatcattagatatgacgtcaatagagaacagagcattggggacatccaggttctaaatggctattttgtgcactactttgctcctaaagaccttcctcctttacccaagaatgtggtattcgtgcttgacagcagtgcttctatggtgggaaccaaactccggcagaccaaggatgccctcttcacaattctccatgacctccgaccccaggaccgtttcagtatcattggattttccaaccggatcaaagtatggaaggaccacttgatatcagtcactccagacagcatcagggatgggaaagtgtacattcaccatatgtcacccactggaggcacagacatcaacggggccctgcagagggccatcaggctcctcaacaagtacgtggcccacagtggcattggagaccggagcgtgtccctcatcgtcttcctgacggatgggaagcccacggtcggggagacgcacaccctcaagatcctcaacaacacccgagaggccgcccgaggccaagtctgcatcttcaccattggcatcggcaacgacgtggacttcaggctgctggagaaactgtcgctggagaactgtggcctcacacggcgcgtgcacgaggaggaggacgcaggctcgcagctcatcgggttctacgatgaaatcaggaccccgctcctctctgacatccgcatcgattatccccccagctcagtggtgcaggccaccaagaccctgttccccaactacttcaacggctcggagatcatcattgcggggaagctggtggacaggaagctggatcacctgcacgtggaggtcaccgccagcaacagtaagaaattcatcatcctgaagacagatgtgcctgtgcggcctcagaaggcagggaaagatgtcacaggaagccccaggcctggaggcgatggagagggggacaccaaccacatcgagcgtctctggagctacctcaccacaaaggagctgctgagctcctggctgcaaagtgacgatgaaccggagaaggagcggctgcggcagcgggcccaggccctggctgtgagctaccgcttcctcactcccttcacctccatgaagctgagggggccggtcccacgcatggatggcctggaggaggcccacggcatgtcggctgccatgggacccgaaccggtggtgcagagcgtgcgaggagctggcacgcagccaggacctttgctcaagaagccaccaaactccgtcaaaaaaaaacaaaacaaaacaaaaaaaagacatgggagagatggtgtttttcctctccaccacctggggatacgatga

SEQ ID NO: 19033 - DNA, 2109 bp, Artificial Sequence
  derived and/or modified sequence
atgctgctgctgctgggcctgtgcctgggcctgagcctgtgtgtgggcagccaggaggaggcccagagctggggccacagcagcgagcaggacggcctgcgggtgccccggcaggtgcggctgctgcagaggctgaagaccaagcccctgatgacagagttctctgtgaagagcaccatcatcagccgctatgccttcaccaccgtgtcctgcaggatgctgaacagagccagcgaggaccaggacatcgagttccagatgcagatcccagctgctgccttcatcaccaacttcaccatgctgattggagacaaggtgtaccagggcgagatcacagagcgggagaagaagagcggggacagagtgaaggagaagaggaacaagaccacagaggagaatggagagaagggcacagagatcttccgggccagcgctgtgatccccagcaaggacaaggccgccttcttcctgtcctatgaggagctgctgcagaggcggctgggcaagtatgagcacagcatctctgtgcggccccagcagctgagcggccgcctgtctgtggatgtgaacatcctggagagcgctggcatcgccagcctggaggtgctgcccctgcacaacagccggcagaggggcagcggcagaggagaagatgacagcggccccccacccagcaccgtcatcaaccagaatgagacctttgccaacatcatcttcaagcccaccgtggtgcagcaggccagaattgcccagaatggcatcctgggggacttcatcatccgctatgatgtgaaccgggagcagagcatcggggacatccaggtgctgaatggctactttgtgcactactttgcccccaaggacctgccccccctgcccaagaatgtggtgtttgtgctggacagcagcgcctccatggtgggcaccaagctgcggcagaccaaggatgccctcttcaccatcctgcatgacctgcggccccaggaccgcttcagcatcatcggcttcagcaaccgcatcaaggtgtggaaggaccacctgatctctgtgaccccagacagcatcagagatggcaaggtgtacatccaccacatgagccccaccggcggcacagacatcaacggggccctgcagagggccatccggctgctgaacaagtatgtggcccacagcggcattggagacagatctgtgtccctgattgtgttcctgacagatggcaagcccaccgtgggggagacccacaccctgaagatcctgaacaacacccgggaggccgcccggggccaggtgtgcatcttcaccatcggcattggaaatgatgtggacttccggctgctggagaagctgagcctggagaactgtggcctgaccaggagagtgcatgaggaggaggatgctggcagccagctgattggcttctatgatgagatccgcacccccctgctgagtgacatcagaattgactacccacccagctctgtggtgcaggccaccaagaccctcttccccaactacttcaacggcagcgagatcatcatcgccggcaagctggtggacaggaagctggaccacctgcacgtggaggtgacagccagcaacagcaagaagttcatcatcctgaagacagatgtgcctgtgcggccccagaaggccggcaaggatgtgacaggcagccccaggcctggaggagatggagagggggacaccaaccacatcgagcggctgtggagctacctgaccaccaaggagctgctgagctcctggctgcagagtgatgatgagcctgagaaggagcggctgcggcagagggcccaggccctggccgtgtcctaccgcttcctgacccccttcacctccatgaagctgcggggccctgtgcccaggatggatggcctggaggaggcccacggcatgtctgctgccatgggccctgagcctgtggtgcagagcgtgagaggagctggcacccagcccggccccctgctgaagaagccctaccagccccgcatcaagatcagcaagacctctgtgcggggcttccggcgggaggagcagatcttcagcaatgtgatgaagttcccctttgccagcatcctggagctgtag

SEQ ID NO: 19034 - DNA, 2088 bp, Artificial Sequence
  derived and/or modified sequence
atgctgctgctgctgggcctgtgcctgggcctgagcctgtgtgtgggcagccaggaggaggcccagagctggggccacagcagcgagcaggacggcctgcgggtgccccggcaggtgcggctgctgcagaggctgaagaccaagcccctgatgacagagttctctgtgaagagcaccatcatcagccgctatgccttcaccaccgtgtcctgcaggatgctgaacagagccagcgaggaccaggacatcgagttccagatgcagatcccagctgctgccttcatcaccaacttcaccatgctgattggagacaaggtgtaccagggcgagatcacagagcgggagaagaagagcggggacagagtgaaggagaagaggaacaagaccacagaggagaatggagagaagggcacagagatcttccgggccagcgctgtgatccccagcaaggacaaggccgccttcttcctgtcctatgaggagctgctgcagaggcggctgggcaagtatgagcacagcatctctgtgcggccccagcagctgagcggccgcctgtctgtggatgtgaacatcctggagagcgctggcatcgccagcctggaggtgctgcccctgcacaacagccggcagaggggcagcggcagaggagaagatgacagcggccccccacccagcaccgtcatcaaccagaatgagacctttgccaacatcatcttcaagcccaccgtggtgcagcaggccagaattgcccagaatggcatcctgggggacttcatcatccgctatgatgtgaaccgggagcagagcatcggggacatccaggtgctgaatggctactttgtgcactactttgcccccaaggacctgccccccctgcccaagaatgtggtgtttgtgctggacagcagcgcctccatggtgggcaccaagctgcggcagaccaaggatgccctcttcaccatcctgcatgacctgcggccccaggaccgcttcagcatcatcggcttcagcaaccgcatcaaggtgtggaaggaccacctgatctctgtgaccccagacagcatcagagatggcaaggtgtacatccaccacatgagccccaccggcggcacagacatcaacggggccctgcagagggccatccggctgctgaacaagtatgtggcccacagcggcattggagacagatctgtgtccctgattgtgttcctgacagatggcaagcccaccgtgggggagacccacaccctgaagatcctgaacaacacccgggaggccgcccggggccaggtgtgcatcttcaccatcggcattggaaatgatgtggacttccggctgctggagaagctgagcctggagaactgtggcctgaccaggagagtgcatgaggaggaggatgctggcagccagctgattggcttctatgatgagatccgcacccccctgctgagtgacatcagaattgactacccacccagctctgtggtgcaggccaccaagaccctcttccccaactacttcaacggcagcgagatcatcatcgccggcaagctggtggacaggaagctggaccacctgcacgtggaggtgacagccagcaacagcaagaagttcatcatcctgaagacagatgtgcctgtgcggccccagaaggccggcaaggatgtgacaggcagccccaggcctggaggagatggagagggggacaccaaccacatcgagcggctgtggagctacctgaccaccaaggagctgctgagctcctggctgcagagtgatgatgagcctgagaaggagcggctgcggcagagggcccaggccctggccgtgtcctaccgcttcctgacccccttcacctccatgaagctgcggggccctgtgcccaggatggatggcctggaggaggcccacggcatgtctgctgccatgggccctgagcctgtggtgcagagcgtgagaggagctggcacccagcccggccccctgctgaagaagccacccaacagcgtgaagaagaagcagaacaagaccaagaagagacatggaagagatggagtcttccccctgcaccacctgggcatcagatag

SEQ ID NO: 19035 - DNA, 2109 bp, Artificial Sequence
  derived and/or modified sequence
atgctgctgctgctgggcctgtgcctgggcctgagcctgtgcgtgggaagccaagaggaggcccagtcatgggggcattcaagtgaacaagatggtcttcgggtgccacggcaggtgcgtctcctgcaaagactgaagaccaaacctctgatgaccgaattttctgtcaagtctacaattatcagccgatatgcgtttacaactgttagctgccgcatgttgaatagggcgagcgaggatcaagacatcgagtttcagatgcagattcctgcagcagccttcataaccaacttcaccatgctgattggcgacaaagtctatcagggggagattacagagagggagaagaagtccggagaccgcgtgaaggagaagcgcaataagactacggaggaaaatggcgaaaaaggaacagagattttcagagccagtgctgtgatcccctccaaagacaaagccgccttctttctgtcctatgaagagctgttgcagcgccgtctgggaaagtacgaacacagcatctctgtgaggccacagcagctcagcggtagactgtctgttgacgtaaatatcctagaaagcgcagggattgcctcactggaagtcctgcccctgcacaactctcgccagagaggctcgggcaggggcgaggatgactccggacctcccccaagtaccgtgattaatcagaatgagacttttgccaacattatttttaagcctaccgtcgtgcagcaagcccgcatagcccagaatggaatccttggggattttattatccggtatgacgtgaaccgagaacagtccattggcgacattcaagtgctgaatggttatttcgtacactacttcgctccaaaggatttgcctcctctccccaagaacgtggtgttcgtgcttgatagtagcgcatctatggtgggtacaaaattacgacaaacgaaagacgccctgttcacaattctgcatgatctcagaccacaggacaggttctccataattggattctccaataggataaaggtgtggaaggaccacctcatatcagtcactcccgattccatccgagacggcaaagtatacatccaccacatgtcccccacaggcggaactgacattaatggagctctgcagagagcgattagactcctgaataagtacgtggcccactcaggcatcggggacagaagtgtgtccctgattgtgttcctcactgacggcaaacccacagtgggtgaaacacacacattaaaaattctaaacaatacccgggaggcagcaagggggcaggtgtgcattttcacaattgggatcggaaacgacgtagactttcgcttactggaaaaacttagcctcgagaattgtggactgacacgtcgagtccacgaagaggaggacgccggcagccagctgattggattctacgatgaaatccgaacaccattgctgtcagatataagaatcgactatccaccgtccagtgtcgtgcaggcgacaaaaacgcttttcccaaactacttcaatggatcagaaattatcatcgcaggcaagctcgttgacaggaagctggatcaccttcacgtggaggtgactgcatctaactcaaaaaagtttatcatcctgaagaccgacgttccggtgagaccgcagaaggctggtaaggacgtcacggggtcacctcggccaggaggcgatggagagggagacactaaccatatagaacgattatggagctacctgactaccaaagagctcctttcctcctggttgcagtcagatgacgaaccagaaaaagaaagacttagacaaagagcccaggccttggccgttagctatagatttttgaccccatttacgagtatgaagttaagaggcccagtgcctagaatggatggcctcgaggaagcccatggaatgtcagccgcaatgggccctgagcccgtggtccaaagtgtgcgtggtgcaggtacacagccaggtcctctgctgaagaagccctatcagccaaggatcaagatttccaagacatctgttcgggggttcagacgcgaagaacagatattcagtaatgtaatgaagttcccgttcgctagtatcctagaactgtag

SEQ ID NO: 19036 - DNA, 2088 bp, Artificial Sequence
  derived and/or modified sequence
atgctgctgctgctgggcctgtgcctgggcctgagcctgtgcgtgggttcccaggaggaagcacagtcatgggggcatagttctgagcaggacggcctgcgggtgccgagacaggtccgtctgttacagaggctgaaaaccaaaccactcatgaccgaatttagcgtgaagagtaccattatttccagatatgcgtttacgaccgtttcttgccgcatgctcaatcgcgcgtcagaggaccaagacattgagttccagatgcaaataccggctgccgcattcattactaatttcaccatgctcattggggataaggtgtatcaaggagaaataacagaacgagagaagaagtctggagatcgcgtgaaagagaaaagaaataagaccaccgaagaaaacggtgaaaaaggaacagaaattttccgggctagtgccgttatcccaagtaaagacaaggctgctttctttttgagctatgaggaacttctccagagaagactggggaagtacgagcactccatatccgtccgaccacagcagctgtcagggcgactgtctgtggacgtaaatatactcgagtccgccggcatcgcttcactcgaggtgttgccactgcacaattcccgtcagcgtggttccggcagaggcgaggacgatagtggaccacctccatccaccgtaatcaatcagaatgagactttcgccaacataatctttaagcccaccgttgtccagcaagcccgaatagcccagaatggcattttaggagatttcatcattcggtatgacgtgaatagggaacagagtatcggtgacatccaggtccttaatggctacttcgttcattattttgcacctaaggatttgcctcctctcccaaaaaacgttgtctttgtgcttgactctagcgcatccatggtgggcactaaacttaggcagacaaaagatgccttgttcactattcttcacgacttaagaccccaagatagattcagcattatcggattttccaataggatcaaggtctggaaagatcacctgatctctgtgacccccgattccattcgggacggcaaggtttacatccatcatatgtcccccactgggggaacggacatcaacggtgccctacaacgtgccatccggctgcttaacaagtatgttgcccactccgggattggcgatcggagcgtgtccctgatcgtctttctaacggatggaaagccgactgtgggggagacccatactctaaaaattctaaacaacacccgtgaagccgcgcggggacaagtgtgtatttttacaattggaatcggcaacgatgtagatttccgcctcctggaaaaactctccctagagaactgcgggctgacacggcgagtgcacgaagaggaggacgccggaagtcaactgatcggtttctatgatgagatcagaaccccgctgctgagtgacattaggatcgattatcccccttcttctgtcgtgcaggcgaccaagacccttttccccaattactttaatggcagcgaaattatcatagccggtaaacttgttgatcgcaaattggaccatctgcatgtggaggtcactgccagcaattccaagaagttcattatcctgaagacagatgttcccgtgcgaccccaaaaagctggtaaagacgtgactggttcaccaagacccggtggtgacggtgaaggggacacaaaccatattgagaggttatggagttacctgacaaccaaggaactgctctcctcttggctgcagtccgacgatgagccagaaaaggaaagactgcgccagcgtgcccaggcccttgcagtgagttaccggttccttactccctttacgagcatgaagctccgggggcctgtgccacgaatggatgggctggaggaggcccacgggatgagtgccgcaatgggccctgaacctgtcgtgcaatcagtgagaggggcgggcactcagcctgggcccctgcttaaaaaaccccctaacagcgtcaaaaaaaagcagaacaagacgaagaaacgacatggccgggacggagttttccccttgcaccatctgggtataaggtag

SEQ ID NO: 19037 - DNA, 2109 bp, Artificial Sequence
  derived and/or modified sequence
atgcttcttctcctgggtctgtgcctaggactcagtttgtgcgtcgggtcccaagaagaagcccagtcttggggtcatagcagcgaacaggatggtctccgcgttccccgacaagttagactgctgcagcgcctcaaaacaaagcctctgatgacggaattcagcgtcaaatcaactatcattagccgatatgccttcaccaccgtaagttgccggatgcttaatcgtgcatccgaggaccaggatattgagtttcagatgcagattcctgcagcagccttcatcaccaactttacaatgttgataggcgacaaggtgtaccagggagagattaccgagagggaaaaaaagagtggggaccgggtgaaggagaagcgcaataaaaccacagaggagaatggtgagaaggggactgagatttttcgagctagcgctgttattccatctaaggacaaggccgcattttttcttagctacgaggagttactacagcggaggctgggaaaatacgagcacagcatctctgtccggccacagcagctctctggacgtttgtccgtggacgtgaacattctggaatctgctggtatagcctcattggaggtgctaccactgcataattcaagacaacggggatccggacgtggagaggacgattcgggacctccaccttctaccgtcatcaatcaaaacgagacatttgctaacattatctttaaacctacagtagttcagcaggctcggattgctcagaacgggatcctcggggacttcatcattaggtacgacgttaatcgcgagcagagcataggcgatatacaggtgctaaacgggtatttcgtccactactttgctcccaaggaccttcctccgttgcccaagaacgttgtcttcgtactggacagctccgcttctatggtcggcacgaagctgcggcaaaccaaggacgcactgtttaccattctgcatgacctgagaccccaggaccgatttagtattattggatttagtaatcggattaaggtgtggaaagatcacctgatctccgtgactcctgactccataagggacggaaaggtttacatccatcacatgtcacctactgggggaacagacatcaacggggctctgcagagggccatacgcctcctgaataaatatgtcgcacattccggcattggcgatcgttctgtgagcctcatagtgtttttaacagacggaaaacccaccgtgggcgaaacccacaccctgaaaattctgaacaacaccagggaggcggctcgtggacaggtctgcattttcactatcgggatcggcaacgatgtggattttcgacttttggaaaagctgagtttggaaaattgtgggctgactaggcgtgtgcacgaggaggaggacgcaggatcccaactgattgggttttatgacgagatccgcaccccgctgctcagcgacatccgaatcgattatcccccttcttcagttgtgcaggctactaagacactgtttcctaattattttaacggatccgaaattatcattgcaggcaagttggttgatcggaaactggatcacctccatgtggaagtcacagcttccaattcaaaaaaattcatcatcctgaagactgatgtccctgttcggcctcagaaagcagggaaggacgtcactgggtcacccaggcctggaggcgacggagaaggcgacaccaatcacatcgagcggctgtggtcctaccttacaaccaaagagttgctgagtagctggttacagagtgatgatgaaccggagaaggagcgcttaagacagcgcgctcaggcactcgccgtctcttataggttcctgacaccctttacctccatgaaactgaggggcccagtgcctaggatggacggactggaggaagctcacggcatgtcggctgctatggggccagaaccagtggttcaatctgtcaggggtgccggtactcagccaggacccttactcaaaaaaccttaccaacctcgaatcaagattagcaagacttcagtccgcggattccggagagaggagcagatattctctaatgtcatgaagttcccatttgcctctattctggagctgtag

SEQ ID NO: 19038 - DNA, 2088 bp, Artificial Sequence
  derived and/or modified sequence
atgctgctcctgttggggctgtgtctcgggctgtccctatgcgttgggtcccaggaggaggcccaaagctggggtcactccagtgaacaggacggtctgagggtgccccgtcaggttagactgctccagcgactcaagacaaaaccactgatgaccgagttttccgtcaagtcaaccatcattagcaggtacgctttcactaccgtgtcttgtcgcatgttaaatcgagcatctgaggatcaggacatagagtttcagatgcagattccggcagctgcctttatcaccaactttacaatgctgatcggcgataaggtctaccagggcgaaattaccgaacgcgaaaagaagtcaggcgacagggtgaaggagaaacgcaacaaaactaccgaagagaatggcgagaaaggcactgaaatcttccgagcctccgctgtcataccctccaaggacaaagccgctttttttttatcctatgaggaacttctccagagaagattagggaaatacgaacatagcatctcagtcaggcctcagcagttatctgggaggctttcagttgatgtcaacatcttggagagcgccggaattgctagcttggaggtgttacctcttcataactcccgacagagggggtctgggaggggcgaagacgactcagggcctcctcccagcactgtcataaaccagaacgagacctttgcaaacatcatctttaagcctacggtcgtccaacaggctagaattgcgcaaaacggaatcctgggcgactttattatacggtacgatgtgaacagagagcagtctatcggcgatattcaggttctgaacggatacttcgtgcactacttcgccccaaaagacttacccccattgcccaaaaatgtcgtgttcgtcctggatagtagtgcctcgatggtgggcacaaagctgagacaaacaaaggacgccctctttacgattctgcacgacttgaggccacaggacagattttctatcattggcttcagcaaccgcatcaaagtgtggaaggaccatttgatctctgtcactcctgatagtatccgggatgggaaagtatacatccaccacatgtctccgacgggcggtaccgacattaatggagccctgcagcgcgcaataagattgcttaacaaatacgttgctcacagcggaataggagaccggagtgtatcgctgattgtgttccttaccgatggtaagccgactgtaggcgagactcacacgctgaagatcctgaacaacaccagggaagccgctcggggacaggtctgtatctttaccatcggcatcggaaatgacgtggactttaggctgctggaaaagctcagcctggaaaattgcggactgactcgccgagtacatgaggaagaagatgcgggttcgcagctgattggcttttatgatgagataagaactcccttgctgtccgatatccgcattgactaccccccaagcagtgtcgtccaggcgacgaagacgctcttccctaattactttaatgggagcgagattatcatcgccggaaagctagtcgatagaaaacttgaccatcttcatgtggaagtgaccgccagcaattccaagaagtttataatcttaaagaccgatgtgcctgttaggccccagaaggctggaaaagatgtgacaggaagcccgaggcccggaggcgatggcgaaggggatacaaaccacattgaaaggctgtggtcatacctgacgacaaaggaactgctgagcagttggctgcagtcagatgacgaaccggagaaagagaggcttcgacagcgggctcaggctctagccgtctcctatcgctttctgacgcccttcacttctatgaagctgcggggtcctgttccacggatggatggcctggaggaagcccatgggatgtcggcagcaatgggccctgagcctgtagttcagtcagtgcgcggagcaggaactcaaccaggacccctgctgaaaaagcctcccaattcggtgaagaagaaacagaataagacaaaaaagcgacacgggcgtgacggcgttttccctctgcaccacttggggatcaggtag

SEQ ID NO: 19039 - DNA, 2109 bp, Artificial Sequence
  derived and/or modified sequence
atgctgctgctgctgggcctgtgcctgggcctgagcctgtgcgtgggcagccaggaggaggcccagagctggggccacagcagcgagcaggacggcctgagagtgcccagacaggtgagactgctgcagagactgaagaccaagcccctgatgaccgagttcagcgtgaagagcaccatcatcagcagatacgccttcaccaccgtgagctgcagaatgctgaacagagccagcgaggaccaggacatcgagttccagatgcagatccccgccgccgccttcatcaccaacttcaccatgctgatcggcgacaaggtgtaccagggcgagatcaccgagagagagaagaagagcggcgacagagtgaaggagaagagaaacaagaccaccgaggagaacggcgagaagggcaccgagatcttcagagccagcgccgtgatccccagcaaggacaaggccgccttcttcctgagctacgaggagctgctgcagagaagactgggcaagtacgagcacagcatcagcgtgagaccccagcagctgagcggcagactgagcgtggacgtgaacatcctggagagcgccggcatcgccagcctggaggtgctgcccctgcacaacagcagacagagaggcagcggcagaggcgaggacgacagcggccccccccccagcaccgtgatcaaccagaacgagaccttcgccaacatcatcttcaagcccaccgtggtgcagcaggccagaatcgcccagaacggcatcctgggcgacttcatcatcagatacgacgtgaacagagagcagagcatcggcgacatccaggtgctgaacggctacttcgtgcactacttcgcccccaaggacctgccccccctgcccaagaacgtggtgttcgtgctggacagcagcgccagcatggtgggcaccaagctgagacagaccaaggacgccctgttcaccatcctgcacgacctgagaccccaggacagattcagcatcatcggcttcagcaacagaatcaaggtgtggaaggaccacctgatcagcgtgacccccgacagcatcagagacggcaaggtgtacatccaccacatgagccccaccggcggcaccgacatcaacggcgccctgcagagagccatcagactgctgaacaagtacgtggcccacagcggcatcggcgacagaagcgtgagcctgatcgtgttcctgaccgacggcaagcccaccgtgggcgagacccacaccctgaagatcctgaacaacaccagagaggccgccagaggccaggtgtgcatcttcaccatcggcatcggcaacgacgtggacttcagactgctggagaagctgagcctggagaactgcggcctgaccagaagagtgcacgaggaggaggacgccggcagccagctgatcggcttctacgacgagatcagaacccccctgctgagcgacatcagaatcgactacccccccagcagcgtggtgcaggccaccaagaccctgttccccaactacttcaacggcagcgagatcatcatcgccggcaagctggtggacagaaagctggaccacctgcacgtggaggtgaccgccagcaacagcaagaagttcatcatcctgaagaccgacgtgcccgtgagaccccagaaggccggcaaggacgtgaccggcagccccagacccggcggcgacggcgagggcgacaccaaccacatcgagagactgtggagctacctgaccaccaaggagctgctgagcagctggctgcagagcgacgacgagcccgagaaggagagactgagacagagagcccaggccctggccgtgagctacagattcctgacccccttcaccagcatgaagctgagaggccccgtgcccagaatggacggcctggaggaggcccacggcatgagcgccgccatgggccccgagcccgtggtgcagagcgtgagaggcgccggcacccagcccggccccctgctgaagaagccctaccagcccagaatcaagatcagcaagaccagcgtgagaggcttcagaagagaggagcagatcttcagcaacgtgatgaagttccccttcgccagcatcctggagctgtag

SEQ ID NO: 19040 - DNA, 2088 bp, Artificial Sequence
  derived and/or modified sequence
atgctgctgctgctgggcctgtgcctgggcctgagcctgtgcgtgggcagccaggaggaggcccagagctggggccacagcagcgagcaggacggcctgagagtgcccagacaggtgagactgctgcagagactgaagaccaagcccctgatgaccgagttcagcgtgaagagcaccatcatcagcagatacgccttcaccaccgtgagctgcagaatgctgaacagagccagcgaggaccaggacatcgagttccagatgcagatccccgccgccgccttcatcaccaacttcaccatgctgatcggcgacaaggtgtaccagggcgagatcaccgagagagagaagaagagcggcgacagagtgaaggagaagagaaacaagaccaccgaggagaacggcgagaagggcaccgagatcttcagagccagcgccgtgatccccagcaaggacaaggccgccttcttcctgagctacgaggagctgctgcagagaagactgggcaagtacgagcacagcatcagcgtgagaccccagcagctgagcggcagactgagcgtggacgtgaacatcctggagagcgccggcatcgccagcctggaggtgctgcccctgcacaacagcagacagagaggcagcggcagaggcgaggacgacagcggccccccccccagcaccgtgatcaaccagaacgagaccttcgccaacatcatcttcaagcccaccgtggtgcagcaggccagaatcgcccagaacggcatcctgggcgacttcatcatcagatacgacgtgaacagagagcagagcatcggcgacatccaggtgctgaacggctacttcgtgcactacttcgcccccaaggacctgccccccctgcccaagaacgtggtgttcgtgctggacagcagcgccagcatggtgggcaccaagctgagacagaccaaggacgccctgttcaccatcctgcacgacctgagaccccaggacagattcagcatcatcggcttcagcaacagaatcaaggtgtggaaggaccacctgatcagcgtgacccccgacagcatcagagacggcaaggtgtacatccaccacatgagccccaccggcggcaccgacatcaacggcgccctgcagagagccatcagactgctgaacaagtacgtggcccacagcggcatcggcgacagaagcgtgagcctgatcgtgttcctgaccgacggcaagcccaccgtgggcgagacccacaccctgaagatcctgaacaacaccagagaggccgccagaggccaggtgtgcatcttcaccatcggcatcggcaacgacgtggacttcagactgctggagaagctgagcctggagaactgcggcctgaccagaagagtgcacgaggaggaggacgccggcagccagctgatcggcttctacgacgagatcagaacccccctgctgagcgacatcagaatcgactacccccccagcagcgtggtgcaggccaccaagaccctgttccccaactacttcaacggcagcgagatcatcatcgccggcaagctggtggacagaaagctggaccacctgcacgtggaggtgaccgccagcaacagcaagaagttcatcatcctgaagaccgacgtgcccgtgagaccccagaaggccggcaaggacgtgaccggcagccccagacccggcggcgacggcgagggcgacaccaaccacatcgagagactgtggagctacctgaccaccaaggagctgctgagcagctggctgcagagcgacgacgagcccgagaaggagagactgagacagagagcccaggccctggccgtgagctacagattcctgacccccttcaccagcatgaagctgagaggccccgtgcccagaatggacggcctggaggaggcccacggcatgagcgccgccatgggccccgagcccgtggtgcagagcgtgagaggcgccggcacccagcccggccccctgctgaagaagccccccaacagcgtgaagaagaagcagaacaagaccaagaagagacacggcagagacggcgtgttccccctgcaccacctgggcatcagatag

SEQ ID NO: 19041 - protein, 326 aa, Artificial Sequence
  derived and/or modified sequence
MLLSKFGSLAHLCGPGGVDHLPVKILQPAKADKESFEKAYQVGAVLGSGGFGTVYAGSRIADGLPVAVKHVVKERVTEWGSLGGATVPLEVVLLRKVGAAGGARGVIRLLDWFERPDGFLLVLERPEPAQDLFDFITERGALDEPLARRFFAQVLAAVRHCHSCGVVHRDIKDENLLVDLRSGELKLIDFGSGALLKDTVYTDFDGTRVYSPPEWIRYHRYHGRSATVWSLGVLLYDMVCGDIPFEQDEEILRGRLLFRRRVSPECQQLIRWCLSLRPSERPSLDQIAAHPWMLGADGGVPESCDLRLCTLDPDDVASTTSSSESL

SEQ ID NO: 19042 - DNA, 981 bp, Artificial Sequence
  derived and/or modified sequence
atgctgctgagcaagttcggcagcctggcccacctgtgcggccccggcggcgtggaccacctgcccgtgaagatcctgcagcccgccaaggccgacaaggagagcttcgagaaggcctaccaggtgggcgccgtgctgggcagcggcggcttcggcaccgtgtacgccggcagcagaatcgccgacggcctgcccgtggccgtgaagcacgtggtgaaggagagagtgaccgagtggggcagcctgggcggcgccaccgtgcccctggaggtggtgctgctgagaaaggtgggcgccgccggcggcgccagaggcgtgatcagactgctggactggttcgagagacccgacggcttcctgctggtgctggagagacccgagcccgcccaggacctgttcgacttcatcaccgagagaggcgccctggacgagcccctggccagaagattcttcgcccaggtgctggccgccgtgagacactgccacagctgcggcgtggtgcacagagacatcaaggacgagaacctgctggtggacctgagaagcggcgagctgaagctgatcgacttcggcagcggcgccctgctgaaggacaccgtgtacaccgacttcgacggcaccagagtgtacagcccccccgagtggatcagataccacagataccacggcagaagcgccaccgtgtggagcctgggcgtgctgctgtacgacatggtgtgcggcgacatccccttcgagcaggacgaggagatcctgagaggcagactgctgttcagaagaagagtgagccccgagtgccagcagctgatcagatggtgcctgagcctgagacccagcgagagacccagcctggaccagatcgccgcccacccctggatgctgggcgccgacggcggcgtgcccgagagctgcgacctgagactgtgcaccctggaccccgacgacgtggccagcaccaccagcagcagcgagagcctgtag

SEQ ID NO: 19043 - DNA, 2369 bp, Artificial Sequence
  derived and/or modified sequence
agcggaccgacgcgacacgccgtgcgcctccgcggctgcgctacgaaaacgagtcccggagcggccccgcgcccgccgcacccggccctcgcccgcccgaagacaggcgccaagctgccccgccgtctccccagctagcgcccggccgccgccgcctcgcgggccccgggcggaagggggcggggtcccgattcgccccgcccccgcggagggatacgcggcgccgcggcccaaaacccccgggcgaggcggccggggcgggtgaggcgctccgcctgctgcgcgtctacgcggtccccgcgggccttccgggcccactgcgccgcgcggaccgcctcgggctcggacggccggtgtccccggcgcgccgctcgcccggatcggccgcggcttcggcgcctggggctcggggctccggggaggccgtcgcccgcgatgctgctctccaagttcggctccctggcgcacctctgcgggcccggcggcgtggaccacctcccggtgaagatcctgcagccagccaaggcggacaaggagagcttcgagaaggcgtaccaggtgggcgccgtgctgggtagcggcggcttcggcacggtctacgcgggtagccgcatcgccgacgggctcccggtggctgtgaagcacgtggtgaaggagcgggtgaccgagtggggcagcctgggcggcgcgaccgtgcccctggaggtggtgctgctgcgcaaggtgggcgcggcgggcggcgcgcgcggcgtcatccgcctgctggactggttcgagcggcccgacggcttcctgctggtgctggagcggcccgagccggcgcaggacctcttcgactttatcacggagcgcggcgccctggacgagccgctggcgcgccgcttcttcgcgcaggtgctggccgccgtgcgccactgccacagctgcggggtcgtgcaccgcgacattaaggacgaaaatctgcttgtggacctgcgctccggagagctcaagctcatcgacttcggttcgggtgcgctgctcaaggacacggtctacaccgacttcgacggcacccgagtgtacagccccccggagtggatccgctaccaccgctaccacgggcgctcggccaccgtgtggtcgctgggcgtgcttctctacgatatggtgtgtggggacatccccttcgagcaggacgaggagatcctccgaggccgcctgctcttccggaggagggtctctccagagtgccagcagctgatccggtggtgcctgtccctgcggccctcagagcggccgtcgctggatcagattgcggcccatccctggatgctgggggctgacgggggcgtcccggagagctgtgacctgcggctgtgcaccctcgaccctgatgacgtggccagcaccacgtccagcagcgagagcttgtgaggagctgcacctgactgggagctaggggaccacctgccttggccagacctgggacgcccccagaccctgactttctcctgcgtgggccgtctcctcctgcggaagcagtgacctctgacccctggtgaccttcgctttgagtgccttttgaacgctggtcccgcgggacttggttttctcaagctctgtctgtccaaagacgctccggtcgaggtcccgcctgccctgggtggatacttgaaccccagacgcccctctgtgctgctgtgtccggaggcggccttcccatctgcctgcccacccggagctctttccgccggcgcagggtcccaagcccacctcccgccctcagtcctgcggtgtgcgtctgggcacgtcctgcacacacaatgcaagtcctggcctccgcgcccgcccgcccacgcgagccgtacccgccgccaactctgttatttatggtgtgaccccctggaggtgccctcggcccaccggggctatttattgtttaatttatttgttgaggttatttcctctgagcagtctgcctctcccaagccccaggggacagtggggaggcaggggagggggtggctgtggtccagggaccccaggccctgattcctgtgcctggcgtctgtcccggccccgcctgtcagaagatgaacatgtatagtggctaacttaaggggagtgggtgaccctgacacttccaggcactgtgcccagggtttgggttttaaattattgactttgtacagtctgcttgtgggctctgaaagctggggtggggccagagcctgagcgtttaatttattcagtacctgtgtttgtgtgaatgcggtgtgtgcaggcatcgcagatgggggttctttcagttcaaaagtgagatgtctggagatcatatttttttatacaggtatttcaattaaaatgtttttgtacatagtggataa

SEQ ID NO: 19044 - DNA, 981 bp, Artificial Sequence
  derived and/or modified sequence
atgcttctgagcaaattcgggtctctggcccacttatgtggtcccggcggtgtagaccacctgcccgtaaagatcctccagcctgccaaggcggacaaagagagcttcgagaaggcataccaggtcggcgcagtactgggctccggcggatttggtacagtgtatgcaggctcccgcatcgccgacggcttaccagtggctgttaaacatgttgttaaggaaagggtcacagaatggggaagcctcgggggggcaacggtgccacttgaggttgtcctgttgcggaaagtgggagccgctggcggggctaggggggtcatccggctgctggattggttcgaacggccagatgggttcctgctggtgcttgaacgccccgagccagcacaagaccttttcgatttcataacagagaggggggctttggacgaaccactcgcacggcggttctttgcacaggtacttgccgcagttcgccactgccactcgtgcggggtggtccacagagacataaaggacgagaacttacttgtggatttgagatcaggagaattgaaactgattgattttggctccggcgctctgctcaaagataccgtctatactgacttcgacgggactcgtgtgtattcacccccggagtggattagataccatcgctaccacggccgctctgcaacagtatggtcattgggggtgcttttgtacgacatggtatgtggcgacatacccttcgagcaagatgaggaaatccttagggggcggctgttgtttcgaaggcgggtgagtccagaatgtcagcagcttattagatggtgcttgtcgctgcggccttcagaacgccctagtctggatcagattgcagcgcacccatggatgctgggggccgacggcggcgtcccggaaagttgtgacctccggctctgcaccctggacccggacgacgtcgcctccacaacgtccagttccgaatctctctag

SEQ ID NO: 19045 - DNA, 981 bp, Artificial Sequence
  derived and/or modified sequence
atgctgctgagcaagtttggcagcctggcccacctgtgtggccctggaggagtggaccacctgcctgtgaagatcctgcagcctgccaaggctgacaaggagagctttgagaaggcctaccaggtgggcgctgtgctgggcagcggcggctttggaacagtgtatgccggcagcagaattgctgatggcctgcctgtggccgtgaagcacgtggtgaaggagcgggtgacagagtggggcagcctgggcggggccaccgtgcccctggaggtggtgctgctgaggaaggtgggcgccgccggcggggcccggggcgtcatccggctgctggactggtttgagaggccagatggcttcctgctggtgctggagaggcctgagcccgcccaggacctgtttgacttcatcacagagcggggggccctggatgagcccctggcccggcgcttctttgcccaggtgctggccgctgtgcgccactgccacagctgtggggtggtgcaccgggacatcaaggatgagaacctgctggtggacctgcggagcggggagctgaagctgattgactttggcagcggggccctgctgaaggacacagtgtacacagactttgatggcaccagggtgtacagccccccagagtggatccgctaccaccgctaccacggccgcagcgccaccgtgtggagcctgggcgtgctgctgtatgacatggtgtgtggggacatcccctttgagcaggatgaggagatcctgcggggccgcctgctcttcagaagaagagtgtccccagagtgccagcagctgatccgctggtgcctgagcctgcggcccagcgagcggcccagcctggaccagattgctgcccacccctggatgctgggcgcagatggaggagtgcctgagagctgtgacctgcggctgtgcaccctggaccctgatgatgtggccagcaccaccagcagcagcgagagcctgtag

SEQ ID NO: 19046 - DNA, 981 bp, Artificial Sequence
  derived and/or modified sequence
atgctgctgagcaagttcggcagcctggcccacctgtgcggccccggtggcgtggaccacctgcctgtaaagatcctgcagccggccaaagcagacaaggaaagcttcgagaaagcctaccaggtaggtgctgtattaggcagtggcggctttggcacagtgtacgcggggtcacgcatcgctgatggccttcccgtggccgttaaacatgtagttaaggagcgtgtgaccgaatggggatccctcggaggcgctactgtgcctctcgaggtcgttctccttagaaaagtaggggcagctggcggggctaggggtgtgataagacttctggactggttcgagcggcctgacggctttctcctggtcttggagagaccggagcctgctcaggacctgttcgattttatcacagaacggggtgctctggatgagcctctggcccgcagattctttgctcaggtcctagccgccgttcgtcattgccacagctgcggggttgtccaccgagatataaaagacgagaacctactggtcgatctgaggtccggcgaacttaagctaatcgactttggtagcggcgccctcctgaaagacacagtgtataccgacttcgacggcacacgggtttactcccctcccgagtggatcaggtaccatagataccatggcagaagtgccacagtgtggtcattaggggtgttgctatatgacatggtgtgtggcgatatccctttcgaacaggacgaagaaatcctgagggggaggttgttattccgaagaagagtatctccagagtgccaacagttgattcggtggtgtctctccctccggccgtctgaaagacccagcttggatcaaatcgctgcccacccttggatgctgggcgcggatggtggtgtgcctgagagttgcgacctcagactttgtaccctggatccagatgatgtggctagcacgacatcctcgtctgagtcactgtag

SEQ ID NO: 19047 - DNA, 981 bp, Artificial Sequence
  derived and/or modified sequence
atgctcctctctaaattcggcagcctggctcatctatgcgggccaggtggggttgatcacctgccggtgaagatcctgcagccggcaaaggcagacaaagaaagctttgagaaggcgtatcaggtgggtgccgtcctagggtctgggggattcggtactgtgtacgctggctcgcggattgcggatggactccccgtcgctgtgaagcatgtcgtcaaagagcgtgtaactgagtgggggagtcttgggggagcaacagttccgctggaggtggtactgcttcgcaaggttggagctgcgggtggcgcacgaggtgttattaggctgttggactggtttgaacggccagatggtttccttctcgtcctcgaacgacccgaacctgcccaggacctgtttgatttcattacggagcgaggggctctggatgaaccgctggctagaaggttttttgcccaggtccttgccgcagttcgccattgtcactcttgcggcgtggtccaccgcgacattaaagatgagaatcttctggtagacctgaggtctggtgaattgaagctcatcgactttgggagcggcgctttactgaaggacaccgtttatacagactttgacgggacccgtgtctatagcccgccagagtggattagataccatcgatatcatggcagatctgcaaccgtctggtctttaggcgtcctcttgtatgatatggtctgcggcgatatcccttttgaacaggatgaagagatactacgcggaaggcttttgttccgacggagggtctctcccgagtgtcagcagctgataaggtggtgcttgtctcttagaccatctgaaagacccagcctggatcagatcgctgcccacccatggatgctgggggcagatggcggagtacctgaaagttgtgacctgcgactgtgtacgcttgatcccgatgacgttgccagtaccacctctagttcagagagcctgtag

SEQ ID NO: 19048 - protein, 203 aa, Artificial Sequence
  derived and/or modified sequence
MAHVSSETQDVSPKDELTASEASTRSPLCEHTFPGDSDLRSMIEEHAFQVLSQGSLLESPSYTVCVSEPDKDDDFLSLNFPRKLWKIVESDQFKSISWDENGTCIVINEELFKKEILETKAPYRIFQTDAIKSFVRQLNLYGFSKIQQNFQRSAFLATFLSEEKESSVLSKIRFTKMKLSRSSTYENRYLCCNLHLKDESNYS

SEQ ID NO: 19049 - DNA, 645 bp, Artificial Sequence
  derived and/or modified sequence
atggcccacgtgagcagcgagacccaggacgtgagccccaaggacgagctgaccgccagcgaggccagcaccagaagccccctgtgcgagcacaccttccccggcgacagcgacctgagaagcatgatcgaggagcacgccttccaggtgctgagccagggcagcctgctggagagccccagctacaccgtgtgcgtgagcgagcccgacaaggacgacgacttcctgagcctgaacttccccagaaagctgtggaagatcgtggagagcgaccagttcaagagcatcagctgggacgagaacggcacctgcatcgtgatcaacgaggagctgttcaagaaggagatcctggagaccaaggccccctacagaatcttccagaccgacgccatcaagagcttcgtgagacagctgaacctgtacggcttcagcaagatccagcagaacttccagagaagcgccttcctggccaccttcctgagcgaggagaaggagagcagcgtgctgagcaagctgcacgtgttcgtgttccaccacagcctgttcggcgccaccttcggcgagcaccacttccagccctgccccctgcccagcggcaacaaggcccccatcagcacctggagcggcgacagctggctgctgtag

SEQ ID NO: 19050 - DNA, 612 bp, Artificial Sequence
  derived and/or modified sequence
atggctcacgtgtcatcagaaacccaggacgtatctcccaaagacgaacttactgcaagcgaggccagcactagaagcccgctgtgcgagcacaccttccccggtgacagcgatctgaggtctatgatcgaagagcacgctttccaggtgctgtcccaaggatctctgctggaaagtccctcatacacagtgtgtgtttccgaaccagacaaagacgatgactttctgagtctgaattttcctcgtaagctgtggaaaatcgtggagtcagaccagtttaagtcaattagttgggacgagaacggaacctgtattgtgattaatgaagaactgtttaaaaaagaaatactggaaactaaggccccttaccgaatcttccagaccgacgccatcaaatcattcgttcgccagctgaatctgtatggcttttctaaaatacagcagaattttcaacggagcgcattcttggctaccttcctgagcgaggagaaggagtccagcgtattgtcaaagatcagatttactaaaatgaagttgtcacgctccagcacctacgagaacaggtacctctgctgtaatctgcacctcaaggatgagagtaactattcttag

SEQ ID NO: 19051 - DNA, 612 bp, Artificial Sequence
  derived and/or modified sequence
atggctcacgtgtccagtgaaacccaggatgtgtcaccaaaggatgagctgaccgcttctgaggcctcaacacgctctcccctctgtgagcacaccttccccggcgatagtgatctgaggtccatgatcgaggagcatgccttccaggtgctttcccagggctctctccttgagtctccttcctacacagtctgcgttagcgaacccgataaagatgatgattttctgtctctaaatttcccgaggaagctctggaagatagtggagagcgatcagttcaaatctatatcttgggatgaaaacggaacttgtatcgtcatcaacgaggagctgtttaaaaaagagatattagaaactaaggccccttatagaatctttcaaacagatgcgataaaatcatttgtgcgccagttaaacctctacggcttttccaaaatccagcagaacttccagcggtccgccttcctagccactttcttgtcagaggagaaggaaagctcagtgctgagtaagattcgatttaccaaaatgaaactttccaggtcaagtacctacgaaaacagatatctgtgctgtaacctccatttgaaggacgagagcaattatagctag

SEQ ID NO: 19052 - DNA, 645 bp, Artificial Sequence
  derived and/or modified sequence
atggcccatgtgtcttcggaaacgcaagacgtgtctccaaaggacgaactgacagcttcagaagcaagcacccgatcccctctgtgtgagcatactttccctggagatagtgaccttcgctcaatgattgaagagcatgcgtttcaggtgttgtctcagggctccctgctcgagtcaccttcctacacagtgtgtgtatctgaacctgataaggatgatgactttctgagtctgaacttccccaggaagctttggaaaattgtggaatccgaccaatttaagtccatttcctgggatgagaatggcacgtgcatcgtgattaacgaagaactgttcaagaaggagatcctcgaaaccaaagctccttaccgcatcttccagaccgacgccataaagagcttcgtgagacagctgaacttgtacggtttttcaaagatacagcagaactttcagaggtcagccttcttagctacctttctgtctgaggaaaaggaatctagcgtgctaagtaaattgcatgtgttcgtcttccaccacagcttgttcggcgccacattcggcgagcaccactttcaaccatgtcccctaccatcaggcaacaaagcccctatctctacttggtccggcgatagctggctcttgtag

SEQ ID NO: 19053 - DNA, 645 bp, Artificial Sequence
  derived and/or modified sequence
atggcccatgtaagctccgagacccaggacgtaagcccaaaggacgagctcactgctagcgaggcaagcacacggtcaccactgtgtgaacataccttccctggtgacagcgatctgagatcaatgatagaggaacatgcctttcaggtgctgagccagggtagtctcctggagtcacccagctacactgtctgcgttagtgaacctgacaaagacgacgacttccttagtctgaattttcctcggaagctttggaaaatcgttgagagtgaccagtttaaatctatttcctgggacgagaatgggacatgtatcgtaatcaacgaggagctctttaagaaagagatactggaaactaaggctccctacagaatattccagacagacgcgataaaaagtttcgtccggcagctgaacctgtatgggttttcaaaaatccagcagaactttcagagatccgcatttctggccaccttcttaagcgaagaaaaagaatctagtgtgttgtctaagctgcatgtgttcgtgtttcatcattcgttgttcggcgctactttcggcgagcaccactttcagccatgccccctgcctagcggaaacaaggcccctataagtacctggtccggggacagttggctcctgtag

SEQ ID NO: 19054 - DNA, 612 bp, Artificial Sequence
  derived and/or modified sequence
atggcccacgtgagcagcgagacccaggatgtgagccccaaggatgagctgacagccagcgaggccagcaccaggagccccctgtgtgagcacaccttccctggggacagcgacctgcgctccatgattgaggagcacgccttccaggtgctgagccagggcagcctgctggagagccccagctacacagtgtgtgtgtctgagccagacaaggatgatgacttcctgagcctgaacttccccaggaagctgtggaagatcgtggagagtgaccagttcaagagcatctcctgggatgaaaatggcacctgcatcgtcatcaatgaggagctgttcaagaaggagatcctggagaccaaggccccctaccgcatcttccagacagatgccatcaagagctttgtgcggcagctgaacctgtatggcttcagcaagatccagcagaacttccagaggtctgccttcctggccaccttcctgtctgaggagaaggagagctctgtgctgagcaagatccgcttcaccaagatgaagctgagccgcagcagcacctatgagaaccgctacctgtgctgcaacctgcacctgaaggatgagagcaactacagctag

SEQ ID NO: 19055 - DNA, 645 bp, Artificial Sequence
  derived and/or modified sequence
atggcccacgtgagcagcgagacccaggatgtgagccccaaggatgagctgacagccagcgaggccagcaccaggagccccctgtgtgagcacaccttccctggggacagcgacctgcgctccatgattgaggagcacgccttccaggtgctgagccagggcagcctgctggagagccccagctacacagtgtgtgtgtctgagccagacaaggatgatgacttcctgagcctgaacttccccaggaagctgtggaagatcgtggagagtgaccagttcaagagcatctcctgggatgaaaatggcacctgcatcgtcatcaatgaggagctgttcaagaaggagatcctggagaccaaggccccctaccgcatcttccagacagatgccatcaagagctttgtgcggcagctgaacctgtatggcttcagcaagatccagcagaacttccagaggtctgccttcctggccaccttcctgtctgaggagaaggagagctctgtgctgagcaagctgcacgtgtttgtgttccaccacagcctgtttggagccaccttcggggagcaccacttccagccctgccccctgcccagcggcaacaaggcccccatcagcacctggagcggggacagctggctgctgtag

SEQ ID NO: 19056 - DNA, 1390 bp, Artificial Sequence
  derived and/or modified sequence
agcatttgaagctgcagtcctgaaaaccatgcaggccggaagagtagataaagaaatatttatttgagatggcacatgtttcttcagaaactcaagatgtttcccccaaagatgaattaactgcttcagaagcctccactaggtctccattgtgtgaacacaccttccctggggactcagacttacggtcaatgattgaagaacatgcttttcaggttttgtcacaaggatccttgttagaaagtccaagttacacagtttgtgtctctgagccagataaagatgatgattttctttctctgaactttcccaggaaactttggaaaatagtggaaagtgaccaattcaagtctatttcatgggatgagaatggaacttgcatagtgattaatgaagaactcttcaagaaagaaattttggaaacaaaggctccttacagaatatttcaaactgatgctatcaaaagttttgttcgacagctcaacctttatggatttagtaaaattcaacagaattttcaaagatctgcctttctagccacctttctgtcagaagagaaagaatcgtctgtcttaagcaagcttcatgtctttgtgtttcaccacagtctatttggagcaacattcggagaacatcactttcagccatgccctttaccatctggtaacaaggctcccatttctacttggagtggagattcctggttgctgtgatgaaatgggatacactggggatccagctgcacaacttttcggaagcagcattcactgtggatttggtatattatgcagcttttggtgtcacaggctaaggtctgacaagattcaccatgcagttttctgggatagcagaaaatgaacatggatttggacagccagattcctcaggatggaaacctagtggtgccatctaaccatatacgtatatttccaagttgtgcataagtagaaaaagtttagaatccatcatctaaaaagggaatcctgatttcctttcctggcagaccatgacagaaagacaaaggtcatttcacctatatccacatgctattaactttttagttctcaaactgggttttcagaaggtagtgtgatagacatggttaaatggttaacaggaagaatgtttaaaaaaaaaattccggctggggtggtggctcaggcctgtaatcacagcattttgggaggccaagctgagtcaggagaatcgcttgaacccaggaggcggaggttgcagtaagctgagatcctgcttttgcgctccagcctgggtgacagagtaagacttcatcttaaagaaatccacaacaataaaaaggctaatgccagacacaataaaaaatgaaaagaataacttgggtgaacagcaaggcaagaaagaaaaaaggaaa

SEQ ID NO: 19057 - DNA, 1374 bp, Artificial Sequence
  derived and/or modified sequence
agcatttgaagctgcagtcctgaaaaccatgcaggccggaagagtagataaagaaatatttatttgagatggcacatgtttcttcagaaactcaagatgtttcccccaaagatgaattaactgcttcagaagcctccactaggtctccattgtgtgaacacaccttccctggggactcagacttacggtcaatgattgaagaacatgcttttcaggttttgtcacaaggatccttgttagaaagtccaagttacacagtttgtgtctctgagccagataaagatgatgattttctttctctgaactttcccaggaaactttggaaaatagtggaaagtgaccaattcaagtctatttcatgggatgagaatggaacttgcatagtgattaatgaagaactcttcaagaaagaaattttggaaacaaaggctccttacagaatatttcaaactgatgctatcaaaagttttgttcgacagctcaacctttatggatttagtaaaattcaacagaattttcaaagatctgcctttctagccacctttctgtcagaagagaaagaatcgtctgtcttaagcaagcttcatgtctttgtgtttcaccacagtctatttggagcaacattcggagaacatcactttcagccatgccctttaccatctggtaacaaggctcccatttctacttggagtggagattcctggttgctgtgatgaaatgggatacactggggatccagctgcacaacttttcggaagcagcattcactgtggatttggtatattatgcagcttttggtgtcacaggctaaggtctgacaagattcaccatgcagttttctgggatagcagaaaatgaacatggatttggacagccagattcctcaggatggaaacctagtggtgccatctaaccatatacgtatatttccaagttgtgcataagtagaaaaagtttagaatccatcatctaaaaagggaatcctgatttcctttcctggcagaccatgacagaaagacaaaggtcatttcacctatatccacatgctattaactttttagttctcaaactgggttttcagaaggtagtgtgatagacatggttaaatggttaacaggaagaatgtttaaaaaaaaaattccggctggggtggtggctcaggcctgtaatcacagcattttgggaggccaagctgagtcaggagaatcgcttgaacccaggaggcggaggttgcagtaagctgagatcctgcttttgcgctccagcctgggtgacagagtaagacttcatcttaaagaaatccacaacaataaaaaggctaatgccagacacaataaaaaatgaaaagaataacttgggtgaacagcaaggcaa

SEQ ID NO: 19058 - DNA, 612 bp, Artificial Sequence
  derived and/or modified sequence
atggcccacgtgagcagcgagacccaggacgtgagccccaaggacgaacttactgcgtccgaggcgtctacccggtcacctttatgtgagcataccttccctggggacagcgatctgagatccatgatcgaggaacacgcctttcaggtgctcagccagggcagtttactcgagtcgccaagctacactgtttgtgtcagcgagccagataaagacgacgatttcctcagccttaacttccctcgaaaactatggaagatagtggaatccgaccagtttaagagcatcagctgggatgagaacggaacatgcatcgtgattaatgaggagctgttcaaaaaagagatcctggagacaaaagctccatatcggatcttccaaaccgatgctataaaaagcttcgtgagacagctgaacctttatgggttctccaaaattcagcagaattttcagcgatccgcattccttgctacattcctcagtgaagagaaggaatcgtcagtactatccaagattcgattcactaagatgaaactctcgcgatccagtacttacgaaaatcgctacttgtgttgcaacctgcatctgaaggacgaaagtaactacagttag

SEQ ID NO: 19059 - DNA, 612 bp, Artificial Sequence
  derived and/or modified sequence
atggcccacgtgagcagcgagacccaggacgtgagccccaaggacgagcttacagcctccgaggcaagcacccggtcaccattgtgtgagcacacctttcccggcgattccgacctccggagtatgatcgaggagcacgccttccaggtactatcacagggcagtttactcgagagtccatcctacacggtgtgcgtgtccgagcccgataaggacgacgattttctgagtctgaactttcccagaaaactgtggaagattgttgaaagcgaccagttcaagagcatttcgtgggatgaaaatgggacctgcatcgttataaatgaggaacttttcaaaaaagagattttagagaccaaagctccgtaccgaatcttccaaacggacgcaatcaaaagcttcgtgcgacagctgaatctctatggtttcagcaaaatccagcagaatttccagcggagtgcattcctggctacattcttaagcgaagaaaaagaaagctctgtgctcagtaagatacgatttacaaagatgaaattgtccagaagcagtacatacgagaatcggtatctctgttgcaacctacatctgaaggacgagtccaattactcatag

SEQ ID NO: 19060 - DNA, 645 bp, Artificial Sequence
  derived and/or modified sequence
atggcccacgtgagcagcgagacccaggacgtgagccccaaggacgaacttactgcgagcgaagcttccacaaggagccccctctgcgagcatacctttcctggagattctgatctccgcagcatgattgaagagcacgccttccaggtactgtctcaaggctcccttctggaaagcccgtcttacacggtttgcgtgtcagaaccagacaaagacgatgattttctgagcctcaactttcccagaaagctgtggaaaatcgttgagagcgatcaattcaagagtatcagctgggacgagaacggcacctgtattgtgataaatgaagagctgtttaagaaggagattctcgaaaccaaggccccatataggatctttcagactgacgcgatcaagagctttgttaggcaactcaacctctacggtttcagcaagattcagcagaattttcagcgttcagctttcctggccacgttcttgtccgaagaaaaggaaagctctgtgttgagcaagttgcacgtcttcgtgtttcaccactctctgtttggcgcaaccttcggagaacatcactttcagccctgccccctgccttctggaaataaagctccaatctctacttggagtggcgattcttggctcctgtag

SEQ ID NO: 19061 - DNA, 645 bp, Artificial Sequence
  derived and/or modified sequence
atggcccacgtgagcagcgagacccaggacgtgagccccaaggacgaacttaccgcttcagaggcctccacccgaagccctctatgtgagcacacatttccaggagactcagatcttcgttccatgatagaagagcacgcctttcaggtgttatcacagggatcacttttagagtcaccttcctacactgtttgtgtcagcgagccagataaggatgatgacttcctctctctgaacttcccccggaaactatggaagatagtggagagcgaccagtttaaaagcataagctgggacgaaaacgggacgtgcatcgttatcaatgaagagctgttcaagaaagagatcctggagactaaggccccgtaccgaatcttccagacggatgccatcaagtcgttcgtgaggcagcttaacctgtacgggttcagtaagattcagcagaactttcagcgcagcgcgttccttgctaccttcctcagcgaggaaaaggagtcaagcgtgctgtccaagttacacgtgttcgtctttcatcactccctgttcggcgcaacctttggagagcaccacttccagccgtgtcccctgccgagcggtaataaagcgccgatcagtacttggagcggtgatagctggctgctttag

SEQ ID NO: 19062 - DNA, 612 bp, Artificial Sequence
  derived and/or modified sequence
atggcacacgtgtccagtgaaacccaggatgtttcacctaaggatgagttaactgcctcggaggccagcacgcgatccccactttgtgaacacaccttccctggggattccgacctgaggtctatgattgaggagcacgcctttcaggtgctgtctcagggttccttgcttgagtccccgtcatacacagtctgcgtcagcgagcccgataaggacgacgactttctgagcttaaacttccccagaaaactttggaaaattgtggagtctgaccagtttaaatccatctcttgggacgaaaatggcacttgtatcgtcattaacgaagagctgtttaaaaaagaaattttagagactaaggccccttaccgcatttttcaaaccgatgcaattaagtcttttgtcaggcaactgaatctctacggtttctccaagatccagcagaattttcagcgttccgcatttctggctacttttctcagtgaggagaaggaatcctccgtgctgtcaaagatacgatttactaagatgaagctgtcaagatcatcgacatatgaaaaccgttacttgtgctgtaatctgcacttgaaagatgaatctaactattcctag

SEQ ID NO: 19063 - DNA, 612 bp, Artificial Sequence
  derived and/or modified sequence
atggcccacgtctcctcagagactcaagacgtctcccccaaggacgaactcacggcttccgaagcgtccacaagatctcccctgtgcgagcataccttccctggcgattcagacctgcggtctatgatcgaggaacatgccttccaggtgctctcccagggcagcttactcgagtctccatcttatacagtgtgtgtctctgagccagacaaggacgacgactttctttcattaaatttccccaggaaactatggaagattgtagaatccgatcagtttaagtccatcagttgggacgaaaacggaacctgcatcgttataaacgaggaactgtttaagaaggaaatcctcgagacaaaggccccttaccgaatcttccagacagacgccattaaatcttttgtgcggcagctgaatctgtatggttttagtaagatccagcagaattttcagcgatccgcatttctggctacatttctcagcgaggagaaagaaagctcagtgctgtctaaaattaggttcactaaaatgaagctttcccggtcatccacgtacgaaaaccgatatctgtgctgtaatctacatttgaaagacgaaagcaattacagttag

SEQ ID NO: 19064 - DNA, 645 bp, Artificial Sequence
  derived and/or modified sequence
atggctcatgtctcaagtgaaactcaagacgtctcccccaaggacgagttgaccgcgtcagaagcttctactaggtctcctctgtgtgagcatacctttcccggagatagcgatttacgatctatgatcgaagaacatgcctttcaagtgctgtctcaagggtccctgttagaaagtccgagttataccgtttgtgtgtctgaaccggataaggacgatgatttcctaagcttgaattttccacgtaagctatggaagattgtggaatcagatcagtttaagtcaataagctgggacgagaatggcacttgtattgtgattaacgaagagctcttcaagaaggaaatactcgaaacaaaagccccttaccgaatttttcagacagatgccataaagagctttgtgaggcagttgaatctttatggcttctccaaaattcagcaaaactttcaacggagcgcattcctggcgacgtttttgtctgaggaaaaagagtcctccgtgctgtcaaagctccacgtcttcgtttttcaccactctctgtttggcgctacgttcggcgaacaccacttccaaccttgccccctaccctctggtaataaagcccctatctccacatggtcaggcgacagctggctactctag

SEQ ID NO: 19065 - DNA, 645 bp, Artificial Sequence
  derived and/or modified sequence
atggcacatgtgagcagcgaaacccaggacgtatctccaaaagatgaactgacagctagcgaagcctccactcggtcacccttgtgcgaacacacatttcccggtgactccgacctgcgcagcatgattgaggaacacgcctttcaggtgctctctcagggttccttgctggagtcccccagctacacagtgtgcgtctcagagcccgacaaagatgacgactttctgtccctcaatttccccaggaagctctggaagattgtcgaatctgatcagttcaaatcaattagctgggacgagaacggaacgtgcattgtcattaatgaagagctattcaaaaaagaaattttggagacgaaggcaccgtaccgtatattccaaactgatgctattaaaagtttcgtgcgacagctgaacctttacgggttctctaagattcagcaaaacttccagcgatctgcatttctcgccaccttcctgtcggaagagaaggagtcttcagttctgtctaagttacacgtgttcgtgtttcaccactcactcttcggtgctacttttggtgaacaccacttccaaccctgccccctgccatccgggaacaaggctcccatatccacttggtctggcgatagttggctcctatag

SEQ ID NO: 19066 - DNA, 1038 bp, Artificial Sequence
  derived and/or modified sequence
taagtgtacatgcttaggccttctgaagcagcatttgaagctgcagtcctgaaaaccatgcaggccggaagagtagataaagaaatatttatttgagatggcacatgtttcttcagaaactcaagatgtttcccccaaagatgaattaactgcttcagaagcctccactaggtctccattgtgtgaacacaccttccctggggactcagacttacggtcaatgattgaagaacatgcttttcaggttttgtcacaaggatccttgttagaaagtccaagttacacagtttgtgtctctgagccagataaagatgatgattttctttctctgaactttcccaggaaactttggaaaatagtggaaagtgaccaattcaagtctatttcatgggatgagaatggaacttgcatagtgattaatgaagaactcttcaagaaagaaattttggaaacaaaggctccttacagaatatttcaaactgatgctatcaaaagttttgttcgacagctcaacctttatggatttagtaaaattcaacagaattttcaaagatctgcctttctagccacctttctgtcagaagagaaagaatcgtctgtcttaagcaagatacgcttcaccaaaatgaaactttccagatcttcaacttatgaaaacaggtatttatgttgcaacttacatttaaaagatgagtcgaattactcataatccttagaagttagcttgtccgcatctgaaaattcacttttaccttgaagttcaatctgtctctgggaaagactagattggaagaataaaattcaagaatgtgatgttttagtaatggaaaagccaagagcgtcaggtggcaaaagtccttctgttactcaagaaaatgctctgaaaaattccttttctcttttttttttgtaaagattaactccacctcaccaccacaatgaggtatttttctcagcaattgacacctgtttactcagttactccctgtaactatgttatgctgtgaagtaggcaatacagttgttaaagaagaataa

SEQ ID NO: 19067 - DNA, 612 bp, Artificial Sequence
  derived and/or modified sequence
atggcccacgtgagcagcgagacccaggacgtgagccccaaggacgagctgaccgccagcgaggccagcaccagaagccccctgtgcgagcacaccttccccggcgacagcgacctgagaagcatgatcgaggagcacgccttccaggtgctgagccagggcagcctgctggagagccccagctacaccgtgtgcgtgagcgagcccgacaaggacgacgacttcctgagcctgaacttccccagaaagctgtggaagatcgtggagagcgaccagttcaagagcatcagctgggacgagaacggcacctgcatcgtgatcaacgaggagctgttcaagaaggagatcctggagaccaaggccccctacagaatcttccagaccgacgccatcaagagcttcgtgagacagctgaacctgtacggcttcagcaagatccagcagaacttccagagaagcgccttcctggccaccttcctgagcgaggagaaggagagcagcgtgctgagcaagatcagattcaccaagatgaagctgagcagaagcagcacctacgagaacagatacctgtgctgcaacctgcacctgaaggacgagagcaactacagctag

SEQ ID NO: 19068 - protein, 214 aa, Artificial Sequence
  derived and/or modified sequence
MSPKPRASGPPAKAKEAGKRKSSSQPSPSDPKKKTTKVAKKGKAVRRGRRGKKGAATKMAAVTAPEAESGPAAPGPSDQPSQELPQHELPPEEPVSEVEEPLSQESQVEEPLSQESEVEEPLSQESQVEEPLSQESEVEEPLSQESQVEEPLSQESEVEEPLSQESQVEEPLSQESEMEEPLSQESQVEEPLSQESEMEEPLSQESEMEELPSV

SEQ ID NO: 19069 - protein, 246 aa, Artificial Sequence
  derived and/or modified sequence
MSPKPRASGPPAKAKEAGKRKSSSQPSPSDPKKKTTKVAKKGKAVRRGRRGKKGAATKMAAVTAPEAESGPAAPGPSDQPSQELPQHELPPEEPVSEGTQHDPLSQESELEEPLSQESEVEEPLSQESQVEEPLSQESEVEEPLSQESQVEEPLSQESEVEEPLSQESEVEEPLSQESQVEEPLSQESEVEEPLSQESQVEEPLSQESEMEEPLSQESQVEEPLSQESEMEEPLSQESEMEELPSV

SEQ ID NO: 19070 - DNA, 645 bp, Artificial Sequence
  derived and/or modified sequence
atgagccccaagcccagagccagcggcccccccgccaaggccaaggaggccggcaagagaaagagcagcagccagcccagccccagcgaccccaagaagaagaccaccaaggtggccaagaagggcaaggccgtgagaagaggcagaagaggcaagaagggcgccgccaccaagatggccgccgtgaccgcccccgaggccgagagcggccccgccgcccccggccccagcgaccagcccagccaggagctgccccagcacgagctgccccccgaggagcccgtgagcgaggtggaggagcccctgagccaggagagccaggtggaggagcccctgagccaggagagcgaggtggaggagcccctgagccaggagagccaggtggaggagcccctgagccaggagagcgaggtggaggagcccctgagccaggagagccaggtggaggagcccctgagccaggagagcgaggtggaggagcccctgagccaggagagccaggtggaggagcccctgagccaggagagcgagatggaggagcccctgagccaggagagccaggtggaggagcccctgagccaggagagcgagatggaggagcccctgagccaggagagcgagatggaggagctgcccagcgtgtag

SEQ ID NO: 19071 - DNA, 561 bp, Artificial Sequence
  derived and/or modified sequence
atgagccccaagcccagagccagcggcccccccgccaaggccaaggaggccggcaagagaaagagcagcagccagcccagccccagcgaccccaagaagaagaccaccaaggtggccaagaagggcaaggccgtgagaagaggcagaagaggcaagaagggcgccgccaccaagatggccgccgtgaccgcccccgaggccgagagcggccccgccgcccccggccccagcgaccagcccagccaggagctgccccagcacgagctgccccccgaggagcccgtgagcgagggcacccagcacgaccccctgagccaggagagcgagctggaggagcccctgagccaggagagcgaggtggaggagcccctgagccaggagagccaggtggaggagcccctgagccaggagagcgaggtggaggagcccctgagccaggagagccaggtggaggagcccctgagccaggagagcgagatggaggagcccctgagccaggagagccaggtggaggagcccctgagccaggagagcgagatggaggagctgcccagcgtgtag

SEQ ID NO: 19072 - DNA, 651 bp, Artificial Sequence
  derived and/or modified sequence
atgagccccaagcccagagccagcggcccccccgccaaggccaaggaggccggcaagagaaagagcagcagccagcccagccccagcgaccccaagaagaagaccaccaaggtggccaagaagggcaaggccgtgagaagaggcagaagaggcaagaagggcgccgccaccaagatggccgccgtgaccgcccccgaggccgagagcggccccgccgcccccggccccagcgaccagcccagccaggagctgccccagcacgagctgccccccgaggagcccgtgagcgagggcacccagcacgaccccctgagccaggagagcgagctggaggagcccctgagccaggagagcgaggtggaggagcccctgagccaggagagccaggtggaggagcccctgagccaggagagcgaggtggaggagcccctgagccaggagagccaggtggaggagcccctgagccaggagagcgaggtggaggagcccctgagccaggagagccaggtggaggagcccctgagccaggagagcgagatggaggagcccctgagccaggagagccaggtggaggagcccctgagccaggagagcgagatggaggagcccctgagccaggagagcgagatggaggagctgcccagcgtgtag

SEQ ID NO: 19073 - DNA, 561 bp, Artificial Sequence
  derived and/or modified sequence
atgagccccaagcccagagccagcggcccccccgccaaggccaaggaggccggcaagagaaagagcagcagccagcccagccccagcgaccccaagaagaagaccaccaaggtggccaagaagggcaaggccgtgagaagaggcagaagaggcaagaagggcgccgccaccaagatggccgccgtgaccgcccccgaggccgagagcggccccgccgcccccggccccagcgaccagcccagccaggagctgccccagcacgagctgccccccgaggagcccgtgagcgagggcacccagcacgaccccctgagccaggagagcgagctggaggagcccctgagccaggagagcgaggtggaggagcccctgagccaggagagccaggtggaggagcccctgagccaggagagcgaggtggaggagcccctgagccaggagagccaggtggaggagcccctgagccaggagagcgaggtggaggagcccctgagccaggagagcgaggtggaggagcccctgagccaggagagcgagatggaggagctgcccagcgtgtag

SEQ ID NO: 19074 - DNA, 645 bp, Artificial Sequence
  derived and/or modified sequence
atgtcccctaagcccagggccagcggaccacccgcaaaggccaaggaggccggtaagagaaagtcgagcagccagcctagtcctagcgaccctaaaaagaaaacgactaaggtagccaaaaaaggtaaggctgtgcgtagaggacgcaggggcaagaagggcgcagcaaccaaaatggccgcggtaactgcccctgaggcagagagtggccccgctgctcctggaccatccgaccaaccatctcaggagctcccacaacacgaacttcctcctgaggagccagtgagtgaggtggaggagcccctttcacaggagagccaagtagaagaaccactgtcacaggaaagcgaggttgaggaaccattaagccaggaaagccaggtcgaggaacctctatctcaggagtcggaagtcgaagaacccctaagccaggaaagccaggtggaggaaccgctgtctcaggagagtgaagttgaagagcccctttcgcaggaaagtcaggttgaagagcctctgagtcaagagagcgagatggaggaacccctgagccaggagtcgcaagtcgaggagccgctttcgcaggagtcggagatggaggagccactgagccaggagtccgagatggaagagttgccttccgtgtag

SEQ ID NO: 19075 - DNA, 561 bp, Artificial Sequence
  derived and/or modified sequence
atgagcccgaagccacgagctagtggtcctcccgccaaggccaaggaagcaggtaaacggaagagttccagtcagccttcaccgtctgatccaaagaagaaaaccaccaaggtggctaagaagggtaaggccgtaagaagggggaggcgcggaaagaaaggtgccgccactaaaatggccgcagttacagcccccgaagctgaatctggtccagctgccccaggcccctctgaccagccatcgcaggaactaccgcagcacgaactccctcccgaagagcccgtgtctgaagggacccagcacgaccccctcagtcaggaatctgaactggaggagcctcttagccaggagtccgaagtggaagagccactgagccaagaaagtcaagtggaggaacctctatctcaagagagcgaagtcgaagagccactgagtcaggaatcccaagttgaagaacctttaagccaagaatccgaaatggaggagccactgtcgcaggaatctcaggttgaagaacctctgtcccaggagtctgaaatggaggaacttccatcagtttag

SEQ ID NO: 19076 - DNA, 651 bp, Artificial Sequence
  derived and/or modified sequence
atgtcaccaaagcccagggcctcggggcccccggctaaagcaaaggaggcaggtaagcggaagtcatcctctcagccctctccatctgaccccaaaaagaaaactacaaaggtagctaagaagggaaaggcagtgaggagggggcgccgcggtaaaaaaggcgccgccaccaaaatggccgcagtgaccgcccctgaggccgagtcaggccctgcagcaccggggccgagcgatcaaccctctcaggaactgcctcaacacgagctgccacctgaagagcccgtctccgaggggacacagcatgatcctctgtcgcaggagagtgagctagaggagccacttagccaagagtccgaggtggaggaaccgctgtcccaggagtcgcaggtggaggagccactgagccaagaaagcgaggtcgaggagccattgtcccaggagagccaggtggaggaaccactgagccaggaaagcgaggtggaggagccactgtcacaagagtcacaagtggaagagccgctgtcccaagagtccgagatggaagagccactcagtcaggaatcccaagtggaggagccgctgtctcaggaaagcgagatggaggagccactgagccaggagagcgaaatggaagagctgcctagcgtctag

SEQ ID NO: 19077 - DNA, 561 bp, Artificial Sequence
  derived and/or modified sequence
atgtcacccaagccccgggctagcggacctccagccaaggcaaaagaggccggaaagaggaaatctagttcccagccttctccatctgatcccaaaaaaaagacaactaaggtagctaaaaagggcaaggcagtgagaaggggccgcaggggaaaaaaaggtgcggctaccaaaatggccgcagtaactgcaccagaagctgagtctgggcctgccgcccctggtccctccgatcagccgtcgcaggagttaccgcagcatgaactgccacccgaagagcccgtctcagaagggacgcagcacgacccacttagccaggaaagtgagctcgaagagcccctgtctcaggaatcagaggtggaggagccactttcacaggagagccaggtggaagaacctctgagccaggagagcgaggtggaggagcccctctcccaggagagccaggttgaggagccattaagtcaggagtctgaagtcgaagagcctctttctcaggagtcagaggttgaagaacctctctctcaggagagtgaaatggaagaattgccgagcgtttag

SEQ ID NO: 19078 - DNA, 645 bp, Artificial Sequence
  derived and/or modified sequence
atgagccccaagccccgggccagcggccccccagccaaggccaaggaggccggcaagaggaagagcagcagccagcccagccccagcgaccccaagaagaagaccaccaaggtggccaagaagggcaaggctgtgcggcggggcagaagaggcaagaagggagctgccaccaagatggctgctgtgacagcccctgaggccgagagcggccctgctgcccctggccccagcgaccagcccagccaggagctgccccagcacgagctgcccccagaggagcctgtgtctgaggtggaggagcccctgagccaggagagccaggtggaggagcccctgagccaggagagcgaggtggaggagcccctgagccaggagagccaggtggaggagcccctgagccaggagagcgaggtggaggagcccctgagccaggagagccaggtggaggagcccctgagccaggagagcgaggtggaggagcccctgagccaggagagccaggtggaggagcccctgagccaggagagcgagatggaggagcccctgagccaggagagccaggtggaggagcccctgagccaggagagcgagatggaggagcccctgagccaggagagcgagatggaggagctgcccagcgtgtag

SEQ ID NO: 19079 - DNA, 561 bp, Artificial Sequence
  derived and/or modified sequence
atgagccccaagccccgggccagcggccccccagccaaggccaaggaggccggcaagaggaagagcagcagccagcccagccccagcgaccccaagaagaagaccaccaaggtggccaagaagggcaaggctgtgcggcggggcagaagaggcaagaagggagctgccaccaagatggctgctgtgacagcccctgaggccgagagcggccctgctgcccctggccccagcgaccagcccagccaggagctgccccagcacgagctgcccccagaggagcctgtgtctgagggcacccagcacgaccccctgagccaggagagcgagctggaggagcccctgagccaggagagcgaggtggaggagcccctgagccaggagagccaggtggaggagcccctgagccaggagagcgaggtggaggagcccctgagccaggagagccaggtggaggagcccctgagccaggagagcgagatggaggagcccctgagccaggagagccaggtggaggagcccctgagccaggagagcgagatggaggagctgcccagcgtgtag

SEQ ID NO: 19080 - DNA, 651 bp, Artificial Sequence
  derived and/or modified sequence
atgagccccaagccccgggccagcggccccccagccaaggccaaggaggccggcaagaggaagagcagcagccagcccagccccagcgaccccaagaagaagaccaccaaggtggccaagaagggcaaggctgtgcggcggggcagaagaggcaagaagggagctgccaccaagatggctgctgtgacagcccctgaggccgagagcggccctgctgcccctggccccagcgaccagcccagccaggagctgccccagcacgagctgcccccagaggagcctgtgtctgagggcacccagcacgaccccctgagccaggagagcgagctggaggagcccctgagccaggagagcgaggtggaggagcccctgagccaggagagccaggtggaggagcccctgagccaggagagcgaggtggaggagcccctgagccaggagagccaggtggaggagcccctgagccaggagagcgaggtggaggagcccctgagccaggagagccaggtggaggagcccctgagccaggagagcgagatggaggagcccctgagccaggagagccaggtggaggagcccctgagccaggagagcgagatggaggagcccctgagccaggagagcgagatggaggagctgcccagcgtgtag

SEQ ID NO: 19081 - DNA, 561 bp, Artificial Sequence
  derived and/or modified sequence
atgagccccaagccccgggccagcggccccccagccaaggccaaggaggccggcaagaggaagagcagcagccagcccagccccagcgaccccaagaagaagaccaccaaggtggccaagaagggcaaggctgtgcggcggggcagaagaggcaagaagggagctgccaccaagatggctgctgtgacagcccctgaggccgagagcggccctgctgcccctggccccagcgaccagcccagccaggagctgccccagcacgagctgcccccagaggagcctgtgtctgagggcacccagcacgaccccctgagccaggagagcgagctggaggagcccctgagccaggagagcgaggtggaggagcccctgagccaggagagccaggtggaggagcccctgagccaggagagcgaggtggaggagcccctgagccaggagagccaggtggaggagcccctgagccaggagagcgaggtggaggagcccctgagccaggagagcgaggtggaggagcccctgagccaggagagcgagatggaggagctgcccagcgtgtag

SEQ ID NO: 19082 - DNA, 561 bp, Artificial Sequence
  derived and/or modified sequence
atgagccccaagccccgggccagcggcccccccgccaaggccaaggaagcaggcaagagaaaatcatccagtcagcctagtccaagcgatcctaaaaaaaaaactacaaaagtcgccaagaaaggcaaggctgtacggcggggaagaaggggcaaaaagggagcggctaccaagatggccgccgtaaccgctccggaagccgagtccggccccgctgctcccgggccatcagatcagccatctcaggagctccctcaacacgaacttccccccgaggagcctgtgagcgagggcacacagcacgatccactctcacaggaaagtgagttagaagaacctctgtctcaggaatcggaagttgaggagccccttagccaagagagccaggttgaggagccccttagccaggagagcgaggtcgaagagcccctatcccaagagtcccaggtcgaggaacccctgagccaggagagtgaaatggaggaaccactgagtcaggagagtcaggtggaagagcccctatcacaggagtccgaaatggaggagcttcccagtgtttag

SEQ ID NO: 19083 - DNA, 561 bp, Artificial Sequence
  derived and/or modified sequence
atgagccccaagccccgggccagcggcccccccgccaaggccaaggaagcaggcaagagaaagtccagtagtcagcctagcccatctgatcccaagaagaagactacaaaggtggccaagaagggcaaggctgtgcggagaggcagaagaggtaagaagggggccgccaccaagatggcggccgtaactgcgcccgaggctgaatcaggccccgccgccccaggcccatccgaccagcccagccaggagctgccgcagcatgagctccccccagaggaaccagtatctgagggcacccagcatgatccacttagccaggagagtgaattagaagagcctttatcacaggagtcagaggtggaggaacccctctcacaggagtctcaggtcgaggagccgttatcccaggagagtgaagtcgaggaaccactctcccaagagtcgcaagtagaagaacctttaagtcaggagtccgaagtcgaagagccgttgtctcaggaaagtgaggttgaggagcctctcagtcaggaatcagagatggaagagcttccgagcgtgtag

SEQ ID NO: 19084 - DNA, 645 bp, Artificial Sequence
  derived and/or modified sequence
atgagtcccaagccccgtgccagcgggccaccagctaaagctaaagaagccggtaagcggaaatcgagcagccagccatcaccctccgaccccaagaaaaaaacaactaaggtggcaaaaaagggcaaagctgtgcgcagagggaggcgcggaaagaaaggggcagctacaaaaatggccgcagtaaccgcgccagaagcggaatccggaccagcggctccagggccatccgaccagcccagccaggagctccctcagcacgaactgccacctgaggaaccagtgagcgaggtcgaggaacctctgtcgcaggagtcgcaggtggaagagcccctgtcgcaggaatctgaggtcgaagaaccccttagtcaggagtctcaggttgaagagcccctaagccaagaatccgaggtcgaagaaccgttatcccaggaatctcaggtagaggagccgctgtcgcaggagtctgaggtcgaagagccactatctcaggagtctcaagtagaagagcctttatctcaggagagtgagatggaagaaccactgtcacaggaatcacaggtcgaggaacctctcagtcaagagtccgagatggaggagccccttagccaggagtctgagatggaggaactgccatcggtgtag

SEQ ID NO: 19085 - DNA, 561 bp, Artificial Sequence
  derived and/or modified sequence
atgagccccaagcccagggccagtggccctcccgcaaaggccaaggaagccggtaaaagaaagagcagctcacagccctctccgtccgatcctaagaagaaaaccactaaggtcgctaagaaaggaaaagccgtgcgcagagggaggcggggtaagaagggagccgctaccaagatggcagcagttacagcgcctgaagcagagtcagggcctgcagcccctggacccagcgaccagccaagtcaggagttgccgcaacacgagttgcctcctgaggaaccagtttccgagggaacacagcacgatcctctgagccaggaatccgagctcgaagaaccactctcacaggagtccgaagtggaggaacctctgtcccaggagagccaagtagaggaacctctgtctcaggagtccgaagttgaggagccgctcagccaggaatcccaagtggaggagcctttaagccaggaatctgagatggaggaacccctatctcaggaatcccaggtcgaggaaccactgagtcaggagagtgaaatggaggagctcccaagcgtgtag

SEQ ID NO: 19086 - DNA, 651 bp, Artificial Sequence
  derived and/or modified sequence
atgtcacccaagccaagagcttccggtccccctgccaaagccaaggaagcagggaagaggaaatctagctctcagccaagcccgtccgatccgaagaagaaaaccaccaaagtggcgaagaaggggaaggcggtgcggaggggcaggagaggaaagaagggggcagccactaaaatggcggctgtaactgccccagaggccgagtcgggcccagccgcacctgggccaagcgatcagccctcccaagagctgcctcagcacgagttgccacctgaagaacctgtcagtgagggcactcaacatgaccccctgtcccaggagtccgaacttgaggaaccactatcacaagagagtgaggtggaggagccgctcagccaggagagccaagtcgaagagccgctgagccaggaatctgaagtcgaggagcctctttcccaagagagccaggtggaagagcccctgtcacaggagtcagaggttgaagaacccctgagtcaagagagccaggtggaggaacccctctcccaggagagcgagatggaggagcccctcagtcaggagagccaagtcgaagagccattaagccaagaaagtgagatggaggaacctctgagccaggagtccgagatggaggagctgccatccgtctag

SEQ ID NO: 19087 - DNA, 561 bp, Artificial Sequence
  derived and/or modified sequence
atgtcccccaagccaagagcatctggaccacctgcaaaggcaaaggaggccggaaagcgaaaaagtagctcacagccgtctccctcagatccgaagaaaaagaccactaaggtagcaaaaaagggcaaggccgtacgacgagggagaagaggaaaaaagggcgctgcaaccaaaatggctgctgtgaccgctcctgaagctgagagcgggccagctgctccagggccaagcgaccagccgtctcaggagctgccacagcacgagctacctcctgaggaacctgtaagcgaagggacccaacacgatccactgtcacaagagagtgagctcgaggaaccactctcgcaggaatcagaagttgaagaacctctctctcaggaatcacaggtggaggaacctttaagtcaggagagcgaggtggaggagcccctgtcacaggagtctcaggtggaagagcccctctcccaggagtctgaggtggaggagcctctctctcaggaaagcgaggtagaggaaccattgtcacaggagagcgagatggaagagctacccagtgtgtag

SEQ ID NO: 19088 - DNA, 775 bp, Artificial Sequence
  derived and/or modified sequence
accaatcacagctcaggggcgtgattgtctcgtcctgggatcgcgagaggtgtatatacagggaggccaggcagcctggagttagtcgaccgttgcgagacgttgagctgcggaagatgagtccaaagccgagagcctcgggacctccggccaaggccaaggaggcaggaaagaggaagtcctcctctcagccgagccccagtgacccgaagaagaagactaccaaggtggccaagaagggaaaagcagttcgtagagggagacgcgggaagaaaggggctgcgacaaagatggcggccgtgacggcacctgaggcggagagcgggccagcggcacccggccccagcgaccagcccagccaggagctccctcagcacgagctgccgccggaggagccagtgagcgaggggacccagcacgaccccctgagtcaggagagcgagctggaggaaccactgagtcaggagagcgaggtggaagaaccactgagtcaggagagccaggtggaggaaccactgagtcaggagagcgaggtggaagaaccactgagtcaggagagccaggtggaggaaccactgagtcaggagagcgagatggaagaaccactgagtcaggagagccaggtggaggaaccactgagtcaggagagcgagatggaagaactaccgagtgtgtagacggccaagtactcccctatctccgagagcagcgactaagttcaggcccagccgccagacctcagagatctcaccagcggggtgcttgccattctgat

SEQ ID NO: 19089 - DNA, 994 bp, Artificial Sequence
  derived and/or modified sequence
atgtggatgctgggagaagtatgtgagatggaaaagttgtttcatggcatccaagaagtgaatgatcctcaaggtgtagcagaggaatttgtaggagagagggatgattgacatcttcgtgtagccctccatccatcccagttagcatggagggattttagggctaccattggctgggtagtggagtgttgaccaatcacagctcaggggcgtgattgtctcgtcctgggatcgcgagaggtgtatatacagggaggccaggcagcctggagttagtcgaccgttgcgagacgttgagctgcggaagatgagtccaaagccgagagcctcgggacctccggccaaggccaaggaggcaggaaagaggaagtcctcctctcagccgagccccagtgacccgaagaagaagactaccaaggtggccaagaagggaaaagcagttcgtagagggagacgcgggaagaaaggggctgcgacaaagatggcggccgtgacggcacctgaggcggagagcgggccagcggcacccggccccagcgaccagcccagccaggagctccctcagcacgagctgccgccggaggagccagtgagcgaggggacccagcacgaccccctgagtcaggagagcgagctggaggaaccactgagtcaggagagcgaggtggaagaaccactgagtcaggagagccaggtggaggaaccactgagtcaggagagcgaggtggaagaaccactgagtcaggagagccaggtggaggaaccactgagtcaggagagcgaggtggaggaaccactgagtcaggagagcgaggtggaagaaccactgagtcaggagagcgagatggaagaactaccgagtgtgtagacggccaagtactcccctatctccgagagcagcgactaagttcaggcccagccgccagacctcagagatctcaccagcggggtgcttgccattctgatgataataaaatgaatgtgttgcaaattg

SEQ ID NO: 19090 - DNA, 741 bp, Artificial Sequence
  derived and/or modified sequence
atgagccccaagcccagagccagcggcccccccgccaaggccaaggaggccggcaagagaaagagcagcagccagcccagccccagcgaccccaagaagaagaccaccaaggtggccaagaagggcaaggccgtgagaagaggcagaagaggcaagaagggcgccgccaccaagatggccgccgtgaccgcccccgaggccgagagcggccccgccgcccccggccccagcgaccagcccagccaggagctgccccagcacgagctgccccccgaggagcccgtgagcgagggcacccagcacgaccccctgagccaggagagcgagctggaggagcccctgagccaggagagcgaggtggaggagcccctgagccaggagagccaggtggaggagcccctgagccaggagagcgaggtggaggagcccctgagccaggagagccaggtggaggagcccctgagccaggagagcgaggtggaggagcccctgagccaggagagcgaggtggaggagcccctgagccaggagagccaggtggaggagcccctgagccaggagagcgaggtggaggagcccctgagccaggagagccaggtggaggagcccctgagccaggagagcgagatggaggagcccctgagccaggagagccaggtggaggagcccctgagccaggagagcgagatggaggagcccctgagccaggagagcgagatggaggagctgcccagcgtgtag

SEQ ID NO: 19091 - DNA, 741 bp, Artificial Sequence
  derived and/or modified sequence
atgagccccaagccccgggccagcggccccccagccaaggccaaggaggccggcaagaggaagagcagcagccagcccagccccagcgaccccaagaagaagaccaccaaggtggccaagaagggcaaggctgtgcggcggggcagaagaggcaagaagggagctgccaccaagatggctgctgtgacagcccctgaggccgagagcggccctgctgcccctggccccagcgaccagcccagccaggagctgccccagcacgagctgcccccagaggagcctgtgtctgagggcacccagcacgaccccctgagccaggagagcgagctggaggagcccctgagccaggagagcgaggtggaggagcccctgagccaggagagccaggtggaggagcccctgagccaggagagcgaggtggaggagcccctgagccaggagagccaggtggaggagcccctgagccaggagagcgaggtggaggagcccctgagccaggagagcgaggtggaggagcccctgagccaggagagccaggtggaggagcccctgagccaggagagcgaggtggaggagcccctgagccaggagagccaggtggaggagcccctgagccaggagagcgagatggaggagcccctgagccaggagagccaggtggaggagcccctgagccaggagagcgagatggaggagcccctgagccaggagagcgagatggaggagctgcccagcgtgtag

SEQ ID NO: 19092 - DNA, 741 bp, Artificial Sequence
  derived and/or modified sequence
atgagccccaaaccgagggccagtggccctccagccaaggctaaggaggcaggaaagaggaaatcatcgtcacagcctagcccatctgatcccaagaaaaagactactaaagtggctaagaaaggaaaggctgtacggaggggacgaaggggcaaaaaaggcgctgccacaaagatggctgctgtgactgcaccggaggccgagtccgggcctgctgcccctggcccaagcgatcagcctagtcaggaactgccgcaacatgagcttcctcctgaagaaccagtgtcggaagggacccagcacgaccccttgagccaggagagcgaactggaagagcccctttctcaggagtcagaggtagaggagcccctgtcccaggagtcccaggtagaagagccgctgtcacaggaatcagaggtcgaagaacccctgagccaagagtctcaggtagaggagcctctcagccaagagtccgaggttgaggagcccctgagtcaagagtccgaggtggaggaaccactaagtcaggaaagccaggtagaggaacccctgtcacaagagtctgaggtggaggagcccttgtcacaggagtcacaggtggaggaacctctcagccaggaaagcgagatggaagagcctctatctcaggagagccaggtggaggagcccctgagccaggagtccgaaatggaggagcctttaagtcaggagtccgaaatggaggagcttccttccgtgtag

SEQ ID NO: 19093 - protein, 453 aa, Artificial Sequence
  derived and/or modified sequence
MRIPVDASTSRRFTPPSTALSPGKMSEALPLGAPDAGAALAGKLRSGDRSMVEVLADHPGELVRTDSPNFLCSVLPTHWRCNKTLPIAFKVVALGDVPDGTLVTVMAGNDENYSAELRNATAAMKNQVARFNDLRFVGRSGRGKSFTLTITVFTNPPQVATYHRAIKITVDGPREPRRHRQKLDDQTKPGSLSFSERLSELEQLRRTAMRVSPHHPAPTPNPRASLNHSTAFNPQPQSQMQDTRQIQPSPPWSYDQSYQYLGSIASPSVHPATPISPGRASGMTTLSAELSSRLSTAPDLTAFSDPRQFPALPSISDPRMHYPGAFTYSPTPVTSGIGIGMSAMGSATRYHTYLPPPYPGSSQAQGGPFQASSPSYHLYYGASAGSYQFSMVGGERSPPRILPPCTNASTGSALLNPSLPNQSDVVEAEGSHSNSPTNMAPSARLEEAVWRPY

SEQ ID NO: 19094 - DNA, 1362 bp, Artificial Sequence
  derived and/or modified sequence
atgagaatccccgtggacgccagcaccagcagaagattcaccccccccagcaccgccctgagccccggcaagatgagcgaggccctgcccctgggcgcccccgacgccggcgccgccctggccggcaagctgagaagcggcgacagaagcatggtggaggtgctggccgaccaccccggcgagctggtgagaaccgacagccccaacttcctgtgcagcgtgctgcccacccactggagatgcaacaagaccctgcccatcgccttcaaggtggtggccctgggcgacgtgcccgacggcaccctggtgaccgtgatggccggcaacgacgagaactacagcgccgagctgagaaacgccaccgccgccatgaagaaccaggtggccagattcaacgacctgagattcgtgggcagaagcggcagaggcaagagcttcaccctgaccatcaccgtgttcaccaaccccccccaggtggccacctaccacagagccatcaagatcaccgtggacggccccagagagcccagaagacacagacagaagctggacgaccagaccaagcccggcagcctgagcttcagcgagagactgagcgagctggagcagctgagaagaaccgccatgagagtgagcccccaccaccccgcccccacccccaaccccagagccagcctgaaccacagcaccgccttcaacccccagccccagagccagatgcaggacaccagacagatccagcccagccccccctggagctacgaccagagctaccagtacctgggcagcatcgccagccccagcgtgcaccccgccacccccatcagccccggcagagccagcggcatgaccaccctgagcgccgagctgagcagcagactgagcaccgcccccgacctgaccgccttcagcgaccccagacagttccccgccctgcccagcatcagcgaccccagaatgcactaccccggcgccttcacctacagccccacccccgtgaccagcggcatcggcatcggcatgagcgccatgggcagcgccaccagataccacacctacctgccccccccctaccccggcagcagccaggcccagggcggccccttccaggccagcagccccagctaccacctgtactacggcgccagcgccggcagctaccagttcagcatggtgggcggcgagagaagcccccccagaatcctgcccccctgcaccaacgccagcaccggcagcgccctgctgaaccccagcctgcccaaccagagcgacgtggtggaggccgagggcagccacagcaacagccccaccaacatggcccccagcgccagactggaggaggccgtgtggagaccctactag

SEQ ID NO: 19095 - DNA, 414 bp, Artificial Sequence
  derived and/or modified sequence
atgcaggacaccagacagatccagcccagccccccctggagctacgaccagagctaccagtacctgggcagcatcgccagccccagcgtgcaccccgccacccccatcagccccggcagagccagcggcatgaccaccctgagcgccgagctgagcagcagactgagcaccgcccccgacctgaccgccttcagcgaccccagacagttccccgccctgcccagcatcagcgaccccagaatgcactaccccggcgccttcacctacagccccacccccgtgaccagcggcatcggcatcggcatgagcgccatgggcagcgccaccagataccacacctacctgccccccccctaccccggcagcagccaggcccagggcggccccttccaggccagcagccccagctactag

SEQ ID NO: 19096 - DNA, 1362 bp, Artificial Sequence
  derived and/or modified sequence
atgagaataccggtggacgccagcacctcaaggcgctttactccgcctagcaccgctctgagtccaggcaagatgagcgaggctctgccactgggcgcccctgatgctggcgctgctctggccggaaagctgcgctctggggacagatcaatggtggaggtcctggccgaccaccccggcgaattagtgaggacagacagtcccaattttctatgcagcgtgctcccaactcactggaggtgtaacaagactctcccgattgcttttaaagtggtggccttaggagacgtaccagatggcacactcgtaaccgtcatggcgggcaacgatgagaattactccgcggaactgcggaatgcaactgccgcaatgaagaaccaggtagcgcgcttcaacgacttgaggttcgtgggccgctctgggcgtggcaaaagttttacactgactatcaccgtgtttactaaccctccccaagttgcaacctaccacagggcaattaaaattacagtagacggcccccgggaaccaaggcggcacaggcaaaaattggatgaccagacgaaaccaggctccctttctttctccgagcggctgagtgaattggaacagctcagacggactgcaatgcgcgtgtcaccacaccaccctgcccctactcctaatccccgcgcctctttgaaccattccacagcatttaaccctcagccacagtctcagatgcaagatacgaggcaaattcagccatcccctccatggtcttacgaccagtcttatcaatacctcggatcgattgcaagcccgtcagttcatcctgcaactcctattagcccaggaagagcttccggcatgactacactgagtgcggagttgagcagccggctgagcactgctccggacctgaccgcgttttcagacccccgccagttcccagctctcccctccatatctgacccgcgaatgcactacccgggggctttcacttactcccctaccccagttaccagtggaatcggcattggcatgtccgccatgggaagcgctacccggtaccacacttaccttccacccccataccccggaagctcccaagctcagggcgggcccttccaggccagtagcccttcgtaccacctttactatggcgccagcgctgggagttaccaattctctatggtcgggggtgagagatcgcctcctagaattctgcccccctgcaccaatgcttccacaggctccgcattgttgaaccccagtctcccaaaccagtcagatgtagtcgaagcggaggggtcacactccaacagccctactaatatggcgccctccgcacgcctagaggaagccgtctggcgtccttactag

SEQ ID NO: 19097 - DNA, 414 bp, Artificial Sequence
  derived and/or modified sequence
atgcaggatactagacagatacaaccgagcccaccctggagctacgatcagagctatcagtacctgggttccatagcctccccatccgtgcaccccgcaacgccgattagccctggacgagcgtccggcatgaccacgcttagcgctgagctcagctcacgtctgtctacggcccctgacttgactgcattttcggatcccagacagttccctgccttgccaagtatctcggacccacggatgcattatccaggtgcgtttacttattcccctacacctgttacctccggcattggtattggaatgagcgctatggggtcagcaactcgataccatacttacctgcctccgccataccccggtagctcgcaggctcagggggggccgttccaggccagctccccctcatattag

SEQ ID NO: 19098 - DNA, 1362 bp, Artificial Sequence
  derived and/or modified sequence
atgagaattcctgtggatgccagcaccagccgccgcttcaccccacccagcacagccctgagccctgggaagatgtctgaggccctgcccctgggcgccccagatgctggggccgccctggccggcaagctgcggagcggggaccgctccatggtggaggtgctggccgaccaccctggagagctggtgaggacagacagccccaacttcctgtgcagcgtgctgcccacccactggcgctgcaacaagaccctgcccatcgccttcaaggtggtggccctgggagatgtgcctgatggcaccctggtgacagtgatggctggaaatgatgagaactacagcgctgagctgagaaatgccacagctgccatgaagaaccaggtggcccgcttcaatgacctgcgctttgtgggccgcagcggccggggcaagagcttcaccctgaccatcaccgtcttcaccaaccccccccaggtggccacctaccaccgggccatcaagatcaccgtggatggcccccgggagcccaggaggcaccggcagaagctggatgaccagaccaagccaggcagcctgtccttcagcgagcggctgtctgagctggagcagctgcggaggacagccatgagggtgagcccccaccacccagcccccacccccaacccccgggccagcctgaaccacagcacagccttcaacccccagccccagagccagatgcaggacacccggcagatccagcccagccccccctggagctatgaccagagctaccagtacctgggcagcatcgccagccccagcgtgcacccagccacccccatcagccctggccgggccagcggcatgaccaccctgtctgctgagctgagcagccggctgagcacagccccagacctgacagccttcagtgacccccggcagtttcctgccctgcccagcatcagtgaccccaggatgcactacccaggggccttcacctacagccccacccctgtgaccagcggcattggaattggcatgtctgccatgggcagcgccacccgctaccacacctacctgcccccaccctacccaggcagcagccaggcccagggcggccccttccaggccagcagccccagctaccacctgtactacggggccagcgctggcagctaccagttctccatggtgggcggggagaggagccccccacgcatcctgcccccctgcaccaatgccagcacaggcagcgccctgctgaaccccagcctgcccaaccagagtgatgtggtggaggccgagggcagccacagcaacagccccaccaacatggcccccagcgcccggctggaggaggccgtgtggaggccctactag

SEQ ID NO: 19099 - DNA, 414 bp, Artificial Sequence
  derived and/or modified sequence
atgcaggacacccggcagatccagcccagccccccctggagctatgaccagagctaccagtacctgggcagcatcgccagccccagcgtgcacccagccacccccatcagccctggccgggccagcggcatgaccaccctgtctgctgagctgagcagccggctgagcacagccccagacctgacagccttcagtgacccccggcagtttcctgccctgcccagcatcagtgaccccaggatgcactacccaggggccttcacctacagccccacccctgtgaccagcggcatcggcatcggcatgtctgccatgggcagcgccacccgctaccacacctacctgcccccaccctacccaggcagcagccaggcccagggcggccccttccaggccagcagccccagctactag

SEQ ID NO: 19100 - DNA, 1362 bp, Artificial Sequence
  derived and/or modified sequence
atgcggatccccgtggacgccagcaccagccggcggttcacccccccctctacagcactgtctccgggcaagatgtctgaggcacttcccctgggcgctcccgatgctggtgcagcgctcgcgggcaagctgagaagcggcgatagatctatggttgaggtgttggcggatcacccaggcgagcttgtgcgaactgacagcccaaatttcctgtgctcagtactgcccacacactggcgctgcaacaaaacacttcccatcgcctttaaagtcgttgctctcggcgatgtgccagatggcactctggtcacagttatggctggaaatgatgaaaactacagtgctgaacttaggaatgccactgctgcgatgaagaaccaagtggctaggtttaatgaccttaggttcgtggggcggagcggccgcggaaagtcgttcacactgactataacggtgttcacaaaccccccccaagtggcaacatatcacagggccataaagataaccgtggacgggcctcgagaacccaggcggcatcgccaaaaactagacgatcagacaaagcccggcagtctttcatttagcgaacgcttatcagagctcgaacagctgcgtagaaccgctatgagggttagtccgcatcacccagccccaacgcctaaccctagagcatcactaaaccactcaaccgccttcaatccacagccccagtcccagatgcaggatacacggcaaatccagccatccccaccttggtcttacgaccaatcttatcaatatctaggaagcattgcatcccctagcgttcaccctgctaccccaatcagccctggccgagcttccggaatgacaactctctcagcagagctgtcgtctcgattaagcactgcccctgatcttactgccttcagtgatcctcgacagttcccagcgttgccttccattagtgatccacgaatgcattacccaggcgcgttcacctattccccgacccctgttacaagtggaatcggcattgggatgagcgcaatggggtctgcaacccgctaccacacatacctgccgcccccgtatccagggagttcacaggcccaggggggacccttccaagcatcctctccatcgtatcacctttactacggggcgtcagccggtagctaccaattttccatggtcggaggggagcgctcaccaccgcggatcttgcccccttgtaccaacgcatccaccggctcggctcttctgaatcctagcctgccaaatcagagcgacgtagtagaagctgaggggtcccactccaattctcccaccaacatggcaccatcagcacggcttgaagaggccgtatggcgaccatactag

SEQ ID NO: 19101 - DNA, 414 bp, Artificial Sequence
  derived and/or modified sequence
atgcaggacacccggcagatccagcccagccccccctggagctacgaccagtcttaccagtatctggggagtattgcctcgccatcggtgcatcccgcaaccccaatctctcctggaagggcctctggcatgactactctctcggctgaactgagcagccggttgtcaactgcccccgatttaacagccttcagtgacccccgccagttcccggctctccctagcattagcgaccctcgtatgcattatcctggagctttcacttactcacctacgcctgtcacttccggtataggaattggaatgtccgccatgggttctgcgacgcggtaccatacatatctgccaccaccgtacccggggtctagccaggcccagggcggccctttccaggccagcagcccatcttactag

SEQ ID NO: 19102 - DNA, 1362 bp, Artificial Sequence
  derived and/or modified sequence
atgcgcatccccgtggatgccagtacctcacggagatttacacctccctctacagccctgagcccaggcaaaatgtccgaagccctgccactgggggctccagacgcaggcgctgccttagctggtaaactgagatccggcgacagatctatggtcgaagtgctggcggaccacccaggggagttggtgaggactgattcccccaatttcctgtgcagcgtcctgccgactcattggaggtgtaacaaaacgcttcccatcgctttcaaagtggtggctttgggggacgtacccgatggcacccttgtaaccgtcatggccggtaacgacgagaattactccgcagaattgaggaacgcaacagcagccatgaagaaccaggttgccagatttaacgacttgaggtttgtggggcgatcagggcgaggcaagtctttcacactgactataaccgtgttcactaatcctccccaagtagccacatatcaccgggcaattaagattaccgtcgacggcccacgcgagcctcgacggcaccgccagaaactagacgatcaaacgaagcccggtagtttgtcattctcagagcgcctttccgagctcgagcagctcagaagaacagctatgcgtgtgagccctcaccacccagcacctacaccgaatccaagggcctctctgaatcactctactgcattcaacccccagccccaaagccagatgcaagatacccggcaaatccagccgagccccccatggagctacgaccagtcctaccagtacctcgggtccatcgcctccccaagcgtgcacccagcaacccccattagccccggacgggcttcggggatgactaccctgtccgcagagctctcttcaagattgtcaacggcccctgatttgactgcgttcagcgatcccagacaattcccagctctgcctagcatcagcgatcctcgcatgcattaccctggagccttcacttatagtccaaccccagtcaccagcgggatcggaattgggatgtccgcgatgggctccgccaccaggtatcacacgtacctaccccctccatacccaggatcttcccaggcacagggcggacctttccaggcatcttccccttcgtaccacttgtactacggtgccagcgccggttcatatcagttctccatggtggggggtgaaagatcacctccaagaatcctgcccccttgcaccaacgcgtcaactggtagtgctctgcttaatccttcactccccaaccagagcgatgtagtggaggccgagggcagtcactctaattctccaacaaatatggccccatccgcacgcctggaggaggccgtctggcgcccttactag

SEQ ID NO: 19103 - DNA, 414 bp, Artificial Sequence
  derived and/or modified sequence
atgcaggatacgcggcaaattcagcctagtccaccatggtcctacgaccaatcatatcaatatttaggctccatcgcaagtccctcagtccatccagccacgccgatcagtcccggaagggcatcaggaatgaccacactctccgccgagctgtcctcccgcctctccaccgcacccgatctcaccgcattctcagacccgagacagtttcccgctctcccctccatctcagacccccgtatgcactacccaggcgcttttacatacagtcctacccccgtgacttctgggatcggcattggcatgtctgccatgggatctgccacacgctaccatacatatctcccacctccataccctggcagctctcaagctcaaggcggtccattccaagcctcatccccctcgtactag

SEQ ID NO: 19104 - DNA, 7274 bp, Artificial Sequence
  derived and/or modified sequence
catagagccagcgggcgcgggcgggacgggcgccccgcggccggacccagccagggcaccacgctgcccggccctgcgccgccaggcacttctttccggggctcctagggacgccagaaggaagtcaacctctgctgcttctccttggcctgcgttggaccttcctttttttgttgtttttttttgtttttcccctttcttccttttgaattaactggcttcttggctggatgttttcaacttctttcctggctgcgaacttttccccaattgttttccttttacaacagggggagaaagtgctctgtggtccgaggcgagccgtgaagttgcgtgtgcgtggcagtgtgcgtggcaggatgtgcgtgcgtgtgtaacccgagccgcccgatctgtttcgatctgcgccgcggagccctccctcaaggcccgctccacctgctgcggttacgcggcgctcgtgggtgttcgtgcctcggagcagctaaccggcgggtgctgggcgacggtggaggagtatcgtctcgctgctgcccgagtcagggctgagtcacccagctgatgtagacagtggctgccttccgaagagtgcgtgtttgcatgtgtgtgactctgcggctgctcaactcccaacaaaccagaggaccagccacaaacttaaccaacatccccaaacccgagttcacagatgtgggagagctgtagaaccctgagtgtcatcgactgggccttcttatgattgttgttttaagattagctgaagatctctgaaacgctgaattttctgcactgagcgttttgacagaattcattgagagaacagagaacatgacaagtacttctagctcagcactgctccaactactgaagctgattttcaaggctacttaaaaaaatctgcagcgtacattaatggatttctgttgtgtttaaattctccacagattgtattgtaaatattttatgaagtagagcatatgtatatatttatatatacgtgcacatacattagtagcactacctttggaagtctcagctcttgcttttcgggactgaagccagttttgcatgataaaagtggccttgttacgggagataattgtgttctgttgggactttagacaaaactcacctgcaaaaaactgacaggcattaactactggaacttccaaataatgtgtttgctgatcgttttactcttcgcataaatattttaggaagtgtatgagaattttgccttcaggaacttttctaacagccaaagacagaacttaacctctgcaagcaagattcgtggaagatagtctccactttttaatgcactaagcaatcggttgctaggagcccatcctgggtcagaggccgatccgcagaaccagaacgttttcccctcctggactgttagtaacttagtctccctcctcccctaaccacccccgcccccccccaccccccgcagtaataaaggcccctgaacgtgtatgttggtctcccgggagctgcttgctgaagatccgcgcccctgtcgccgtctggtaggagctgtttgcagggtcctaactcaatcggcttgttgtgatgcgtatccccgtagatgccagcacgagccgccgcttcacgccgccttccaccgcgctgagcccaggcaagatgagcgaggcgttgccgctgggcgccccggacgccggcgctgccctggccggcaagctgaggagcggcgaccgcagcatggtggaggtgctggccgaccacccgggcgagctggtgcgcaccgacagccccaacttcctctgctccgtgctgcctacgcactggcgctgcaacaagaccctgcccatcgctttcaaggtggtggccctaggggatgttccagatggcactctggtcactgtgatggctggcaatgatgaaaactactcggctgagctgagaaatgctaccgcagccatgaagaaccaggttgcaagatttaatgacctcaggtttgtcggtcgaagtggaagagggaaaagcttcactctgaccatcactgtcttcacaaacccaccgcaagtcgccacctaccacagagccatcaaaatcacagtggatgggccccgagaacctcgaagacatcggcagaaactagatgatcagaccaagcccgggagcttgtccttttccgagcggctcagtgaactggagcagctgcggcgcacagccatgagggtcagcccacaccacccagcccccacgcccaaccctcgtgcctccctgaaccactccactgcctttaaccctcagcctcagagtcagatgcaggatacaaggcagatccaaccatccccaccgtggtcctacgatcagtcctaccaatacctgggatccattgcctctccttctgtgcacccagcaacgcccatttcacctggacgtgccagcggcatgacaaccctctctgcagaactttccagtcgactctcaacggcacccgacctgacagcgttcagcgacccgcgccagttccccgcgctgccctccatctccgacccccgcatgcactatccaggcgccttcacctactccccgacgccggtcacctcgggcatcggcatcggcatgtcggccatgggctcggccacgcgctaccacacctacctgccgccgccctaccccggctcgtcgcaagcgcagggaggcccgttccaagccagctcgccctcctaccacctgtactacggcgcctcggccggctcctaccagttctccatggtgggcggcgagcgctcgccgccgcgcatcctgccgccctgcaccaacgcctccaccggctccgcgctgctcaaccccagcctcccgaaccagagcgacgtggtggaggccgagggcagccacagcaactcccccaccaacatggcgccctccgcgcgcctggaggaggccgtgtggaggccctactgaggcgccaggcctggcccggctgggccccgcgggccgccgccttcgcctccgggcgcgcgggcctcctgttcgcgacaagcccgccgggatcccgggccctgggcccggccaccgtcctggggccgagggcgcccgacggccaggatctcgctgtaggtcaggcccgcgcagcctcctgcgcccagaagcccacgccgccgccgtctgctggcgccccggccctcgcggaggtgtccgaggcgacgcacctcgagggtgtccgccggccccagcacccaggggacgcgctggaaagcaaacaggaagattcccggagggaaactgtgaatgcttctgatttagcaatgctgtgaataaaaagaaagattttatacccttgacttaactttttaaccaagttgtttattccaaagagtgtggaattttggttggggtggggggagaggagggatgcaactcgccctgtttggcatctaattcttatttttaatttttccgcaccttatcaattgcaaaatgcgtatttgcatttgggtggtttttatttttatatacgtttatataaatatatataaattgagcttgcttctttcttgctttgaccatggaaagaaatatgattcccttttctttaagttttatttaacttttcttttggacttttgggtagttgtttttttttgttttgttttgtttttttgagaaacagctacagctttgggtcatttttaactactgtattcccacaaggaatccccagatatttatgtatcttgatgttcagacatttatgtgttgataattttttaattatttaaatgtacttatattaagaaaaatatcaagtactacattttcttttgttcttgatagtagccaaagttaaatgtatcacattgaagaaggctagaaaaaaagaatgagtaatgtgatcgcttggttatccagaagtattgtttacattaaactccctttcatgttaatcaaacaagtgagtagctcacgcagcaacgtttttaataggatttttagacactgagggtcactccaaggatcagaagtatggaattttctgccaggctcaacaagggtctcatatctaacttcctccttaaaacagagaaggtcaatctagttccagagggttgaggcaggtgccaataattacatctttggagaggatttgatttctgcccagggatttgctcaccccaaggtcatctgataatttcacagatgctgtgtaacagaacacagccaaagtaaactgtgtaggggagccacatttacataggaaccaaatcaatgaatttaggggttacgattatagcaatttaagggcccaccagaagcaggcctcgaggagtcaatttgcctctgtgtgcctcagtggagacaagtgggaaaacatggtcccacctgtgcgagaccccctgtcctgtgctgctcactcaacaacatctttgtgttgctttcaccaggctgagaccctaccctatggggtatatgggcttttacctgtgcaccagtgtgacaggaaagattcatgtcactactgtccgtggctacaattcaaaggtatccaatgtcgctgtaaattttatggcactatttttattggaggatttggtcagaatgcagttgttgtacaactcataaatactaactgctgattttgacacatgtgtgctccaaatgatctggtggttatttaacgtacctcttaaaattcgttgaaacgatttcaggtcaactctgaagagtatttgaaagcaggacttcagaacagtgtttgatttttattttataaatttaagcattcaaattaggcaaatctttggctgcaggcagcaaaaacagctggacttatttaaaacaacttgtttttgagttttcttatatatatattgattatttgttttacacacatgcagtagcactttggtaagagttaaagagtaaagcagcttatgttgtcaggtcgttcttatctagagaagagctatagcagatctcggacaaactcagaatatattcactttcatttttgacaggattccctccacaactcagtttcatatattattccgtattacatttttgcagctaaattaccataaaatgtcagcaaatgtaaaaatttaatttctgaaaagcaccattagcccatttcccccaaattaaacgtaaatgttttttttcagcacatgttaccatgtctgacctgcaaaaatgctggagaaaaatgaaggaaaaaattatgtttttcagtttaattctgttaactgaagatattccaactcaaaaccagcctcatgctctgattagataatcttttacattgaacctttactctcaaagccatgtgtggagggggcttgtcactattgtaggctcactggattggtcatttagagtttcacagactcttaccagcatatatagtatttaattgtttcaaaaaaaatcaaactgtagttgttttggcgataggtctcacgcaacacatttttgtatgtgtgtgtgtgtgcgtgtgtgtgtgtgtgtgtgaaaaattgcattcattgacttcaggtagattaaggtatctttttattcattgccctcaggaaagttaaggtatcaatgagacccttaagccaatcatgtaataactgcatgtgtctggtccaggagaagtattgaataagccatttctactgcttactcatgtccctatttatgatttcaacatggatacatatttcagttctttctttttctcactatctgaaaatacatttccctccctctcttccccccaatatctccctttttttctctcttcctctatcttccaaaccccactttctccctcctccttttcctgtgttctcttaagcagatagcacatacccccacccagtaccaaatttcagaacacaagaaggtccagttcttcccccttcacataaaggaacatggtttgtcagcctttctcctgtttatgggtttcttccagcagaacagagacattgccaaccatattggatctgcttgctgtccaaaccagcaaactttcctgggcaaatcacaatcagtgagtaaatagacagcctttctgctgccttgggtttctgtgcagataaacagaaatgctctgattagaaaggaaatgaatggttccactcaaatgtcctgcaatttaggattgcagatttctgccttgaaatacctgtttctttgggacattccgtcctgatgatttttatttttgttggtttttatttttggggggaatgacatgtttgggtcttttatacatgaaaatttgtttgacaataatctcacaaaacatattttacatctgaacaaaatgcctttttgtttaccgtagcgtatacatttgttttgggatttttgtgtgtttgttgggaattttgtttttagccaggtcagtattgatgaggctgatcatttggctctttttttccttccagaagagttgcatcaacaaagttaattgtatttatgtatgtaaatagattttaagcttcattataaaatattgttaatgcctataactttttttcaatttttttgtgtgtgtttctaaggactttttcttaggtttgctaaatactgtagggaaaaaaatgcttctttctactttgtttattttagactttaaaatgagctacttcttattcacttttgtaaacagctaatagcatggttccaattttttttaagttcactttttttgttctaggggaaatgaatgtgcaaaaaaagaaaaagaactgttggttatttgtgttattctggatgtataaaaatcaatggaaaaaaataaactttcaaattgaaatgacggtataacacatctactgaaaaagcaacgggaaatgtggtcctatttaagccagcccccacctagggtctatttgtgtggcagttattgggtttggtcacaaaacatcctgaaaattcgtgcgtgggcttctttctccctggtacaaacgtatggaatgcttcttaaaggggaactgtcaagctggtgtcttcagccagatgacatgagagaatatcccagaaccctctctccaaggtgtttctagatagcacaggagagcaggcactgcactgtccacagtccacggtacacagtcgggtgggccgcctcccctctcctgggagcattcgtcgtgcccagcctgagcagggcagctggactgctgctgttcaggagccaccagagccttcctctctttgtaccacagtttcttctgtaaatccagtgttacaatcagtgtgaatggcaaataaacagtttgacaagtacatacaccata

SEQ ID NO: 19105 - protein, 933 aa, Artificial Sequence
  derived and/or modified sequence
MRMAATAWAGLQGPPLPTLCPAVRTGLYCRDQAHAERWAMTSETSSGSHCARSRMLRRRAQEEDSTVLIDVSPPEAEKRGSYGSTAHASEPGGQQAAACRAGSPAKPRIADFVLVWEEDLKLDRQQDSAARDRTDMHRTWRETFLDNLRAAGLCVDQQDVQDGNTTVHYALLSASWAVLCYYAEDLRLKLPLQELPNQASNWSAGLLAWLGIPNVLLEVVPDVPPEYYSCRFRVNKLPRFLGSDNQDTFFTSTKRHQILFEILAKTPYGHEKKNLLGIHQLLAEGVLSAAFPLHDGPFKTPPEGPQAPRLNQRQVLFQHWARWGKWNKYQPLDHVRRYFGEKVALYFAWLGFYTGWLLPAAVVGTLVFLVGCFLVFSDIPTQELCGSKDSFEMCPLCLDCPFWLLSSACALAQAGRLFDHGGTVFFSLFMALWAVLLLEYWKRKSATLAYRWDCSDYEDTEERPRPQFAASAPMTAPNPITGEDEPYFPERSRARRMLAGSVVIVVMVAVVVMCLVSIILYRAIMAIVVSRSGNTLLAAWASRIASLTGSVVNLVFILILSKIYVSLAHVLTRWEMHRTQTKFEDAFTLKVFIFQFVNFYSSPVYIAFFKGRFVGYPGNYHTLFGVRNEECAAGGCLIELAQELLVIMVGKQVINNMQEVLIPKLKGWWQKFRLRSKKRKAGASAGASQGPWEDDYELVPCEGLFDEYLEMVLQFGFVTIFVAACPLAPLFALLNNWVEIRLDARKFVCEYRRPVAERAQDIGIWFHILAGLTHLAVISNAFLLAFSSDFLPRAYYRWTRAHDLRGFLNFTLARAPSSFAAAHNRTCRYRAFRDDDGHYSQTYWNLLAIRLAFVIVFEHVVFSVGRLLDLLVPDIPESVEIKVKREYYLAKQALAENEVLFGTNGTKDEQPEGSELSSHWTPFTVPKASQLQQ

SEQ ID NO: 19106 - DNA, 2802 bp, Artificial Sequence
  derived and/or modified sequence
atgagaatggccgccaccgcctgggccggcctgcagggcccccccctgcccaccctgtgccccgccgtgagaaccggcctgtactgcagagaccaggcccacgccgagagatgggccatgaccagcgagaccagcagcggcagccactgcgccagaagcagaatgctgagaagaagagcccaggaggaggacagcaccgtgctgatcgacgtgagcccccccgaggccgagaagagaggcagctacggcagcaccgcccacgccagcgagcccggcggccagcaggccgccgcctgcagagccggcagccccgccaagcccagaatcgccgacttcgtgctggtgtgggaggaggacctgaagctggacagacagcaggacagcgccgccagagacagaaccgacatgcacagaacctggagagagaccttcctggacaacctgagagccgccggcctgtgcgtggaccagcaggacgtgcaggacggcaacaccaccgtgcactacgccctgctgagcgccagctgggccgtgctgtgctactacgccgaggacctgagactgaagctgcccctgcaggagctgcccaaccaggccagcaactggagcgccggcctgctggcctggctgggcatccccaacgtgctgctggaggtggtgcccgacgtgccccccgagtactacagctgcagattcagagtgaacaagctgcccagattcctgggcagcgacaaccaggacaccttcttcaccagcaccaagagacaccagatcctgttcgagatcctggccaagaccccctacggccacgagaagaagaacctgctgggcatccaccagctgctggccgagggcgtgctgagcgccgccttccccctgcacgacggccccttcaagaccccccccgagggcccccaggcccccagactgaaccagagacaggtgctgttccagcactgggccagatggggcaagtggaacaagtaccagcccctggaccacgtgagaagatacttcggcgagaaggtggccctgtacttcgcctggctgggcttctacaccggctggctgctgcccgccgccgtggtgggcaccctggtgttcctggtgggctgcttcctggtgttcagcgacatccccacccaggagctgtgcggcagcaaggacagcttcgagatgtgccccctgtgcctggactgccccttctggctgctgagcagcgcctgcgccctggcccaggccggcagactgttcgaccacggcggcaccgtgttcttcagcctgttcatggccctgtgggccgtgctgctgctggagtactggaagagaaagagcgccaccctggcctacagatgggactgcagcgactacgaggacaccgaggagagacccagaccccagttcgccgccagcgcccccatgaccgcccccaaccccatcaccggcgaggacgagccctacttccccgagagaagcagagccagaagaatgctggccggcagcgtggtgatcgtggtgatggtggccgtggtggtgatgtgcctggtgagcatcatcctgtacagagccatcatggccatcgtggtgagcagaagcggcaacaccctgctggccgcctgggccagcagaatcgccagcctgaccggcagcgtggtgaacctggtgttcatcctgatcctgagcaagatctacgtgagcctggcccacgtgctgaccagatgggagatgcacagaacccagaccaagttcgaggacgccttcaccctgaaggtgttcatcttccagttcgtgaacttctacagcagccccgtgtacatcgccttcttcaagggcagattcgtgggctaccccggcaactaccacaccctgttcggcgtgagaaacgaggagtgcgccgccggcggctgcctgatcgagctggcccaggagctgctggtgatcatggtgggcaagcaggtgatcaacaacatgcaggaggtgctgatccccaagctgaagggctggtggcagaagttcagactgagaagcaagaagagaaaggccggcgccagcgccggcgccagccagggcccctgggaggacgactacgagctggtgccctgcgagggcctgttcgacgagtacctggagatggtgctgcagttcggcttcgtgaccatcttcgtggccgcctgccccctggcccccctgttcgccctgctgaacaactgggtggagatcagactggacgccagaaagttcgtgtgcgagtacagaagacccgtggccgagagagcccaggacatcggcatctggttccacatcctggccggcctgacccacctggccgtgatcagcaacgccttcctgctggccttcagcagcgacttcctgcccagagcctactacagatggaccagagcccacgacctgagaggcttcctgaacttcaccctggccagagcccccagcagcttcgccgccgcccacaacagaacctgcagatacagagccttcagagacgacgacggccactacagccagacctactggaacctgctggccatcagactggccttcgtgatcgtgttcgagcacgtggtgttcagcgtgggcagactgctggacctgctggtgcccgacatccccgagagcgtggagatcaaggtgaagagagagtactacctggccaagcaggccctggccgagaacgaggtgctgttcggcaccaacggcaccaaggacgagcagcccgagggcagcgagctgagcagccactggacccccttcaccgtgcccaaggccagccagctgcagcagtag

SEQ ID NO: 19107 - DNA, 2802 bp, Artificial Sequence
  derived and/or modified sequence
atgcgcatggctgctacggcctgggcgggcttacagggtcctcctcttcccacactctgccccgccgttcggaccggattgtactgtcgcgatcaggcccatgctgagagatgggctatgacatccgagaccagcagcgggagccattgcgccagaagccgcatgctccggcggcgcgcccaagaggaggattccactgtcctgatcgacgtctcacctcccgaggctgaaaaaagaggcagctatggcagcacagcccacgcaagcgagcctggggggcagcaagctgcggcttgcagagctggaagcccagcgaagcctagaattgcggattttgtactggtttgggaggaggatctgaagctggatcgtcagcaagacagtgccgctagggatcggacggatatgcaccgcacatggagggaaactttcctggataacctgagggccgctggcctctgtgtggaccaacaggatgtccaggatggcaacaccactgttcattacgcgctcctcagtgccagttgggccgtactttgttattatgccgaggacctcagactgaagctgcctcttcaggaactacctaatcaggcatccaattggtctgcgggcctattggcctggctcggtattcccaatgttctgctcgaagttgtccccgacgttccaccggaatattattcttgccgctttcgggtgaataagttacctcgctttctcggctcagataaccaggacactttctttaccagcacaaagcgccaccagattctattcgagatactcgcaaaaactccatatgggcacgagaagaaaaacctgctgggaatacatcaacttttggccgaaggtgtgctcagtgccgcttttccgctacatgatggacctttcaaaacaccaccggaagggccccaggctccgcgcttgaaccagagacaggtcctgttccagcattgggcccgctgggggaagtggaacaagtaccaaccattggatcatgttcgcaggtacttcggagaaaaagtcgcactttacttcgcatggctcggcttctacacagggtggttacttccagcagccgttgttgggacactcgtcttccttgtaggctgttttttggtgttctcagatattccaacccaagaactttgtggcagcaaagactccttcgagatgtgcccgctgtgcctggattgccccttttggctgctttcttcagcctgtgcccttgcccaggctggaagactgttcgatcatggtggcacagttttcttctccctcttcatggccctctgggccgtgctgctgcttgagtattggaagcgcaagtctgctactttggcgtaccgttgggattgttctgattatgaggacaccgaggagcgacccaggccgcaattcgctgcatcagctcctatgaccgccccgaacccaattaccggggaggacgagccctacttccctgaacgctcgcgggctagacgcatgcttgccggcagtgtcgtgattgtggttatggttgccgtggtggttatgtgcctggttagtatcatactgtatagagccattatggccatcgtagtgtcccgcagcggtaataccctactggccgcctgggcctcacgcatcgcaagcctcacaggcagcgtcgtgaacctcgtttttatcctcatcctgagcaagatctacgtgtctcttgcccacgtactgactcggtgggagatgcacagaactcagacgaagtttgaggatgccttcacactgaaagtgtttatctttcagttcgtgaacttctacagctcacctgtgtacatcgccttctttaaggggcgctttgtaggatatccaggaaattatcatactctcttcggagtgcgcaacgaggagtgtgcggctggtggatgcttgattgagctggctcaggagctgctggtcatcatggttggcaagcaagtgattaacaacatgcaagaagtgcttattccaaagctgaaggggtggtggcagaagttccgactgcgcagcaagaaacggaaagccggcgcctctgccggagcatcacaggggccttgggaagatgattatgaattggtgccctgtgaggggctgtttgatgagtacctagaaatggttttgcagttcgggttcgttactatcttcgtggctgcctgccctctagctccactgttcgcactgcttaataactgggttgaaattcgcttggatgctcgcaagttcgtgtgtgagtaccgtcgcccggtggccgagagagcccaagatatcggcatttggtttcatatcctggctggactgacccacctcgccgtgatctccaacgccttcctgcttgccttcagctcagacttcctgcctagggcgtactacaggtggactcgggcacacgacctgcgcggcttcctgaattttaccttggctcgtgcccccagttcatttgccgctgcccacaatagaacctgccgctatagagcatttcgagacgacgacggacactattcacaaacttactggaatttgcttgccattcggttagcctttgtgatagtctttgagcacgtagtgtttagtgtgggcagactcttggacctcttggtgccagacattcctgagagtgtggagatcaaagtaaaacgcgagtactatttggcgaagcaggctctagccgaaaatgaagtgctattcgggactaacggcacgaaagacgagcagcccgagggctccgagctgtctagccactggacaccattcactgtgcctaaggcatcacagctgcaacagtag

SEQ ID NO: 19108 - DNA, 2802 bp, Artificial Sequence
  derived and/or modified sequence
atgaggatggccgccacagcctgggccggcctgcagggcccccccctgcccaccctgtgcccagctgtgaggacaggcctgtactgccgggaccaggcccatgctgagcgctgggccatgaccagcgagaccagcagcggcagccactgtgcccggagcaggatgctgcggcggcgggcccaggaggaggacagcacagtgctgattgatgtgtccccacctgaggccgagaagaggggcagctatggcagcacagcccacgccagcgagcccggcggccagcaggccgccgcctgcagagctggcagccctgccaagcccagaattgctgactttgtgctggtgtgggaggaggacctgaagctggaccggcagcaggacagcgctgcccgggacagaacagacatgcacaggacctggagggagaccttcctggacaacctgcgggctgctggcctgtgtgtggaccagcaggatgtgcaggacggcaacaccaccgtgcactacgccctgctgagcgcctcctgggccgtgctgtgctactatgcagaggacctgcggctgaagctgcccctgcaggagctgcccaaccaggccagcaactggagcgctggcctgctggcctggctgggcatccccaacgtgctgctggaggtggtgcctgatgtgcccccagagtactacagctgccgcttccgggtgaacaagctgccccgcttcctgggcagtgacaaccaggacaccttcttcaccagcaccaagaggcaccagatcctgtttgagatcctggccaagaccccctacggccacgagaagaagaacctgctgggcatccaccagctgctggccgagggcgtgctgtctgctgccttccccctgcatgatggccccttcaagaccccacctgagggcccccaggccccccggctgaaccagaggcaggtgctcttccagcactgggcccgctggggcaagtggaacaagtaccagcccctggaccacgtgcggcgctactttggagagaaggtggccctgtactttgcctggctgggcttctacacaggctggctgctgcctgctgctgtggtgggcaccctggtgttcctggtgggctgcttcctggtgttcagtgacatccccacccaggagctgtgtggcagcaaggacagctttgagatgtgccccctgtgcctggactgccccttctggctgctgagcagcgcctgtgccctggcccaggccggccgcctgtttgaccacggcggcaccgtcttcttcagcctcttcatggccctgtgggccgtgctgctgctggagtactggaagaggaagagcgccaccctggcctaccgctgggactgcagcgactatgaggacacagaggagcggccccggccccagtttgctgccagcgcccccatgacagcccccaaccccatcactggagaagatgagccctacttccctgagaggagccgggcccggaggatgctggccggctctgtggtgattgtggtgatggtggccgtggtggtgatgtgcctggtgtccatcatcctgtaccgggccatcatggccatcgtggtgagccgcagcggcaacaccctgctggccgcctgggccagccgcatcgccagcctgaccggctctgtggtgaacctggtgttcatcctgatcctgagcaagatctacgtgtccctggcccacgtgctgacccgctgggagatgcacaggacccagaccaagtttgaagatgccttcaccctgaaggtgttcatcttccagtttgtgaacttctacagcagccctgtgtacatcgccttcttcaagggccgctttgtgggctacccaggcaactaccacaccctgtttggagtgagaaatgaggagtgtgccgccggcggctgcctgattgagctggcccaggagctgctggtgatcatggtgggcaagcaggtgatcaacaacatgcaggaggtgctgatccccaagctgaagggctggtggcagaagttccggctgcggagcaagaagaggaaggccggggccagcgctggggccagccagggcccctgggaggatgattatgagctggtgccctgtgagggcctgtttgatgagtacctggagatggtgctgcagtttggatttgtgaccatctttgtggccgcctgccccctggcccccctgtttgccctgctgaacaactgggtggagatccggctggatgccaggaagtttgtgtgtgagtacagaagacctgtggccgagcgggcccaggacatcggcatctggttccacatcctggccggcctgacccacctggccgtcatcagcaatgccttcctgctggccttcagcagtgacttcctgccccgggcctactaccgctggacccgggcccatgacctgcggggcttcctgaacttcaccctggcccgggcccccagcagctttgctgctgcccacaacagaacctgccgctaccgggccttcagagatgatgatggccactacagccagacctactggaacctgctggccatccggctggcctttgtgattgtgtttgaacatgtggtgttttctgtgggccgcctgctggacctgctggtgcctgacatccctgagagcgtggagatcaaggtgaagcgggagtactacctggccaagcaggccctggccgagaatgaggtgctgtttggcaccaacggcaccaaggatgagcagcctgagggcagcgagctgagcagccactggacccccttcaccgtgcccaaggccagccagctgcagcagtag

SEQ ID NO: 19109 - DNA, 2802 bp, Artificial Sequence
  derived and/or modified sequence
atgcggatggccgccaccgcctgggccggcctgcagggcccccccttgccaaccctctgcccagccgtccggacagggttatactgtcgggatcaggcccacgccgagcgttgggccatgaccagcgaaacctcgagcggcagccactgtgcgcggtccagaatgctgcgcaggcgggcacaggaggaagattctacggttcttatcgatgtatctccaccagaggccgaaaaaaggggcagctacggtagcactgcacatgcctccgagccaggtggacagcaggccgccgcctgcagagccgggagccccgccaaaccacgcatcgcggatttcgttctggtctgggaagaggacctaaaactggacaggcagcaggactcagcagcacgggaccggacggatatgcaccgaacgtggcgggagacattcctggacaatctgcgtgcagcagggctgtgcgtcgatcagcaggacgtgcaagacggtaacacgactgtccattacgccctgctgtcagcaagctgggccgtactgtgctactacgccgaggacctgaggctgaagctcccactgcaggagcttcccaaccaggcaagtaattggtctgctgggttgctggcttggctaggaatcccaaacgtgctgctggaggtggtccccgacgtaccaccagaatattactcttgtagatttcgggttaataagttgcctagatttctgggcagtgataaccaggacactttctttactagtactaaaagacaccagattctttttgaaattcttgctaagacaccgtacggccacgaaaaaaagaatctgttgggcatacatcagctgctggctgagggagtcctgtccgcagcattcccactgcacgacggtccttttaaaactccccccgagggcccccaagccccaaggctgaatcaaagacaggtgctgtttcagcactgggctcgatgggggaagtggaataagtatcaacccttggaccatgtccggcggtattttggcgagaaggtggcgctgtatttcgcctggctaggattttacaccggctggctgctccccgctgcagttgtggggacgctcgtgtttcttgttggctgtttcctggtgttctccgacattcctactcaggaactttgcggcagcaaagattcttttgagatgtgtccattgtgtctcgactgtccattctggctgctcagcagcgcatgcgcactcgctcaggccggccgattgtttgaccatggaggcaccgttttctttagcctctttatggcactctgggctgtgttgctgctggaatattggaaacgaaaatccgcaactctcgcgtatcgctgggattgttccgactacgaggacactgaagagcgcccacggccccagttcgccgctagcgcacccatgaccgcacctaaccccattactggcgaagacgaaccctactttcccgaaaggtcccgggcgcggcggatgctggctggcagcgtagttatcgttgtgatggtcgccgtcgtggtgatgtgcctcgtgtctataattttgtatagagccataatggcgatcgttgtatccagatcagggaacactttactcgccgcttgggcttcccgaattgctagcctgactggatctgtcgttaatctggtcttcattctgattttatccaaaatttacgtctctctggcccatgtgttaactcgctgggagatgcacaggacccagacaaagtttgaagatgccttcacattgaaagtatttatttttcagtttgtcaacttctactcaagtccagtgtacattgcattcttcaaaggtagattcgtcgggtatccaggtaactaccatacactttttggagtccgcaacgaagaatgcgcagcgggcggctgcttgatcgagcttgcacaggaactcctcgttataatggtcggcaaacaggttattaacaacatgcaggaggtcctgatccccaagctcaagggctggtggcagaaatttcgactccgttcaaaaaaaaggaaagccggcgcgtccgccggcgcttcccaggggccctgggaagacgactacgaactggttccatgtgaaggactgtttgatgagtacctggagatggtgctgcaatttggatttgtcactatattcgtcgctgcttgccctctggcaccactgttcgctctcctgaacaactgggtggaaataaggctggacgcgaggaagtttgtgtgcgaatatcgcagaccagtcgctgagcgggctcaggatattgggatctggtttcatatactcgccgggttaacacacctggccgtgatttctaatgcgttcttgctggccttctccagtgactttttgccacgggcctattacaggtggacgcgtgcacacgatttgcgaggatttctgaatttcaccctcgcccgggctccgtccagttttgctgctgctcataaccgcacatgtcgctatcgagcctttagagacgatgatggccactactcgcagacgtattggaacctgctagccattagactggctttcgtgatagttttcgaacacgtcgtgttttccgtcggccgccttctcgatctgctcgtgccagatatcccggagtccgtggagatcaaggtgaagcgcgagtactacttggccaagcaggcattggctgagaatgaagttctatttggaactaatgggaccaaggacgaacagcccgagggctctgaactgtcgtcacattggaccccattcacagtccccaaggcttctcagctgcagcagtag

SEQ ID NO: 19110 - DNA, 4128 bp, Artificial Sequence
  derived and/or modified sequence
aaagatagatcctgctccaggagccgggaagccttgccctggccagctgtgctgggcacctcccctgcctgcttcctggcccacttgcaggcaaggtgagggcatgcgaatggctgccactgcctgggcggggctccaagggccacccctccccaccctctgtcccgcagtgaggacgggactctactgccgagaccaggctcacgctgagaggtgggccatgacctccgagacctcttccggaagccactgtgccaggagcaggatgctgcggcgacgggcccaggaagaggacagcaccgtcctgatcgatgtgagcccccctgaggcagagaagaggggctcttacgggagcacagcccacgcctcggagccaggtggacagcaagcggccgcctgcagagctgggagtcctgccaagccccggatcgcagacttcgtcctcgtttgggaggaggacctgaagctagacaggcagcaggacagtgccgcccgggacagaacagacatgcacaggacctggcgggagacttttctggataatcttcgtgcggctgggctgtgtgtagaccagcaggacgtccaggacgggaacaccacagtgcactacgccctcctcagcgcctcctgggctgtgctctgctactacgccgaagacctgcgcctgaagctgcccttgcaggagttacccaaccaggcctccaactggtcggccggcctgctggcatggctgggcatccccaacgtcctgctggaggttgtgccagacgtaccccccgagtactactcctgccggttcagagtgaacaagctgccacgcttcctcgggagtgacaaccaggacaccttcttcacaagcaccaagaggcaccaaattctgtttgagatcctggccaagaccccgtatggccacgagaagaaaaacctgcttgggatccaccagctgctggcagagggtgtcctcagtgccgccttccccctgcatgacggccccttcaagacgcccccagagggcccgcaggctccacgcctcaaccagcgccaagtccttttccagcactgggcgcgctggggcaagtggaacaagtaccagcccctggaccacgtgcgcaggtacttcggggagaaggtggccctctacttcgcctggctcgggttttacacaggctggctcctgccagcggcagtggtgggcacactggtgttcctggtgggctgcttcctggtgttctcagacatacccacgcaggaactgtgtggcagcaaggacagcttcgagatgtgcccactttgcctcgactgccctttctggctgctctccagcgcctgtgccctggcccaggccggccggctgttcgaccacggcggcaccgtgttcttcagcttgttcatggcactgtgggccgtgctgctgctggagtactggaagcggaagagcgccacgctggcctaccgctgggactgctctgactacgaggacactgaggagaggcctcggccccagtttgccgcctcagcccccatgacagccccgaaccccatcacgggtgaggacgagccctacttccctgagaggagccgcgcgcgccgcatgctggccggctctgtggtgatcgtggtgatggtggccgtggtggtcatgtgcctcgtgtctatcatcctgtaccgtgccatcatggccatcgtggtgtccaggtcgggcaacacccttctcgcagcctgggcctctcgcatcgccagcctcacggggtctgtagtgaacctcgtcttcatcctcatcctctccaagatctatgtatccctggcccacgtcctgacacgatgggaaatgcaccgcacccagaccaagttcgaggacgccttcaccctcaaggtgttcatcttccagttcgtcaacttctactcctcacccgtctacattgccttcttcaagggcaggtttgtgggatacccaggcaactaccacaccttgtttggagtccgcaatgaggagtgcgcggctggaggctgcctgatcgagctggcacaggagctcctggtcatcatggtgggcaagcaggtcatcaacaacatgcaggaggtcctcatcccgaagctaaagggctggtggcagaagttccggcttcgctccaagaagaggaaggcgggagcttctgcaggggctagccaggggccctgggaggacgactatgagcttgtgccctgtgagggtctgtttgacgagtacctggaaatggtgctgcagttcggcttcgtcaccatcttcgtggccgcctgtccgctcgcgccgctcttcgccctgctcaacaactgggtggagatccgcttggacgcgcgcaagttcgtctgcgagtaccggcgcccggtggccgagcgcgcccaggacatcggcatctggttccacatcctggcgggcctcacgcacctggcggtcatcagcaacgccttcctcctggccttctcgtccgacttcctgccgcgcgcctactaccggtggacccgcgcccacgacctgcgcggcttcctcaacttcacgctggcgcgagccccgtcctccttcgccgccgcgcacaaccgcacgtgcaggtatcgggctttccgggatgacgatggacattattcccagacctactggaatcttcttgccatccgcctggccttcgtcattgtgtttgagcatgtggttttctccgttggccgcctcctggacctcctggtgcctgacatcccagagtctgtggagatcaaagtgaagcgggagtactacctggctaagcaggcactggctgagaatgaggttctttttggaacgaacggaacaaaggatgagcagcccgagggctcagagctcagctcccactggacacccttcacggttcccaaggccagccagctgcagcagtgacgcctggaaggacatctggtggtccttaggggagtggcccctcctgagccctgcgagcagcgtccttttcctcttccctcaggcagcggctgtgtgaaccgctggctgctgttgtgcctcatctctgggcacattgcctgcttccccccagcgccggcttctctcctcagagcgcctgtcactccatccccggcagggagggaccgtcagctcacaaggccctctttgtttcctgctcccagacataagcccaaggggcccctgcacccaagggaccctgtccctcggtggcctccccaggcccctggacacgacagttctcctcaggcaggtgggctttgtggtcctcgccgcccctggccacatcgccctctcctcttacacctggtgaccttcgaatgtttcagagcgcagggccgttctccctcgtgtcctctggacccacccgccccttcctgccctgtttgcgcagggacatcacccacatgccccagctctcggaccctgcagctctgtgtcccaggccacagcaaaggtctgttgaacccctccctccattcccagttatctgggtcctctggattcttctgtttcttgaatcaggctctgctttccccctagccactacaggcagcctctgacagtgccgctttacttgcattctgcagcaattacatgtgtccttttgatccttgcccaacttccctccctctcccagctcctggcccctggcccagggcccctcttgctgtttttacctctgttccttggggcctagtacccagcaagcacccaaatgggggaggttttgggatgagaggaggaaacgtgtatacctgtaacatctggtggctcttcccccagaagtttgtgttcatacataattgttttccacgctggatcataatgtgacgtgcagttctgccctgtgctggggagccacatgaagcttcccctggctaacttgctaccccgcagcaatcccagtgtggccgtctgcttgctaaaaaatggatctgtgctcatctgtattgatgtccttggagttctacaagtggaacttaagtgtcaaaaagaatatgtggtttttagctgagcgtggtggctcacacctgtaatcccaggactttgggaggctgaggcaggaggattacaaggtcaggagttcgggactagcctgtccaacatggtgaaaccctgtctttactaaaaatgcaaaaatt

SEQ ID NO: 19111 - DNA, 2802 bp, Artificial Sequence
  derived and/or modified sequence
atgcgtatggccgctacagcctgggcagggctgcagggacctcctctgccgaccctgtgtccagctgtgcggacaggcctctactgtcgcgaccaggcacacgccgagaggtgggcaatgacatctgaaacttcatccggctcacactgtgcacgaagtcgcatgctcagaagaagagcccaggaggaagactctactgtgctcatcgacgtgtctccgcctgaggcagaaaaacgtggatcttacgggagcactgcccatgccagcgagcctggaggccagcaggccgcagcatgccgagcaggctctcccgcaaagcctagaatagccgactttgttttggtctgggaagaggaccttaagctagaccggcagcaggattccgcagctagagatagaacagacatgcaccgaacatggcgcgagacgtttctggacaatttgcgggctgccggtctgtgtgtcgatcagcaagatgtgcaggacggaaatacaacagtgcactatgcgctgttatccgcttcttgggccgtgctgtgttactatgccgaagatctcaggctgaagctgcccctgcaggaactacccaatcaggctagtaactggtccgctggcttactggcatggctggggatccctaacgtactccttgaggtagtgccagatgtccctcccgaatactacagctgccgtttccgggtgaataaactgcccagattcctcggtagcgataatcaggacacgttcttcacaagcactaagcgccatcagatcctcttcgaaatcctcgcgaagaccccctacgggcacgaaaaaaaaaatttattaggtatccatcagctgctggcagaaggggtgctgtcagctgcatttccgcttcatgatggaccctttaaaaccccacctgaaggacctcaagctcctcgcctgaaccagcggcaggtactgttccaacactgggctagatggggtaaatggaacaagtaccagccactggatcatgtgcgacgatactttggcgagaaggtggcgttatattttgcatggctgggattctataccggatggctacttccagccgcagtcgttggcaccctggtctttctggtcggctgttttctggtattcagtgacatccccacccaagaactttgcggatccaaagactcatttgaaatgtgccccctctgtctcgattgtcctttctggttgctgagttccgcatgcgcgctggctcaggccggtaggttgttcgaccacggtggcacagtgtttttcagcttgttcatggccctctgggccgtgctactactggaatattggaaaaggaaatctgctactctggcgtatcggtgggattgttcagactatgaagacacagaggagcggccaaggccacagttcgctgcctctgccccaatgaccgctcctaatccaatcaccggggaggacgaaccatactttcccgaacggtccagggcgcgacgaatgcttgctgggagcgtggtaatcgttgtgatggtcgctgtagttgtgatgtgtttggtgtcaattatcctatatagagcaattatggcaatagtagtcagcagatcaggcaacaccctacttgcagcttgggccagtagaatagcaagtctgaccggatccgtggtgaacctggtcttcattttgatactatctaagatttacgttagtttggctcatgtactcacccgctgggaaatgcaccggacccagacaaaatttgaagatgcttttacactaaaggtgttcatcttccagtttgtcaacttctattcctctcctgtgtacattgcattcttcaagggacgcttcgtgggttatcccggtaattaccatacactctttggtgtgcgcaatgaggaatgtgccgcaggaggctgcctgattgagttggcgcaggagttactcgtcattatggtgggcaagcaggtgatcaataacatgcaggaagttttgatccctaagttgaaaggatggtggcagaagtttcgcctgcggtcaaaaaaacggaaagcaggcgcatccgcaggagcctcgcagggtccttgggaagacgactatgagctggtcccctgcgagggcctgtttgatgaatatctggagatggtgcttcagttcggcttcgttacaatcttcgtagccgcatgtccactcgcacccttgtttgcactgttaaataattgggtcgaaatcagacttgatgccagaaagttcgtgtgcgagtaccggcgacccgtcgcggaacgtgctcaggatatcggcatctggttccacatcctcgctggcctgactcacctggcagtgatttcgaatgcctttctccttgccttcagttctgatttccttcctcgcgcttattaccgttggaccagggcacacgaccttcgcggatttctcaacttcacactggctagagcaccgtcatccttcgctgccgctcataaccggacttgccggtaccgggctttcagagacgacgacggtcactattctcagacatactggaatctcttggccatacgattagcatttgtcattgtttttgagcacgtggttttcagtgtgggacggcttctggacctcctggtgcccgacatacccgaaagtgtcgagatcaaagtaaagagggaatactaccttgccaagcaagccctcgctgaaaacgaggtgcttttcggcacaaacggaacaaaagatgagcaaccagagggcagcgaactgtcgagtcactggactccctttacagttccaaaggcctctcaactccagcagtag

SEQ ID NO: 19112 - DNA, 306 bp, Artificial Sequence
  derived and/or modified sequence
tgacacgtccaccttggcttcattatcgctttcgagaacgtggtgttctttttcctgtgtccaaacgaccgcctggtccctgacgttccagctttggcgaccaaaatcaccgcacgcgctctgccaggtcaggcagggggaggccgacagcccggtgacgccgtaagtgtcagtaagctgaggatctgggctgtatcacaggggcgatctggcagctggatgagaggtctggagtttccaggcgatctccagacttgcaccgccacacttccgtgttcatgcttgctggcttctgtccagtgttag

SEQ ID NO: 19113 - protein, 2025 aa, Artificial Sequence
  derived and/or modified sequence
MDNFAEGDFTVADYALLEDCPHVDDCVFAAEFMSNDYVRVTQLYCDGVGVQYKDYIQSERNLEFDICSIWCSKPISVLQDYCDAIKINIFWPLLFQHQNSSVISRLHPCVDANNSRASEINLKKLQHLELMEDIVDLAKKVANDSFLIGGLLRIGCKIENKILAMEEALNWIKYAGDVTILTKLGSIDNCWPMLSIFFTEYKYHITKIVMEDCNLLEELKTQSCMDCIEEGELMKMKGNEEFSKERFDIAIIYYTRAIEYRPENYLLYGNRALCFLRTGQFRNALGDGKRATILKNTWPKGHYRYCDALSMLGEYDWALQANIKAQKLCKNDPEGIKDLIQQHVKLQKQIEDLQGRTANKDPIKAFYENRAYTPRSLSAPIFTTSLNFVEKERDFRKINHEMANGGNQNLKVADEALKVDDCDCHPEFSPPSSQPPKHKGKQKSRNNESEKFSSSSPLTLPADLKNILEKQFSKSSRAAHQDFANIMKMLRSLIQDGYMALLEQRCRSAAQAFTELLNGLDPQKIKQLNLAMINYVLVVYGLAISLLGIGQPEELSEAENQFKRIIEHYPSEGLDCLAYCGIGKVYLKKNRFLEALNHFEKARTLIYRLPGVLTWPTSNVIIEESQPQKIKMLLEKFVEECKFPPVPDAICCYQKCHGYSKIQIYITDPDFKGFIRISCCQYCKIEFHMNCWKKLKTTTFNDKIDKDFLQGICLTPDCEGVISKIIIFSSGGEVKCEFEHKVIKEKVPPRPILKQKCSSLEKLRLKEDKKLKRKIQKKEAKKLAQERMEEDLRESNPPKNEEQKETVDNVQRCQFLDDRILQCIKQYADKIKSGIQNTAMLLKELLSWKVLSTEDYTTCFSSRNFLNEAVDYVIRHLIQENNRVKTRIFLHVLSELKEVEPKLAAWIQKLNSFGLDATGTFFSRYGASLKLLDFSIMTFLWNEKYGHKLDSIEGKQLDYFSEPASLKEARCLIWLLEEHRDKFPALHSALDEFFDIMDSRCTVLRKQDSGEAPFSSTKVKNKSKKKKPKDSKPMLVGSGTTSVTSNNEIITSSEDHSNRNSDSAGPFAVPDHLRQDVEEFEALYDQHSNEYVVRNKKLWDMNPKQKCSTLYDYFSQFLEEHGPLDMSNKMFSAEYEFFPEETRQILEKAGGLKPFLLGCPRFVVIDNCIALKKVASRLKKKRKKKNIKTKVEEISKAGEYVRVKLQLNPAAREFKPDVKSKPVSDSSSAPAFENVKPKPVSANSPKPACEDVKAKPVSDNSSRQVSEDGQPKGVSSNSPKPGSEDANYKRVSCNSPKPVLEDVKPTYWAQSHLVTGYCTYLPFQRFDITQTPPAYINVLPGLPQYTSIYTPLASLSPEYQLPRSVPVVPSFVANDRADKNAAAYFEGHHLNAENVAGHQIASETQILEGSLGISVKSHCSTGDAHTVLSESNRNDEHCGNSNNKCEVIPESTSAVTNIPHVQMVAIQVSWNIIHQEVNTEPYNPFEERQGEISRIEKEHQVLQDQLQEVYENYEQIKLKGLEETRDLEEKLKRHLEENKISKTELDWFLQDLEREIKKWQQEKKEIQERLKSLKKKIKKVSNASEMYTQKNDGKEKEHELHLDQSLEISNTLTNEKMKIEEYIKKGKEDYEESHQRAVAAEVSVLENWKESEVYKLQIMESQAEAFLKKLGLISRDPAAYPDMESDIRSWELFLSNVTKEIEKAKSQFEEQIKAIKNGSRLSELSKVQISELSFPACNTVHPELLPESSGDDGQGLVTSASDVTGNHAALHRDPSVFSAGDSPGEAPSALLPGPPPGQPEATQLTGPKRAGQAALSERSPVADRKQPVPPGRAARSSQSPKKPFNSIIEHLSVVFPCYNSTELAGFIKKVRSKNKNSLSGLSIDEIVQRVTEHILDEQKKKKPNPGKDKRTYEPSSATPVTRSSQGSPSVVVAPSPKTKGQKAEDVPVRIALGASSCEICHEVFKSKNVRVLKCGHKYHKGCFKQWLKGQSACPACQGRDLLTEESPSGRGWPSQNQELPSCSSR

SEQ ID NO: 19114 - protein, 1179 aa, Artificial Sequence
  derived and/or modified sequence
MDNFAEGDFTVADYALLEDCPHVDDCVFAAEFMSNDYVRVTQLYCDGVGVQYKDYIQSERNLEFDICSIWCSKPISVLQDYCDAIKINIFWPLLFQHQNSSVISRLHPCVDANNSRASEINLKKLQHLELMEDIVDLAKKVANDSFLIGGLLRIGCKIENKILAMEEALNWIKYAGDVTILTKLGSIDNCWPMLSIFFTEYKYHITKIVMEDCNLLEELKTQSCMDCIEEGELMKMKGNEEFSKERFDIAIIYYTRAIEYRPENYLLYGNRALCFLRTGQFRNALGDGKRATILKNTWPKGHYRYCDALSMLGEYDWALQANIKAQKLCKNDPEGIKDLIQQHVKLQKQIEDLQGRTANKDPIKAFYENRAYTPRSLSAPIFTTSLNFVEKERDFRKINHEMANGGNQNLKVADEALKVDDCDCHPEFSPPSSQPPKHKGKQKSRNNESEKFSSSSPLTLPADLKNILEKQFSKSSRAAHQDFANIMKMLRSLIQDGYMALLEQRCRSAAQAFTELLNGLDPQKIKQLNLAMINYVLVVYGLAISLLGIGQPEELSEAENQFKRIIEHYPSEGLDCLAYCGIGKVYLKKNRFLEALNHFEKARTLIYRLPGVLTWPTSNVIIEESQPQKIKMLLEKFVEECKFPPVPDAICCYQKCHGYSKIQIYITDPDFKGFIRISCCQYCKIEFHMNCWKKLKTTTFNDKIDKDFLQGICLTPDCEGVISKIIIFSSGGEVKCEFEHKVIKEKVPPRPILKQKCSSLEKLRLKEDKKLKRKIQKKEAKKLAQERMEEDLRESNPPKNEEQKETVDNVQRCQFLDDRILQCIKQYADKIKSGIQNTAMLLKELLSWKVLSTEDYTTCFSSRNFLNEAVDYVIRHLIQENNRVKTRIFLHVLSELKEVEPKLAAWIQKLNSFGLDATGTFFSRYGASLKLLDFSIMTFLWNEKYGHKLDSIEGKQLDYFSEPASLKEARCLIWLLEEHRDKFPALHSALDEFFDIMDSRCTVLRKQDSGEAPFSSTKVKNKSKKKKPKDSKPMLVGSGTTSVTSNNEIITSSEDHSNRNSDSAGPFAVPDHLRQDVEEFEALYDQHSNEYVVRNKKLWDMNPKQKCSTLYDYFSQFLEEHGPLDMSNKMFSAEYEFFPEETRQILEKAGGLKPFLLGCPRFVVIDNCIALKKVASRLK

SEQ ID NO: 19115 - DNA, 6078 bp, Artificial Sequence
  derived and/or modified sequence
atggacaacttcgccgagggcgacttcaccgtggccgactacgccctgctggaggactgcccccacgtggacgactgcgtgttcgccgccgagttcatgagcaacgactacgtgagagtgacccagctgtactgcgacggcgtgggcgtgcagtacaaggactacatccagagcgagagaaacctggagttcgacatctgcagcatctggtgcagcaagcccatcagcgtgctgcaggactactgcgacgccatcaagatcaacatcttctggcccctgctgttccagcaccagaacagcagcgtgatcagcagactgcacccctgcgtggacgccaacaacagcagagccagcgagatcaacctgaagaagctgcagcacctggagctgatggaggacatcgtggacctggccaagaaggtggccaacgacagcttcctgatcggcggcctgctgagaatcggctgcaagatcgagaacaagatcctggccatggaggaggccctgaactggatcaagtacgccggcgacgtgaccatcctgaccaagctgggcagcatcgacaactgctggcccatgctgagcatcttcttcaccgagtacaagtaccacatcaccaagatcgtgatggaggactgcaacctgctggaggagctgaagacccagagctgcatggactgcatcgaggagggcgagctgatgaagatgaagggcaacgaggagttcagcaaggagagattcgacatcgccatcatctactacaccagagccatcgagtacagacccgagaactacctgctgtacggcaacagagccctgtgcttcctgagaaccggccagttcagaaacgccctgggcgacggcaagagagccaccatcctgaagaacacctggcccaagggccactacagatactgcgacgccctgagcatgctgggcgagtacgactgggccctgcaggccaacatcaaggcccagaagctgtgcaagaacgaccccgagggcatcaaggacctgatccagcagcacgtgaagctgcagaagcagatcgaggacctgcagggcagaaccgccaacaaggaccccatcaaggccttctacgagaacagagcctacacccccagaagcctgagcgcccccatcttcaccaccagcctgaacttcgtggagaaggagagagacttcagaaagatcaaccacgagatggccaacggcggcaaccagaacctgaaggtggccgacgaggccctgaaggtggacgactgcgactgccaccccgagttcagcccccccagcagccagccccccaagcacaagggcaagcagaagagcagaaacaacgagagcgagaagttcagcagcagcagccccctgaccctgcccgccgacctgaagaacatcctggagaagcagttcagcaagagcagcagagccgcccaccaggacttcgccaacatcatgaagatgctgagaagcctgatccaggacggctacatggccctgctggagcagagatgcagaagcgccgcccaggccttcaccgagctgctgaacggcctggacccccagaagatcaagcagctgaacctggccatgatcaactacgtgctggtggtgtacggcctggccatcagcctgctgggcatcggccagcccgaggagctgagcgaggccgagaaccagttcaagagaatcatcgagcactaccccagcgagggcctggactgcctggcctactgcggcatcggcaaggtgtacctgaagaagaacagattcctggaggccctgaaccacttcgagaaggccagaaccctgatctacagactgcccggcgtgctgacctggcccaccagcaacgtgatcatcgaggagagccagccccagaagatcaagatgctgctggagaagttcgtggaggagtgcaagttcccccccgtgcccgacgccatctgctgctaccagaagtgccacggctacagcaagatccagatctacatcaccgaccccgacttcaagggcttcatcagaatcagctgctgccagtactgcaagatcgagttccacatgaactgctggaagaagctgaagaccaccaccttcaacgacaagatcgacaaggacttcctgcagggcatctgcctgacccccgactgcgagggcgtgatcagcaagatcatcatcttcagcagcggcggcgaggtgaagtgcgagttcgagcacaaggtgatcaaggagaaggtgccccccagacccatcctgaagcagaagtgcagcagcctggagaagctgagactgaaggaggacaagaagctgaagagaaagatccagaagaaggaggccaagaagctggcccaggagagaatggaggaggacctgagagagagcaacccccccaagaacgaggagcagaaggagaccgtggacaacgtgcagagatgccagttcctggacgacagaatcctgcagtgcatcaagcagtacgccgacaagatcaagagcggcatccagaacaccgccatgctgctgaaggagctgctgagctggaaggtgctgagcaccgaggactacaccacctgcttcagcagcagaaacttcctgaacgaggccgtggactacgtgatcagacacctgatccaggagaacaacagagtgaagaccagaatcttcctgcacgtgctgagcgagctgaaggaggtggagcccaagctggccgcctggatccagaagctgaacagcttcggcctggacgccaccggcaccttcttcagcagatacggcgccagcctgaagctgctggacttcagcatcatgaccttcctgtggaacgagaagtacggccacaagctggacagcatcgagggcaagcagctggactacttcagcgagcccgccagcctgaaggaggccagatgcctgatctggctgctggaggagcacagagacaagttccccgccctgcacagcgccctggacgagttcttcgacatcatggacagcagatgcaccgtgctgagaaagcaggacagcggcgaggcccccttcagcagcaccaaggtgaagaacaagagcaagaagaagaagcccaaggacagcaagcccatgctggtgggcagcggcaccaccagcgtgaccagcaacaacgagatcatcaccagcagcgaggaccacagcaacagaaacagcgacagcgccggccccttcgccgtgcccgaccacctgagacaggacgtggaggagttcgaggccctgtacgaccagcacagcaacgagtacgtggtgagaaacaagaagctgtgggacatgaaccccaagcagaagtgcagcaccctgtacgactacttcagccagttcctggaggagcacggccccctggacatgagcaacaagatgttcagcgccgagtacgagttcttccccgaggagaccagacagatcctggagaaggccggcggcctgaagcccttcctgctgggctgccccagattcgtggtgatcgacaactgcatcgccctgaagaaggtggccagcagactgaagaagaagagaaagaagaagaacatcaagaccaaggtggaggagatcagcaaggccggcgagtacgtgagagtgaagctgcagctgaaccccgccgccagagagttcaagcccgacgtgaagagcaagcccgtgagcgacagcagcagcgcccccgccttcgagaacgtgaagcccaagcccgtgagcgccaacagccccaagcccgcctgcgaggacgtgaaggccaagcccgtgagcgacaacagcagcagacaggtgagcgaggacggccagcccaagggcgtgagcagcaacagccccaagcccggcagcgaggacgccaactacaagagagtgagctgcaacagccccaagcccgtgctggaggacgtgaagcccacctactgggcccagagccacctggtgaccggctactgcacctacctgcccttccagagattcgacatcacccagaccccccccgcctacatcaacgtgctgcccggcctgccccagtacaccagcatctacacccccctggccagcctgagccccgagtaccagctgcccagaagcgtgcccgtggtgcccagcttcgtggccaacgacagagccgacaagaacgccgccgcctacttcgagggccaccacctgaacgccgagaacgtggccggccaccagatcgccagcgagacccagatcctggagggcagcctgggcatcagcgtgaagagccactgcagcaccggcgacgcccacaccgtgctgagcgagagcaacagaaacgacgagcactgcggcaacagcaacaacaagtgcgaggtgatccccgagagcaccagcgccgtgaccaacatcccccacgtgcagatggtggccatccaggtgagctggaacatcatccaccaggaggtgaacaccgagccctacaaccccttcgaggagagacagggcgagatcagcagaatcgagaaggagcaccaggtgctgcaggaccagctgcaggaggtgtacgagaactacgagcagatcaagctgaagggcctggaggagaccagagacctggaggagaagctgaagagacacctggaggagaacaagatcagcaagaccgagctggactggttcctgcaggacctggagagagagatcaagaagtggcagcaggagaagaaggagatccaggagagactgaagagcctgaagaagaagatcaagaaggtgagcaacgccagcgagatgtacacccagaagaacgacggcaaggagaaggagcacgagctgcacctggaccagagcctggagatcagcaacaccctgaccaacgagaagatgaagatcgaggagtacatcaagaagggcaaggaggactacgaggagagccaccagagagccgtggccgccgaggtgagcgtgctggagaactggaaggagagcgaggtgtacaagctgcagatcatggagagccaggccgaggccttcctgaagaagctgggcctgatcagcagagaccccgccgcctaccccgacatggagagcgacatcagaagctgggagctgttcctgagcaacgtgaccaaggagatcgagaaggccaagagccagttcgaggagcagatcaaggccatcaagaacggcagcagactgagcgagctgagcaaggtgcagatcagcgagctgagcttccccgcctgcaacaccgtgcaccccgagctgctgcccgagagcagcggcgacgacggccagggcctggtgaccagcgccagcgacgtgaccggcaaccacgccgccctgcacagagaccccagcgtgttcagcgccggcgacagccccggcgaggcccccagcgccctgctgcccggccccccccccggccagcccgaggccacccagctgaccggccccaagagagccggccaggccgccctgagcgagagaagccccgtggccgacagaaagcagcccgtgccccccggcagagccgccagaagcagccagagccccaagaagcccttcaacagcatcatcgagcacctgagcgtggtgttcccctgctacaacagcaccgagctggccggcttcatcaagaaggtgagaagcaagaacaagaacagcctgagcggcctgagcatcgacgagatcgtgcagagagtgaccgagcacatcctggacgagcagaagaagaagaagcccaaccccggcaaggacaagagaacctacgagcccagcagcgccacccccgtgaccagaagcagccagggcagccccagcgtggtggtggcccccagccccaagaccaagggccagaaggccgaggacgtgcccgtgagaatcgccctgggcgccagcagctgcgagatctgccacgaggtgttcaagagcaagaacgtgagagtgctgaagtgcggccacaagtaccacaagggctgcttcaagcagtggctgaagggccagagcgcctgccccgcctgccagggcagagacctgctgaccgaggagagccccagcggcagaggctggcccagccagaaccaggagctgcccagctgcagcagcagatag

SEQ ID NO: 19116 - DNA, 3540 bp, Artificial Sequence
  derived and/or modified sequence
atggacaacttcgccgagggcgacttcaccgtggccgactacgccctgctggaggactgcccccacgtggacgactgcgtgttcgccgccgagttcatgagcaacgactacgtgagagtgacccagctgtactgcgacggcgtgggcgtgcagtacaaggactacatccagagcgagagaaacctggagttcgacatctgcagcatctggtgcagcaagcccatcagcgtgctgcaggactactgcgacgccatcaagatcaacatcttctggcccctgctgttccagcaccagaacagcagcgtgatcagcagactgcacccctgcgtggacgccaacaacagcagagccagcgagatcaacctgaagaagctgcagcacctggagctgatggaggacatcgtggacctggccaagaaggtggccaacgacagcttcctgatcggcggcctgctgagaatcggctgcaagatcgagaacaagatcctggccatggaggaggccctgaactggatcaagtacgccggcgacgtgaccatcctgaccaagctgggcagcatcgacaactgctggcccatgctgagcatcttcttcaccgagtacaagtaccacatcaccaagatcgtgatggaggactgcaacctgctggaggagctgaagacccagagctgcatggactgcatcgaggagggcgagctgatgaagatgaagggcaacgaggagttcagcaaggagagattcgacatcgccatcatctactacaccagagccatcgagtacagacccgagaactacctgctgtacggcaacagagccctgtgcttcctgagaaccggccagttcagaaacgccctgggcgacggcaagagagccaccatcctgaagaacacctggcccaagggccactacagatactgcgacgccctgagcatgctgggcgagtacgactgggccctgcaggccaacatcaaggcccagaagctgtgcaagaacgaccccgagggcatcaaggacctgatccagcagcacgtgaagctgcagaagcagatcgaggacctgcagggcagaaccgccaacaaggaccccatcaaggccttctacgagaacagagcctacacccccagaagcctgagcgcccccatcttcaccaccagcctgaacttcgtggagaaggagagagacttcagaaagatcaaccacgagatggccaacggcggcaaccagaacctgaaggtggccgacgaggccctgaaggtggacgactgcgactgccaccccgagttcagcccccccagcagccagccccccaagcacaagggcaagcagaagagcagaaacaacgagagcgagaagttcagcagcagcagccccctgaccctgcccgccgacctgaagaacatcctggagaagcagttcagcaagagcagcagagccgcccaccaggacttcgccaacatcatgaagatgctgagaagcctgatccaggacggctacatggccctgctggagcagagatgcagaagcgccgcccaggccttcaccgagctgctgaacggcctggacccccagaagatcaagcagctgaacctggccatgatcaactacgtgctggtggtgtacggcctggccatcagcctgctgggcatcggccagcccgaggagctgagcgaggccgagaaccagttcaagagaatcatcgagcactaccccagcgagggcctggactgcctggcctactgcggcatcggcaaggtgtacctgaagaagaacagattcctggaggccctgaaccacttcgagaaggccagaaccctgatctacagactgcccggcgtgctgacctggcccaccagcaacgtgatcatcgaggagagccagccccagaagatcaagatgctgctggagaagttcgtggaggagtgcaagttcccccccgtgcccgacgccatctgctgctaccagaagtgccacggctacagcaagatccagatctacatcaccgaccccgacttcaagggcttcatcagaatcagctgctgccagtactgcaagatcgagttccacatgaactgctggaagaagctgaagaccaccaccttcaacgacaagatcgacaaggacttcctgcagggcatctgcctgacccccgactgcgagggcgtgatcagcaagatcatcatcttcagcagcggcggcgaggtgaagtgcgagttcgagcacaaggtgatcaaggagaaggtgccccccagacccatcctgaagcagaagtgcagcagcctggagaagctgagactgaaggaggacaagaagctgaagagaaagatccagaagaaggaggccaagaagctggcccaggagagaatggaggaggacctgagagagagcaacccccccaagaacgaggagcagaaggagaccgtggacaacgtgcagagatgccagttcctggacgacagaatcctgcagtgcatcaagcagtacgccgacaagatcaagagcggcatccagaacaccgccatgctgctgaaggagctgctgagctggaaggtgctgagcaccgaggactacaccacctgcttcagcagcagaaacttcctgaacgaggccgtggactacgtgatcagacacctgatccaggagaacaacagagtgaagaccagaatcttcctgcacgtgctgagcgagctgaaggaggtggagcccaagctggccgcctggatccagaagctgaacagcttcggcctggacgccaccggcaccttcttcagcagatacggcgccagcctgaagctgctggacttcagcatcatgaccttcctgtggaacgagaagtacggccacaagctggacagcatcgagggcaagcagctggactacttcagcgagcccgccagcctgaaggaggccagatgcctgatctggctgctggaggagcacagagacaagttccccgccctgcacagcgccctggacgagttcttcgacatcatggacagcagatgcaccgtgctgagaaagcaggacagcggcgaggcccccttcagcagcaccaaggtgaagaacaagagcaagaagaagaagcccaaggacagcaagcccatgctggtgggcagcggcaccaccagcgtgaccagcaacaacgagatcatcaccagcagcgaggaccacagcaacagaaacagcgacagcgccggccccttcgccgtgcccgaccacctgagacaggacgtggaggagttcgaggccctgtacgaccagcacagcaacgagtacgtggtgagaaacaagaagctgtgggacatgaaccccaagcagaagtgcagcaccctgtacgactacttcagccagttcctggaggagcacggccccctggacatgagcaacaagatgttcagcgccgagtacgagttcttccccgaggagaccagacagatcctggagaaggccggcggcctgaagcccttcctgctgggctgccccagattcgtggtgatcgacaactgcatcgccctgaagaaggtggccagcagactgaagtag

SEQ ID NO: 19117 - DNA, 6078 bp, Artificial Sequence
  derived and/or modified sequence
atggataacttcgccgagggcgatttcaccgttgccgactacgctctgctcgaggactgcccccacgtggacgactgtgttttcgctgccgagtttatgagcaacgattatgtgagagttacccagctctattgcgatggggtaggagtgcagtacaaggactacatacagtccgaacggaacctggaatttgacatttgtagcatctggtgttcaaaacctatatccgttttgcaggattactgtgacgccattaagatcaatatcttctggccccttctattccagcaccagaacagctcagtaatttccaggttacacccatgtgtggacgcgaacaactcaagggctagcgagattaatctcaagaaactgcagcatttggagctgatggaggatatcgttgacttggccaaaaaagttgctaacgacagcttcctcatcggagggcttctgaggataggctgtaaaatcgagaataagatcctggccatggaggaagccctcaactggatcaagtatgcgggggacgtcacaatcctaaccaagctgggatcaatcgacaactgttggcccatgctctccatcttctttaccgagtataaataccatatcacaaagattgtaatggaagactgtaatctgttagaagagctgaagactcagtcctgtatggattgcatagaggagggcgagctcatgaagatgaagggtaacgaagaattttctaaggaacggtttgacatcgccattatctattataccagagcaatcgaatatcggccagagaactacttgctctatggtaaccgagccttatgctttctacgcacggggcagtttcggaacgccctcggtgacggcaaacgggcgacaattttgaaaaatacctggccgaagggccactacaggtattgcgacgccctgtctatgcttggggaatacgattgggcactccaagccaatataaaggctcagaaattatgcaaaaatgatcctgaagggattaaagacctgatccagcaacatgtcaaacttcagaaacagattgaagacctacagggccggactgctaacaaggatcccattaaagctttctatgagaatcgtgcgtacactccacggtccctcagcgccccgatatttactacatccctcaactttgtggaaaaagaacgggatttccgtaaaatcaatcacgagatggccaacggggggaaccagaacctcaaagtggcagacgaagcgctaaaggttgatgactgcgattgccaccccgaattcagcccccccagtagccagccgcccaaacacaagggaaaacagaaatccagaaacaacgagtccgagaagttctcatcctcttcacctctgactcttcccgccgacctgaagaacattctcgagaagcagtttagcaaatcctcgcgggccgcccaccaggactttgctaacattatgaagatgttacgcagcctgattcaggacgggtatatggcattgctcgagcagagatgcagatccgcagcccaggctttcactgagttactgaatgggctggacccccagaagattaaacagctcaaccttgccatgatcaactatgtgcttgtcgtctatgggttggccatttccctgcttggcattggacagccagaggagctaagcgaagcggagaatcagtttaaaaggatcatcgagcactaccccagcgagggattagactgcctagcctactgcggtatcggcaaagtgtacctgaagaagaatagatttttagaggcactgaatcatttcgaaaaggcacggactctcatctataggttgcccggggtgctgacttggccaacaagcaacgtcatcattgaggaaagccagccccagaagataaagatgctgttagagaagtttgtggaggagtgcaagtttcccccagtgcctgatgccatctgttgctaccagaagtgtcacggatacagtaagatacaaatttacatcacggacccagatttcaaaggcttcatcagaattagctgctgtcagtattgcaagattgagtttcacatgaattgttggaagaagctcaagaccaccacgtttaatgataaaattgataaggactttctgcaaggcatttgtctgacccctgattgcgagggggtcatctctaaaatcattatcttttcttccggcggtgaagttaaatgcgagttcgaacacaaagtgattaaggagaaggtgccaccacgtcctatcctcaagcagaaatgctcatcccttgaaaagctacgtctaaaggaagataagaagctgaaacggaaaatccagaaaaaagaagcaaagaaactggcccaggaaaggatggaggaagatctacgggaaagcaacccccctaaaaacgaagagcaaaaggaaacagtggataatgttcagcggtgccagttccttgacgacaggattctacagtgtatcaagcagtatgccgacaagattaaatctggaatacaaaacactgccatgctgctcaaggagctcctttcctggaaagtcctttccaccgaagattacaccacctgtttctccagcagaaattttctcaatgaagccgtggactatgttattagacatctgatacaggaaaataacagagtaaagacacgtatcttcctacatgtgctctctgagctaaaagaggtcgagcccaaacttgctgcttggatccagaagctgaattccttcgggctggacgctaccggcacgttcttcagccggtatggagccagccttaagcttttggacttcagcatcatgacatttctgtggaacgaaaagtatggacacaaactggactctatagaaggcaagcagctggattatttctcagagcccgcgagcctgaaggaagctcggtgtcttatctggctattagaagaacatcgcgataagttccccgccctgcacagcgccctggacgaattctttgacatcatggatagccgatgtaccgtactgaggaaacaggattcaggggaagctcctttctcaagcacaaaggtgaagaataagtctaaaaaaaaaaaacctaaggactctaaaccaatgttggttggttcgggaaccacctcagtaacaagcaataacgagattatcacctcctcagaagatcatagtaaccgtaatagcgactccgctggaccctttgctgtgcctgaccatctgagacaagacgtggaagaattcgaagcgctgtacgatcagcattctaacgaatatgtggttaggaacaagaaattatgggacatgaaccccaaacagaagtgttcaaccttatacgactacttcagtcaatttctcgaagaacacggaccacttgacatgtcgaacaaaatgttcagcgctgaatacgagttttttcctgaagagacccgtcagatcttggaaaaagctggggggcttaagccttttttgctgggctgcccccgctttgtcgttattgacaattgcattgccctgaaaaaggtggcctctagactgaagaaaaagcgtaaaaaaaagaatatcaagacaaaagttgaagagataagcaaagccggggagtatgttagggtgaaactgcaactgaaccccgccgcacgggaatttaagcctgatgtcaagtcaaagcctgtcagtgatagttcatctgcaccagcattcgaaaacgttaaacccaaacctgtgtcggcgaacagcccgaagcctgcttgcgaagatgttaaggcgaaacccgtgtcggacaatagcagtcgacaggtcagcgaagatggccaacctaagggggtatccagtaattccccaaagccgggtagcgaggatgctaactataaacgcgtgtcatgtaatagccccaagccggttctcgaagacgtcaaacctacctattgggcccagtcccaccttgtgactgggtattgtacctatctgccttttcagcgatttgacattacccagacccctcctgcctacatcaacgtcctccccggtctgcctcagtacactagtatctacacaccacttgcatctctgtctccagaataccagctgccacggagtgtgccagttgtaccgtcctttgtggccaatgatcgggccgacaagaacgcagccgcttattttgaaggtcaccacttgaacgccgagaacgtggctgggcaccagatcgctagtgagactcaaattttggaaggctcactgggtatcagtgtcaagagccattgttcgacgggagatgctcacaccgtgctttccgaatcaaatcgaaacgacgagcattgtggcaactctaacaataagtgtgaggtcatccctgaatctactagtgccgtgacaaacatccctcacgtccagatggtggcaattcaggttagctggaacattattcatcaggaagttaacaccgagccttacaatcccttcgaggagcggcaaggtgaaatttcccgtattgagaaggagcatcaagttctacaggaccaactccaggaggtctacgagaactatgaacaaataaagctgaaaggactcgaagaaactcgagatctcgaggagaaacttaagcgccatctggaagagaataagataagtaaaacagaactcgattggttcttgcaggatcttgaacgcgaaattaaaaagtggcaacaagagaaaaaggaaattcaagagaggctgaaatccctaaaaaagaaaatcaaaaaggtatcaaatgcttcagagatgtatacccaaaagaacgacgggaaggaaaaggaacacgagcttcatctggatcagtccctggagattagcaataccctcaccaatgaaaagatgaaaatcgaggaatacatcaagaaaggtaaggaagactacgaggagtcccatcagagagctgtggccgcggaggtttccgtcctcgaaaattggaaggagagcgaggtgtacaaactccaaattatggagtcccaggccgaggcatttctgaagaagctaggtctgatcagccgagatcctgccgcctacccagatatggaatcagatatccggagttgggagctatttttgtccaacgtcacaaaagagatcgaaaaagccaagtcacaatttgaagaacaaattaaagctattaagaacggatcccgcctctctgagctgtctaaagtgcaaataagtgaattgtcttttccagcttgcaatacagtacaccctgagttgctgcctgagagctcaggggatgacggacaaggcttggtgaccagtgcatccgacgtcaccgggaatcacgccgcccttcatcgcgacccttccgtcttttcagctggagacagcccaggcgaggccccgagcgctcttctccccggcccgccccctggccagcctgaggcaacccagttaactgggccaaagcgcgcaggacaagcagccctgtcagaacgtagccccgtcgctgacagaaaacagcctgtgcctcctgggagagcagccaggtcaagccagtctccgaagaagcctttcaatagcattattgagcacctcagcgtggttttcccttgttacaactctacggagctggccggctttatcaagaaggtccggtccaaaaataaaaattccctgtccggtttatccatagatgaaattgtccagcgggtgactgagcatatcttagatgaacagaaaaaaaagaagccaaatcccgggaaggataagaggacatatgagccgtcatcagccacaccggtgaccaggtcttcccaaggatcaccctctgtagtcgtagcccctagtcccaaaaccaaaggccagaaggccgaggacgtcccagtgcgaatcgccctgggagcctcctcctgtgagatctgccacgaggtcttcaagtccaagaatgtccgagtcttgaaatgtggtcacaaataccacaaaggttgcttcaaacagtggctcaaagggcaaagcgcgtgccccgcctgtcaaggccgggatctcctgaccgaggagtctccttcaggaaggggttggcccagtcagaaccaggagctccccagctgctcatcgagatag

SEQ ID NO: 19118 - DNA, 6078 bp, Artificial Sequence
  derived and/or modified sequence
atggataatttcgccgaaggggattttaccgtggccgattacgccctgctcgaggactgtcctcatgtggatgactgcgtcttcgccgccgagttcatgagtaacgattacgttcgagtcacccagttgtactgcgatggtgtgggggtgcagtacaaagactacatccaaagcgaacgaaacttagagttcgatatctgctctatttggtgttctaagcctatttccgtgctgcaggattattgtgacgccatcaagattaatatcttctggcctctgctgttccagcatcagaattctagcgtgatttcaaggctccacccttgtgtggacgccaacaatagtagggccagtgagatcaatctgaagaagctgcagcacctcgagcttatggaggatattgtcgatctggctaaaaaagtggccaatgatagttttttgatcgggggcctgctcagaatcggctgcaagattgaaaacaaaatcctagcgatggaggaggccctaaattggatcaagtacgccggagacgttacaatcctaaccaaacttgggagtattgacaactgttggcctatgttgagtatctttttcaccgagtataagtatcatattactaagattgtgatggaggattgtaacttgcttgaggaactaaagacccagtcttgtatggactgcatcgaagagggtgagctgatgaaaatgaaagggaacgaagagttctcaaaagaacgcttcgacatagctataatttattacacgcgggccatcgaataccgaccagagaattatctgttgtacggaaaccgcgctctctgcttcctaaggacaggccaattccggaatgctctgggggatggcaaaagagccacgattctcaagaatacgtggcccaaaggacattaccgatactgtgacgcactgagcatgctcggtgaatacgactgggctctccaggccaatatcaaagcccagaagttgtgcaagaacgacccagagggcatcaaggacctaattcaacaacatgttaagctgcagaaacagatcgaagacctgcagggccgaaccgctaacaaggatcctattaaggcattctatgagaacagggcctacacacccagaagcctgtccgcccctatattcactactagcttgaacttcgtcgagaaggagagggattttcgcaagatcaatcacgaaatggctaatgggggcaaccagaatctcaaggtcgccgacgaggccctgaaagtcgacgactgcgactgtcatccggaattctccccacctagctcacagccgcccaaacataagggcaagcagaaaagtcggaataatgagtctgaaaagttctcatcttcttcccccttgactctgccagctgacttaaagaacattttagagaaacaattctcgaaaagtagtcgtgccgctcaccaggatttcgccaacataatgaagatgcttcggagcttaatacaggacgggtatatggcactcctcgagcagcggtgcaggagcgccgcccaggccttcactgagctgttgaatggtttggacccccagaagatcaaacagttaaacttagctatgatcaattacgtgctggtggtatacggtctcgccattagcctgctggggattggtcagcctgaagaattgagtgaggctgagaaccagttcaaaagaatcatcgagcactatcccagtgaaggattagactgcttagcatactgcggcattggcaaagtatacctcaaaaagaataggtttctcgaggcactgaatcacttcgagaaggccagaactctaatctataggctgcctggggtgctcacatggccgaccagtaatgtcattatagaagaatcccagccccaaaaaattaagatgctcctcgagaagttcgtggaggaatgcaaatttccaccagttcccgacgccatttgctgctaccagaagtgtcatggctactccaaaatccaaatttacattacggatccagatttcaagggtttcatccgaatttcctgttgccagtattgtaaaatcgaattccatatgaactgctggaaaaagctgaaaactaccacgttcaatgacaaaatcgataaggacttcctgcaaggaatctgcttaacccctgattgtgaaggcgtgatctccaagattataattttttcttccggaggggaagtcaagtgcgaatttgagcacaaggtcataaaggagaaggtccccccccggcccattctcaagcagaaatgttcctctcttgagaaactgaggctgaaggaagataagaagctcaagagaaagattcagaagaaggaggccaagaaactcgcccaagaacgcatggaagaggacctcagggagagcaacccgccaaaaaacgaagaacaaaaagaaaccgtggacaacgtacagcgatgtcaattcctggacgaccgaatattgcagtgcatcaagcagtacgctgacaagattaaaagcggcattcaaaacacggctatgctccttaaagagctgctaagctggaaggtgctgagcaccgaggactacacaacatgttttagttcacgaaatttcctgaatgaagctgtggactatgtgatcaggcacctgatacaggaaaataaccgggtaaaaacgaggattttcctgcacgtcctttcggaactgaaagaggttgagcccaagctcgctgcctggattcagaaattaaactccttcggtctcgatgctaccgggactttttttagtagatacggtgcatctcttaaactgctggacttctctatcatgacattcctctggaatgaaaagtacgggcacaagttggactccatagaggggaaacagctggactatttttcggaacccgcatcactaaaagaggctaggtgcctgatctggttgctggaagagcatcgagacaagttcccggcattacactcagccctggacgagttcttcgacatcatggattccagatgcacagtgttgagaaagcaagatagcggagaggccccatttagctccaccaaggtaaagaataagtcaaagaagaaaaagcccaaggacagtaagcccatgcttgttggaagtggcaccacttccgtcacttcgaacaacgagatcataacaagcagcgaggatcattccaatcggaattctgacagcgctggaccttttgcggtcccagatcatttaagacaggacgtggaggagtttgaggccctctatgaccaacatagcaatgaatatgtcgtgcgcaacaagaagctctgggacatgaaccctaagcagaaatgttctactctgtacgattacttttcacagtttctggaggagcatggccctcttgacatgtcaaacaagatgttttccgccgaatatgagtttttccccgaggagacacggcaaattctcgaaaaggccgggggtctcaagcccttccttctgggttgtccaaggttcgtggtgatcgataactgtattgctctcaaaaaagtggcctcacgccttaagaagaaacgtaagaaaaagaacattaaaacgaaagtcgaagagatttcaaaggctggggagtatgtgcgcgtcaagctgcagctgaaccccgctgcacgagagttcaagcccgacgtgaagagtaaacccgtgagcgactccagttcagcacctgcgttcgagaacgtgaagcccaaaccggtgagcgccaactcccccaaaccagcatgcgaagatgtgaaagctaagccagtgtcagataactcctcaaggcaagtgagtgaagatggccagccaaaaggagtaagtagtaattcacccaaacctggtagtgaggatgcgaactataaaagggtgtcgtgcaattcccccaagccagtactggaggacgtgaagcccacgtattgggctcagtcccaccttgtcacaggatactgtacctatctgccattccagcggttcgatatcacgcagacccctcccgcatacattaatgtcctgccaggtctgcctcagtacacgagtatatacacaccgctagcttccctgtcgccggaataccaactgcctcgcagcgtccccgttgttcccagttttgtggcgaatgacagagcagataagaatgcagccgcatattttgaaggccaccatcttaacgctgagaatgtagcaggccatcagatcgccagtgagactcagatcctggagggcagtctggggatatcggtgaaatcccattgctcaacaggcgatgctcacactgtgttgtctgagtccaatcggaatgatgaacattgcgggaactctaataacaaatgcgaggtgattcctgagtctacaagcgcagtgaccaatattccgcacgtgcagatggtagccattcaggtgtcctggaacattattcatcaggaagtaaataccgagccctacaatccgtttgaggaaagacagggagaaatcagcaggatcgagaaagagcaccaggtcctacaggaccaattgcaggaagtctacgaaaattatgaacagattaaattgaagggtctggaggaaacgagggatctggaggagaaactcaaacgccacctcgaagagaacaagatttctaaaacagagttagactggttccttcaagacctcgaacgcgagataaaaaaatggcagcaggagaaaaaggagatacaggagagactgaaatctctcaagaagaagattaagaaggttagcaatgccagcgagatgtacacacagaagaatgatgggaaggaaaaagagcatgagctgcacctggaccagagcctggagataagcaacaccctaaccaatgaaaagatgaagatcgaagaatacatcaagaaaggtaaggaggattatgaggaaagtcatcaacgtgccgttgccgcagaagtctccgtactggagaactggaaggagtctgaggtctacaagttgcagatcatggagtcacaagccgaggcattcctgaagaaacttggtttgatcagccgcgacccagccgcctaccccgacatggagagcgatatcaggtcatgggagctgttcttatccaatgtgactaaggagattgagaaagccaagtcgcaatttgaagagcagataaaagccataaaaaatggatctcgcttgagtgagctaagtaaggttcagatttcggagctatcgttcccagcttgtaatacagtgcaccctgaactgttgccagagtcttccggggatgatggtcagggtttagtgacatccgccagcgacgtgacaggcaaccacgccgcactgcatcgggacccaagtgtcttctctgcaggtgattcccctggagaggcaccgtctgctctcttacctggaccacctcctggccagcccgaagcgacacagctgactggccccaagcgtgcgggacaggccgccctgagcgagaggagcccggtcgctgatcggaagcagccggtgcctcctgggcgagccgctcgcagctctcagagcccaaagaaaccttttaattccatcattgaacacctgtccgtcgtctttccttgctacaactctaccgagctcgcagggttcatcaaaaaagtgagatctaagaacaagaattccctctccgggctgtctattgacgaaattgtccagcgcgtcactgagcacatccttgacgagcagaaaaagaaaaagcccaaccccggcaaagacaaaagaacctatgaaccttcctccgcaacaccagttacacgctcaagccagggttccccctctgttgtagtcgctcccagtcctaagacaaaaggtcagaaggcggaagacgtgcctgttcgcattgccctcggtgccagcagctgtgaaatctgccatgaggtgttcaagtctaaaaatgttagagtgctgaaatgcggacacaaataccacaaggggtgcttcaagcagtggctcaaaggacagtcagcatgccccgcttgtcagggtcgagatctgttaactgaggaatccccctcaggtagaggctggccttcccagaatcaggagctcccatcctgttcaagtcgttag

SEQ ID NO: 19119 - DNA, 6078 bp, Artificial Sequence
  derived and/or modified sequence
atggataatttcgctgagggcgattttacagtggcagattatgcattgctagaggactgtcctcacgtggacgattgcgtattcgctgcggagtttatgtctaacgactacgtccgggtgacacagctgtattgtgatggggtcggagtccagtataaggactatatccaaagcgagcgtaacctggaattcgacatatgcagcatatggtgctccaaaccaatttctgtactgcaagactattgtgatgctattaaaataaatatcttctggccattgttatttcagcaccagaatagctcagtcatctctagactgcacccatgtgtggacgccaataattctcgcgcaagtgaaatcaacttgaagaaactccagcacttagaacttatggaggatattgtcgacttggccaaaaaagttgccaatgattcatttttgataggcggtttacttagaatcgggtgcaagattgaaaacaagatcctggccatggaggaagcccttaattggattaagtacgccggcgacgtgacaattctaacgaagctgggctcaattgataattgttggcccatgctgagcattttcttcacagagtacaaatatcacattaccaagatagtcatggaagactgcaatttgcttgaggaactgaagacccagagctgcatggactgtatcgaggagggagagcttatgaagatgaagggcaacgaggaattcagcaaggaaagattcgacatagccataatttattacacacgggccatcgaatataggcctgaaaactacctgctctacggaaacagggcactgtgcttcctgcgcactgggcaatttcgtaatgccctgggagacggaaaacgtgccactatattgaaaaacacttggcccaagggacactatcggtattgtgatgcgctgtcgatgttgggcgagtacgattgggcactccaggctaacatcaaggctcagaagctctgtaagaatgacccggaaggtatcaaggacctgattcagcaacatgtgaagctccaaaaacaaatcgaggacctgcagggccggactgccaataaggatccgattaaggccttttatgaaaaccgagcatacactccccgatccttgagcgctcccatttttaccacctctctgaactttgttgaaaaagagcgtgattttaggaaaattaaccacgagatggcaaacggaggcaaccagaacctaaaggtggccgatgaggccctgaaggtagatgactgcgactgtcacccagagtttagccctccaagctcacagccaccaaaacacaaaggaaagcagaagtcccgcaacaacgagtccgagaagttcagcagttctagtcccttgaccctgccagcagatctaaagaatattctagagaagcagttctccaaatcttccagggccgcccatcaggacttcgccaatatcatgaagatgctgcgctccctcattcaggatggctacatggctcttttagagcagagatgcaggtctgcagctcaggccttcaccgagcttcttaatggattggaccctcaaaagatcaaacagcttaatcttgcaatgatcaattatgtgttggtcgtgtatggactcgctatcagcttacttggcattggacaacccgaggagcttagcgaggctgagaaccagtttaagcggatcatcgagcattatccctctgagggcctcgactgcttggcatattgtggtatagggaaagtgtacctgaagaaaaaccggttcctggaggcgcttaatcacttcgaaaaggcacggacactgatctatcgtcttcccggtgtgttaacatggccgaccagcaatgtcattatcgaggagagccagccccaaaagatcaaaatgctgctggagaaatttgtagaagagtgcaagttcccacccgtccctgatgccatctgctgttaccagaaatgccacggctattccaagatccagatctatataaccgatcctgattttaagggcttcatccgtatatcctgctgccagtattgtaaaatcgagtttcacatgaactgctggaagaaattgaagacaacaaccttcaacgacaagattgataaagactttttacaaggtatctgtctgaccccagactgcgaaggagtaatttctaaaatcattatattcagtagtggtggggaagttaaatgcgaattcgagcacaaagtgattaaggaaaaagtccctcctcgtcccatcctcaagcaaaaatgttcaagcctcgaaaaattgagacttaaagaggacaagaagttgaagcggaaaattcagaagaaagaggctaaaaagttagcccaagagcgcatggaggaagacttaagggagtcaaacccacccaagaatgaagagcagaaagagaccgtcgacaatgtgcagcgctgccagttcctcgacgataggatcctacaatgcattaaacagtacgcagataagataaagtctgggattcaaaacacagccatgctactgaaggagctgctctcttggaaggtactatccactgaggattatactacttgtttctcttctcgtaacttcttaaatgaggcggttgattacgtgattagacatctaattcaggaaaataatcgtgtgaagaccagaatcttcttgcatgtgctgtctgaactgaaggaagtcgagcctaaactcgctgcctggattcagaaacttaacagctttggtctggacgccacgggtaccttctttagccgttacggcgcctcactgaaattactggatttttcaatcatgacttttctgtggaacgagaaatacggccacaagctggactctatcgaaggtaagcagttggactatttctcagagcccgccagtcttaaagaggccaggtgcctgatatggctccttgaagaacacagggacaaatttcccgctctccacagcgccctggatgaatttttcgatatcatggactcgaggtgtactgtgttgaggaagcaggactcaggcgaagcccccttcagcagcactaaagtgaagaacaaaagcaaaaagaaaaagccaaaggattcaaaacccatgttggttggaagtggtactaccagcgtgacgtctaacaacgagattatcacatcttctgaggatcattccaataggaacagcgacagcgcagggccatttgccgtgcctgaccatctgcgccaggacgtggaggagtttgaagccctatacgaccagcattctaatgaatatgtcgtgcgcaataagaaactctgggatatgaatccaaagcaaaagtgtagcaccctctacgattatttctctcagtttctggaagagcatggacccttggatatgtctaataagatgttttccgccgaatatgagtttttcccggaagaaacccgtcaaatcctggagaaggctggtggcctgaagccttttctgctgggctgcccgcggtttgtggtcatcgacaactgcatagccctaaagaaggtcgcctccaggctgaaaaagaaacgtaaaaagaagaatatcaaaactaaagtggaagaaataagcaaggccggagagtacgttcgcgtcaaactccaactgaatcccgccgctcgggagttcaagcccgacgtaaaaagcaagcccgtcagtgatagtagtagcgctcctgcctttgaaaacgtcaagccaaaacccgtaagcgctaactcaccaaagcccgcctgtgaggacgtgaaggcaaagccagttagtgataactccagtcgacaagtctcagaagatgggcagcccaagggtgtgtcatcaaacagcccgaagccaggatcagaggacgccaactataagcgagtttcatgtaactcccccaagcctgttcttgaagacgtcaagcctacttactgggcccagagccacctcgtgacgggctactgtacctacttgccgttccagcgttttgacataacgcagactccgcctgcatacattaacgtcctgcctggcctgcctcagtatacttccatttacactcctcttgcgagtctgagccctgaatatcaactgccgagatctgtccccgttgtgccatcttttgtggccaacgacagagctgataagaatgccgctgcctactttgaggggcatcatctcaacgcggagaatgtagctggacaccagattgcaagcgagacccagattcttgagggatcattaggcatatctgttaaaagccactgttctaccggcgacgcccacactgtgctgtcagagtctaatcgcaacgatgagcattgtggaaactcgaacaacaagtgtgaggttatccctgagagcacaagtgccgtgaccaacatcccacatgtgcagatggtagccatacaggtctcctggaatattatccaccaggaagtgaacactgagccttataacccgttcgaggagaggcagggagagattagtagaattgaaaaagaacaccaagtgctccaggatcagctgcaggaggtctacgagaattatgagcagattaaactgaaaggcctggaagagacccgcgatctggaggaaaagttaaagcggcacctggaggaaaataaaatttcgaaaaccgagcttgattggtttcttcaggacctcgaaagggaaattaaaaagtggcagcaggagaaaaaggagatacaggagagattaaaaagtctgaagaagaagatcaagaaggtgagtaatgcaagcgaaatgtacacacagaagaatgatgggaaggaaaaggagcacgaactacatctggaccagagtctagaaatcagcaacacgctgaccaatgagaaaatgaagattgaagaatatatcaaaaaaggaaaggaggattatgaggagtcccaccagagggctgttgccgcagaggtctccgtgctcgaaaattggaaagaaagcgaggtatacaaacttcagatcatggaatcccaggccgaggccttcctaaagaagcttggcctcatctcgagggatcctgcagcttatccagatatggaaagcgacataagaagctgggaattgtttctttctaacgtcactaaggagattgagaaggccaagagtcagttcgaggaacaaatcaaggctatcaagaatggaagcaggctgtctgaattgagcaaagttcagatctcagagctgtccttcccagcttgtaatacagtgcatccggaactactgccggaatcctctggggacgatggacagggcctggtaacgtcagccagcgatgtgaccggtaatcacgccgctctgcatcgcgaccccagcgtattctctgccggcgactcccctggcgaagccccgtccgctcttttgcccggtccaccacccgggcagccagaggctacccaactcacggggcccaagagagcgggccaagccgctctttcggagagatcacccgtggccgatagaaagcagcctgtaccgccaggcagggccgccaggagttctcaaagtccaaagaagcctttcaacagcatcattgaacacctgtctgtggtgtttccgtgctacaattctacagagcttgctggctttatcaagaaagtgcgatccaaaaacaagaattctctgtctggtctgtccattgatgaaatagtgcagagagtcaccgagcacatcctggacgagcagaaaaagaaaaaacctaatcccggtaaagacaagcgtacctatgaaccatcttcggccacccccgtgacccgtagcagccaggggtcgccatcagtggtggttgcacctagtccaaaaaccaaaggccagaaagctgaggacgttcctgtacgcatcgctctgggtgcttcaagttgtgaaatttgtcacgaggtcttcaagagcaagaatgtgagagttctcaagtgcggccacaagtaccataaaggctgtttcaagcaatggctcaaagggcaaagcgcttgtcctgcttgccagggacgggacctactcaccgaggagagtccctcaggaaggggttggcctagccagaatcaggagctgccatcatgctccagccggtag

SEQ ID NO: 19120 - DNA, 3540 bp, Artificial Sequence
  derived and/or modified sequence
atggataactttgctgaaggtgattttaccgtcgcggactatgctctgctggaggactgcccccacgtggacgattgcgtcttcgctgcagaatttatgtcaaacgattacgtgcgtgtcacgcaactttattgtgatggggtgggtgtccagtacaaggattatatccaatccgagcggaatctggaatttgatatttgctcgatctggtgtagcaagcccatttcagtgcttcaagactactgtgacgccattaagataaacattttctggcccctccttttccagcaccaaaactcatcagtcatcagcagactccacccctgcgtggacgctaataactcccgcgcatccgaaatcaatttgaaaaagctgcagcatctggagttaatggaagatatcgttgacctggccaagaaagtggccaacgactcattcctcattgggggcttgcttaggatcggttgcaaaattgaaaataagatattggcgatggaagaagcccttaattggattaaatatgcgggagatgttaccatcctgacaaaactgggaagtatcgacaattgttggcctatgctgagtatcttcttcaccgagtacaaatatcacatcacaaagatagtaatggaggactgcaatctgttggaggaactcaaaacgcaatcctgcatggactgtattgaggaaggtgaacttatgaagatgaaggggaatgaggaatttagtaaggaaaggtttgacatcgccataatatactatacacgtgctatcgagtatcggcctgaaaactacctcctgtatgggaatagggctctttgtttcctccgcactggccagtttcgaaatgcgctcggagatgggaaacgcgcaaccatcctcaagaacacctggccgaagggccactaccggtactgcgatgccctctcgatgctgggagagtacgattgggctttacaggcgaatatcaaagcacagaaactgtgcaagaatgaccccgaggggattaaggacctgatccagcagcacgtgaaacttcagaaacaaatcgaagacctgcaggggaggacagccaataaagacccaatcaaggctttctatgaaaacagggcatatacccccaggtccctttctgctcccattttcaccacaagtcttaacttcgtggagaaagagagggactttcggaagatcaatcatgaaatggctaacgggggaaatcagaacctaaaggtcgccgatgaagccctcaaagtggacgactgcgactgccaccctgagttttccccgccatcgtcgcaacctcccaagcacaaggggaagcaaaaaagccggaataacgaatcggaaaagtttagcagttccagtcccctgacactcccagcagacctgaaaaatatcctagagaagcagtttagcaagagcagtcgcgccgcacatcaagatttcgcgaatattatgaagatgctgcgcagtcttattcaggatgggtacatggctttgctggagcagcgatgcagaagcgcagcccaggcgtttaccgaactgctgaacggtcttgacccacagaagattaaacagctgaacctggctatgataaattacgttctagtcgtgtacggcctcgccattagcctactgggaattggacagcctgaggagctgtccgaagccgaaaatcaattcaagcgcattatagaacattatccctcagaaggcttggattgcttggcttactgcgggatcggcaaggtttaccttaagaaaaatcgtttcctggaagcattgaaccacttcgagaaggcaaggacactgatctaccggctgcctggggtcctcacatggcctacgtccaatgttattattgaagagagccagcctcagaagatcaaaatgctgttagagaaattcgttgaggaatgcaaattcccccccgtaccggatgccatttgctgttaccaaaagtgccatggctacagcaagatccagatctacattacggacccagatttcaaagggtttattaggatatcatgctgtcagtactgtaagattgaattccacatgaattgctggaagaagctgaaaacaaccaccttcaatgacaagattgacaaggattttttgcaaggcatatgcctgacccctgattgcgagggcgttatctctaagatcattatttttagtagcggcggggaggtgaagtgcgaatttgagcacaaggtgataaaagaaaaggtacctccccggcccattctaaaacagaagtgcagtagccttgagaagctcagactcaaagaggacaagaaactgaaacggaaaattcagaaaaaagaagcaaagaagctggcacaagagcggatggaggaggatcttcgggaatcaaatcctcccaaaaacgaggagcagaaggagacagtggacaatgtgcagcggtgccagtttctagacgaccgaattttgcagtgcatcaagcagtacgcagataaaatcaaatcaggaatccaaaatacagccatgctgctcaaagagcttctgtcctggaaggtattgagtaccgaagactacactacttgcttttctagtcgcaattttctcaacgaggctgttgattacgtcattagacacctcattcaagaaaacaacagagtcaagactcggattttcttgcacgtactcagcgagctgaaggaggtcgagcccaagcttgccgcatggatacaaaaattgaactcattcggcctggatgcaactgggactttctttagtagatatggggcaagcctgaagctgctagacttcagtatcatgaccttcctttggaacgagaagtacgggcataagctggacagcatagagggcaaacaacttgactacttttctgaaccagccagcctgaaggaagcacggtgtctcatatggctgctggaggagcaccgggataaattccccgccctacactcagctctggatgagttcttcgacatcatggattctcggtgcacagtgctgaggaaacaggactccggcgaggctccattcagttctaccaaggtgaaaaacaaatccaagaaaaagaagcccaaggattctaagccaatgctagttggcagcggcacaacctccgtcactagtaacaatgagatcatcacgagtagcgaggaccactcaaatcgtaatagcgactcggcaggacctttcgcagtccctgatcacttacggcaggacgtggaagagttcgaggccctgtatgatcagcattccaatgaatatgtggtcagaaacaaaaaactgtgggacatgaatccaaagcagaagtgttccacactgtatgattatttcagtcagttcctcgaagaacatggccccctcgacatgtcaaacaagatgttctccgccgagtacgagttttttccggaagagacacgacagatcttggaaaaggcaggcggccttaagcctttcctgctgggctgtccgcgcttcgtggtgatcgataactgcatagctctcaaaaaagttgcctctcgtttgaagtag

SEQ ID NO: 19121 - DNA, 6078 bp, Artificial Sequence
  derived and/or modified sequence
atggacaactttgctgagggggacttcaccgtggccgactatgccctgctggaggactgcccccacgtggatgactgtgtgtttgctgctgagttcatgagcaatgactatgtgcgggtgacccagctgtactgtgatggagtgggcgtgcagtacaaggactacatccagagcgagaggaacctggagtttgacatctgcagcatctggtgcagcaagcccatctctgtgctgcaggactactgtgatgccatcaagatcaacatcttctggcccctgctcttccagcaccagaacagcagcgtcatcagccggctgcacccctgtgtggatgccaacaacagccgggccagcgagatcaacctgaagaagctgcagcacctggagctgatggaggacatcgtggacctggccaagaaggtggccaatgacagcttcctgattggaggcctgctgcgcatcggctgcaagattgagaacaagatcctggccatggaggaggccctgaactggatcaagtatgctggagatgtgaccatcctgaccaagctgggcagcattgacaactgctggcccatgctgagcatcttcttcacagagtacaagtaccacatcaccaagatcgtgatggaggactgcaacctgctggaggagctgaagacccagagctgcatggactgcatcgaggagggggagctgatgaagatgaagggaaatgaggagttcagcaaggagagatttgatattgccatcatctactacacccgggccatcgagtacagacctgagaactacctgctgtatggcaacagagccctgtgcttcctgaggacaggccagttcagaaatgccctgggagatggcaagagggccaccatcctgaagaacacctggcccaagggccactaccgctactgtgatgccctgtccatgctgggggagtatgactgggccctgcaggccaacatcaaggcccagaagctgtgcaagaatgaccctgagggcatcaaggacctgatccagcagcacgtgaagctgcagaagcagatcgaggacctgcagggccgcacagccaacaaggaccccatcaaggccttctatgagaacagagcctacacccccaggagcctgagcgcccccatcttcaccaccagcctgaactttgtggagaaggagcgggacttcaggaagatcaaccacgagatggccaacggcggcaaccagaacctgaaggtggctgatgaggccctgaaggtggatgactgtgactgccaccctgagttcagcccccccagcagccagccccccaagcacaagggcaagcagaagagcagaaataatgaaagtgagaagttcagcagcagcagccccctgaccctgcctgctgacctgaagaacatcctggagaagcagttcagcaagagcagccgggccgcccaccaggactttgccaacatcatgaagatgctgcggagcctcatccaggacggctacatggccctgctggagcagcgctgccgctctgctgcccaggccttcacagagctgctgaatggcctggacccccagaagatcaagcagctgaacctggccatgatcaactacgtgctggtggtgtatggcctggccatcagcctgctgggcatcggccagcctgaggagctgtctgaggccgagaaccagttcaagaggatcatcgagcactaccccagcgagggcctggactgcctggcctactgcggcatcggcaaggtgtacctgaagaagaaccgcttcctggaggccctgaaccactttgagaaggcccggaccctcatctaccgcctgcccggggtgctgacctggcccaccagcaatgtcatcatcgaggagagccagccccagaagatcaagatgctgctggagaagtttgtggaggagtgcaagttcccccctgtgcctgatgccatctgctgctaccagaagtgccacggctacagcaagatccagatctacatcacagatcctgacttcaagggcttcatccgcatcagctgctgccagtactgcaagattgagttccacatgaactgctggaagaagctgaagaccaccaccttcaatgacaagattgacaaggacttcctgcagggcatctgcctgaccccagactgtgagggcgtcatcagcaagatcatcatcttcagcagcggcggggaggtgaagtgtgaatttgagcacaaggtgatcaaggagaaggtgcccccccggcccatcctgaagcagaagtgcagcagcctggagaagctgcggctgaaggaggacaagaagctgaagaggaagatccagaagaaggaggccaagaagctggcccaggagaggatggaggaggacctgcgggagagcaacccccccaagaatgaggagcagaaggagaccgtggacaacgtgcagcgctgccagttcctggatgaccgcatcctgcagtgcatcaagcagtatgctgacaagatcaagagcggcatccagaacacagccatgctgctgaaggagctgctgtcctggaaggtgctgagcacagaggactacaccacctgcttcagcagcaggaacttcctgaatgaagctgtggactatgtgatccgccacctgatccaggagaacaacagagtgaagacccgcatcttcctgcacgtgctgtctgagctgaaggaggtggagcccaagctggccgcctggatccagaagctgaacagctttggcctggatgccaccggcaccttcttcagccgctatggagccagcctgaagctgctggacttcagcatcatgaccttcctgtggaatgagaagtatggccacaagctggacagcattgagggcaagcagctggactacttcagcgagcccgccagcctgaaggaggcccgctgcctgatctggctgctggaggagcaccgggacaagtttcctgccctgcacagcgccctggatgagttctttgacatcatggacagccgctgcaccgtgctgaggaagcaggacagcggggaggcccccttcagcagcaccaaggtgaagaacaagagcaagaagaagaagcccaaggacagcaagcccatgctggtgggcagcggcaccacctctgtgaccagcaacaatgagatcatcaccagcagcgaggaccacagcaacagaaacagcgacagcgctggcccctttgctgtgcctgaccacctgcggcaggatgtggaggagtttgaggccctgtatgaccagcacagcaatgaatatgtggtgaggaacaagaagctgtgggacatgaaccccaagcagaagtgcagcaccctgtatgactacttcagccagttcctggaggagcacggccccctggacatgagcaacaagatgttttctgcagaatatgagttcttccctgaggagacccggcagatcctggagaaggccggcggcctgaagcccttcctgctgggctgccccaggtttgtggtgattgacaactgcatcgccctgaagaaggtggccagccggctgaagaagaagaggaagaagaagaacatcaagaccaaggtggaggagatcagcaaggccggggagtatgtgcgggtgaagctgcagctgaacccagctgcccgggagttcaagccagatgtgaagagcaagcctgtgtctgacagcagcagcgccccagcctttgaaaatgtgaagcccaagcctgtgtctgccaacagccccaagccagcctgtgaagatgtgaaggccaagcctgtgtctgacaacagcagccggcaggtgtctgaagatggccagcccaagggcgtgagcagcaacagccccaagccaggctctgaagatgccaactacaagagggtgtcctgcaacagccccaagcctgtgctggaggatgtgaagcccacctactgggcccagagccacctggtgacaggctactgcacctacctgcccttccagagatttgacatcacccagaccccaccagcctacatcaacgtgctgcccggcctgccccagtacaccagcatctacacccccctggccagcctgagccctgagtaccagctgcccaggtctgtgcctgtggtgcccagctttgtggccaatgacagagctgacaagaatgctgctgcctactttgagggccaccacctgaatgcagaaaatgtggccggccaccagatcgccagcgagacccagatcctggagggcagcctgggcatctctgtgaagagccactgcagcactggagatgcccacacagtgctgtctgagagcaacagaaatgatgagcactgcggcaacagcaacaacaagtgtgaggtgattcctgagagcaccagcgctgtgaccaacatcccccacgtgcagatggtggccatccaggtgtcctggaacatcatccaccaggaggtgaacacagagccctacaacccctttgaggagcggcagggcgagatcagcagaattgagaaggagcaccaggtgctgcaggaccagctgcaggaggtgtatgaaaattatgagcagatcaagctgaagggcctggaggagacccgggacctggaggagaagctgaagaggcacctggaggagaacaagatcagcaagacagagctggactggttcctgcaggacctggagcgggagatcaagaagtggcagcaggagaagaaggagatccaggagcggctgaagagcctgaagaagaagatcaagaaggtgtccaatgccagcgagatgtacacccagaagaatgatggcaaggagaaggagcacgagctgcacctggaccagagcctggagatcagcaacaccctgaccaatgagaagatgaagattgaggagtacatcaagaagggcaaggaggactatgaggagagccaccagagagctgtggccgctgaggtgtctgtgctggagaactggaaggagagcgaggtgtacaagctgcagatcatggagagccaggccgaggccttcctgaagaagctgggcctcatcagccgggaccctgctgcctacccagacatggagagtgacatccgctcctgggagctgttcctgagcaatgtgaccaaggagattgagaaggccaagagccagtttgaggagcagatcaaggccatcaagaatggcagccggctgtctgagctgagcaaggtgcagatcagcgagctgtccttccctgcctgcaacacagtgcaccctgagctgctgcctgagagcagtggagatgatggccagggcctggtgaccagcgccagtgatgtgacaggcaaccacgccgccctgcaccgggaccccagcgtcttctctgctggggacagccctggagaggcccccagcgccctgctgcccggccccccacctggccagcctgaggccacccagctgaccggccccaagagagctggccaggccgccctgtctgagaggagccctgtggccgacaggaagcagcctgtgcccccaggccgggccgcccggagcagccagagccccaagaagcccttcaacagcatcatcgagcacctgtctgtggtgttcccctgctacaacagcacagagctggccggcttcatcaagaaggtgcgcagcaagaacaagaacagcctgagcggcctgagcattgatgagatcgtgcagagggtgacagagcacatcctggatgagcagaagaagaagaagcccaaccctgggaaggacaagaggacctatgagcccagcagcgccacccctgtgaccaggagcagccagggcagccccagcgtggtggtggcccccagccccaagaccaagggccagaaggccgaggatgtgcctgtgcgcatcgccctgggcgccagcagctgtgagatctgccacgaggtgttcaagagcaagaatgtgcgggtgctgaagtgtggccacaagtaccacaagggctgcttcaagcagtggctgaagggccagagcgcctgcccagcctgccagggccgggacctgctgacagaggagagccccagcggccggggctggcccagccagaaccaggagctgcccagctgcagcagcaggtag

SEQ ID NO: 19122 - DNA, 3540 bp, Artificial Sequence
  derived and/or modified sequence
atggacaactttgctgagggggacttcaccgtggccgactatgccctgctggaggactgcccccacgtggatgactgtgtgtttgctgctgagttcatgagcaatgactatgtgcgggtgacccagctgtactgtgatggagtgggcgtgcagtacaaggactacatccagagcgagaggaacctggagtttgacatctgcagcatctggtgcagcaagcccatctctgtgctgcaggactactgtgatgccatcaagatcaacatcttctggcccctgctcttccagcaccagaacagcagcgtcatcagccggctgcacccctgtgtggatgccaacaacagccgggccagcgagatcaacctgaagaagctgcagcacctggagctgatggaggacatcgtggacctggccaagaaggtggccaatgacagcttcctgattggaggcctgctgcgcatcggctgcaagattgagaacaagatcctggccatggaggaggccctgaactggatcaagtatgctggagatgtgaccatcctgaccaagctgggcagcattgacaactgctggcccatgctgagcatcttcttcacagagtacaagtaccacatcaccaagatcgtgatggaggactgcaacctgctggaggagctgaagacccagagctgcatggactgcatcgaggagggggagctgatgaagatgaagggaaatgaggagttcagcaaggagagatttgatattgccatcatctactacacccgggccatcgagtacagacctgagaactacctgctgtatggcaacagagccctgtgcttcctgaggacaggccagttcagaaatgccctgggagatggcaagagggccaccatcctgaagaacacctggcccaagggccactaccgctactgtgatgccctgtccatgctgggggagtatgactgggccctgcaggccaacatcaaggcccagaagctgtgcaagaatgaccctgagggcatcaaggacctgatccagcagcacgtgaagctgcagaagcagatcgaggacctgcagggccgcacagccaacaaggaccccatcaaggccttctatgagaacagagcctacacccccaggagcctgagcgcccccatcttcaccaccagcctgaactttgtggagaaggagcgggacttcaggaagatcaaccacgagatggccaacggcggcaaccagaacctgaaggtggctgatgaggccctgaaggtggatgactgtgactgccaccctgagttcagcccccccagcagccagccccccaagcacaagggcaagcagaagagcagaaataatgaaagtgagaagttcagcagcagcagccccctgaccctgcctgctgacctgaagaacatcctggagaagcagttcagcaagagcagccgggccgcccaccaggactttgccaacatcatgaagatgctgcggagcctcatccaggacggctacatggccctgctggagcagcgctgccgctctgctgcccaggccttcacagagctgctgaatggcctggacccccagaagatcaagcagctgaacctggccatgatcaactacgtgctggtggtgtatggcctggccatcagcctgctgggcatcggccagcctgaggagctgtctgaggccgagaaccagttcaagaggatcatcgagcactaccccagcgagggcctggactgcctggcctactgcggcatcggcaaggtgtacctgaagaagaaccgcttcctggaggccctgaaccactttgagaaggcccggaccctcatctaccgcctgcccggggtgctgacctggcccaccagcaatgtcatcatcgaggagagccagccccagaagatcaagatgctgctggagaagtttgtggaggagtgcaagttcccccctgtgcctgatgccatctgctgctaccagaagtgccacggctacagcaagatccagatctacatcacagatcctgacttcaagggcttcatccgcatcagctgctgccagtactgcaagattgagttccacatgaactgctggaagaagctgaagaccaccaccttcaatgacaagattgacaaggacttcctgcagggcatctgcctgaccccagactgtgagggcgtcatcagcaagatcatcatcttcagcagcggcggggaggtgaagtgtgaatttgagcacaaggtgatcaaggagaaggtgcccccccggcccatcctgaagcagaagtgcagcagcctggagaagctgcggctgaaggaggacaagaagctgaagaggaagatccagaagaaggaggccaagaagctggcccaggagaggatggaggaggacctgcgggagagcaacccccccaagaatgaggagcagaaggagaccgtggacaacgtgcagcgctgccagttcctggatgaccgcatcctgcagtgcatcaagcagtatgctgacaagatcaagagcggcatccagaacacagccatgctgctgaaggagctgctgtcctggaaggtgctgagcacagaggactacaccacctgcttcagcagcaggaacttcctgaatgaagctgtggactatgtgatccgccacctgatccaggagaacaacagagtgaagacccgcatcttcctgcacgtgctgtctgagctgaaggaggtggagcccaagctggccgcctggatccagaagctgaacagctttggcctggatgccaccggcaccttcttcagccgctatggagccagcctgaagctgctggacttcagcatcatgaccttcctgtggaatgagaagtatggccacaagctggacagcattgagggcaagcagctggactacttcagcgagcccgccagcctgaaggaggcccgctgcctgatctggctgctggaggagcaccgggacaagtttcctgccctgcacagcgccctggatgagttctttgacatcatggacagccgctgcaccgtgctgaggaagcaggacagcggggaggcccccttcagcagcaccaaggtgaagaacaagagcaagaagaagaagcccaaggacagcaagcccatgctggtgggcagcggcaccacctctgtgaccagcaacaatgagatcatcaccagcagcgaggaccacagcaacagaaacagcgacagcgctggcccctttgctgtgcctgaccacctgcggcaggatgtggaggagtttgaggccctgtatgaccagcacagcaatgaatatgtggtgaggaacaagaagctgtgggacatgaaccccaagcagaagtgcagcaccctgtatgactacttcagccagttcctggaggagcacggccccctggacatgagcaacaagatgttttctgcagaatatgagttcttccctgaggagacccggcagatcctggagaaggccggcggcctgaagcccttcctgctgggctgccccaggtttgtggtgattgacaactgcatcgccctgaagaaggtggccagccggctgaagtag

SEQ ID NO: 19123 - DNA, 6078 bp, Artificial Sequence
  derived and/or modified sequence
atggacaacttcgccgagggcgacttcaccgtggccgactacgccctgctggaggactgcccccatgtagatgactgtgtgttcgccgccgagttcatgagtaatgactacgtgagggtcacccagctttactgtgacggagtgggagtgcagtacaaagactacatccagtcagagaggaaccttgaatttgatatttgcagcatctggtgttccaagccaatctcggtgttgcaggactattgcgacgctatcaaaattaatatattttggcctctgcttttccagcaccaaaactccagcgttattagccgactgcacccttgtgtagacgctaataattcgagggcctccgagattaacctgaagaaactgcagcaccttgagctgatggaggatattgtcgatctcgcgaagaaggtggccaacgactctttccttatcggcgggctgctgagaatcggatgcaagatagagaataagattttggccatggaagaggcgctgaattggataaagtatgccggtgacgttacgatcctaaccaaactcggatcgatcgacaactgttggcccatgctttcaattttctttacagaatacaaataccacatcacaaagatagtgatggaagattgtaacttgttggaggaactcaagacccagtcctgtatggattgtatcgaagaaggggaactcatgaaaatgaaggggaacgaggaatttagcaaagagagattcgacatagccatcatctactacacccgtgccatcgaatacagacccgagaactatctgctgtacggtaaccgggccctctgctttttgagaacaggccagtttcggaacgccctgggtgacggtaagagggccacgatccttaaaaacacgtggcccaaggggcactataggtattgcgacgctttgtctatgctgggagaatacgactgggcactgcaggccaatattaaggctcaaaagttgtgcaagaatgaccccgaaggaatcaaggacctaatacagcagcacgtaaaactgcagaagcagattgaggacctccagggcagaaccgccaacaaagaccctatcaaagcgttctacgagaaccgggcatatacacctaggtcactttctgccccaatttttactacatctctgaactttgtcgagaaagagcgagatttcaggaaaattaatcacgagatggccaatggaggaaatcagaatctgaaagtggccgacgaggcattgaaagttgatgattgtgactgccatccagagttctcaccacccagctctcagccccccaagcataaagggaaacagaaatccaggaataatgaatccgaaaagttttcgtcctcatcccctttgaccctgcccgctgacttgaaaaacatcctggagaaacagttttccaagtcttcccgggccgcccaccaggattttgctaatattatgaagatgctcagatccctcattcaggatggttatatggctctgctcgaacagcgatgtcggagtgccgcccaggcgtttaccgaacttctcaacgggcttgatcctcagaagatcaaacagctaaatcttgctatgatcaattacgtacttgtggtatacggactggcgatcagtctcctgggaataggacaaccagaagagctgtccgaggccgagaaccagtttaagaggatcattgagcattacccctccgagggtttggactgtctcgcctactgtgggatcggcaaggtctacctgaagaaaaaccgcttcctggaggccctcaatcactttgagaaggctagaactctgatctaccgactgccaggcgtactcacgtggccaacaagcaatgtgatcatcgaggaatcacagccacagaagatcaaaatgctgctcgagaaatttgtagaagagtgcaaatttccccctgttcctgacgccatttgctgttaccagaagtgccacggctattctaagatacaaatatatatcacagacccagacttcaaaggcttcattcgcatatcatgttgtcagtactgtaagatcgagtttcatatgaactgctggaagaaacttaagactacaacgttcaatgataaaatcgacaaggacttcctgcagggcatctgcttgacaccagactgtgaaggggtcattagcaagattattatttttagcagcgggggggaggtgaagtgcgagtttgagcataaggtcataaaggagaaggtgccccctagacctatactcaagcaaaagtgttcctccttagagaagctgcggctgaaagaggacaagaagctgaagcggaaaatccagaagaaggaggccaaaaagctggctcaggaaagaatggaagaggacctgagagaaagtaatccccccaaaaacgaggagcagaaagagacggtggataatgtgcagaggtgccagtttctggacgacaggatcctgcaatgcattaagcaatacgccgacaaaataaagagcggaattcagaataccgccatgctgttgaaagagttactctcatggaaggtgctgagtaccgaggattatactacgtgctttagtagcagaaatttcctcaatgaagctgtggactacgtgattaggcatctgatacaagaaaataatagggtgaagacccgcatttttctgcatgtgctgagcgagctgaaggaggtggaaccgaagctcgccgcctggatccagaagctgaattcatttgggctggacgcaacaggtaccttttttagccgctatggcgcctccctgaaactgctggacttctcaataatgacctttctgtggaacgagaagtacggtcacaagttggactctattgaagggaaacagttagattacttttccgagccagccagccttaaggaagctagatgtttaatttggctgttggaggaacatagggataagttcccggctctgcactcggccctcgacgagttttttgacattatggatagtcggtgcacagtgttgcgaaagcaagactctggcgaagcccccttttccagcactaaagtgaagaataagtcaaagaagaaaaagcctaaagattctaagccgatgctcgttggatccgggaccacatccgtgactagtaacaacgagatcattacgagttccgaggaccacagtaaccgaaactcagattcagcgggacccttcgcggtccccgaccatctgcgacaagatgtggaggaattcgaggctctctatgatcagcatagcaatgagtatgtggtcaggaataaaaaactatgggacatgaacccaaaacaaaaatgctcaaccctctacgactatttcagtcaattcctagaggagcatgggccccttgacatgagcaataaaatgttctctgccgagtatgaattcttccctgaagagactcgccagattctagagaaagctggtgggctgaagcctttcttattgggctgccctagatttgtggtcatcgataattgcattgctctgaagaaggtggccagtcggttgaagaagaagcgcaaaaagaaaaacatcaaaaccaaggttgaggagatatcaaaagccggagagtatgttagagtcaaacttcaattaaatccagctgcgcgcgagttcaagccggacgtgaaatcaaagcctgtttcagactcaagctccgctcctgcatttgagaacgttaagccaaaacccgtatcagccaactccccaaagcccgcctgtgaagacgtcaaagccaagcccgtttcagacaactctagcagacaggtctctgaagacgggcagccaaagggcgtctcctccaattccccgaagccgggttcagaagatgctaactacaagcgggtgtcatgtaatagtcctaaaccagtgctggaagatgttaagccaacatactgggctcagagtcatttggtaacgggttactgtacgtacctgccatttcagaggtttgatattactcagacgccccccgcgtacattaatgtgctgccaggactcccccagtatacttcgatatacactcccctcgcttcactgagtcccgagtatcagttacctcggtctgtacctgttgtcccctctttcgtagctaacgatagagcagataagaatgcagcagcttacttcgaaggacaccacctcaacgcagaaaacgtagccggccaccaaattgcctccgaaacccaaatcctcgagggctctttgggaatttcagtgaaaagccattgttccacaggagacgcccatacagtgctatcagaaagcaatagaaatgacgagcattgtggaaacagcaataacaagtgcgaggtgattccagaaagcacatccgccgtcaccaacattcctcacgtccagatggttgccattcaagtttcctggaacattatccatcaggaggtgaacacagagccttataatccgtttgaagaacgccagggcgagatttcccggatcgaaaaggagcaccaggtgctgcaggatcagttgcaggaagtgtatgagaattatgagcaaattaaacttaagggactggaggaaacccgagatctcgaagagaaacttaagcgccacttggaggaaaataagatttcgaagaccgagctggattggttccttcaggatctggaacgggaaataaaaaaatggcagcaagagaagaaagaaatacaggaaaggttgaagtcgctgaagaagaagatcaagaaggtgagtaatgcatcggagatgtatacacagaagaatgacggcaaagagaaggagcacgagctacatctggaccagtctctggagatctctaataccttgaccaatgaaaagatgaaaattgaagaatatatcaaaaagggaaaggaggactatgaggagagccaccagagagcagtggctgcagaggtatcggttttggagaattggaaggagtccgaagtctacaagctgcaaataatggagtctcaggcagaggccttcctgaagaagctaggcttgattagcagagacccagctgcttatcccgacatggagtcagatatccggagctgggaacttttcctctccaacgtcacgaaagagattgagaaagcaaaaagtcaatttgaggaacagatcaaagccatcaagaatggatctcggctctcagagctctccaaggttcagatttcagaactgtcattcccggcctgcaacacagtgcatccagagctcctgccggaatcaagtggtgatgacgggcaagggttggtgacatcggccagcgatgtgaccgggaatcacgccgccctgcatcgtgatccgagcgtatttagtgccggggactccccgggcgaagccccctctgcactcctgcccggacctccgccggggcagcccgaggcaacacagctaacaggccccaagagagccggccaagccgctctgtctgagagatcccctgtggccgataggaagcaaccagtcccccccggtcgtgcagcacgctcttcccagtcccccaagaagccttttaatagcatcatcgagcacctgtccgtcgtcttcccatgttataatagtaccgaattagctggatttatcaaaaaggtgcggtccaaaaataaaaactctctgagcggcttaagcattgacgaaatcgtccaaagggtgaccgagcacatcctcgatgaacagaaaaaaaaaaagcccaatccaggcaaggataagaggacatacgaaccaagctcagccacccccgtcactcggtcctctcaggggtcgcccagtgtggtggtggctccaagccccaaaaccaaaggccagaaggctgaagacgtgcctgtgcgaattgccctcggcgccagttcatgtgagatttgccacgaagttttcaagtctaaaaatgtgcgggtactgaagtgcggccataagtaccacaagggttgctttaagcaatggcttaagggccaaagcgcctgcccggcctgtcaaggacgtgatctcctcactgaagagtcgccctccggacgcggctggccgtcacagaatcaggagttgccaagttgttcctcaaggtag

SEQ ID NO: 19124 - DNA, 6078 bp, Artificial Sequence
  derived and/or modified sequence
atggacaacttcgccgagggcgacttcaccgtggccgactacgccttgttggaagattgcccccacgtcgacgattgcgtgttcgcggccgagtttatgtcaaacgattacgtgcgggttacacaactctattgtgatggagtcggagtacaatacaaagattacatacagtccgaacggaacctagaattcgacatttgttcaatctggtgctctaagccaataagcgtattacaggattattgcgatgccatcaagatcaacatattttggcccctgttgtttcaacaccagaatagttccgttatatcccgactccacccttgtgtggacgctaataacagcagagcatccgagatcaacctgaagaagcttcaacacttggaactaatggaggacattgttgacctcgccaagaaggtcgctaatgactcgtttttaattggtggtctgctaaggatagggtgcaagatagaaaataaaatcctggcaatggaagaggctctgaactggattaagtatgccggggatgtgaccatccttactaaactggggagcatcgacaattgctggccaatgttgtccatattcttcaccgagtataaataccacataaccaagatcgtcatggaggactgcaacttgttggaggaactcaaaacacagagttgcatggactgtatagaggagggcgagttgatgaagatgaaagggaacgaggagttcagcaaagagcgattcgacattgccataatttactacaccagggccattgagtacagacctgagaactacctcctctacgggaaccgtgctctgtgcttcctcagaacaggacagtttaggaacgctctcggggacggcaaaagggccaccatcctaaagaacacatggccaaagggtcattatcgttattgcgacgccttatctatgctaggtgagtacgattgggccttgcaggcaaacatcaaggcgcaaaagttatgtaaaaatgatccagagggaattaaggacttgatacaacaacacgttaagttacagaagcagatagaagacctgcagggaaggactgctaataaggaccccatcaaagcattttacgagaatagagcttacacaccacgttccctgagcgcccccatcttcaccacgtctctcaattttgtagaaaaggagagggacttccgcaagataaaccacgagatggccaacggggggaatcaaaacctgaaggtcgccgacgaggccttaaaagtcgacgattgcgactgtcatccagagttctcacccccctcctcgcaaccgcctaagcataaggggaaacagaaatctcgcaataacgagtcggaaaaattttcctcctctagccccttgaccctccctgccgatctgaagaacattcttgagaaacagttttccaagagctcccgggctgctcaccaggacttcgcaaatataatgaaaatgctccgttccctgatccaggacggttatatggccctcctggaacagaggtgccggtccgctgctcaggcatttacagagttgctcaatggtcttgatccccagaagataaagcagctcaatcttgcgatgataaattacgtgttagtggtttacggcctggctatttcactgctgggcatcggtcagcccgaggaattgagcgaggcagagaatcagttcaagcggatcattgagcactacccgtctgagggcctcgactgcctcgcttactgcggaatcggcaaagtttatctaaagaagaaccggtttcttgaggcactcaatcacttcgaaaaagctcgcacactgatctacagactgccaggcgtattaacctggcccacctcgaacgtgatcatagaggagtcacagccgcagaaaatcaagatgctgctggaaaagtttgtggaggagtgtaaatttccccctgtgcccgacgccatttgttgctaccagaaatgtcatgggtactccaaaattcagatttacattactgatccagacttcaaagggtttataaggatctcctgctgccagtattgcaagattgagttccacatgaactgctggaagaagttaaaaaccaccacgtttaacgacaagatagacaaagattttcttcaggggatttgtctaacgccagattgtgaaggggtcatctccaagattatcatatttagcagtggtggggaggtgaagtgtgaattcgagcacaaggtcatcaaagagaaggtacctcctcggcccatactgaaacagaaatgctcctcactggaaaaactccgattgaaggaggacaaaaaactcaaaagaaagattcagaaaaaggaggcaaaaaaactcgcccaagagagaatggaagaagatctacgcgagtcgaatccccccaaaaatgaagagcagaaggagacagtcgataatgtgcaaagatgtcagtttctggacgaccggatcttgcagtgcattaaacagtatgccgataaaatcaaaagcggcatacagaataccgctatgctgctgaaagaactcctgtcttggaaagtgctctcaacagaagattacacaacctgtttctcttcaaggaacttcctgaatgaggccgttgactacgtgatcagacacttaatccaagaaaacaaccgcgtaaagacacgaatctttctgcacgtactttcagagctgaaggaagtcgagccgaagctcgccgcttggatccagaagttaaatagcttcggcttggacgccacaggaaccttttttagtcggtacggagcgtctctaaaactcctggatttttccatcatgacttttctgtggaatgagaaatatggccataagcttgattctatagagggtaaacaactggactacttttcggagcctgctagccttaaggaggctaggtgcctgatctggttactcgaggagcacagagataagtttcccgcgctccacagcgcccttgacgaatttttcgatatcatggactctcgatgcacagtgttaagaaagcaggactctggggaagccccctttagctctacaaaggtgaagaacaagagtaaaaagaagaaaccaaaggactctaagccgatgttggtcgggtcaggcactacaagtgtgaccagtaacaatgaaattattacttcatccgaggaccattcgaatcggaatagcgactcggccggaccgttcgcagtccccgatcaccttagacaggacgtggaagaattcgaggccctttatgaccagcattccaacgagtatgtggtccgtaataaaaaactgtgggacatgaacccaaagcaaaaatgctccactctctacgattacttctcccagttcctggaagaacatgggccactcgatatgtccaataaaatgttttctgccgaatacgagttcttccccgaggagactaggcagattttggaaaaggcagggggactgaaacccttcctgctgggatgtccacgcttcgtagttattgataactgcatcgccctgaagaaagtggcttctcgtctgaaaaaaaagcgtaagaaaaagaacataaagacaaaagtagaggagattagcaaagcaggtgagtacgtgcgggtaaagttgcagctcaatccagctgcaagggaatttaagcccgacgtcaaaagcaagcccgtgtcagactcatcgtctgccccagcattcgagaatgtcaaacctaaaccggtgtcggccaacagtcctaagccagcctgtgaagacgtgaaggctaaacccgtaagcgataatagtagtcgacaagtctccgaggacggtcagcctaaaggtgttagcagcaactcacccaagccaggctctgaagatgctaattataaacgtgtttcttgtaattccccaaagccggtccttgaggatgtaaaacctacttactgggcccagtcacacttagtgactggatattgtacctacttgccattccagcgcttcgacataacacaaacgccaccggcctacatcaacgtgttacccgggctcccccagtatacgagcatttatacaccactcgcctcactttccccagaatatcagctgcctcgttccgtgcccgttgtgcccagttttgttgccaatgatcgggcagacaaaaacgcagctgcgtactttgagggacatcacctcaacgctgagaatgtagccggtcatcagattgctagtgagacacagatactggaaggaagcttaggaatttccgtgaaatcacactgctcaacgggagacgcccacaccgtgttgagcgagtccaacagaaatgatgaacattgcgggaattcaaacaataagtgtgaagtgattccggagtcaacttccgccgtgaccaatatcccgcatgtgcagatggttgcgattcaggtcagctggaacatcatacaccaggaagtcaatacagaaccctacaaccctttcgaggagcgccagggtgaaatcagtcggatcgaaaaagaacaccaagttctgcaggaccagctccaggaagtctacgagaattatgaacagatcaagctgaaaggtctggaggagactagggacctggaggagaaactgaaacggcacctggaggagaacaaaatctctaaaaccgaactggactggttcttgcaggatctggaacgtgagatcaagaagtggcaacaagagaaaaaagaaatccaggagaggctaaaatccctcaagaagaagataaagaaggtatcaaatgctagtgagatgtacacacagaagaacgacggcaaggagaaagagcacgagctgcacttagaccagagtctggagatatcaaacaccctcaccaatgagaaaatgaaaatcgaagaatatattaaaaaggggaaggaagattacgaagagagtcaccaacgcgccgttgccgccgaggtctctgttctggagaactggaaagagagcgaagtgtataagctccagatcatggaaagccaggccgaagcattcctgaagaaacttggcctcatatcccgggaccctgctgcgtaccctgatatggagagcgacatcagaagctgggagctcttcctaagcaacgtgaccaaagaaatcgagaaagccaagtcacaattcgaggaacaaatcaaggccattaagaacggcagcaggctgagcgagttaagcaaggtccaaatctccgagcttagttttcctgcttgcaataccgttcatccagagctcctgcctgaatcgtcaggtgacgatggccaggggctggttacttctgcctcagacgtgaccggaaaccatgctgcactccatagggatccaagtgtcttttcagcgggtgattccccaggagaggctccatctgccctactccccgggcccccgccaggccagcctgaagccacccagttgactggtcccaaacgggctggccaagcagcactgtcagagagatccccagttgccgacaggaaacagcctgtgccccccggcagggcggctagatcttcccagagtccaaagaagcctttcaattcgatcattgagcatcttagcgtggtctttccctgttacaattcaacggagctggcaggcttcatcaagaaggttcgctcaaagaacaagaacagtctctccgggttgtccatcgacgagattgtccagcgggttacagaacatatcctggatgaacaaaaaaagaagaagccaaacccaggcaaggataagagaacatatgagcccagcagcgccacacctgttaccagatctagccagggaagtccctctgtggtcgtcgctccctcgccgaaaactaagggccagaaagctgaggatgtgcctgtaagaatcgcgctcggggcctcgtcatgtgaaatctgccatgaagtctttaaaagcaagaatgtccgggtgttaaaatgcggccacaagtatcacaaaggctgcttcaagcaatggctcaaaggccaatcggcctgcccagcctgtcagggaagagacttactgacagaagagtcaccttcaggcagagggtggcctagccagaaccaggaacttccatcctgcagttccagatag

SEQ ID NO: 19125 - DNA, 6078 bp, Artificial Sequence
  derived and/or modified sequence
atggacaacttcgccgagggcgacttcaccgtggccgactacgccttgctggaggactgcccccatgtagacgactgcgttttcgctgctgagttcatgtcgaatgactacgtcagagtgacgcagttatactgcgacggggtcggggtccaatataaggattatattcaatctgagagaaacctcgagttcgatatctgttcaatttggtgctcaaagccaatctccgtgctccaagactactgtgacgcaatcaagattaacattttttggcccctgctctttcagcatcagaatagcagcgtgatctccaggctgcacccttgtgtagacgcaaacaacagccgggccagtgaaatcaatttgaaaaaactgcaacatttagaactcatggaagatatcgtcgaccttgccaagaaagtggctaacgattcatttcttatcggtggacttctcaggatcggatgcaagatcgaaaacaaaatcctagccatggaggaagcccttaattggatcaagtacgccggggacgtcaccatcctgacaaagctggggtctatagacaactgttggcctatgctgagcatcttctttaccgagtataagtatcacatcacaaaaattgtgatggaggattgcaatctgctagaggagctgaagactcaaagctgtatggactgcattgaggaaggcgagctcatgaagatgaagggcaacgaggaattcagcaaggagagattcgacatagccatcatctattatacacgggcgatagagtaccggccggagaactacctcctgtacggaaacagggccctttgtttcttacgtacagggcaattccgtaatgcactgggcgatgggaagcgggctacgatcctcaagaatacttggcccaagggacattaccgctactgcgatgcactgtctatgctcggagagtacgattgggctctgcaagccaatattaaggctcagaaattgtgcaaaaatgatccagaagggatcaaggatcttatccagcagcatgtgaaattgcagaaacagatcgaggatctacagggccggacagctaataaggaccccatcaaagccttctacgaaaacagagcctataccccgcggagtttatcagcacctattttcacaactagtctcaactttgtggagaaggaaagggacttccggaaaattaatcatgagatggccaatggtgggaaccagaacttaaaagtggctgatgaagcactgaaggtggatgattgtgattgccacccggagttttcaccgccgtccagtcagcctcctaaacataaaggaaaacaaaaatctaggaacaatgagagcgaaaaattcagtagcagctctccattgaccctgccagccgatctgaagaacatccttgaaaaacaattcagcaagagctcgagagcagctcaccaagattttgctaacatcatgaaaatgctgcgctccctgattcaagatgggtatatggccttgctggaacaacggtgccgctcagccgctcaagcttttacagagctgctcaacggactagacccacagaagattaagcaactgaacctggccatgatcaactacgttctggtggtgtacggattagctatttctctcctaggtattgggcagcctgaagaattatctgaagcagagaaccaattcaaaaggatcatcgagcattaccctagcgaaggcctggactgcctggcctattgtgggatcggcaaagtgtacctgaagaaaaatcgctttctcgaagccctgaatcatttcgaaaaggccagaacccttatctatcgtttacctggcgtgctgacttggcctacctctaatgtcataatcgaggagtctcagccccagaagatcaaaatgcttctggaaaagtttgttgaagaatgtaagttcccacccgtgcccgacgctatctgttgttaccagaaatgccatgggtactctaaaattcagatctatatcaccgatcccgattttaaggggtttatccggatatcctgttgtcagtactgcaaaatcgagttccacatgaactgttggaagaaactgaagaccaccaccttcaatgacaagatcgacaaggattttctgcagggaatttgcctgacacccgactgcgagggggttatttctaaaattataatcttctcctcaggtggagaggtcaagtgtgaattcgagcataaggttattaaggaaaaagtgcctccccggcctatactgaagcagaagtgcagtagtttagagaaactgcgtcttaaggaagacaaaaagctgaagagaaaaattcagaaaaaggaggctaagaagctggcccaggaacggatggaggaggaccttcgggagtctaacccccccaagaacgaagaacagaaggagactgtggacaacgtccagcgctgccaattcctcgacgaccgaatcttacagtgcattaaacagtacgccgacaaaatcaaatccggcattcagaatacagcaatgctcctcaaagaattgttaagctggaaagtgctgagtaccgaggattatacaacttgcttttcatcccggaatttcctgaacgaggcggtcgattacgtgattaggcatctaatccaagaaaacaatagggtcaaaactagaatcttcctgcacgtgctctctgaacttaaagaagttgagcccaagcttgccgcatggatacagaaattgaacagtttcggactggatgccacagggactttctttagtaggtatggtgcctccctgaaattgctagacttttcgattatgactttcctgtggaacgagaagtacggtcataaactagatagcattgaagggaaacagttggactacttctccgagcccgcctctctgaaagaagccagatgtttgatctggctcttggaggagcaccgcgataaatttcccgccctgcactccgccctggatgagttcttcgacatcatggatagccggtgtaccgtcctgagaaagcaagattctggtgaggcacctttctccagtactaaggtgaagaacaagtctaagaagaagaaaccaaaagatagtaagccgatgttggtgggatcaggcactaccagtgtaaccagtaataacgagatcatcaccagctccgaggatcacagcaatcgcaactctgactccgccggcccgttcgctgttccggaccacctgagacaggatgttgaggaatttgaagctctgtatgaccagcactccaatgaatatgtggtccgcaacaaaaagttgtgggatatgaaccccaagcagaaatgttccacgctctatgattacttttcccagttcctggaggaacacggccccttagacatgtcaaataagatgtttagtgccgaatacgagtttttccccgaggagactaggcaaatcctcgaaaaggcagggggattgaagccattcctgcttgggtgccccaggtttgttgtgatagacaattgcatcgcactgaaaaaggtggccagcaggctgaaaaaaaaaagaaagaaaaaaaacatcaagactaaggtggaggagatttcgaaggctggtgagtacgtcagggtcaagctacagcttaatccagccgcacgggagtttaagcctgatgtgaagtcgaagccagtctcggacagcagctcagccccagcttttgagaatgtcaaacccaaaccagtgtccgctaactcccccaagccagcgtgcgaagacgtcaaagctaagcctgtgtctgacaactcaagccggcaggtatccgaggatggacagcccaaaggcgtgagtagcaactcccccaaaccaggctccgaagatgccaactataagcgggtctcgtgtaactcgcctaagcctgtattagaggacgtgaaacctacttactgggctcagtctcacctggtcactggctactgtacatatctgccctttcagagattcgatatcactcagacaccacctgcatatatcaacgtgctaccagggttgccccagtataccagcatctataccccgctagcctcattaagccctgagtaccaactacctcgatctgtacccgtggttccaagtttcgtggccaatgaccgagcggataagaatgcagcagcttactttgaaggtcaccacctgaacgccgagaatgtagcaggccatcagatcgcatcagagactcagattctggagggcagtctggggatctcagttaaatcacactgtagtacaggggacgcgcacacagtgctaagcgagtccaacaggaatgacgagcactgcggaaacagtaataacaaatgcgaggtcattcccgagtctaccagcgcagtgacaaatatcccccatgtgcagatggtcgctatccaggtgagctggaatatcattcatcaggaggtcaacacggaaccctacaatccgttcgaggagaggcaaggcgaaatcagccgcatcgaaaaagaacatcaggtgctgcaggatcagctacaggaggtgtatgagaactacgaacagatcaaactgaaaggtttggaagaaacccgagacctcgaagagaagttgaaacgccacttggaagagaacaagatctccaaaacggagttagactggtttttgcaagatctggagcgagagatcaaaaaatggcagcaggaaaagaaagagattcaagagcggctcaaaagtctcaaaaaaaaaatcaaaaaagtaagcaatgctagcgagatgtatacccagaaaaatgatggaaaagagaaggaacacgaactgcaccttgatcagagcctcgaaattagtaatactctcaccaacgagaagatgaaaatcgaggagtatatcaaaaagggaaaggaagactacgaggaatctcaccagcgggctgtggccgctgaggtgagtgtgctggagaactggaaagagtccgaagtatataaattgcagattatggagtctcaggcggaagctttcttaaagaaactggggctgatctctcgggatccagcagcctatcctgatatggaatccgatattagatcctgggagctgtttctgtccaacgtgactaaggaaattgaaaaagctaaaagtcagttcgaagagcagattaaagccattaagaacggaagccgcttaagtgagctgtcaaaagttcaaatttcggaactctccttcccggcttgcaatacagtacacccggagttgctcccggagagctcgggagatgacggacagggactagtcactagtgcctcagatgtcacggggaaccatgccgcgctccaccgtgacccctctgtctttagtgctggcgacagtcccggggaggctccttctgctctcttacccgggcctccacctggccagcccgaagccacacaactgaccggaccaaagagagctggtcaagccgcccttagcgaaagaagtcccgtggcagaccgcaagcagcctgtcccacctggcagagcggccaggtcttcacagtcgcctaaaaagccctttaactcaattatagaacacttgagtgtggtcttcccctgttataattctactgaattggccggcttcatcaagaaagtgaggagcaagaataagaatagtctgtccggtctgtccattgacgagattgtgcaacgcgttactgagcacatcctggatgagcagaaaaaaaaaaaaccaaaccccgggaaggacaaacgcacttacgagccctcaagcgcaacgcctgtgactcggagcagccaaggctcgccctctgtggtagtggctccatcacccaagacaaaagggcagaaggcagaagatgtccctgtccggatcgctctcggggcctcttcatgcgaaatttgccatgaggtcttcaagtcaaaaaatgtgagagtcttgaagtgtggtcataaataccataaaggatgtttcaagcagtggctcaagggccagtccgcttgccccgcctgccagggtagggacctgctaacggaagagtcaccatccggaagggggtggccctcacagaatcaagagctgccctcctgttcatctaggtag

SEQ ID NO: 19126 - DNA, 3540 bp, Artificial Sequence
  derived and/or modified sequence
atggacaacttcgccgagggcgacttcaccgtggccgactacgccttgttggaagactgcccccacgtggacgactgcgtctttgccgccgagttcatgagtaatgactatgtgcgcgtgacccagttgtattgtgatggtgtgggagttcagtacaaagactacatccagagtgaacgcaatctggaatttgacatttgttctatttggtgcagtaagccgatttcagttctgcaagactactgtgatgctatcaagattaatatattttggcctttgctcttccagcaccagaactcttccgtgatctcgagactacacccgtgcgtggatgctaataatagcagggctagtgagataaacctaaagaagctccagcacttggagctcatggaggatatcgtggatctcgcgaagaaggtggcaaatgattccttcctgatcggcggattgctgcgaattggctgtaaaatagagaacaagattctagccatggaggaagccctgaactggatcaaatacgcaggggacgtgactatcctgactaagctgggaagtattgataactgttggcccatgctatctattttctttactgagtacaagtatcatattactaagatagtgatggaggactgtaatctgcttgaagagctgaagacccagtcatgtatggattgtattgaagagggggagctcatgaagatgaaggggaacgaggagttttctaaggagcgcttcgatatcgccatcatctactataccagagcaatcgaatacagaccggagaactacctcctctacgggaatcgggccctctgctttctgagaaccggacagtttaggaacgccctcggggatgggaagcgcgccacgattcttaaaaacacatggccaaaagggcactatcggtactgtgacgccctttctatgttaggagaatacgactgggcccttcaagcgaacatcaaagcccagaagctttgtaaaaatgacccagaaggcatcaaggatctcattcaacagcatgtgaaactgcaaaaacagatcgaagacctacaaggtagaaccgccaacaaggacccaattaaggcgttctacgagaacagggcctatactccgagatcccttagtgctccaatcttcactactagcctgaacttcgtggaaaaggagcgggattttaggaagatcaaccacgagatggctaatggtgggaaccagaatctgaaggtcgccgacgaggcccttaaggttgacgactgcgattgccacccagagttctcaccacccagctcccagccgcctaagcacaaaggcaaacagaaaagcagaaacaatgaatctgaaaaattctcgtcatcgtctcctctcactttgcctgcggatctcaagaacattctggaaaagcaattcagcaaaagttctagagcggctcatcaggattttgctaacattatgaaaatgctacgttcgctgatacaggacggctatatggcattgctggaacagcggtgtcgcagcgctgcccaggctttcaccgagttgttaaacggcttagaccctcagaaaataaagcagctgaacttggccatgattaattacgtgcttgtggtgtatggtctcgcaattagcctgctcgggatcggacagcccgaagaactgagtgaggccgaaaaccaattcaagaggatcatcgagcactatccttccgaggggctggattgtctggcctactgtgggatcggcaaagtgtaccttaaaaagaatcgctttcttgaagctctcaaccactttgaaaaagcccgcactctgatttaccgcctgcctggagtgttgacatggccaacaagtaatgtaattatcgaggagtcacaaccccaaaagatcaaaatgctgctggagaagttcgtggaagaatgcaagttccctcccgttccggatgccatttgctgctatcagaaatgtcacggctacagtaagatacagatatatattacagatcccgacttcaaagggtttatcagaatctcctgttgccagtactgtaaaatcgagtttcacatgaattgctggaaaaagctgaaaaccacaaccttcaatgacaaaatcgataaagatttcctgcagggcatctgccttacaccggactgcgaaggtgtcatttccaaaattattattttctcaagtggaggggaggtcaagtgtgagttcgaacacaaagtaattaaagagaaggtgccaccaagaccaatcctgaaacagaagtgcagtagcctggaaaaacttcggttgaaggaggacaaaaaactgaaaaggaaaatccagaaaaaggaggctaaaaaactcgcacaagagcgcatggaagaagatctcagagagagtaacccccctaaaaacgaggaacagaaagagacagtggataacgtgcagcgatgtcagtttctagatgaccgcattctgcagtgcataaagcaatacgctgataagataaagagcgggatccagaataccgccatgttgctcaaagagcttctctcttggaaagtgctgagcactgaagactacaccacgtgtttcagcagccgaaattttctgaatgaagctgtggattacgtcatccgacatcttatccaggagaataacagggtcaagactcgaatttttctacatgtgctcagcgaattaaaagaagtggagccaaaactggcggcttggatacagaaactgaactcatttgggctagatgcgaccggaaccttttttagtagatacggagcaagccttaagttgctggacttctctatcatgactttcctctggaatgaaaagtacgggcataagctggactccattgagggcaagcagcttgattatttttcagagcctgctagtctcaaggaagctaggtgcctcatttggctgctggaagaacacagagacaaatttcctgccctacactcagcccttgacgaattcttcgacattatggactcccgctgcacagtcttaaggaaacaggatagtggtgaggccccattctcttctactaaagtgaagaacaaaagcaaaaagaagaagcctaaggattccaaacccatgctcgttggctctgggacaacctccgtgacctctaacaatgaaatcattacttcttctgaagatcatagcaacaggaattcagatagcgccgggccatttgcagtgcccgatcacctgagacaagacgtggaggagttcgaggctctctacgatcaacatagcaacgagtacgtcgtgaggaataagaagctttgggacatgaaccccaaacaaaagtgctcaaccctatacgattacttctcccagttcctggaagagcacggaccactagacatgtcgaataaaatgtttagcgctgaatacgagtttttcccagaagaaactagacagattttggagaaggctggcgggctcaaacccttcctgctaggatgtccccgcttcgtagtcattgacaactgcatcgctttgaagaaagtcgcctcaagactaaagtag

SEQ ID NO: 19127 - DNA, 6077 bp, Artificial Sequence
  derived and/or modified sequence
atggacaatttcgccgaaggcgacttcaccgttgctgactatgccctgttagaggactgcccacacgtcgacgattgcgtctttgccgcagagttcatgtccaatgattatgtgagggtgacgcagctctattgtgatggagtcggcgtgcagtacaaggactatattcagagcgaaaggaacttggagttcgatatatgttcaatctggtgttccaaacccataagcgtgctgcaagactactgcgacgccattaagatcaacattttctggccccttctgttccagcatcagaattccagcgttatctctcgcctgcatccctgcgtggacgcgaacaattcgcgcgcttctgaaataaacctgaagaagctgcagcaccttgaacttatggaggatattgtcgatctcgccaaaaaagtagccaacgattcgtttctcataggaggcctactccggatcggttgcaagatcgagaacaaaattctcgctatggaggaagcgctaaattggattaaatatgctggagacgtgacgattctgaccaagttgggctccatcgacaactgctggcccatgctctcaatttttttcaccgagtacaaataccatatcacaaagatcgtgatggaagactgcaacctgcttgaggagctcaagacgcagtcttgcatggattgtatagaggagggggaattaatgaaaatgaagggaaacgaggaattctctaaagagagatttgacatcgcaattatctactatactagggccattgaatatcgccctgagaactatcttctgtatggcaatagagcactatgcttcttgaggactggacagtttagaaatgcccttggagacggcaagagagctactatcttaaagaacacatggcctaaagggcactatcgctattgtgacgcgctgtccatgctgggtgagtacgactgggcgttgcaggccaacattaaggcacagaagctgtgcaagaatgaccccgaaggtattaaggatctgatccagcagcatgtcaagttgcagaagcagatcgaagacctccagggccgaacggccaataaagatccaataaaggctttctatgagaatcgcgcttacacacctcgctccctgtccgcaccgatctttacaacttccctgaacttcgtggaaaaagagcgggacttccgaaagatcaatcacgaaatggcgaacggcggtaaccaaaatctaaaggtcgctgatgaggcgctgaaggtggatgattgcgattgccatcctgaattttctcctccaagctcccagcctccaaaacataaggggaaacaaaagtctcgcaataacgaatctgagaaattttctagtagcagcccgctgacgttgcctgcagatttaaagaatattctggagaagcagttctcaaagagcagtagggccgcacaccaagatttcgctaacatcatgaaaatgcttaggtctttaatccaggacggctacatggcactgctcgagcagagatgccgcagcgcagcccaggcctttactgagttgctgaacgggcttgacccccagaaaatcaaacagctgaatctggccatgattaactacgtgctggtcgtctacggactggccatctccctcttggggatcggccagcctgaggagctgagtgaggcagaaaatcagttcaagaggatcatcgaacattatcctagtgaaggcctggactgcctggcctattgtggaatcggcaaggtctatcttaagaagaaccggttcctggaagccttaaaccatttcgaaaaagctcgcacgctgatctatcggctgcccggagtgcttacatggccgacaagtaacgtgattattgaggaatcacagcctcaaaaaataaaaatgctcctggaaaagtttgtggaggaatgcaagtttcccccagtcccagatgccatttgttgctaccagaaatgccacggttattccaagatccagatctatatcaccgaccctgatttcaagggcttcatccggatcagctgctgccagtattgtaaaattgaattccatatgaactgctggaaaaagctaaagactacgacattcaatgataaaatagacaaggattttctgcaggggatttgcctgacaccagattgcgagggggtgatttctaagatcatcatcttttcgtccgggggagaggtcaagtgtgaattcgagcataaagtgatcaaagagaaggttcctcccaggccaatattaaagcaaaagtgtagcagtctggaaaaattacgactcaaggaggacaaaaaactgaagcgtaaaatacagaaaaaagaagcaaagaaactcgcccaagaacgaatggaggaggacctgcgggagagcaatccacccaagaatgaagaacaaaaggagacagtggacaatgtgcagaggtgccagttccttgacgatcggatccttcagtgtattaagcagtatgccgacaaaatcaaaagcggcattcagaatacagccatgttgttaaaggagttgttatcatggaaagttctgagcactgaagattatacaacatgcttttcttcgcggaatttcctgaacgaggcagtggactatgttatcagacatctgattcaggagaacaacagggtgaagacccggatctttctgcacgtgctctccgagctcaaagaggtcgagccgaaactggccgcttggatccagaaattaaattcattcggattagacgcaactggcacatttttctccagatatggcgcttcactcaagctattggacttttccattatgacttttctctggaacgagaaatacggacataagctcgacagtattgagggcaagcaacttgactacttcagcgagccagcttcactcaaggaagccagatgtttaatttggctcttggaagagcatcgcgataaattcccggcactgcatagcgctctggacgagttctttgacatcatggacagccgctgcacggttctgaggaagcaggactccggggaagcacccttcagttctacaaaagttaaaaacaagtctaaaaaaaagaagccaaaagactcaaaaccgatgctcgtgggaagcggcactacatctgtaacctcaaacaacgaaattatcacatcaagcgaggatcattcaaatcgtaattcagacagcgcagggccttttgccgtgccggatcatctgcggcaggacgtagaggagttcgaggcactgtatgaccagcattctaatgaatacgtggtgagaaacaagaagctgtgggatatgaatcccaagcagaaatgttcgaccctgtatgattacttttcgcagttccttgaagaacacggtcccctggatatgagcaacaaaatgtttagcgccgagtacgagttttttccagaggagacgaggcagatcctggagaaggccggaggactcaagcctttcctgctgggatgtcccaggttcgtcgtgattgacaactgtatcgcacttaagaaggttgcgtccaggcttaagaaaaagaggaagaaaaagaacatcaagactaaagttgaagagatcagcaaggctggcgaatatgtgagggtaaagttgcaactgaatcccgctgccagagagtttaaacctgatgtaaaatctaagcccgtgtctgattcatcatccgcaccagctttcgaaaacgtcaagcctaaaccggtttccgcaaatagcccaaagcccgcttgtgaggatgtcaaggccaagccagtcagtgataattcgtctcgccaggtctcagaggatggccagccgaagggtgtgtcctccaactcacctaagcccggatcagaagacgcaaattataagcgtgtgagctgcaattcacccaagcccgttctggaggatgtgaagcccacatactgggctcagtcccacctcgtgacaggttactgtacttatctgcctttccagaggttcgacatcacccagacacccccagcctacattaatgttcttcccggtctgccccagtacaccagtatttatacacctttagccagtctgagccctgagtatcagcttcccaggagtgtacctgtggtgcccagtttcgtggccaatgaccgggcagataagaatgctgccgcatatttcgaggggcaccacctgaatgcagagaacgttgccggacatcaaatcgccagtgagacacagattttagagggctctttgggcatcagtgtgaaatcacattgcagtactggcgacgcccatacggtcctgtcagagagcaaccggaacgatgagcactgcggaaacagcaataataaatgcgaggtgatcccagaaagcacctcggcggttacaaatattcctcacgtccaaatggtggctattcaggtctcatggaacatcatacatcaagaggtaaatacggaaccatataatccatttgaagagcggcaaggcgaaatctctagaatcgagaaagagcaccaagtattacaggaccagctgcaggaagtgtacgagaattacgaacagatcaaactgaaagggttggaagaaacacgagatctagaggaaaagcttaaacgccacctggaagaaaataagattagcaagacagaactcgactggttcctgcaagacttggaacgcgagataaaaaagtggcaacaggagaagaaagagatccaggagaggctgaagtcgctgaagaagaaaatcaagaaggtgtcaaatgcgagtgagatgtacactcagaagaatgatggaaaggagaaagaacatgagctacatttagaccagtccctagagatctcaaatacactcactaatgaaaagatgaagatcgaagaatacattaagaaaggtaaagaagactatgaagaatcccaccagcgcgcagtggccgctgaagtatcggtgcttgaaaactggaaggagtccgaggtgtacaagctacagatcatggagtctcaggccgaggccttcctgaaaaaacttggcctgatcagccgcgatcccgctgcatatcctgatatggagtctgacatacgcagctgggagctgttcctgtcaaacgttactaaagagatcgaaaaagcaaagtcacagtttgaggagcagattaaagcaataaagaacggctcacgtctttcagagttatctaaagtgcagatcagcgaacttagttttccagcttgtaacaccgtacatcccgagttactcccggaaagcagcggtgacgacggacaaggcctcgttacctcagcctctgatgttactggcaaccacgcagcactccaccgagacccctccgtgttctcggcaggggattccccaggagaggccccatcagccctcctgcctggtccccctcccggtcagcctgaggccacgcaactcacaggacccaaaagggcaggacaggccgcactgagcgagagatcccccgtagctgatcgtaaacaaccggtgccccctggaagagcagccaggagcagccagtctcccaaaaagccattcaactctataatcgagcatctctctgtcgtgtttccctgctacaattccaccgaacttgcagggttcattaagaaggtgcgctctaaaaacaagaactcactgagcgggctctctatcgatgagattgttcagagagtgactgaacacattttagatgaacagaagaagaagaagccgaacccaggcaaggataaaaggacttatgagccgtcatcagcaacaccagttacaaggagctcccaaggtagcccaagcgtggtagtggccccttcgcccaagaccaagggtcaaaaagccgaagacgtccccgtccgaattgccctaggcgcaagcagctgtgagatatgtcacgaagtcttcaagagcaagaatgttcgcgtgctgaagtgcggtcacaaataccataaaggctgctttaaacagtggctgaaaggccaaagtgcttgccccgcttgccagggcagggacctgctgaccgaggagagtcccagtgggagaggctggccttctcagaatcaggagctgccttcatgtagttccagata

SEQ ID NO: 19128 - DNA, 6077 bp, Artificial Sequence
  derived and/or modified sequence
atggacaacttcgctgagggcgacttcaccgttgcagactatgccctgttagaggactgcccacacgtggatgattgcgtctttgccgctgaattcatgtcaaacgactatgtcagagtcacgcaactgtattgcgatggggtgggagttcagtataaagactatatccaaagtgaacgcaatctggagttcgacatttgctcgatctggtgtagcaagcccattagtgtgttacaagattactgcgatgctataaagatcaacattttttggcccctcctgttccagcaccagaactcttcggtgatctcgagactgcatccatgcgtcgacgccaacaactctagagcatctgaaattaatctgaaaaaactgcagcatttagagttaatggaggacattgtggacctagcaaaaaaggtggcgaatgattcatttttgattggcggattgctgagaattggatgtaagatcgaaaataagatccttgccatggaggaggcactgaattggattaagtacgccggagacgtcaccatcctgacgaagttaggaagcattgacaattgctggcctatgctgtccatattctttacggagtacaaataccacatcactaaaatcgtgatggaagattgcaatctcctcgaggaactcaagacccagtcctgcatggactgtattgaggagggtgagctaatgaaaatgaaaggaaatgaagaattctccaaggagaggttcgacatcgctattatttactacaccagggctattgagtacagacccgaaaattacctcctctacggtaatagggccctgtgctttcttcggacaggccagttcaggaatgctttgggagacggaaagagagcgaccatactaaagaacacttggcccaaaggccactatagatactgtgatgctctgtccatgcttggcgagtacgactgggctctgcaggcaaacattaaagcccagaagctttgtaagaacgaccctgaaggcattaaagatctgatccaacagcacgtcaaacttcagaagcaaattgaggacctgcagggacgcactgccaataaagacccgataaaagcattctacgagaaccgcgcatatactccaagaagcttgagcgcgcctatcttcactacgagcctaaacttcgtcgaaaaggagcgggattttcgcaaaatcaatcacgagatggccaacgggggaaatcaaaaccttaaagtagcagacgaggcgctaaaagtagatgactgcgactgtcacccagaattttcccccccaagttcccagcccccaaaacataagggtaagcagaaatcgcgaaacaacgagtctgagaaattttccagcagcagcccgttaacgctgccagctgacctcaaaaatatcctggaaaaacagttttccaaaagctctagggcagctcaccaggatttcgcaaacattatgaaaatgcttcggagccttatccaggatggttacatggctttgctggagcaacgctgccggagcgccgctcaagcgtttactgaactccttaacggactggatccgcagaaaattaaacagctgaacctcgcgatgattaactatgtgctggttgtttacggattggccatcagcttgctgggtattgggcaaccagaggagctctctgaagccgagaaccaattcaagcggatcatcgagcattatccctctgaggggctagattgcctggcttactgcggcattgggaaagtgtacctgaaaaagaataggttcctggaggccctaaatcacttcgaaaaagccaggactttgatctatcgtcttccaggagtgctgacctggccgacatctaacgtcatcatcgaggagtcacaaccacagaagatcaaaatgttgctggagaagttcgtggaggagtgcaaattcccacctgtcccggatgcgatatgctgctatcaaaagtgtcacggatactctaagatacagatctacatcacagatccggatttcaaaggattcataagaatttcctgctgtcagtattgcaaaatcgaatttcacatgaactgttggaaaaaactcaagactactacctttaatgataagattgataaagactttcttcaagggatctgtctgacacccgactgcgaaggtgtcattagcaagattataatatttagctccggaggtgaggttaagtgtgagtttgaacataaagttatcaaagaaaaggtgccccctagaccgatcctgaagcagaagtgctcctccctagaaaagctcaggctcaaagaagacaagaagctgaaaagaaagatccagaaaaaggaggccaagaaacttgcccaagaaaggatggaagaagatctgcgcgagagtaaccccccaaaaaatgaagagcagaaagaaaccgtggataacgtgcaacgatgtcagtttctggacgataggatactgcagtgcatcaagcagtatgcagataagattaagtcagggatccagaataccgcaatgcttctaaaagagctgctttcatggaaggttttgtctacagaggattacaccacttgcttctcttccagaaactttctgaatgaagccgtcgactatgtgatccgccacctgatccaagagaacaaccgcgtgaaaaccaggatatttttacatgtcctttcagagctgaaagaggttgaacctaagctcgccgcatggattcagaaactcaattctttcgggctggacgccactggaacctttttttctagatatggcgcttcactgaaactcctggatttcagtataatgacatttctgtggaatgagaagtacggtcataaactcgactctatcgaaggcaagcaactcgattacttctcagagcctgccagtctgaaggaggctagatgcttgatttggctccttgaggagcacagagataaatttcctgctctgcactcagctctggatgagttttttgacattatggattctagatgtactgtgctccgcaaacaagatagcggagaagcgccattcagctctacgaaagtgaaaaacaagtcaaagaagaagaagcctaaagattccaagcctatgctagtgggcagtggcacaacctcggtgacctccaataacgaaatcattacatcctccgaggaccactctaaccggaatagtgattcagcgggaccttttgcagtgcccgatcatcttcgccaagacgtggaagagttcgaagctctctatgatcagcatagcaacgagtacgtggtgagaaataagaagctgtgggatatgaaccctaaacaaaagtgctctaccctttatgactacttttctcagtttttggaggagcatggtccactggatatgtcaaacaaaatgttcagcgccgagtacgagttctttcccgaagaaacgagacaaatacttgagaaggccggaggccttaagccatttctcctgggctgtccaaggttcgtggtcattgataattgtatcgcattaaagaaggtggcatcccggctgaagaagaagaggaagaaaaagaacataaagaccaaagtggaggagatcagcaaggcaggggagtatgtcagagtgaaactccaactgaatcctgccgctagggaattcaagcccgacgtgaaaagcaagccggtgtccgactcttcctccgcgcctgcgtttgaaaacgttaaaccaaaacctgttagcgctaattcacccaagcccgcttgcgaggacgtcaaagctaaaccagtgtccgataatagctcacgccaggtatctgaggatggccaaccaaagggtgtcagctccaacagccctaaacctgggtctgaagatgccaactacaagagggtctcttgtaatagcccaaaaccagtgctggaggatgtcaaacccacttactgggcacagagtcatctcgtgactggctattgcacctacctccctttccaacgctttgatattacgcagacaccccctgcatatattaacgtgctgccaggcctccctcagtatactagcatttacaccccccttgcatctctgagtcccgagtaccagctgccccgtagcgtgccggtcgtgccttcctttgttgctaatgaccgtgccgataaaaatgcagccgcttatttcgaaggtcaccacctgaacgcagagaatgtagccggtcatcagatcgcctctgagacccagattctggaaggatcactggggatcagcgttaaatcgcattgctcaacgggggacgcccatacagtcctctccgagagtaaccggaatgatgaacattgtggtaattccaataacaaatgtgaggttatacccgaatcaaccagcgccgtgactaatataccgcatgtgcagatggtggcaattcaggtatcatggaacattatccaccaagaggtcaatactgagccatataacccttttgaggagcggcagggggaaattagtaggatcgagaaggagcatcaggttttgcaggaccagcttcaagaggtttacgaaaactacgagcagataaaactgaaaggtctggaggagaccagggatcttgaggagaaacttaaaagacatctggaagaaaataagatctccaaaacagagttggactggtttcttcaggacctggagcgtgagatcaagaaatggcaacaggaaaaaaaagagattcaggaacgactcaaatcattgaagaagaagattaaaaaggtatccaatgccagtgaaatgtacacgcaaaagaacgacggcaaagagaaagagcacgagctacacctagaccaatcactcgaaatttcaaacacactgacgaatgagaaaatgaaaattgaggagtatatcaaaaagggcaaagaggactatgaggagtcccatcaacgcgctgtcgccgctgaggtgagcgtgttggaaaattggaaagaatccgaggtgtacaaattgcagatcatggaatcccaagccgaagcctttttgaaaaaactgggcctgatcagtagggacccagcagcctatccggacatggagtctgacatccgctcctgggagctgtttctgagtaacgtaacaaaggagatcgaaaaagcaaagtcacagtttgaggagcagatcaaagccatcaagaacggaagtagactgagcgaactgtctaaggtgcagatcagcgagctgtccttcccagcgtgtaataccgtgcatcccgaattgctcccagagtccagtggcgacgatgggcagggtcttgtaaccagtgctagtgacgtgacaggaaatcacgccgcactgcaccgcgatccaagcgtgtttagcgcaggagactctccaggggaggctccttctgcattattgccaggccctccacctggtcagcctgaggcaactcagctgacaggaccaaaaagggcaggacaggcagctctgagcgagcgctctcctgtggctgacaggaagcagcccgttcctccagggagggcagctcggtcatcacagagtcccaagaagccttttaatagtattatcgaacatctgagcgtggtcttcccctgttacaactccaccgagttggccggattcatcaaaaaggtccgctccaaaaacaaaaattccctgagcgggctgagcatcgacgagattgtacagcgggtgactgagcacatcttggatgagcaaaaaaagaagaagccaaaccccggaaaggacaaacgcacctatgagcccagctccgcgaccccagtaacgcggagcagtcaaggaagtcctagcgtcgtggtggcccctagcccaaagaccaaaggccagaaagcagaagacgtccctgtgaggatcgccttgggcgctagttcatgtgagatttgtcacgaggtctttaagtccaaaaatgtgagggtgctgaaatgtggccataagtaccacaagggttgcttcaaacagtggctgaagggacagtctgcctgtcccgcttgccaaggcagagatctgttaacagaagaaagtccctctgggagagggtggccgagtcagaaccaggagctgccctcgtgctcctctagata

SEQ ID NO: 19129 - DNA, 6077 bp, Artificial Sequence
  derived and/or modified sequence
atggataacttcgccgaaggagactttaccgtggcggactacgctttattagaggactgtccacacgtcgacgactgcgtctttgcagctgagtttatgtctaacgactacgtgagagtaacccagctgtattgcgatggcgtaggagtccagtacaaggactacatacagagtgagcgtaatttggagtttgatatttgttctatctggtgttctaaaccgatcagcgtgcttcaggattattgcgatgcaatcaaaatcaacattttctggcctctgcttttccagcaccagaactcatccgtcatctccagactccacccctgcgtagatgcaaacaatagccgtgcgtctgaaatcaatctgaagaagctgcagcacctggaattaatggaagacattgttgacttagccaagaaggtcgcaaatgacagttttcttatcgggggtctgctgaggattggatgtaaaatcgagaacaaaatcctagccatggaggaggcactcaattggatcaagtacgccggagatgttaccatcctgactaagctgggatcaattgataattgctggccaatgctgtctattttcttcacggagtacaaatatcacatcacaaaaatagtcatggaggactgtaatctgttagaggagctgaagacccagagttgtatggactgcatagaggaaggcgaattgatgaaaatgaaaggaaacgaagaatttagtaaggaacgatttgatatcgcaattatttattatacgcgggctatcgagtacagaccagagaactatctcttatacgggaacagagccctgtgtttccttaggactggccaatttcgtaacgccttgggcgacggcaagagagcgactattcttaagaatacttggcctaaaggccactacaggtattgcgacgcacttagcatgttaggagaatacgactgggctctgcaggctaacatcaaggcacagaaactgtgcaagaacgaccccgagggtattaaggacctcattcagcaacatgtcaagcttcagaagcagatcgaagatctgcagggtcggaccgccaataaggaccctatcaaagcattttacgagaatcgagcatataccccccgatcactgagcgcccctattttcacaacaagcttgaatttcgtcgagaaagaacgcgacttccggaagatcaatcacgagatggcaaacgggggaaaccagaatctgaaagtggcggatgaggccctaaaggtggatgattgtgattgtcacccggagttcagccccccaagctcgcaacccccaaaacataagggcaagcagaaaagccgaaataatgagagcgagaaattcagctcttccagccctctcaccctaccggcagacttaaaaaacatcctggaaaagcaattctccaaatcttcacgggcagcacatcaggactttgctaacattatgaaaatgctaagaagtctgatacaagatggctatatggcactgcttgaacagcgctgtcggagtgccgcacaagcctttaccgagcttctaaacggtttggatccccaaaagattaagcagctcaacctcgctatgatcaactacgtacttgttgtgtacggactcgccatttctctgcttgggattggccagcctgaagagctgtcagaagccgagaaccaattcaagaggatcatcgagcactaccccagcgagggtctggactgtctggcctactgtggcatcggcaaggtctatctgaagaagaatagatttctggaagccttgaaccactttgagaaggccagaacgttaatttatcgcctgcctggtgtgttaacttggcccacctccaatgtcattatcgaggagagccagcctcaaaagattaagatgttgctggagaaattcgttgaggagtgcaagtttcctcctgtgccagatgccatttgctgttaccagaagtgtcatggttattccaagatccagatctacatcactgatcctgacttcaaaggttttatccgcatctcttgttgccaatattgtaagatcgagttccatatgaactgttggaagaagctgaagacaacgacctttaacgataagatcgataaggactttctccaaggtatctgtctgactcctgattgtgagggtgttatctccaaaatcatcatcttctcctccgggggtgaagttaagtgtgaattcgagcacaaagtgattaaggagaaggttcctcccagaccgattttaaaacagaagtgttcgtcactggaaaagctgcggctgaaggaggataagaaactgaaaagaaagatccagaagaaagaggctaaaaagctcgcccaggaaagaatggaagaggaccttcgagagtccaaccctccgaaaaacgaggaacaaaaggaaactgttgataacgtgcagaggtgccagttcttggacgacaggattctgcagtgcatcaagcagtacgctgataaaattaaaagcggaatccagaatactgccatgctcctcaaagaactgctgtcgtggaaagtgttgtcaacggaggattacactacatgcttcagctcgcgaaatttcctcaacgaagcagtcgactacgtgatcagacacttaattcaagaaaacaacagagtaaagaccagaatcttcctgcacgttctgagcgagctcaaggaagttgagcctaagctggctgcctggattcagaaactgaacagctttgggctggacgccaccggtaccttcttctcgagatacggcgcatcgctgaagcttcttgatttctcaatcatgacattcctgtggaacgaaaagtacggccataagctggactctatagaaggaaaacaactggattactttagtgaacctgcatcattaaaggaggcaagatgcctaatctggctcctggaggaacacagggataaatttcccgctctccattcggcactggacgagttttttgacatcatggattcaagatgtactgttctgcggaagcaggactctggcgaggctcccttctccagcacaaaggtcaagaacaagtccaagaagaagaagcccaaggactctaagcctatgctcgtggggtcgggcaccacaagtgtcacaagtaacaatgagatcatcacttcttctgaggatcattcaaatcgtaactctgacagcgctggcccttttgctgttcctgatcaccttcggcaagatgtggaagagttcgaagcactgtacgaccagcactccaatgaatatgttgtccggaataaaaagctctgggatatgaacccaaagcagaagtgttccaccttgtatgattacttctctcaattcttggaggagcacggccctcttgacatgagcaataagatgtttagtgctgagtatgagttctttcccgaagagacccgccagatacttgagaaggcaggcggactgaagcccttcctcctgggatgcccaagatttgtggtgattgacaattgcatcgcgctgaagaaggttgcctccagattgaaaaaaaaaagaaaaaaaaagaatatcaaaaccaaggtggaagaaatttctaaggccggtgaatatgtgcgcgtgaagctccaattgaaccccgcagccagagagttcaaaccagacgtcaagtcgaaacccgtgtctgattcgtccagtgcccctgcattcgagaacgtgaagcctaagccagtctctgctaattcaccaaaacccgcatgcgaggatgtgaaggctaagcccgtcagcgataattcctcacggcaggtgagcgaggacgggcaacccaaaggagtgtcttctaactcgcccaagccagggagcgaggatgctaactataagagagtgtcctgcaactcccccaaacctgttctggaagacgttaagccgacctactgggcacaaagccatctggtgacgggatattgcacatatctgcctttccagcgcttcgatatcacacagactccccctgcctacattaacgtcctgccgggactgccccaatatacatccatctatacccctttggctagcctcagcccggaatatcagctcccccgaagcgtccccgtggtcccatcatttgtcgccaatgatcgtgcagataaaaatgctgctgcctacttcgaaggtcaccatctgaatgctgagaatgttgccggtcaccagatagcctccgagacccagattctggaaggttctctcggcatttctgtcaagtcacattgcagcaccggggacgcccataccgtcctatcagaaagcaacagaaacgatgaacactgcgggaattccaacaacaagtgcgaagtgattcctgagagcacgtctgcggtcactaatatcccacatgtccagatggtggccattcaggtctcctggaacatcattcaccaggaggtcaataccgagccatacaatccattcgaggaacgccagggggaaatatcaaggatcgaaaaagaacatcaggtcctgcaggatcagcttcaagaagtgtatgagaactacgagcagattaaactaaaaggactggaggagacacgggacttagaggagaaactgaagcgtcatcttgaggaaaataagattagtaaaaccgagcttgattggtttctccaggatctggaaagggagatcaagaaatggcagcaggagaagaaggagattcaggagagactcaaatctctgaagaaaaaaatcaaaaaagtgagcaatgcgtctgagatgtatacacagaaaaacgatggaaaagagaaagagcacgagctgcacctcgatcagtccctggaaattagcaataccctaactaacgaaaagatgaagattgaggagtatataaagaaaggcaaggaggactacgaggagagccaccagagggcggtggcagcagaagtgagcgtgctggaaaactggaaagagagcgaggtgtataagttgcagatcatggaaagccaggcggaagcatttctgaagaaacttggcctgatcagtcgcgaccccgctgcgtaccccgatatggagtcagacatccggagctgggaattgtttcttagcaacgtgacgaaggagatagaaaaagctaagagtcagttcgaggagcagattaaggccataaagaatggttcacggctgtccgagctgagcaaggtccagatctctgagctcagcttccctgcttgtaatacagtccaccccgagctgttacccgagagctccggcgacgacggtcagggactggtcacaagcgcatcggacgtgactggaaaccacgctgctttgcaccgtgatccttctgtcttctcagcaggcgattctcccggagaagcaccgagcgccctcctgcccggaccgcctcctggtcagccagaggctacacagctgactggtccaaagcgtgccggtcaggcagcgcttagtgaacgtagcccagtggcggatagaaagcaacctgtgcctcccggaagagctgctcgttccagccagtccccaaagaagcccttcaacagcatcattgaacatctgtcagtcgtctttccctgttataattccacagagcttgcgggattcatcaaaaaggtgaggagtaagaataagaactccctatccgggctatctattgatgagattgttcagcgcgtcacagagcacatcctggacgaacagaaaaagaaaaaaccaaaccccggtaaggataaaaggacctacgaaccatctagcgccaccccagtgacgagatcgagccagggtagtcctagcgtcgttgtggctccgtcacccaagaccaaagggcagaaggctgaagacgtgcctgttaggattgcccttggcgcaagctcatgcgaaatctgccacgaggtgttcaaaagcaagaatgtgcgagtactgaaatgtgggcacaagtaccacaagggctgtttcaaacagtggttgaaaggacagagcgcatgcccggcttgtcagggcagagatctactcacggaggaaagtcccagtggtcggggttggcctagccagaatcaggagttaccttcctgcagctcgagata

SEQ ID NO: 19130 - DNA, 3540 bp, Artificial Sequence
  derived and/or modified sequence
atggataactttgccgaaggtgatttcacagtggcagattacgccctcctggaagattgtccacatgttgacgactgcgtatttgctgcagaatttatgtccaatgattacgtgagagttacacaactctactgtgacggcgtcggtgtgcagtacaaggactacatccagagtgagcgcaatttagaattcgacatatgctctatctggtgttcgaagcctatctctgtcctgcaggactattgcgatgcaataaagatcaacatcttctggccactgttgtttcaacaccaaaacagttcggtcatcagccggcttcacccatgcgtggacgcgaataactctcgcgcttcagagatcaacctcaagaagctgcaacacctggagttgatggaggatatagtggacctggcgaagaaggtcgccaacgacagcttccttattgggggactcctaagaattgggtgtaagattgagaataagatattggccatggaagaagccctcaattggatcaaatatgccggtgatgtgaccattcttaccaagttagggagcattgacaactgctggccaatgctcagcatcttcttcacagaatacaagtatcacattactaaaattgtgatggaggattgcaacttgctggaagaactgaagacccagagttgcatggactgcatcgaggagggcgagttgatgaagatgaagggtaatgaggagtttagcaaagagagatttgatattgccataatctattacacaagagcgatcgagtatagaccagagaactaccttctgtacgggaatcgtgccctgtgtttcttgcgtacggggcagtttagaaatgccctcggagatggaaaacgcgcaacgattctgaagaatacctggccgaagggccattaccgctattgcgacgctttatctatgttgggcgagtatgattgggcactacaagctaacatcaaagcacagaagctatgcaagaacgatcccgaagggatcaaagatctaatccaacagcacgttaaactgcaaaagcagattgaggatctgcaggggagaaccgcgaacaaagaccccattaaggctttttacgagaaccgtgcatacacgcctcggtctctgagcgcaccgatatttactacatctctcaattttgttgagaaggagagagacttcaggaagatcaaccacgaaatggccaatggcggaaaccagaacctgaaagttgcagacgaggccctgaaggtcgacgattgtgactgccatccggaattcagccctcccagttctcagccaccgaagcataaaggcaagcaaaaaagccgaaacaatgaatccgagaaattttcttcttcatcccctcttactctacccgctgacctcaagaatattcttgaaaagcagttctctaagagtagcagagccgcacaccaggactttgccaacattatgaaaatgctgcgcagcctgatccaggacggatatatggccttactcgagcagcggtgtcgttcggcagcccaggctttcaccgaactcctgaacggcctggatccacagaagattaaacagttgaacttagctatgatcaactatgtgctggtggtttacggtcttgcaattagtctgctcggtatcggccagccagaggagctgtctgaagcggagaatcagtttaaacggatcatagagcactacccatctgaaggtcttgactgtctggcttactgtgggatcgggaaggtttatttgaagaaaaaccgcttcctggaggcactgaatcacttcgaaaaggccagaacgctgatctatcgcctgcccggagtgctcacatggcccacaagtaatgttatcattgaagagtcccagccgcagaagatcaaaatgctactggaaaagttcgtggaggaatgtaaatttccacccgtgcccgacgctatatgctgctatcagaagtgtcacgggtacagcaagattcagatctatataactgatcctgatttcaagggctttatccggatttcctgctgtcaatattgtaaaatagaatttcacatgaattgctggaagaaactaaaaacaaccacctttaacgacaaaatcgataaggattttcttcaggggatctgcctcacgcccgactgcgagggagtcattagcaagattatcatattttcctctggtggcgaggtgaaatgcgaattcgagcacaaagtgatcaaagagaaggtacctccgaggcccatacttaagcagaaatgctcgtctctcgaaaaacttcgacttaaggaggataaaaagctaaagcgcaagatccagaaaaaggaagctaaaaagctggcacaggagcggatggaagaggatctgagggagtccaatccgcctaagaatgaggagcaaaaggagaccgtggataatgttcagaggtgtcagttcctcgatgatcggattttgcagtgcattaaacagtacgctgacaaaatcaagagcggtatacagaacactgccatgctccttaaagaactgttgtcatggaaagtcctctctacagaggattatactacctgctttagttctcggaactttttaaatgaggccgtggattacgtgatcagacatttgatacaagagaacaatcgagtgaagacccggattttcctgcacgttctgtccgagttaaaggaggtcgagcctaaattagcggcatggattcagaagttgaattccttcggcctggacgccacgggtacattttttagtagatatggcgctagcctcaaactgctcgacttctcaatcatgaccttcctgtggaacgaaaagtatggacataaactggatagcatcgaggggaagcaactggactatttctccgagcctgcttccctgaaggaggctcggtgcctcatctggcttttagaagagcatcgcgataaatttccggcactgcattccgcactggacgaattctttgatataatggactcaagatgtactgtattgcggaagcaggacagtggggaagctccctttagttcaaccaaggtcaaaaacaagtcgaagaaaaaaaaaccaaaagatagtaagcctatgctcgtaggctcggggaccacaagcgtaacatcgaataacgagatcattactagctccgaggaccactccaacagaaatagcgacagtgccggacctttcgctgtgcccgatcacctacgtcaggatgttgaagaattcgaagcactgtacgatcaacactccaatgagtacgtggttaggaacaagaagctttgggacatgaaccctaagcagaaatgctccacactgtatgattacttcagtcagtttctggaggaacatggtccactggacatgtcaaataaaatgttctctgccgaatacgaattcttccctgaagagaccaggcaaatcttagaaaaagctggcggacttaagccattcctgctcggctgtcctcgattcgtcgttattgataattgcatcgctctgaagaaggtggcgtcacgtcttaagtag

SEQ ID NO: 19131 - DNA, 9084 bp, Artificial Sequence
  derived and/or modified sequence
ctgaactagttgccagtgatcttgaaacgtgacagtaaccaagagataaataggtgacaatgacaggaaaattagatgtagtaaaagagagtgtttgagagcagaagctatggcaactaaagactggatttgaatccttcctagcttggtgacatgagcaaattacttgatttaagtgagcattttcccatctgtacagtggagataacgataattgtgcctgctaagaagaattgctgtgaagattagtgaaataatgcatgtaaaacatttggtacagtatgtgacacatagtacaaatagtttgctaggaagattgttattattcttcacttgtgatattgtgaagttttcatacagcaaattggacatcatgagatggattgattaaataaatagatttgaacttcaaggactggtagtgttcttgctttggaaagaagaaacttggtttatcctaataatagtaggataataatggtgaagtgataggtacaagtaatagtgtttatgatgcgctggtgatgataggaaaagaaagccattatatgggcaagagctagaagtaataaaatggtgcatttttcagtgatgtttggcctatgtagctattctctgataactataaaaatccttattattgaagattcttcaggaaaaaaaacccttagtctgaaactttaccaccaatcccccttgccccccattgaaatacgtatttttaaaacatggcttttgataatgtgagggttttttcctttttgcgatttagcagtgctgattgtgtattgcagtagttgtgagagcattagaagcagcagtcgataggaggatggaaggtctggatgccgccttggggagttaggagattggcagacttaccctgtaccactctagccctactcctttgcccaagacagaaacacactgagatggataggagaatatgagcagttgataggaaagttctcagtggagtcaggatttaggttaggccaggagattgagaatataacagtttgtgtatgatgaaatggcatatttcacagaatgcagtaaaagcaggtagggtacaagtgcagcaacaggaagatgtcttttcttcattcagcaaacacttatttgagagcttaccatgtgctaggcacatacaaagataaataagatgcccttgatgatcctctatttaaaggagacatgtaaacaggttaacttagagtagagatggtgaatatgtgaacctgaggaaaggaagaaatagattaaattatctggagagagaggaaaagtcagcagaatggggacgagaatctttcggagctcagtgttctgataggagttatttccttgggcataggttccaagtatttttctaatataccatagaagccaggaaaactttcttctgttatctcaaatgatttaattactgacttgagtttgtgttgtctccttagacttgtgcaccatggacaattttgctgagggagatttcactgtggcggattatgccttgttagaagattgccctcacgtggatgattgtgtctttgctgctgaatttatgagcaatgattatgttcgtgtgactcagctttactgtgatggggtgggtgtgcaatataaagattatatccaaagtgagaggaatttggaatttgacatctgcagtatatggtgtagtaaaccaatttctgtcctgcaagattattgcgatgccattaaaataaacatcttctggccacttctgtttcaacatcaaaacagttccgtaatatcacgattgcatccctgtgtggacgccaacaattcacgtgcttctgagataaatttgaagaaactacaacatcttgagttgatggaagatattgtggatttggcaaagaaagttgctaatgattcattccttattggaggcttattgagaattggttgtaaaatagaaaataaaatcttggcaatggaagaagctctgaattggataaaatatgcaggcgatgtaacaattctaactaaattaggatcaattgacaattgttggcctatgttaagtattttctttactgaatacaagtaccacataactaaaattgtaatggaagactgcaatttgcttgaagaacttaaaactcaaagttgtatggattgtatagaggaaggagaactaatgaaaatgaaaggaaatgaagagttttccaaagaaagatttgatatagctattatctattacaccagagccattgaatatagacctgaaaactaccttctttatggtaaccgagctctttgttttcttcgtactggacagtttagaaatgcactcggtgatggaaagagagccactattctgaagaacacttggccaaagggtcattatcgttattgtgatgctctttctatgctgggggaatatgactgggccctgcaagcaaacataaaagctcaaaaactctgtaaaaatgaccctgagggaatcaaggatctaattcagcagcatgtaaagttacaaaaacaaatagaagacctacaaggtcgaacagcaaataaggatccaattaaagccttttatgaaaacagggcctacacacctaggagtttatcagcacctatatttactacttcacttaactttgtggagaaggaaagagatttcagaaaaattaatcacgaaatggccaacggtggtaatcagaatctaaaggtggcggatgaggcgttgaaggtagatgattgtgactgtcatcctgaattttcaccaccatcaagtcagcctccaaaacataaaggaaaacaaaaatctcgaaacaatgaatcagaaaagttcagttctagttcaccattgactttaccagcagatttgaagaacatcttggagaaacagttttctaaatcttccagagctgcacaccaggattttgctaatataatgaaaatgctgagaagcttaattcaagatggctatatggccttattggagcagcgttgccgcagcgctgcacaggcctttacagagttgctgaacggtttagatcctcaaaaaataaagcaattgaacctggccatgattaactatgttttggtcgtctatggacttgccatttctctccttggaataggacagcctgaggaattatctgaagccgaaaaccagtttaagaggattattgaacactaccccagtgagggccttgattgcttggcctactgtggaattggaaaagtatatttgaaaaaaaacagatttctagaagctctcaatcactttgagaaagcaagaaccttgatttatcgtcttcctggagtgttaacttggcccacgagtaatgtgattattgaagagtctcagccacaaaaaataaagatgctgttagagaaatttgttgaagaatgcaagttccctccagtgccagatgccatttgttgctatcagaagtgccatggatattctaagatccagatatacataactgatccagactttaagggttttatacgcatcagctgttgccagtactgtaaaatagaatttcacatgaattgctggaagaagttaaaaactacaacctttaatgataaaattgacaaggattttctacaaggaatatgtcttacccctgactgtgaaggtgtcatttctaagattatcatcttcagcagtggtggtgaagttaaatgtgaatttgaacacaaggtcataaaagaaaaggttcctccaagacctattctgaaacagaaatgttctagcctagagaaactaagactgaaagaagacaaaaaattgaagagaaagatccaaaaaaaagaagcaaaaaagttagcacaagaaagaatggaggaggacttaagagaaagtaatccacccaaaaatgaagagcagaaagaaactgtagacaatgttcagcgttgtcagttccttgatgacagaattctacagtgtataaagcagtatgctgacaagattaaatccggcatacagaatacagccatgcttctcaaagaattgctttcttggaaagttttgagcacagaagactatacaacctgtttttctagcagaaattttctaaatgaagcagtggactatgttattcgccacttgattcaagaaaataacagagtaaagacaagaatatttctgcatgttttgagtgagcttaaagaagtggagcccaaattagccgcctggatccaaaaacttaatagctttggcttagatgccacaggaactttcttttctcgttatggagcatctcttaaactgcttgattttagtatcatgactttcctctggaatgagaaatatggtcacaaactagactctatagaaggaaagcaacttgattatttctctgagccagcatcattgaaggaagcccgttgtttaatatggctgctagaagaacacagagacaagttcccagcattgcatagtgctttagatgaattctttgatataatggacagccgctgtactgtgttaaggaaacaagatagtggtgaagcaccgtttagttcaaccaaggtgaaaaacaaaagcaagaaaaagaagccaaaggattcaaagcctatgttagttgggtctggaacaacttcagtaacttcaaataatgagatcatcacttcaagtgaagaccatagcaatcgaaattcagattctgcaggcccatttgcagtgcctgaccatcttcggcaagatgtagaagaattcgaagctctctatgaccaacacagtaacgaatatgttgtccgcaataagaagctatgggacatgaacccaaaacaaaaatgttcaactctatatgattacttctctcagtttttggaggaacatggtcccttggacatgagtaacaagatgttctctgcagaatatgagtttttcccagaagaaactcgacagatactagaaaaagcaggaggtttaaaaccttttctcttgggatgccctcgttttgttgtgattgacaactgtattgcactgaagaaggttgcatcacggctcaagaaaaaaaggaagaagaaaaacattaaaacaaaagtagaagaaatttcaaaagcaggggagtatgtacgagttaaactacaactgaatccagctgctagggaatttaaaccagatgtaaagtctaaaccagtgtcagattcatcttcagcaccagcttttgaaaatgtgaaacccaaacctgtgtctgcaaattctcccaagccagcttgtgaagatgtgaaggccaaaccagtatccgacaattcttctagacaagtttctgaggatgggcaacccaaaggggtctcttctaattctcctaaaccaggctctgaggatgcaaattacaagcgagtctcctgtaattcccccaaaccggttcttgaggatgtgaaaccaacttattgggctcaatcccatttggtcacaggatactgtacgtatcttcctttccagagatttgatatcacccagacaccgccagcatacataaacgtgttaccaggtttgccccagtacaccagcatatatacacccttggccagcctttctcctgaatatcagctaccaagatcagtaccagtggtgccgtcttttgtagccaatgacagagcagataaaaatgctgctgcctattttgagggtcatcatttgaatgctgagaatgttgctggtcaccagattgcctctgaaacacagatccttgagggctctttgggaatatctgtaaagtcacactgcagcacaggtgatgctcatacagtcctgagtgagtctaacagaaatgatgagcactgtggaaattctaacaacaaatgtgaagtaattccagaaagcaccagtgcagtaacaaacattccacacgtgcagatggttgccatacaggtatcttggaacataatacaccaagaagtcaatactgagccatataatccttttgaggaacgacaaggggaaatttcacggattgaaaaggagcaccaagtattacaagaccaacttcaagaagtgtatgaaaattatgagcagataaaacttaagggcttagaagagaccagggacctggaagagaagttgaaaaggcacttagaagaaaacaagatctcaaagacggaattagattggttccttcaagatttggaaagagaaattaaaaaatggcaacaggaaaaaaaagaaatccaagaaagactaaaatcactgaagaagaaaattaaaaaggtttcaaatgccagtgaaatgtatacccagaaaaatgatggaaaggaaaaggaacatgaattacatctggatcagtcccttgaaatcagcaacacacttacaaatgagaaaatgaaaatagaagagtatataaagaaagggaaagaggattatgaagagagtcatcagagagctgtggctgcagaggtatccgtacttgaaaactggaaggagagtgaagtgtataagctacagatcatggagtcacaagcagaagcctttctgaagaagctggggctgattagccgtgatcctgcagcatatcctgacatggagtctgatatacgttcatgggaattgtttctttctaatgttacaaaagaaattgagaaagcaaagtctcagtttgaagaacaaattaaggcaattaaaaatggttctcggctcagtgaactttctaaagtgcagatttctgagctttcatttcctgcctgtaacacggttcatcccgagttactccctgagtcttcaggcgacgatggccaagggcttgtgacttctgcaagcgacgtgactggaaaccacgcagcacttcacagggatcctagtgtgttctctgctggtgattccccaggggaggctccttctgcgctgttgccagggccaccccctggtcagcctgaagccactcagctgacagggccaaaacgggctggccaggcagctctgtcagaacgaagccctgtggctgatcggaagcagcctgttcctccaggacgtgctgcgcgttcaagccagtctccaaaaaagccgttcaatagtattattgagcacctgtcagtggtattcccatgttacaacagcactgagcttgctggttttattaaaaaagtgcgaagcaaaaacaagaactcactctcaggattgagtattgatgaaattgtccaaagagtgacagaacacattctagatgaacagaaaaagaaaaagccaaacccaggaaaggacaagaggacttatgagcccagctctgccacccccgtgaccaggtcctcccagggctcaccctcggtggttgttgcaccatcacccaaaaccaaggggcagaaagcagaagatgtccctgtgaggattgcactgggtgcaagttcctgtgaaatatgccacgaggtgttcaaatcaaaaaacgtgcgtgtgctcaaatgtgggcacaagtatcacaaagggtgctttaagcagtggcttaaagggcagagcgcttgcccggcctgccagggtcgtgatctcctgacagaagagtcaccttctggaagaggctggcccagtcagaatcaggagctgccttcctgctcttctaggtagtcacacttcactaaagtgtcatccaccagtgtgttgaatccgaagaatgacaattttctaccactggtgtaaaaaacaaacatttgaagacccttgtgcattgtgtgtcacaaagctaaatacatggaaatcgttaatatcgctgatattaagtaatttccccactctgagtgaatactttgatgattgccaacagtggctaataaaatgacggctaccacactcatgggtcactggggctgcgcagggctctttgaggtgggtggcttcttttggaaagtactatgaacgtctcgaagcagtattctagtgataagaattcttaacatagccaagcgccccacgtttgttccccacgtttgttccccttttctgtttgaaaaacctgttctggtagctccacaagagagatgatactgactttttaaattttttacaagagtctgtattcctgatatgcctatatttttcctcaaagattctgcattttaaggatgggcataagcaaactatattttaataatttatagttaatgttaaaatattggctgatttagaccaaaagattcaaatctcctctttgtgaaatcccatctgcatttgattttttattattttatgttcccccgttagattgttttaagtgtttgcttttcatcttttatagatgtaatctgattttcaaaaatcattaacactttttaattagtatcgactaagactttttccccctggaatcgaggctgtgtgtccgtcatcccagcccccggttggagcctgctctttgaactccgctgccttccttagcagcttctgtcctcttctgtgagtcagtcagcgagtgcttgggatccgcatccagccgtgctgagcacacaacaggctgtgtgtggaaatggccaccaccattctccttccccaccccaccacaaaaagagaagctgtgtctttagacaaccctgaggtatctgtgttacaatcgttctgtgtttgatatttgtgtaaagtatgcatgcagtcttgtactgtgacctaagaacaaaactgtaactgcattagaaaccatgaaaaaattagatattgttttgtgacttttagacagtggtaaatatagaaccatgaattctggtcacattccatttctctccaacatgaaggatcaaaaaatgtttttcaatgtgttctttgttccactggaaacttagagtcatgagtttatgagctgatttggtcaccttcctctgcctttgttcactgtgagttctgatgtcttagtgacttagttcttagaagctcacgccttagtttgaaacagattctccacggtggtccccaaaacactgtctgcatatccataagaattgagcgctatgggtgttaacgtgcatgaggatcagtttgcagcagcaagtacaaaaggagaagaggaacatccgttgaatgagtgtgttttgtacataacttcagatacttgtgaacatgccttatatttgtccaacaactgtcagaataaagaacattctaaaatgagaagttca

SEQ ID NO: 19132 - DNA, 7712 bp, Artificial Sequence
  derived and/or modified sequence
gtcggctgacgtggagggccggaggtggcggcggcggcggcggcggctgctgctgctgctgcccgcgtccgaggctcgcgggcggcgggcccggacttgtgcaccatggacaattttgctgagggagatttcactgtggcggattatgccttgttagaagattgccctcacgtggatgattgtgtctttgctgctgaatttatgagcaatgattatgttcgtgtgactcagctttactgtgatggggtgggtgtgcaatataaagattatatccaaagtgagaggaatttggaatttgacatctgcagtatatggtgtagtaaaccaatttctgtcctgcaagattattgcgatgccattaaaataaacatcttctggccacttctgtttcaacatcaaaacagttccgtaatatcacgattgcatccctgtgtggacgccaacaattcacgtgcttctgagataaatttgaagaaactacaacatcttgagttgatggaagatattgtggatttggcaaagaaagttgctaatgattcattccttattggaggcttattgagaattggttgtaaaatagaaaataaaatcttggcaatggaagaagctctgaattggataaaatatgcaggcgatgtaacaattctaactaaattaggatcaattgacaattgttggcctatgttaagtattttctttactgaatacaagtaccacataactaaaattgtaatggaagactgcaatttgcttgaagaacttaaaactcaaagttgtatggattgtatagaggaaggagaactaatgaaaatgaaaggaaatgaagagttttccaaagaaagatttgatatagctattatctattacaccagagccattgaatatagacctgaaaactaccttctttatggtaaccgagctctttgttttcttcgtactggacagtttagaaatgcactcggtgatggaaagagagccactattctgaagaacacttggccaaagggtcattatcgttattgtgatgctctttctatgctgggggaatatgactgggccctgcaagcaaacataaaagctcaaaaactctgtaaaaatgaccctgagggaatcaaggatctaattcagcagcatgtaaagttacaaaaacaaatagaagacctacaaggtcgaacagcaaataaggatccaattaaagccttttatgaaaacagggcctacacacctaggagtttatcagcacctatatttactacttcacttaactttgtggagaaggaaagagatttcagaaaaattaatcacgaaatggccaacggtggtaatcagaatctaaaggtggcggatgaggcgttgaaggtagatgattgtgactgtcatcctgaattttcaccaccatcaagtcagcctccaaaacataaaggaaaacaaaaatctcgaaacaatgaatcagaaaagttcagttctagttcaccattgactttaccagcagatttgaagaacatcttggagaaacagttttctaaatcttccagagctgcacaccaggattttgctaatataatgaaaatgctgagaagcttaattcaagatggctatatggccttattggagcagcgttgccgcagcgctgcacaggcctttacagagttgctgaacggtttagatcctcaaaaaataaagcaattgaacctggccatgattaactatgttttggtcgtctatggacttgccatttctctccttggaataggacagcctgaggaattatctgaagccgaaaaccagtttaagaggattattgaacactaccccagtgagggccttgattgcttggcctactgtggaattggaaaagtatatttgaaaaaaaacagatttctagaagctctcaatcactttgagaaagcaagaaccttgatttatcgtcttcctggagtgttaacttggcccacgagtaatgtgattattgaagagtctcagccacaaaaaataaagatgctgttagagaaatttgttgaagaatgcaagttccctccagtgccagatgccatttgttgctatcagaagtgccatggatattctaagatccagatatacataactgatccagactttaagggttttatacgcatcagctgttgccagtactgtaaaatagaatttcacatgaattgctggaagaagttaaaaactacaacctttaatgataaaattgacaaggattttctacaaggaatatgtcttacccctgactgtgaaggtgtcatttctaagattatcatcttcagcagtggtggtgaagttaaatgtgaatttgaacacaaggtcataaaagaaaaggttcctccaagacctattctgaaacagaaatgttctagcctagagaaactaagactgaaagaagacaaaaaattgaagagaaagatccaaaaaaaagaagcaaaaaagttagcacaagaaagaatggaggaggacttaagagaaagtaatccacccaaaaatgaagagcagaaagaaactgtagacaatgttcagcgttgtcagttccttgatgacagaattctacagtgtataaagcagtatgctgacaagattaaatccggcatacagaatacagccatgcttctcaaagaattgctttcttggaaagttttgagcacagaagactatacaacctgtttttctagcagaaattttctaaatgaagcagtggactatgttattcgccacttgattcaagaaaataacagagtaaagacaagaatatttctgcatgttttgagtgagcttaaagaagtggagcccaaattagccgcctggatccaaaaacttaatagctttggcttagatgccacaggaactttcttttctcgttatggagcatctcttaaactgcttgattttagtatcatgactttcctctggaatgagaaatatggtcacaaactagactctatagaaggaaagcaacttgattatttctctgagccagcatcattgaaggaagcccgttgtttaatatggctgctagaagaacacagagacaagttcccagcattgcatagtgctttagatgaattctttgatataatggacagccgctgtactgtgttaaggaaacaagatagtggtgaagcaccgtttagttcaaccaaggtgaaaaacaaaagcaagaaaaagaagccaaaggattcaaagcctatgttagttgggtctggaacaacttcagtaacttcaaataatgagatcatcacttcaagtgaagaccatagcaatcgaaattcagattctgcaggcccatttgcagtgcctgaccatcttcggcaagatgtagaagaattcgaagctctctatgaccaacacagtaacgaatatgttgtccgcaataagaagctatgggacatgaacccaaaacaaaaatgttcaactctatatgattacttctctcagtttttggaggaacatggtcccttggacatgagtaacaagatgttctctgcagaatatgagtttttcccagaagaaactcgacagatactagaaaaagcaggaggtttaaaaccttttctcttgggatgccctcgttttgttgtgattgacaactgtattgcactgaagaaggttgcatcacggctcaagaaaaaaaggaagaagaaaaacattaaaacaaaagtagaagaaatttcaaaagcaggggagtatgtacgagttaaactacaactgaatccagctgctagggaatttaaaccagatgtaaagtctaaaccagtgtcagattcatcttcagcaccagcttttgaaaatgtgaaacccaaacctgtgtctgcaaattctcccaagccagcttgtgaagatgtgaaggccaaaccagtatccgacaattcttctagacaagtttctgaggatgggcaacccaaaggggtctcttctaattctcctaaaccaggctctgaggatgcaaattacaagcgagtctcctgtaattcccccaaaccggttcttgaggatgtgaaaccaacttattgggctcaatcccatttggtcacaggatactgtacgtatcttcctttccagagatttgatatcacccagacaccgccagcatacataaacgtgttaccaggtttgccccagtacaccagcatatatacacccttggccagcctttctcctgaatatcagctaccaagatcagtaccagtggtgccgtcttttgtagccaatgacagagcagataaaaatgctgctgcctattttgagggtcatcatttgaatgctgagaatgttgctggtcaccagattgcctctgaaacacagatccttgagggctctttgggaatatctgtaaagtcacactgcagcacaggtgatgctcatacagtcctgagtgagtctaacagaaatgatgagcactgtggaaattctaacaacaaatgtgaagtaattccagaaagcaccagtgcagtaacaaacattccacacgtgcagatggttgccatacaggtatcttggaacataatacaccaagaagtcaatactgagccatataatccttttgaggaacgacaaggggaaatttcacggattgaaaaggagcaccaagtattacaagaccaacttcaagaagtgtatgaaaattatgagcagataaaacttaagggcttagaagagaccagggacctggaagagaagttgaaaaggcacttagaagaaaacaagatctcaaagacggaattagattggttccttcaagatttggaaagagaaattaaaaaatggcaacaggaaaaaaaagaaatccaagaaagactaaaatcactgaagaagaaaattaaaaaggtttcaaatgccagtgaaatgtatacccagaaaaatgatggaaaggaaaaggaacatgaattacatctggatcagtcccttgaaatcagcaacacacttacaaatgagaaaatgaaaatagaagagtatataaagaaagggaaagaggattatgaagagagtcatcagagagctgtggctgcagaggtatccgtacttgaaaactggaaggagagtgaagtgtataagctacagatcatggagtcacaagcagaagcctttctgaagaagctggggctgattagccgtgatcctgcagcatatcctgacatggagtctgatatacgttcatgggaattgtttctttctaatgttacaaaagaaattgagaaagcaaagtctcagtttgaagaacaaattaaggcaattaaaaatggttctcggctcagtgaactttctaaagtgcagatttctgagctttcatttcctgcctgtaacacggttcatcccgagttactccctgagtcttcaggcgacgatggccaagggcttgtgacttctgcaagcgacgtgactggaaaccacgcagcacttcacagggatcctagtgtgttctctgctggtgattccccaggggaggctccttctgcgctgttgccagggccaccccctggtcagcctgaagccactcagctgacagggccaaaacgggctggccaggcagctctgtcagaacgaagccctgtggctgatcggaagcagcctgttcctccaggacgtgctgcgcgttcaagccagtctccaaaaaagccgttcaatagtattattgagcacctgtcagtggtattcccatgttacaacagcactgagcttgctggttttattaaaaaagtgcgaagcaaaaacaagaactcactctcaggattgagtattgatgaaattgtccaaagagtgacagaacacattctagatgaacagaaaaagaaaaagccaaacccaggaaaggacaagaggacttatgagcccagctctgccacccccgtgaccaggtcctcccagggctcaccctcggtggttgttgcaccatcacccaaaaccaaggggcagaaagcagaagatgtccctgtgaggattgcactgggtgcaagttcctgtgaaatatgccacgaggtgttcaaatcaaaaaacgtgcgtgtgctcaaatgtgggcacaagtatcacaaagggtgctttaagcagtggcttaaagggcagagcgcttgcccggcctgccagggtcgtgatctcctgacagaagagtcaccttctggaagaggctggcccagtcagaatcaggagctgccttcctgctcttctaggtagtcacacttcactaaagtgtcatccaccagtgtgttgaatccgaagaatgacaattttctaccactggtgtaaaaaacaaacatttgaagacccttgtgcattgtgtgtcacaaagctaaatacatggaaatcgttaatatcgctgatattaagtaatttccccactctgagtgaatactttgatgattgccaacagtggctaataaaatgacggctaccacactcatgggtcactggggctgcgcagggctctttgaggtgggtggcttcttttggaaagtactatgaacgtctcgaagcagtattctagtgataagaattcttaacatagccaagcgccccacgtttgttccccacgtttgttccccttttctgtttgaaaaacctgttctggtagctccacaagagagatgatactgactttttaaattttttacaagagtctgtattcctgatatgcctatatttttcctcaaagattctgcattttaaggatgggcataagcaaactatattttaataatttatagttaatgttaaaatattggctgatttagaccaaaagattcaaatctcctctttgtgaaatcccatctgcatttgattttttattattttatgttcccccgttagattgttttaagtgtttgcttttcatcttttatagatgtaatctgattttcaaaaatcattaacactttttaattagtatcgactaagactttttccccctggaatcgaggctgtgtgtccgtcatcccagcccccggttggagcctgctctttgaactccgctgccttccttagcagcttctgtcctcttctgtgagtcagtcagcgagtgcttgggatccgcatccagccgtgctgagcacacaacaggctgtgtgtggaaatggccaccaccattctccttccccaccccaccacaaaaagagaagctgtgtctttagacaaccctgaggtatctgtgttacaatcgttctgtgtttgatatttgtgtaaagtatgcatgcagtcttgtactgtgacctaagaacaaaactgtaactgcattagaaaccatgaaaaaattagatattgttttgtgacttttagacagtggtaaatatagaaccatgaattctggtcacattccatttctctccaacatgaaggatcaaaaaatgtttttcaatgtgttctttgttccactggaaacttagagtcatgagtttatgagctgatttggtcaccttcctctgcctttgttcactgtgagttctgatgtcttagtgacttagttcttagaagctcacgccttagtttgaaacagattctccacggtggtccccaaaacactgtctgcatatccataagaattgagcgctatgggtgttaacgtgcatgaggatcagtttgcagcagcaagtacaaaaggagaagaggaacatccgttgaatgagtgtgttttgtacataacttcagatacttgtgaacatgccttatatttgtccaacaactgtcagaataaagaacattctaaaatg

SEQ ID NO: 19133 - DNA, 10363 bp, Artificial Sequence
  derived and/or modified sequence
tgtattctttaaatattatgtctcattagtctcttctctcctgctggaactttaactggatatatatatacactaaactgtttccagatcacttattctttatctttcatattttttatctctttgtttctctttaccagaatttacagtgctggataatttcataaggcatatattttagttcaccaattttctcttcaactgtgcctaatatcctctgtaacccatcctgtctcttttttttcttttaacaattgcatttttaattactttttttttttttttttaagatggagtctctctctgtcgcccaggctggagtgcagaggcgcgatctcagctcactgcaagctccgcctcccgggttcacgccattctcctgcctcagcctcccgagtagctgggactacaggcgcccgccaccacgcccggctaatttttttgtatttttagtagagacggggtttcaccgtgttacccaggatggtctcgatctcctgacctcgtcatctgctcacgttggcctcccagagtgctgggattacaggcatgagccaccatgcccggccgcatttttaatttctaaaagttctgcctggttcttttttgatatgtccagtcattcttcatgttctcatgttatatgctgatttttgtgactctatagctattctgtagactatatcagacattcccaatgtctgatatccttgaggagggggatgtctaaatttattgcttttttgtttttttttctgttgtctctcctcaatgtagctgtcacctcatgtgtttggtgatcattgattatgaacttctgtttgatctttgtggtgatcttgagagtctaatttgaggatgcttgctttctgaaagcatttctatcagctttgtctgggagccagaaagtttagctggcatcacttttgagttcctacattttgcttctggcccagggctcagtgtcctgatcctattactgctcttggcaccactacttgtagcactaaactgtagccaggtttaatttctagctcaaggtttgttgcttttgcgtggagagggtgccttcacatgttcccctatttctatgagctcagcaaaaacatccaaaaagtgtttttttttttaatctaggatatacctttttcctcccaacagtacattcccccagagtgtatagttgaccataactgatgggatcagaagctctttattttaatatttaattttagtagtatatttttgtttgattgtattataaaaaattttatggtaccaagcaagctttcttggtgataccaacatttccattaaaactagtttacatctaagttaagatttgagttatcctaaagaaaagtattaagtaaatagcagtacagatggcaaatggattgcacaatatatcctctggatccatagtgaccctgcagagataaacctgtgatggtcaaacaatgtgaaaactgctgtcagagacatgggcagggtgctcttgtttacagagaagaggtgcaaaaatcaacttgatggtagtgggaagatcaggaaatgcttcctgaaattgagtattaagaactaatagacattaggtggttgcagaataagttttgtttaggaaggacaagcagttgggtatgactggcttctaggttgtgtgttgtggagtgactggggataaaagcaggagcaagatcacaaaaggtcttctatgcttatattagggaagttggactttattctcaagctgaagggaagctgttgcatggttttaagcagtaaagtgatatgatcagagttttagaggatgccaagattgaaggcaagtctgaccagttaggagactgcttgttaaattagttcagaggagaaacagtgaaggcagtggcactgggcatgaagaagtatatgtgtgctaattttagatttcttagggaagcagaaatgacaagagttagtggtccattggacagaaatattgaaggagactggggagtctaggttgactcccagggtttaggtttgggcagtaaaatgacatgtagaacaattaactgataaacagcatacagaaagaggaaagaacttcatttcatatgtttgtttttgaggaaaagatgtttgtttttgaacttcctgattcagaggggcttgtgggacatcttggttaagatcctgtagtagttctagtagggtctagaagtcaagagatacaaccccgcctggaaggatttgggagtcttcagcatttggaattttggaagccattgtttactgcagtgcatatgagataatttaaactggtacatagataaacacttgaaaaaattttaatagataggaatttaatgtgtatgagaaacataacttgcacatctaacctttgataatcatggacattatcacttaggccaagtgagctcaataaaagggaaatattaactaaaaatatatgtgatacatggaaatggcaaaaatcacggtgaagctatgcaaacgatgcaagttcagaaagtgctgtgttaagtcatgggtgtggtggataaattcacccaaggagagagtaagagtgagaagaaaagagagttgacattgggtggcggggaatggagaagaagaacccatgaaggaaactgaggaagagcagccagacgaataggaggaaaaccaggagaagatggtctttggagtccaaatgaagagttctgaggaggaagtggtccacagcgtcaaacttgtgcaccatggacaattttgctgagggagatttcactgtggcggattatgccttgttagaagattgccctcacgtggatgattgtgtctttgctgctgaatttatgagcaatgattatgttcgtgtgactcagctttactgtgatggggtgggtgtgcaatataaagattatatccaaagtgagaggaatttggaatttgacatctgcagtatatggtgtagtaaaccaatttctgtcctgcaagattattgcgatgccattaaaataaacatcttctggccacttctgtttcaacatcaaaacagttccgtaatatcacgattgcatccctgtgtggacgccaacaattcacgtgcttctgagataaatttgaagaaactacaacatcttgagttgatggaagatattgtggatttggcaaagaaagttgctaatgattcattccttattggaggcttattgagaattggttgtaaaatagaaaataaaatcttggcaatggaagaagctctgaattggataaaatatgcaggcgatgtaacaattctaactaaattaggatcaattgacaattgttggcctatgttaagtattttctttactgaatacaagtaccacataactaaaattgtaatggaagactgcaatttgcttgaagaacttaaaactcaaagttgtatggattgtatagaggaaggagaactaatgaaaatgaaaggaaatgaagagttttccaaagaaagatttgatatagctattatctattacaccagagccattgaatatagacctgaaaactaccttctttatggtaaccgagctctttgttttcttcgtactggacagtttagaaatgcactcggtgatggaaagagagccactattctgaagaacacttggccaaagggtcattatcgttattgtgatgctctttctatgctgggggaatatgactgggccctgcaagcaaacataaaagctcaaaaactctgtaaaaatgaccctgagggaatcaaggatctaattcagcagcatgtaaagttacaaaaacaaatagaagacctacaaggtcgaacagcaaataaggatccaattaaagccttttatgaaaacagggcctacacacctaggagtttatcagcacctatatttactacttcacttaactttgtggagaaggaaagagatttcagaaaaattaatcacgaaatggccaacggtggtaatcagaatctaaaggtggcggatgaggcgttgaaggtagatgattgtgactgtcatcctgaattttcaccaccatcaagtcagcctccaaaacataaaggaaaacaaaaatctcgaaacaatgaatcagaaaagttcagttctagttcaccattgactttaccagcagatttgaagaacatcttggagaaacagttttctaaatcttccagagctgcacaccaggattttgctaatataatgaaaatgctgagaagcttaattcaagatggctatatggccttattggagcagcgttgccgcagcgctgcacaggcctttacagagttgctgaacggtttagatcctcaaaaaataaagcaattgaacctggccatgattaactatgttttggtcgtctatggacttgccatttctctccttggaataggacagcctgaggaattatctgaagccgaaaaccagtttaagaggattattgaacactaccccagtgagggccttgattgcttggcctactgtggaattggaaaagtatatttgaaaaaaaacagatttctagaagctctcaatcactttgagaaagcaagaaccttgatttatcgtcttcctggagtgttaacttggcccacgagtaatgtgattattgaagagtctcagccacaaaaaataaagatgctgttagagaaatttgttgaagaatgcaagttccctccagtgccagatgccatttgttgctatcagaagtgccatggatattctaagatccagatatacataactgatccagactttaagggttttatacgcatcagctgttgccagtactgtaaaatagaatttcacatgaattgctggaagaagttaaaaactacaacctttaatgataaaattgacaaggattttctacaaggaatatgtcttacccctgactgtgaaggtgtcatttctaagattatcatcttcagcagtggtggtgaagttaaatgtgaatttgaacacaaggtcataaaagaaaaggttcctccaagacctattctgaaacagaaatgttctagcctagagaaactaagactgaaagaagacaaaaaattgaagagaaagatccaaaaaaaagaagcaaaaaagttagcacaagaaagaatggaggaggacttaagagaaagtaatccacccaaaaatgaagagcagaaagaaactgtagacaatgttcagcgttgtcagttccttgatgacagaattctacagtgtataaagcagtatgctgacaagattaaatccggcatacagaatacagccatgcttctcaaagaattgctttcttggaaagttttgagcacagaagactatacaacctgtttttctagcagaaattttctaaatgaagcagtggactatgttattcgccacttgattcaagaaaataacagagtaaagacaagaatatttctgcatgttttgagtgagcttaaagaagtggagcccaaattagccgcctggatccaaaaacttaatagctttggcttagatgccacaggaactttcttttctcgttatggagcatctcttaaactgcttgattttagtatcatgactttcctctggaatgagaaatatggtcacaaactagactctatagaaggaaagcaacttgattatttctctgagccagcatcattgaaggaagcccgttgtttaatatggctgctagaagaacacagagacaagttcccagcattgcatagtgctttagatgaattctttgatataatggacagccgctgtactgtgttaaggaaacaagatagtggtgaagcaccgtttagttcaaccaaggtgaaaaacaaaagcaagaaaaagaagccaaaggattcaaagcctatgttagttgggtctggaacaacttcagtaacttcaaataatgagatcatcacttcaagtgaagaccatagcaatcgaaattcagattctgcaggcccatttgcagtgcctgaccatcttcggcaagatgtagaagaattcgaagctctctatgaccaacacagtaacgaatatgttgtccgcaataagaagctatgggacatgaacccaaaacaaaaatgttcaactctatatgattacttctctcagtttttggaggaacatggtcccttggacatgagtaacaagatgttctctgcagaatatgagtttttcccagaagaaactcgacagatactagaaaaagcaggaggtttaaaaccttttctcttgggatgccctcgttttgttgtgattgacaactgtattgcactgaagaaggttgcatcacggctcaagaaaaaaaggaagaagaaaaacattaaaacaaaagtagaagaaatttcaaaagcaggggagtatgtacgagttaaactacaactgaatccagctgctagggaatttaaaccagatgtaaagtctaaaccagtgtcagattcatcttcagcaccagcttttgaaaatgtgaaacccaaacctgtgtctgcaaattctcccaagccagcttgtgaagatgtgaaggccaaaccagtatccgacaattcttctagacaagtttctgaggatgggcaacccaaaggggtctcttctaattctcctaaaccaggctctgaggatgcaaattacaagcgagtctcctgtaattcccccaaaccggttcttgaggatgtgaaaccaacttattgggctcaatcccatttggtcacaggatactgtacgtatcttcctttccagagatttgatatcacccagacaccgccagcatacataaacgtgttaccaggtttgccccagtacaccagcatatatacacccttggccagcctttctcctgaatatcagctaccaagatcagtaccagtggtgccgtcttttgtagccaatgacagagcagataaaaatgctgctgcctattttgagggtcatcatttgaatgctgagaatgttgctggtcaccagattgcctctgaaacacagatccttgagggctctttgggaatatctgtaaagtcacactgcagcacaggtgatgctcatacagtcctgagtgagtctaacagaaatgatgagcactgtggaaattctaacaacaaatgtgaagtaattccagaaagcaccagtgcagtaacaaacattccacacgtgcagatggttgccatacaggtatcttggaacataatacaccaagaagtcaatactgagccatataatccttttgaggaacgacaaggggaaatttcacggattgaaaaggagcaccaagtattacaagaccaacttcaagaagtgtatgaaaattatgagcagataaaacttaagggcttagaagagaccagggacctggaagagaagttgaaaaggcacttagaagaaaacaagatctcaaagacggaattagattggttccttcaagatttggaaagagaaattaaaaaatggcaacaggaaaaaaaagaaatccaagaaagactaaaatcactgaagaagaaaattaaaaaggtttcaaatgccagtgaaatgtatacccagaaaaatgatggaaaggaaaaggaacatgaattacatctggatcagtcccttgaaatcagcaacacacttacaaatgagaaaatgaaaatagaagagtatataaagaaagggaaagaggattatgaagagagtcatcagagagctgtggctgcagaggtatccgtacttgaaaactggaaggagagtgaagtgtataagctacagatcatggagtcacaagcagaagcctttctgaagaagctggggctgattagccgtgatcctgcagcatatcctgacatggagtctgatatacgttcatgggaattgtttctttctaatgttacaaaagaaattgagaaagcaaagtctcagtttgaagaacaaattaaggcaattaaaaatggttctcggctcagtgaactttctaaagtgcagatttctgagctttcatttcctgcctgtaacacggttcatcccgagttactccctgagtcttcaggcgacgatggccaagggcttgtgacttctgcaagcgacgtgactggaaaccacgcagcacttcacagggatcctagtgtgttctctgctggtgattccccaggggaggctccttctgcgctgttgccagggccaccccctggtcagcctgaagccactcagctgacagggccaaaacgggctggccaggcagctctgtcagaacgaagccctgtggctgatcggaagcagcctgttcctccaggacgtgctgcgcgttcaagccagtctccaaaaaagccgttcaatagtattattgagcacctgtcagtggtattcccatgttacaacagcactgagcttgctggttttattaaaaaagtgcgaagcaaaaacaagaactcactctcaggattgagtattgatgaaattgtccaaagagtgacagaacacattctagatgaacagaaaaagaaaaagccaaacccaggaaaggacaagaggacttatgagcccagctctgccacccccgtgaccaggtcctcccagggctcaccctcggtggttgttgcaccatcacccaaaaccaaggggcagaaagcagaagatgtccctgtgaggattgcactgggtgcaagttcctgtgaaatatgccacgaggtgttcaaatcaaaaaacgtgcgtgtgctcaaatgtgggcacaagtatcacaaagggtgctttaagcagtggcttaaagggcagagcgcttgcccggcctgccagggtcgtgatctcctgacagaagagtcaccttctggaagaggctggcccagtcagaatcaggagctgccttcctgctcttctaggtagtcacacttcactaaagtgtcatccaccagtgtgttgaatccgaagaatgacaattttctaccactggtgtaaaaaacaaacatttgaagacccttgtgcattgtgtgtcacaaagctaaatacatggaaatcgttaatatcgctgatattaagtaatttccccactctgagtgaatactttgatgattgccaacagtggctaataaaatgacggctaccacactcatgggtcactggggctgcgcagggctctttgaggtgggtggcttcttttggaaagtactatgaacgtctcgaagcagtattctagtgataagaattcttaacatagccaagcgccccacgtttgttccccacgtttgttccccttttctgtttgaaaaacctgttctggtagctccacaagagagatgatactgactttttaaattttttacaagagtctgtattcctgatatgcctatatttttcctcaaagattctgcattttaaggatgggcataagcaaactatattttaataatttatagttaatgttaaaatattggctgatttagaccaaaagattcaaatctcctctttgtgaaatcccatctgcatttgattttttattattttatgttcccccgttagattgttttaagtgtttgcttttcatcttttatagatgtaatctgattttcaaaaatcattaacactttttaattagtatcgactaagactttttccccctggaatcgaggctgtgtgtccgtcatcccagcccccggttggagcctgctctttgaactccgctgccttccttagcagcttctgtcctcttctgtgagtcagtcagcgagtgcttgggatccgcatccagccgtgctgagcacacaacaggctgtgtgtggaaatggccaccaccattctccttccccaccccaccacaaaaagagaagctgtgtctttagacaaccctgaggtatctgtgttacaatcgttctgtgtttgatatttgtgtaaagtatgcatgcagtcttgtactgtgacctaagaacaaaactgtaactgcattagaaaccatgaaaaaattagatattgttttgtgacttttagacagtggtaaatatagaaccatgaattctggtcacattccatttctctccaacatgaaggatcaaaaaatgtttttcaatgtgttctttgttccactggaaacttagagtcatgagtttatgagctgatttggtcaccttcctctgcctttgttcactgtgagttctgatgtcttagtgacttagttcttagaagctcacgccttagtttgaaacagattctccacggtggtccccaaaacactgtctgcatatccataagaattgagcgctatgggtgttaacgtgcatgaggatcagtttgcagcagcaagtacaaaaggagaagaggaacatccgttgaatgagtgtgttttgtacataacttcagatacttgtgaacatgccttatatttgtccaacaactgtcagaataaagaacattctaaaatgagaagttca

SEQ ID NO: 19134 - DNA, 3771 bp, Artificial Sequence
  derived and/or modified sequence
gccacccgctccctcccgccgtcggctgacgtggagggccggaggtggcggcggcggcggcggcggctgctgctgctgctgcccgcgtccgaggctcgcgggcggcgggcccgggtgagtgcacacccggcgcgctgccgggctcccggatgtgtcaccttgtcccgctgcagccgagatgccgggggagcggggccttccacaccccctccgtgggtgtgtgacttgtgcaccatggacaattttgctgagggagatttcactgtggcggattatgccttgttagaagattgccctcacgtggatgattgtgtctttgctgctgaatttatgagcaatgattatgttcgtgtgactcagctttactgtgatggggtgggtgtgcaatataaagattatatccaaagtgagaggaatttggaatttgacatctgcagtatatggtgtagtaaaccaatttctgtcctgcaagattattgcgatgccattaaaataaacatcttctggccacttctgtttcaacatcaaaacagttccgtaatatcacgattgcatccctgtgtggacgccaacaattcacgtgcttctgagataaatttgaagaaactacaacatcttgagttgatggaagatattgtggatttggcaaagaaagttgctaatgattcattccttattggaggcttattgagaattggttgtaaaatagaaaataaaatcttggcaatggaagaagctctgaattggataaaatatgcaggcgatgtaacaattctaactaaattaggatcaattgacaattgttggcctatgttaagtattttctttactgaatacaagtaccacataactaaaattgtaatggaagactgcaatttgcttgaagaacttaaaactcaaagttgtatggattgtatagaggaaggagaactaatgaaaatgaaaggaaatgaagagttttccaaagaaagatttgatatagctattatctattacaccagagccattgaatatagacctgaaaactaccttctttatggtaaccgagctctttgttttcttcgtactggacagtttagaaatgcactcggtgatggaaagagagccactattctgaagaacacttggccaaagggtcattatcgttattgtgatgctctttctatgctgggggaatatgactgggccctgcaagcaaacataaaagctcaaaaactctgtaaaaatgaccctgagggaatcaaggatctaattcagcagcatgtaaagttacaaaaacaaatagaagacctacaaggtcgaacagcaaataaggatccaattaaagccttttatgaaaacagggcctacacacctaggagtttatcagcacctatatttactacttcacttaactttgtggagaaggaaagagatttcagaaaaattaatcacgaaatggccaacggtggtaatcagaatctaaaggtggcggatgaggcgttgaaggtagatgattgtgactgtcatcctgaattttcaccaccatcaagtcagcctccaaaacataaaggaaaacaaaaatctcgaaacaatgaatcagaaaagttcagttctagttcaccattgactttaccagcagatttgaagaacatcttggagaaacagttttctaaatcttccagagctgcacaccaggattttgctaatataatgaaaatgctgagaagcttaattcaagatggctatatggccttattggagcagcgttgccgcagcgctgcacaggcctttacagagttgctgaacggtttagatcctcaaaaaataaagcaattgaacctggccatgattaactatgttttggtcgtctatggacttgccatttctctccttggaataggacagcctgaggaattatctgaagccgaaaaccagtttaagaggattattgaacactaccccagtgagggccttgattgcttggcctactgtggaattggaaaagtatatttgaaaaaaaacagatttctagaagctctcaatcactttgagaaagcaagaaccttgatttatcgtcttcctggagtgttaacttggcccacgagtaatgtgattattgaagagtctcagccacaaaaaataaagatgctgttagagaaatttgttgaagaatgcaagttccctccagtgccagatgccatttgttgctatcagaagtgccatggatattctaagatccagatatacataactgatccagactttaagggttttatacgcatcagctgttgccagtactgtaaaatagaatttcacatgaattgctggaagaagttaaaaactacaacctttaatgataaaattgacaaggattttctacaaggaatatgtcttacccctgactgtgaaggtgtcatttctaagattatcatcttcagcagtggtggtgaagttaaatgtgaatttgaacacaaggtcataaaagaaaaggttcctccaagacctattctgaaacagaaatgttctagcctagagaaactaagactgaaagaagacaaaaaattgaagagaaagatccaaaaaaaagaagcaaaaaagttagcacaagaaagaatggaggaggacttaagagaaagtaatccacccaaaaatgaagagcagaaagaaactgtagacaatgttcagcgttgtcagttccttgatgacagaattctacagtgtataaagcagtatgctgacaagattaaatccggcatacagaatacagccatgcttctcaaagaattgctttcttggaaagttttgagcacagaagactatacaacctgtttttctagcagaaattttctaaatgaagcagtggactatgttattcgccacttgattcaagaaaataacagagtaaagacaagaatatttctgcatgttttgagtgagcttaaagaagtggagcccaaattagccgcctggatccaaaaacttaatagctttggcttagatgccacaggaactttcttttctcgttatggagcatctcttaaactgcttgattttagtatcatgactttcctctggaatgagaaatatggtcacaaactagactctatagaaggaaagcaacttgattatttctctgagccagcatcattgaaggaagcccgttgtttaatatggctgctagaagaacacagagacaagttcccagcattgcatagtgctttagatgaattctttgatataatggacagccgctgtactgtgttaaggaaacaagatagtggtgaagcaccgtttagttcaaccaaggtgaaaaacaaaagcaagaaaaagaagccaaaggattcaaagcctatgttagttgggtctggaacaacttcagtaacttcaaataatgagatcatcacttcaagtgaagaccatagcaatcgaaattcagattctgcaggcccatttgcagtgcctgaccatcttcggcaagatgtagaagaattcgaagctctctatgaccaacacagtaacgaatatgttgtccgcaataagaagctatgggacatgaacccaaaacaaaaatgttcaactctatatgattacttctctcagtttttggaggaacatggtcccttggacatgagtaacaagatgttctctgcagaatatgagtttttcccagaagaaactcgacagatactagaaaaagcaggaggtttaaaaccttttctcttgggatgccctcgttttgttgtgattgacaactgtattgcactgaagaaggttgcatcacggctcaag

SEQ ID NO: 19135 - protein, 623 aa, Artificial Sequence
  derived and/or modified sequence
MAAGETQLYAKVSNKLKSRSSPSLLEPLLAMGFPVHTALKALAATGRKTAEEALAWLHDHCNDPSLDDPIPQEYALFLCPTGPLLEKLQEFWRESKRQCAKNRAHEVFPHVTLCDFFTCEDQKVECLYEALKRAGDRLLGSFPTAVPLALHSSISYLGFFVSGSPADVIREFAMTFATEASLLADCSVKPCTKQLHLTLAHKFYPHHQRTLEQLARAIPLGHSCQWTAALYSRDMRFVHYQTLRALFQYKPQNVDELTLSPGDYIFVDPTQQDEASEGWVIGISQRTGCRGFLPENYTDRASESDTWVKHRMYTFSLATDLNSRKDGEASSRCSGEFLPQTARSLSSLQALQATVARKSVLVVRHGERVDQIFGKAWLQQCSTPDGKYYRPDLNFPCSLPRRSRGIKDFENDPPLSSCGIFQSRIAGDALLDSGIRISSVFASPALRCVQTAKLILEELKLEKKIKIRVEPGIFEWTKWEAGKTTPTLMSLEELKEANFNIDTDYRPAFPLSALMPAESYQEYMDRCTASMVQIVNTCPQDTGVILIVSHGSTLDSCTRPLLGLPPRECGDFAQLVRKIPSLGMCFCEENKEEGKWELVNPPVKTLTHGANAAFNWRNWISGN

SEQ ID NO: 19136 - DNA, 1872 bp, Artificial Sequence
  derived and/or modified sequence
atggccgccggcgagacccagctgtacgccaaggtgagcaacaagctgaagagcagaagcagccccagcctgctggagcccctgctggccatgggcttccccgtgcacaccgccctgaaggccctggccgccaccggcagaaagaccgccgaggaggccctggcctggctgcacgaccactgcaacgaccccagcctggacgaccccatcccccaggagtacgccctgttcctgtgccccaccggccccctgctggagaagctgcaggagttctggagagagagcaagagacagtgcgccaagaacagagcccacgaggtgttcccccacgtgaccctgtgcgacttcttcacctgcgaggaccagaaggtggagtgcctgtacgaggccctgaagagagccggcgacagactgctgggcagcttccccaccgccgtgcccctggccctgcacagcagcatcagctacctgggcttcttcgtgagcggcagccccgccgacgtgatcagagagttcgccatgaccttcgccaccgaggccagcctgctggccgactgcagcgtgaagccctgcaccaagcagctgcacctgaccctggcccacaagttctacccccaccaccagagaaccctggagcagctggccagagccatccccctgggccacagctgccagtggaccgccgccctgtacagcagagacatgagattcgtgcactaccagaccctgagagccctgttccagtacaagccccagaacgtggacgagctgaccctgagccccggcgactacatcttcgtggaccccacccagcaggacgaggccagcgagggctgggtgatcggcatcagccagagaaccggctgcagaggcttcctgcccgagaactacaccgacagagccagcgagagcgacacctgggtgaagcacagaatgtacaccttcagcctggccaccgacctgaacagcagaaaggacggcgaggccagcagcagatgcagcggcgagttcctgccccagaccgccagaagcctgagcagcctgcaggccctgcaggccaccgtggccagaaagagcgtgctggtggtgagacacggcgagagagtggaccagatcttcggcaaggcctggctgcagcagtgcagcacccccgacggcaagtactacagacccgacctgaacttcccctgcagcctgcccagaagaagcagaggcatcaaggacttcgagaacgacccccccctgagcagctgcggcatcttccagagcagaatcgccggcgacgccctgctggacagcggcatcagaatcagcagcgtgttcgccagccccgccctgagatgcgtgcagaccgccaagctgatcctggaggagctgaagctggagaagaagatcaagatcagagtggagcccggcatcttcgagtggaccaagtgggaggccggcaagaccacccccaccctgatgagcctggaggagctgaaggaggccaacttcaacatcgacaccgactacagacccgccttccccctgagcgccctgatgcccgccgagagctaccaggagtacatggacagatgcaccgccagcatggtgcagatcgtgaacacctgcccccaggacaccggcgtgatcctgatcgtgagccacggcagcaccctggacagctgcaccagacccctgctgggcctgccccccagagagtgcggcgacttcgcccagctggtgagaaagatccccagcctgggcatgtgcttctgcgaggagaacaaggaggagggcaagtgggagctggtgaacccccccgtgaagaccctgacccacggcgccaacgccgccttcaactggagaaactggatcagcggcaactag

SEQ ID NO: 19137 - DNA, 1872 bp, Artificial Sequence
  derived and/or modified sequence
atggccgcaggggagacacagctgtacgctaaggtgtctaataaactcaaatcccgctcatcaccatccttgctggagcctctacttgcaatgggcttcccggtacacacagccctcaaggcacttgctgccacaggccgtaagaccgccgaggaggcattggcttggctgcatgaccactgcaacgatcccagcctcgatgacccaatcccccaggaatatgctttatttctctgtcccaccggcccccttctggagaaactgcaggaattttggcgcgaatcgaagcggcagtgcgccaagaaccgggctcatgaagttttccctcatgtgaccctatgtgacttttttacctgtgaggatcaaaaagttgagtgtctctacgaggcactgaaacgtgccggggataggttgcttggctccttccccacggccgttcccttggcgctgcattctagtatctcatacctgggatttttcgtgtctggttcccctgctgacgtgatcagggagttcgctatgacgtttgccaccgaggcttccctgctggccgactgctcagtcaaaccatgtacgaagcagctgcatctgacactagctcacaaattctatcctcatcaccagagaacactcgagcagctggcaagagcaatacccctagggcacagttgtcagtggacagcggccttatactcaagagatatgcgatttgtgcattaccaaactctgagagccctgtttcagtacaagccccaaaacgtcgatgagctcaccctgtccccaggagactatatatttgtggaccccacccaacaggacgaagcaagtgagggctgggtgattggcattagccagcgtaccggctgtcgaggtttcctgcccgagaattatacagaccgcgcgtctgagagcgatacatgggtcaagcatcgaatgtacactttctccctcgctaccgatttgaatagccgcaaggacggcgaagctagcagccgctgctctggcgaatttttaccacagactgcccgcagcttgagtagcttgcaggcattgcaggctaccgtagcccgtaagtccgtactggttgtgagacacggtgagcgtgtggatcaaatctttggaaaggcttggctgcagcagtgcagcactccagatgggaagtactaccggcctgatctgaacttcccttgttctcttcctcgacggagtaggggcattaaggactttgagaacgatcccccactctcgtcctgtgggatcttccagagtagaatcgctggagacgccctgctggatagtggcatacggataagctctgtatttgcatctcccgcgttgcggtgtgttcagacagcaaaactgattctggaggaactcaaactcgagaagaagattaaaattcgggtggagccgggaatcttcgagtggaccaagtgggaagcaggtaaaactaccccgaccctcatgtccttagaagagctgaaagaagccaacttcaatatagacaccgactaccgccccgccttccccctgtcggcacttatgcctgcggagtcctaccaggaatacatggataggtgtacagctagtatggtacaaatcgtcaatacatgccctcaggacacgggtgtcattctgatcgtgtcccatggctctaccctggacagctgtacgcgcccgctgctgggactcccgccgcgggaatgcggagacttcgcgcagctcgtgcgcaaaatcccatctctgggtatgtgtttctgtgaggagaataaggaggagggcaagtgggaactcgtgaatcccccagtgaagacactgacacacggcgctaacgccgccttcaattggcggaactggatctccgggaactag

SEQ ID NO: 19138 - DNA, 1872 bp, Artificial Sequence
  derived and/or modified sequence
atggctgctggggagacccagctgtatgccaaggtgagcaacaagctgaagagccgcagcagccccagcctgctggagcccctgctggccatgggcttccctgtgcacacagccctgaaggccctggccgccactggaaggaagacagctgaggaggccctggcctggctgcatgaccactgcaatgaccccagcctggatgaccccatcccccaggagtatgccctcttcctgtgccccaccggccccctgctggagaagctgcaggagttctggagggagagcaagaggcagtgtgccaagaacagagcccacgaggtgttcccccacgtgaccctgtgtgacttcttcacctgtgaggaccagaaggtggagtgcctgtatgaggccctgaagagagctggggaccggctgctgggcagcttccccacagctgtgcccctggccctgcacagcagcatctcctacctgggcttctttgtgtctggcagccctgcagatgtgatccgggagtttgccatgacctttgccacagaggccagcctgctggccgactgcagcgtgaagccctgcaccaagcagctgcacctgaccctggcccacaagttctacccccaccaccagaggaccctggagcagctggcccgggccatccccctgggccacagctgccagtggacagctgccctgtacagccgggacatgagatttgtgcactaccagaccctgcgggccctcttccagtacaagccccagaatgtggatgagctgaccctgagccctggggactacatctttgtggaccccacccagcaggatgaggccagcgagggctgggtgattggcatcagccagaggacaggctgccggggcttcctgcctgagaactacacagaccgggccagcgagagtgacacctgggtgaagcacaggatgtacaccttcagcctggccacagacctgaacagcaggaaggatggagaggccagcagccgctgcagcggggagttcctgccccagacagcccggagcctgagcagcctgcaggccctgcaggccaccgtggccaggaagtctgtgctggtggtgagacatggagagcgggtggaccagatctttgggaaggcctggctgcagcagtgcagcaccccagatggcaagtactacagaccagacctgaacttcccctgcagcctgcccaggaggagccggggcatcaaggactttgaaaatgacccccccctgagcagctgtggcatcttccagagcagaattgctggagatgccctgctggacagcggcatccgcatcagctctgtgtttgccagccctgccctgcgctgtgtgcagacagccaagctgatcctggaggagctgaagctggagaagaagatcaagatccgggtggagcccggcatctttgagtggaccaagtgggaggccggcaagaccacccccaccctgatgagcctggaggagctgaaggaggccaacttcaacatcgacacagactacagacctgccttccccctgagcgccctgatgcctgctgagagctaccaggagtacatggaccgctgcacagcctccatggtgcagatcgtgaacacctgcccccaggacaccggggtcatcctgattgtgagccacggcagcaccctggacagctgcacccggcccctgctgggcctgcccccccgggagtgtggggactttgcccagctggtgaggaagatccccagcctgggcatgtgcttctgtgaggagaacaaggaggagggcaagtgggagctggtgaacccccctgtgaagaccctgacccacggggccaatgctgccttcaactggaggaactggatcagcggcaactag

SEQ ID NO: 19139 - DNA, 1872 bp, Artificial Sequence
  derived and/or modified sequence
atggccgccggcgagacccagctgtacgccaaggtgagcaacaagctgaagtctagaagtagtcctagcttgctggagccacttttagcaatggggttccccgtgcataccgcgctgaaggcgcttgctgccactggacgcaagactgcagaagaagccctggcatggctacatgaccactgtaacgatccatctcttgacgacccaatcccacaggagtatgctttattcctttgccccaccggccctctgctggaaaaattacaggagttttggcgtgagagtaagaggcagtgtgccaaaaaccgagcacatgaggtctttccccacgtgactctttgcgattttttcacatgtgaagaccagaaagtggagtgtctgtacgaggcactaaagcgcgctggggataggcttctgggcagctttccgacagccgtacctctggccctgcattcctccattagctatctgggatttttcgtgtccggttctcctgccgatgtgatccgagagttcgctatgacctttgctactgaagcatcactgctcgctgattgctctgtaaagccgtgtaccaaacagctccatctcaccctggctcacaagttttatcctcatcatcaaaggactttggaacagctggctcgggcaataccattgggacattcttgtcaatggactgcagcattatactcgagggacatgcggtttgtacattatcagaccctgagagccctcttccagtacaagccccaaaatgtggatgagctgacgttgtcaccgggggattacattttcgtggatcctacacaacaagatgaagctagcgaagggtgggtcatcgggattagtcaaagaactggatgtagaggatttctaccggagaactacaccgatagggctagtgaatctgacacatgggtaaaacatagaatgtacactttttctttggcaactgatctaaacagtcggaaagatggcgaggctagctccaggtgtagcggggagtttctgccccagacagcccgttcactttcaagtctgcaggctctgcaggccactgtcgctcggaagtccgtcctggtggtgcgtcatggagagcgagtcgatcagattttcggcaaagcctggcttcagcaatgctcaacacccgatggtaaatattaccgaccagacctcaactttccctgtagtctaccgcggagatctagggggataaaggatttcgagaacgatccacccctgagctcctgcgggatttttcagagccgcattgcgggggacgcgctgctcgattcaggaatccgcatctctagcgtgttcgcctcacctgctttacggtgcgtgcagacagccaagctgattctggaggaactgaagctagagaaaaaaatcaagatcagagtggagccagggattttcgagtggacaaagtgggaggctggaaaaaccactccaaccttgatgagcctggaagagctcaaagaggctaattttaatattgataccgactacaggcctgcctttcccctgagcgccctaatgcccgccgagagctaccaggagtatatggaccgctgcaccgcatctatggtccagatagtgaatacatgtccccaagacacaggggtgatcctgatcgttagtcacggatccaccctcgattcctgcactagacccctgctcggcctccctcctcgcgaatgtggtgacttcgcacagcttgtaaggaagattcccagccttgggatgtgtttctgcgaagaaaacaaagaggaagggaagtgggagctcgtgaacccccccgtcaaaactctcacccatggcgcaaacgccgcctttaattggcggaactggatctcaggcaactag

SEQ ID NO: 19140 - DNA, 1872 bp, Artificial Sequence
  derived and/or modified sequence
atggcagccggagagacacagctttacgccaaagtgagcaataaattaaagtctcgctcatcaccatccctgctggaaccccttctggctatgggcttccccgtgcacacggctctcaaggctctggcagctaccggacgtaaaactgctgaagaagccctggcatggctccatgaccactgcaatgatccaagtcttgatgacccgattccacaggaatacgccctctttctgtgtccaactggaccgctgctcgagaaactacaggaattttggagagagtcaaaacgccaatgcgcaaaaaatcgggctcacgaggtgttccctcatgttaccctttgcgattttttcacttgcgaagatcaaaaggtggagtgtttgtatgaagccctgaagagggccggtgacaggctgctggggtccttcccaaccgcagtcccactcgccctgcatagctctatttcctacctgggattttttgtgagcgggagtcctgctgacgtgattcgcgaattcgctatgacattcgccactgaggccagcctcctggccgactgctctgttaaaccttgtacaaaacaacttcatttgacactggctcacaaattttatccccatcaccagcggacgttggaacagctcgcccgtgctatcccgctcggacattcatgccagtggacagctgcattgtatagccgggacatgcggttcgtgcactaccaaacattgcgggcactgttccagtacaagccccaaaacgtcgacgagttaacgctctctccaggggattatatctttgtggacccgacccagcaggatgaagcttctgagggctgggtgatcggcattagccaacgaactgggtgtcggggatttctgcctgaaaactacactgatagggcttccgagagcgacacttgggtgaaacaccgaatgtacaccttctccctggccacagacctcaattccagaaaggacggggaagctagctctcgttgctctggcgagttcctcccgcagacagccaggagcctaagcagccttcaagctctacaggctacggtggcccgtaagtcagtgttggtagttaggcacggagagagggtggatcaaattttcggcaaagcatggctgcagcaatgtagcacgcccgatgggaagtactaccgaccggatctgaacttcccctgttcgctacctaggcggtccagaggtatcaaggacttcgaaaatgatccccctctcagttcttgtggaatctttcagagcagaattgctggcgacgccttactggattcagggattcgaattagcagcgtttttgcgagcccagctctgcgatgcgtccaaactgccaaacttatcctagaagaactcaagttagagaagaaaattaaaatcagggtggagccaggcatattcgagtggaccaagtgggaagcaggtaagacgaccccaaccctcatgtccttggaggaacttaaagaggcaaattttaatatcgacacagactaccgcccagcatttcccctgagcgccctgatgcccgctgagtcttaccaagaatacatggacagatgcaccgcttcaatggtgcagattgtaaacacttgccctcaggatacgggtgtaatactcattgtgtcacatgggtccactctggactcttgtacacgccctttgttaggcctcccaccccgagagtgcggcgattttgcccagttagttcgtaagatcccttccctcgggatgtgtttttgcgaagaaaataaagaagaagggaagtgggaactggtgaacccccctgtaaagactctcacccacggtgctaatgcagcttttaactggcgtaactggatctccggaaattag

SEQ ID NO: 19141 - DNA, 1968 bp, Artificial Sequence
  derived and/or modified sequence
ctcatttctgtgtgcaggcgagcttcttggcctaagggcaggaagagatggcagcgggggagacgcagctctacgccaaggtctccaacaagctcaagagccgcagcagcccctcgctcctggagcccctcctggccatgggcttcccggtgcacaccgcgctgaaagcgttggcagccacggggaggaagacggcggaggaggccttggcctggctgcatgatcattgcaatgacccttccctagacgaccccatcccccaggagtatgcccttttcctctgtccaacggggcccctgctggaaaaacttcaagagttctggagagagagcaagcgccagtgtgcaaagaacagagctcatgaggtcttcccacacgtgacactctgtgacttcttcacgtgtgaagaccagaaggtggaatgcctgtacgaggcgctgaagagagctggagacaggctcctgggctccttccccacggccgtgcctctggctctccactcctccatcagctacctcggcttcttcgtcagtggcagccccgcagacgtcatccgggaattcgccatgaccttcgccacggaagcatctctcttagcagactgctccgtgaagccttgcaccaaacagctgcatctgaccttggcccacaagttctacccccaccaccagaggacgctggagcagctggccagagccatccccctgggccacagctgccagtggaccgcagcactctactcccgagacatgcgctttgtgcactaccagaccctgagagccctattccagtacaaaccccagaacgtggatgagctgacgctaagtcctggtgactacatctttgtggaccccacgcagcaggacgaagccagcgagggctgggtgattgggatctcacagcggacgggctgccggggcttcctgccggaaaactacacggatcgagccagtgagtctgacacgtgggtgaagcacaggatgtacaccttcagtctagccacagacctgaactccagaaaggatggtgaagccagcagcagatgcagcggggaatttcttccacaaacggcaaggagtcttagcagcttacaggccttgcaggctaccgttgcaaggaagagcgtgctggtggttcgccacggggagagagtggatcagatcttcgggaaggcatggctgcagcaatgctccactcctgatgggaaatactacaggccagacctgaatttcccctgcagtctgccaagacggagtcgtgggatcaaagactttgaaaacgatcccccattatcatcgtgtggcattttccagtccagaattgcaggggacgcgctactggacagtggtatcagaatcagctctgtgtttgcctccccagccctccgctgtgtgcagacggccaaactcatcctggaagaactcaaactggagaaaaaaatcaagatacgagtggaacctggaatctttgaatggacaaaatgggaagctggcaaaaccaccccaaccctcatgagcctggaagagctgaaagaggcaaatttcaacattgacactgattacaggcccgcgtttcccctgtccgccctcatgccggccgagagctaccaggagtacatggacaggtgcacggcgagcatggtgcaaatcgtcaacacctgtccacaggacacgggtgtcatcctaattgtgagtcacggctccactctggactcctgcacgcggccactgctcgggctgccgccccgggaatgtggggattttgcccaactcgtgagaaagatcccttccctgggcatgtgcttctgtgaagaaaataaagaggaaggaaaatgggagttggtgaacccaccggtgaagaccctgacccacggggcgaacgcagcatttaactggaggaactggatctcaggcaactgagagccacggtgatgttgtcataacctcagagtggagaggcagaaaccat

SEQ ID NO: 19142 - protein, 309 aa, Artificial Sequence
  derived and/or modified sequence
MGLGNESSLMDFILLGFSDHPRLEAVLFVFVLFFYLLTLVGNFTIIIISYLDPPLHTPMYFFLSNLSLLDICFTTSLAPQTLVNLQRPKKTITYGGCVAQLYISLALGSTECILLADMALDRYIAVCKPLHYVVIMNPRLCQQLASISWLSGLASSLIHATFTLQLPLCGNHRLDHFICEVPALLKLACVDTTVNELVLFVVSVLFVVIPPALISISYGFITQAVLRIKSVEARHKAFSTCSSHLTVVIIFYGTIIYVYLQPSDSYAQDQGKFISLFYTMVTPTLNPIIYTLRNKDMKEALRKLLSGKL

SEQ ID NO: 19143 - DNA, 930 bp, Artificial Sequence
  derived and/or modified sequence
atgggcctgggcaacgagagcagcctgatggacttcatcctgctgggcttcagcgaccaccccagactggaggccgtgctgttcgtgttcgtgctgttcttctacctgctgaccctggtgggcaacttcaccatcatcatcatcagctacctggacccccccctgcacacccccatgtacttcttcctgagcaacctgagcctgctggacatctgcttcaccaccagcctggccccccagaccctggtgaacctgcagagacccaagaagaccatcacctacggcggctgcgtggcccagctgtacatcagcctggccctgggcagcaccgagtgcatcctgctggccgacatggccctggacagatacatcgccgtgtgcaagcccctgcactacgtggtgatcatgaaccccagactgtgccagcagctggccagcatcagctggctgagcggcctggccagcagcctgatccacgccaccttcaccctgcagctgcccctgtgcggcaaccacagactggaccacttcatctgcgaggtgcccgccctgctgaagctggcctgcgtggacaccaccgtgaacgagctggtgctgttcgtggtgagcgtgctgttcgtggtgatcccccccgccctgatcagcatcagctacggcttcatcacccaggccgtgctgagaatcaagagcgtggaggccagacacaaggccttcagcacctgcagcagccacctgaccgtggtgatcatcttctacggcaccatcatctacgtgtacctgcagcccagcgacagctacgcccaggaccagggcaagttcatcagcctgttctacaccatggtgacccccaccctgaaccccatcatctacaccctgagaaacaaggacatgaaggaggccctgagaaagctgctgagcggcaagctgtag

SEQ ID NO: 19144 - DNA, 930 bp, Artificial Sequence
  derived and/or modified sequence
atggggctcggaaatgaatcctccctcatggattttatcctgctcggtttctccgaccacccgcggcttgaagctgttctgttcgtgtttgtactgttcttctatctactcaccctcgtgggcaacttcacaatcataatcatcagctatttggacccacctctgcatacccctatgtacttcttcttgagcaacttatctctgctcgacatctgctttacaaccagcttggcacctcagaccctggtcaacctccagagaccaaagaagacaatcacatatggtgggtgtgttgctcagctctatatatctttggcacttgggtcaacagaatgtattttgctggctgatatggccctggatagatatattgcggtgtgcaaacctctccattacgtggttatcatgaatcctcgcctctgccagcagctcgctagtatttcgtggctgagtgggttagcatctagcctcattcatgcaacttttacacttcagttgccactttgtgggaatcatcggctggaccactttatctgcgaggtgccagcgctcctgaaactggcatgtgtagatactacagtaaacgagcttgtgctttttgtcgtctcggtactttttgtggtgatcccacctgcgctgatatctatcagctacgggttcatcactcaagcagtgctcagaattaagtctgtggaggcccgccataaggccttctccacttgtagtagtcacctgaccgtcgttattattttctatggaacaatcatctatgtctacttacaaccttctgacagttatgctcaggaccagggcaagttcatcagccttttctataccatggtcactcctacgctcaaccccatcatttatacgctcaggaataaggatatgaaagaagctttaaggaaattgcttagtggcaagctgtag

SEQ ID NO: 19145 - DNA, 930 bp, Artificial Sequence
  derived and/or modified sequence
atgggcctgggcaatgaaagcagcctgatggacttcatcctgctgggcttcagtgaccacccccggctggaggccgtgctgtttgtgtttgtgctcttcttctacctgctgaccctggtgggcaacttcaccatcatcatcatctcctacctggacccccccctgcacacccccatgtacttcttcctgagcaacctgagcctgctggacatctgcttcaccaccagcctggccccccagaccctggtgaacctgcagaggcccaagaagaccatcacctacggcggctgtgtggcccagctgtacatcagcctggccctgggcagcacagagtgcatcctgctggccgacatggccctggaccgctacatcgctgtgtgcaagcccctgcactacgtggtgatcatgaacccccggctgtgccagcagctggccagcatctcctggctgagcggcctggccagcagcctcatccacgccaccttcaccctgcagctgcccctgtgtggcaaccaccggctggaccacttcatctgtgaggtgcctgccctgctgaagctggcctgtgtggacaccaccgtgaatgagctggtgctgtttgtggtgtctgtgctgtttgtggtgatccccccagccctgatcagcatctcctatggcttcatcacccaggccgtgctgcgcatcaagtctgtggaggcccggcacaaggccttcagcacctgcagcagccacctgactgtggtgatcatcttctacggcaccatcatctacgtgtacctgcagcccagcgacagctatgcccaggaccagggcaagttcatcagcctcttctacaccatggtgacccccaccctgaaccccatcatctacaccctgaggaacaaggacatgaaggaggccctgaggaagctgctgagcggcaagctgtag

SEQ ID NO: 19146 - DNA, 983 bp, Artificial Sequence
  derived and/or modified sequence
ttcctgccttaggtgcggatccccctggagggatgggattgggcaatgagagttccctaatggatttcatccttctaggcttctcagaccaccctcgtctggaggctgttctctttgtatttgtccttttcttctacctcctgacccttgtgggaaacttcaccataatcatcatctcatatctggatccccctcttcataccccaatgtacttttttctcagcaacctctctttactggacatctgcttcactactagccttgctcctcagaccttagttaacttgcaaagaccaaagaagacgatcacttacggtggttgtgtggcgcaactctatatttctctggcactgggctccactgaatgtatcctcttggctgacatggccttggatcggtacattgctgtctgcaaacccctccactatgtagtcatcatgaacccacggctttgccaacagctggcatctatctcctggctcagtggtttggctagttccctaatccatgcaacttttaccttgcaattgcctctctgtggcaaccataggctggaccattttatttgcgaagtaccagctcttctcaagttggcttgtgtggacaccactgtcaatgaattggtgctttttgttgttagtgttctgtttgttgtcattccaccagcactcatctccatctcctatggcttcataactcaagctgtgctgaggatcaaatcagtagaggcaaggcacaaagccttcagcacctgctcctcccaccttacagtggtgattatattctatggcaccataatctacgtgtacctgcaacctagtgacagctatgcccaggaccaagggaagtttatctccctcttctacaccatggtgacccccactttaaatcctatcatctatactttaaggaacaaggatatgaaagaggctctgaggaaacttctctcgggaaaattgtgattcctatggacatgatttgca

SEQ ID NO: 19147 - DNA, 930 bp, Artificial Sequence
  derived and/or modified sequence
atgggcctgggcaacgagagcagcctgatggacttcatcctgctgggattttccgaccatccacgtctcgaagcggtccttttcgtgttcgttcttttcttctacctccttacgctggttgggaatttcaccattatcataattagctacctggaccctcccctccacacacctatgtattttttcctatctaacctcagcttgttggatatctgcttcaccaccagcctggccccccaaacgctcgtgaatctgcagcgcccaaaaaaaacaatcacctacggaggctgcgttgcgcagctgtatatcagcctcgcactgggctccacagagtgcattctgctggctgatatggccctagacagatacatcgcagtgtgtaagcccctccattacgttgtgataatgaacccgagactgtgccagcagctggccagtatttcatggcttagcggcctggccagctcactgatccacgcgacattcactctccaactgccgctgtgtggcaatcatcggttggaccactttatctgcgaggtccccgccttgctgaagctcgcttgtgtggatacaacagttaacgagctggtgctctttgtagtttcagtgctgttcgtagtcattccgcctgctcttatttctatctcttacggtttcatcacgcaggcagtcctgagaatcaaaagtgtggaggctaggcataaggcattctccacatgtagttcccatctgactgtcgtgatcattttttacggtactatcatctatgtttatctgcagccgtccgactcctatgcccaggaccaggggaagtttataagcttgttttacacaatggttacacctactttgaaccctatcatatacacgctgcgcaacaaggacatgaaagaggctctccgaaagctcctgtctggcaaactctag

SEQ ID NO: 19148 - DNA, 930 bp, Artificial Sequence
  derived and/or modified sequence
atgggcctaggaaacgaaagctctctcatggacttcatactgctcggattcagtgaccacccacgtctggaggctgtgttatttgtattcgttctttttttctacctgctcactctcgttggaaactttacgattatcattatctcctatctggaccctcccctgcatactcctatgtacttctttctgtctaacctgtctctgctggacatatgtttcactaccagtctggctccccagacactcgtgaacctgcaacgccctaagaagacaattacttacgggggatgtgtggctcagctctatatctccctggctctgggctctacggaatgtattctgctggcagatatggccctcgaccgctatattgctgtatgtaagccactccattatgttgtgatcatgaatcctcggctctgccagcagctggcctcaatctcgtggctgtcaggcctcgcttctagtttaatccacgcgactttcactctccagctgccactgtgtggcaaccacagactggatcatttcatatgcgaggtccctgccctactgaagttggcttgcgttgacactaccgttaatgagctcgtgcttttcgtggtgtctgtactgtttgtggttatccctccagctctgattagcatttcatatgggttcattacacaagccgtgttacgaatcaaatcggttgaagccaggcacaaagccttctccacgtgctcatcccacctgacggtggttatcatcttttacggaactatcatatacgtctatctgcaaccaagtgattcctatgcacaagatcaggggaagtttatatctctgttctatacaatggtgactccgaccctgaacccaatcatttacaccctgcgcaataaggatatgaaggaagctcttcgtaaattactttcaggtaagttatag

SEQ ID NO: 19149 - protein, 317 aa, Artificial Sequence
  derived and/or modified sequence
MGMVRHTNESNLAGFILLGFSDYPQLQKVLFVLILILYLLTILGNTTIILVSRLEPKLHMPMYFFLSHLSFLYRCFTSSVIPQLLVNLWEPMKTIAYGGCLVHLYNSHALGSTECVLPAVMSCDRYVAVCRPLHYTVLMHIHLCMALASMAWLSGIATTLVQSTLTLQLPFCGHRQVDHFICEVPVLIKLACVGTTFNEAELFVASILFLIVPVSFILVSSGYIAHAVLRIKSATRRQKAFGTCFSHLTVVTIFYGTIIFMYLQPAKSRSRDQGKFVSLFYTVVTRMLNPLIYTLRIKEVKGALKKVLAKALGVNIL

SEQ ID NO: 19150 - DNA, 954 bp, Artificial Sequence
  derived and/or modified sequence
atgggcatggtgagacacaccaacgagagcaacctggccggcttcatcctgctgggcttcagcgactacccccagctgcagaaggtgctgttcgtgctgatcctgatcctgtacctgctgaccatcctgggcaacaccaccatcatcctggtgagcagactggagcccaagctgcacatgcccatgtacttcttcctgagccacctgagcttcctgtacagatgcttcaccagcagcgtgatcccccagctgctggtgaacctgtgggagcccatgaagaccatcgcctacggcggctgcctggtgcacctgtacaacagccacgccctgggcagcaccgagtgcgtgctgcccgccgtgatgagctgcgacagatacgtggccgtgtgcagacccctgcactacaccgtgctgatgcacatccacctgtgcatggccctggccagcatggcctggctgagcggcatcgccaccaccctggtgcagagcaccctgaccctgcagctgcccttctgcggccacagacaggtggaccacttcatctgcgaggtgcccgtgctgatcaagctggcctgcgtgggcaccaccttcaacgaggccgagctgttcgtggccagcatcctgttcctgatcgtgcccgtgagcttcatcctggtgagcagcggctacatcgcccacgccgtgctgagaatcaagagcgccaccagaagacagaaggccttcggcacctgcttcagccacctgaccgtggtgaccatcttctacggcaccatcatcttcatgtacctgcagcccgccaagagcagaagcagagaccagggcaagttcgtgagcctgttctacaccgtggtgaccagaatgctgaaccccctgatctacaccctgagaatcaaggaggtgaagggcgccctgaagaaggtgctggccaaggccctgggcgtgaacatcctgtag

SEQ ID NO: 19151 - DNA, 954 bp, Artificial Sequence
  derived and/or modified sequence
atgggaatggttaggcataccaatgaatccaacctcgctggcttcatactactggggttttctgactatccacaacttcagaaggtgctatttgtgctcattctcattttgtaccttctgaccatattgggaaacacaaccattattctcgtgtcccggctggaaccgaaactgcacatgcccatgtatttttttctcagtcatctgtcctttctataccgctgcttcaccagttccgtgattccccagcttctcgtgaatctgtgggaacctatgaagacaatcgcgtatggaggctgcttagttcatttatataattcccacgccctgggctcaacagagtgtgtgcttccagccgttatgtcttgcgaccgctatgtagccgtctgcaggcccctccattacaccgtgctcatgcatatccacctatgcatggccctcgcttcgatggcgtggttgtcaggtatcgcaactacactggtgcagtccactctcaccctacaactgccattctgcggccacaggcaggtggatcactttatttgtgaagtcccagtgctgatcaagctcgcctgtgtggggacgacattcaacgaggcggaactgtttgtggcctctattctgttcttaatcgtgcctgtatcttttattctagtctcctcaggctacattgcccatgctgtcctccgtattaaatcagcgacacgcagacagaaggcgtttggaacctgcttctctcatctcactgtggtcacgattttttacggaaccattatatttatgtaccttcaacccgccaagtccaggagcagagaccagggcaagtttgtatccctgttctataccgtcgttacacgcatgctcaaccctctgatctacacgttgcgcattaaagaagtcaagggggccctgaaaaaagtcctcgctaaagcactgggcgtgaacattctctag

SEQ ID NO: 19152 - DNA, 954 bp, Artificial Sequence
  derived and/or modified sequence
atgggcatggtgcgccacaccaatgaaagcaacctggccggcttcatcctgctgggcttcagtgactacccccagctgcagaaggtgctgtttgtgctgatcctgatcctgtacctgctgaccatcctgggcaacaccaccatcatcctggtgtcccggctggagcccaagctgcacatgcccatgtacttcttcctgagccacctgtccttcctgtaccgctgcttcaccagcagcgtcatcccccagctgctggtgaacctgtgggagcccatgaagaccatcgcctatggaggctgcctggtgcacctgtacaacagccacgccctgggcagcacagaatgtgtgctgcctgctgtgatgagctgtgaccgctacgtggccgtgtgccggcccctgcactacacagtgctgatgcacatccacctgtgcatggccctggcctccatggcctggctgagcggcatcgccaccaccctggtgcagagcaccctgaccctgcagctgcccttctgtggccaccggcaggtggaccacttcatctgtgaggtgcctgtgctgatcaagctggcctgtgtgggcaccaccttcaatgaggccgagctgtttgtggccagcatcctcttcctgattgtgcctgtgtccttcatcctggtgagcagcggctacatcgcccatgctgtgctgcgcatcaagagcgccacccggcggcagaaggccttcggcacctgcttcagccacctgactgtggtgaccatcttctacggcaccatcatcttcatgtacctgcagcctgccaagagccgcagccgggaccagggcaagtttgtgtccctcttctacacagtggtgaccaggatgctgaaccccctcatctacaccctgcgcatcaaggaggtgaagggggccctgaagaaggtgctggccaaggccctgggcgtgaacatcctgtag

SEQ ID NO: 19153 - DNA, 954 bp, Artificial Sequence
  derived and/or modified sequence
atggggatggtgagacataccaatgagagcaacctagcaggtttcatccttttagggttttctgattatcctcagttacagaaggttctatttgtgctcatattgattctgtatttactaactattttggggaataccaccatcattctggtttctcgtctggaacccaagcttcatatgccgatgtatttcttcctttctcatctctccttcctgtaccgctgcttcaccagcagtgttattccccagctcctggtaaacctgtgggaacccatgaaaactatcgcctatggtggctgtttggttcacctttacaactcccatgccctgggatccactgagtgcgtcctcccggctgtgatgtcctgtgaccgctatgtggctgtctgccgtcctctccattacactgtcttaatgcatatccatctctgcatggccttggcatctatggcatggctcagtggaatagccaccaccctggtacagtccaccctcaccctgcagctgcccttctgtgggcatcgccaagtggatcatttcatctgcgaggtccctgtgctcatcaagctggcttgtgtgggcaccacgtttaacgaggctgagctttttgtggctagtatccttttccttatagtgcctgtctcattcatcctggtctcctctggctacattgcccacgcagtgttgaggattaagtcagctaccaggagacagaaagcattcgggacctgcttctcccacctgacagtggtcaccatcttttatggaaccatcatcttcatgtatctgcagccagccaagagtagatccagggaccagggcaagtttgtttctctcttctacactgtggtaacccgcatgcttaaccctcttatttataccttgaggatcaaggaggtgaaaggggcattaaagaaagttctagcaaaggctctgggagtaaatattttatga

SEQ ID NO: 19154 - DNA, 954 bp, Artificial Sequence
  derived and/or modified sequence
atgggcatggtgcggcacaccaacgagagcaacctggccggcttcattctacttggctttagcgactatcctcagttgcaaaaagttttgtttgtgctgattcttatcttgtatctgcttaccatccttgggaatacaacaataatcctggtttcccgccttgaaccaaagctccacatgcctatgtatttcttcctgtcacacctgtcctttctgtacaggtgcttcacatcatcagtgatcccccagctcctggtcaatctgtgggagcccatgaaaacaatcgcctatggaggctgtctggtccacctatacaacagccacgctctggggtccactgagtgcgttctaccggcagttatgtcttgtgatcggtacgtggcggtctgccgcccactccactataccgtactcatgcacattcacctttgcatggccctggcgagcatggcctggcttagcggaatcgccactaccctggtgcagagcacactcacactgcaactgcccttttgtgggcataggcaggtagaccacttcatatgcgaggtgcccgtgctgatcaagctagcgtgcgtggggacgacctttaatgaggccgaattgttcgtggccagcattctttttctaattgtccctgttagcttcattctcgtcagctccggttatatcgctcatgccgtgttgagaattaaatccgctacaaggcggcagaaagcctttggcacttgcttctctcacctgacagtggtcaccatattctatggaaccatcattttcatgtatttacagcctgcgaagtctcgctcccgtgatcagggaaaattcgtgagcctgttttacacagtggtgaccagaatgctgaatccgctgatttacactcttcgcatcaaagaggtgaaaggcgcactgaagaaggtccttgcaaaagctttaggcgtgaatatcctgtag

SEQ ID NO: 19155 - DNA, 954 bp, Artificial Sequence
  derived and/or modified sequence
atgggcatggtccgccacactaatgagtctaacttggcaggttttatcctcctggggttcagcgactatccccaactgcagaaggtcctgttcgtgctgatcctgatactatacctcttaacgatcctcggtaacaccactataatcctcgtgtcacgactggaacccaaacttcacatgccaatgtacttcttcctgtctcacctctctttcttatatagatgctttacaagttctgtgattcctcagttgcttgtgaacctttgggagcccatgaagacaattgcctacggcggatgcctggttcacctctacaattcccatgcgttgggatccaccgagtgcgtgctgccagcggtgatgtcctgcgatagatacgtggccgtgtgtcgaccattacattacactgtactcatgcatatacacctatgcatggctttagccagcatggcctggctttccggaatagccactacactggtgcagtctaccttaacgttacagctccctttctgcggccaccgacaagtggatcactttatctgtgaggtcccggtgctcattaaattggcctgcgtgggcactaccttcaacgaggcggaacttttcgtggcgagcattttgtttctcatagtgccagtttctttcattctggtgtcctcgggctacatcgcacatgcagtgttgcgtatcaaatcggccactagaaggcagaaggcctttggaacatgcttttcacacttgaccgtggtcacaattttttacgggaccataatattcatgtacctacagcctgccaagtcacggtcgcgagatcagggtaagtttgtgtcactgttttatactgtggtgacacggatgctgaaccccttgatttacacgctgagaattaaagaggtcaaaggggcactgaaaaaagttcttgctaaagccctgggcgtgaacatcctgtag

SEQ ID NO: 19156 - protein, 318 aa, Artificial Sequence
  derived and/or modified sequence
MDKINQTFVREFILLGLSGYPKLEIIFFALILVMYVVILIGNGVLIIASILDSRLHMPMYFFLGNLSFLDICYTTSSIPSTLVSLISKKRNISFSGCAVQMFFGFAMGSTECFLLGMMAFDRYVAICNPLRYPIIMNKVVYVLLTSVSWLSGGINSTVQTSLAMRWPFCGNNIINHFLCEILAVLKLACSDISVNIVTLAVSNIAFLVLPLLVIFFSYMFILYTILRTNSATGRHKAFSTCSAHLTVVIIFYGTIFFMYAKPKSQDLLGKDNLQATEGLVSMFYGVVTPMLNPIIYSLRNKDVKAAIKYLLSRKAINQ

SEQ ID NO: 19157 - protein, 346 aa, Artificial Sequence
  derived and/or modified sequence
MFIQVIFYICCLAVKILYIGSSFGILKADMDKINQTFVREFILLGLSGYPKLEIIFFALILVMYVVILIGNGVLIIASILDSRLHMPMYFFLGNLSFLDICYTTSSIPSTLVSLISKKRNISFSGCAVQMFFGFAMGSTECFLLGMMAFDRYVAICNPLRYPIIMNKVVYVLLTSVSWLSGGINSTVQTSLAMRWPFCGNNIINHFLCEILAVLKLACSDISVNIVTLAVSNIAFLVLPLLVIFFSYMFILYTILRTNSATGRHKAFSTCSAHLTVVIIFYGTIFFMYAKPKSQDLLGKDNLQATEGLVSMFYGVVTPMLNPIIYSLRNKDVKAAIKYLLSRKAIN

SEQ ID NO: 19158 - DNA, 957 bp, Artificial Sequence
  derived and/or modified sequence
atggacaagatcaaccagaccttcgtgagagagttcatcctgctgggcctgagcggctaccccaagctggagatcatcttcttcgccctgatcctggtgatgtacgtggtgatcctgatcggcaacggcgtgctgatcatcgccagcatcctggacagcagactgcacatgcccatgtacttcttcctgggcaacctgagcttcctggacatctgctacaccaccagcagcatccccagcaccctggtgagcctgatcagcaagaagagaaacatcagcttcagcggctgcgccgtgcagatgttcttcggcttcgccatgggcagcaccgagtgcttcctgctgggcatgatggccttcgacagatacgtggccatctgcaaccccctgagataccccatcatcatgaacaaggtggtgtacgtgctgctgaccagcgtgagctggctgagcggcggcatcaacagcaccgtgcagaccagcctggccatgagatggcccttctgcggcaacaacatcatcaaccacttcctgtgcgagatcctggccgtgctgaagctggcctgcagcgacatcagcgtgaacatcgtgaccctggccgtgagcaacatcgccttcctggtgctgcccctgctggtgatcttcttcagctacatgttcatcctgtacaccatcctgagaaccaacagcgccaccggcagacacaaggccttcagcacctgcagcgcccacctgaccgtggtgatcatcttctacggcaccatcttcttcatgtacgccaagcccaagagccaggacctgctgggcaaggacaacctgcaggccaccgagggcctggtgagcatgttctacggcgtggtgacccccatgctgaaccccatcatctacagcctgagaaacaaggacgtgaaggccgccatcaagtacctgctgagcagaaaggccatcaaccagtag

SEQ ID NO: 19159 - DNA, 1041 bp, Artificial Sequence
  derived and/or modified sequence
atgttcatccaggtgatcttctacatctgctgcctggccgtgaagatcctgtacatcggcagcagcttcggcatcctgaaggccgacatggacaagatcaaccagaccttcgtgagagagttcatcctgctgggcctgagcggctaccccaagctggagatcatcttcttcgccctgatcctggtgatgtacgtggtgatcctgatcggcaacggcgtgctgatcatcgccagcatcctggacagcagactgcacatgcccatgtacttcttcctgggcaacctgagcttcctggacatctgctacaccaccagcagcatccccagcaccctggtgagcctgatcagcaagaagagaaacatcagcttcagcggctgcgccgtgcagatgttcttcggcttcgccatgggcagcaccgagtgcttcctgctgggcatgatggccttcgacagatacgtggccatctgcaaccccctgagataccccatcatcatgaacaaggtggtgtacgtgctgctgaccagcgtgagctggctgagcggcggcatcaacagcaccgtgcagaccagcctggccatgagatggcccttctgcggcaacaacatcatcaaccacttcctgtgcgagatcctggccgtgctgaagctggcctgcagcgacatcagcgtgaacatcgtgaccctggccgtgagcaacatcgccttcctggtgctgcccctgctggtgatcttcttcagctacatgttcatcctgtacaccatcctgagaaccaacagcgccaccggcagacacaaggccttcagcacctgcagcgcccacctgaccgtggtgatcatcttctacggcaccatcttcttcatgtacgccaagcccaagagccaggacctgctgggcaaggacaacctgcaggccaccgagggcctggtgagcatgttctacggcgtggtgacccccatgctgaaccccatcatctacagcctgagaaacaaggacgtgaaggccgccatcaagtacctgctgagcagaaaggccatcaactag

SEQ ID NO: 19160 - DNA, 957 bp, Artificial Sequence
  derived and/or modified sequence
atggataaaataaatcagacttttgtgcgggaattcatcctgttaggtctttcggggtatccaaagcttgagatcatcttcttcgctcttatcctggtaatgtatgttgtgattctcataggaaatggggtgcttattattgcatctatcttggactctcgactccacatgcctatgtactttttccttggcaatctctcttttcttgacatttgttacacaactagcagcatacctagcactctggtgtcgctgatcagcaagaaaagaaacatcagtttcagtggctgcgcagtgcagatgttctttggatttgctatggggagtaccgagtgcttcctattgggcatgatggctttcgataggtacgtggccatttgcaatcccctgcgctaccccattattatgaacaaggtggtgtacgttttattgacaagcgtcagctggctgagtggagggatcaatagcaccgtgcagacttcccttgctatgagatggccattttgcgggaataatattatcaatcatttcctgtgcgaaatacttgcagttcttaagctcgcctgctctgatatttcggtcaacatagtgacgctcgcggtgagtaacattgcttttcttgtcctgcccctgctagtgatttttttcagctacatgtttatcctgtatactatcctcagaacaaatagtgctaccggcaggcataaggcattcagcacttgcagcgcccacctgaccgtggtcatcattttctacggcaccattttttttatgtatgccaagcccaaaagccaagacctgcttggcaaagacaaccttcaagcaactgagggtcttgtgtctatgttctacggcgtcgttactcctatgctcaatcctattatatactcattgaggaacaaggacgtgaaggccgctattaagtacctcttatcacgaaaagccataaaccagtag

SEQ ID NO: 19161 - DNA, 1041 bp, Artificial Sequence
  derived and/or modified sequence
atgtttatccaggtcatcttttacatatgctgcctggccgtcaagattctttatataggttcctcctttggaatccttaaagcagacatggacaagattaatcagaccttcgtgcgcgagttcatcttactcggtctgagcggctatccgaaactcgagatcattttttttgcgctgatcttggtcatgtatgtggtgatacttattggcaatggagtcctgatcattgcatctattctcgattctcgtttacacatgcctatgtacttttttctcggcaacctgtccttcctggacatctgctatactacctcatctattccaagtaccttggtgtcactgatctctaaaaagagaaacatatccttttctggttgtgcggtccagatgttcttcggcttcgcaatggggtcaaccgagtgttttctgctggggatgatggcattcgaccgctacgttgccatctgtaatccccttcgctaccctatcataatgaacaaggttgtctatgtccttctgacctctgtctcttggcttagcggcggcattaattcaacggttcagacctccctagccatgcgctggccattttgtggaaacaacattattaaccactttctgtgcgagattcttgcggttttgaaactcgcatgcagcgatatatctgttaatatagtgaccctcgctgtttccaacatagcttttctcgtactgccactgctagtaattttcttctcctatatgttcattttgtacacaatcctccgaacgaacagtgctactggcagacataaggccttttctacgtgcagtgcgcacctcacggtcgtcattattttctacgggaccatctttttcatgtacgccaagcccaagtcacaggacctgctcggtaaggataatctgcaagctactgaaggcctggtgagtatgttctacggtgtggtgaccccaatgcttaatccaataatttattcactccgaaacaaggacgttaaagccgcaattaagtacctccttagccgcaaggccatcaactag

SEQ ID NO: 19162 - DNA, 957 bp, Artificial Sequence
  derived and/or modified sequence
atggacaagatcaaccagacctttgtgcgggagttcatcctgctgggcctgagcggctaccccaagctggagatcatcttctttgccctgatcctggtgatgtatgtggtgatcctgattggaaatggagtgctgatcatcgccagcatcctggacagccggctgcacatgcccatgtacttcttcctgggcaacctgtccttcctggacatctgctacaccaccagcagcatccccagcaccctggtgtccctcatcagcaagaagaggaacatctccttcagcggctgtgctgtgcagatgttctttggatttgccatgggcagcacagagtgcttcctgctgggcatgatggcctttgacagatatgtggccatctgcaaccccctgcgctaccccatcatcatgaacaaggtggtgtatgtgctgctgacctctgtgtcctggctgagcggcggcatcaacagcacagtgcagaccagcctggccatgcgctggcccttctgtggcaacaacatcatcaaccacttcctgtgtgagatcctggccgtgctgaagctggcctgcagcgacatctctgtgaacatcgtgaccctggccgtgagcaacatcgccttcctggtgctgcccctgctggtgatcttcttctcctacatgttcatcctgtacaccatcctgcggaccaacagcgccaccggccgccacaaggccttcagcacctgcagcgcccacctgactgtggtgatcatcttctacggcaccatcttcttcatgtatgccaagcccaagagccaggacctgctgggcaaggacaacctgcaggccacagagggcctggtgtccatgttctacggcgtggtgacccccatgctgaaccccatcatctacagcctgaggaacaaggatgtgaaggccgccatcaagtacctgctgagcaggaaggccatcaaccagtag

SEQ ID NO: 19163 - DNA, 1041 bp, Artificial Sequence
  derived and/or modified sequence
atgttcatccaggtgatcttctacatctgctgcctggccgtgaagatcctgtacatcggcagcagctttggcatcctgaaggctgacatggacaagatcaaccagacctttgtgcgggagttcatcctgctgggcctgagcggctaccccaagctggagatcatcttctttgccctgatcctggtgatgtatgtggtgatcctgattggaaatggagtgctgatcatcgccagcatcctggacagccggctgcacatgcccatgtacttcttcctgggcaacctgtccttcctggacatctgctacaccaccagcagcatccccagcaccctggtgtccctcatcagcaagaagaggaacatctccttcagcggctgtgctgtgcagatgttcttcggctttgccatgggcagcacagagtgcttcctgctgggcatgatggcctttgaccgctacgtggccatctgcaaccccctgcgctaccccatcatcatgaacaaggtggtgtatgtgctgctgacctctgtgtcctggctgagcggcggcatcaacagcacagtgcagaccagcctggccatgcgctggcccttctgtggcaacaacatcatcaaccacttcctgtgtgagatcctggccgtgctgaagctggcctgcagcgacatctctgtgaacatcgtgaccctggccgtgagcaacatcgccttcctggtgctgcccctgctggtgatcttcttctcctacatgttcatcctgtacaccatcctgcggaccaacagcgccaccggccgccacaaggccttcagcacctgcagcgcccacctgactgtggtgatcatcttctacggcaccatcttcttcatgtatgccaagcccaagagccaggacctgctgggcaaggacaacctgcaggccacagagggcctggtgtccatgttttatggagtggtgacccccatgctgaaccccatcatctacagcctgaggaacaaggatgtgaaggccgccatcaagtacctgctgagcaggaaggccatcaactag

SEQ ID NO: 19164 - DNA, 957 bp, Artificial Sequence
  derived and/or modified sequence
atggacaagataaaccagacatttgtgagagaattcattcttctgggactctctggttaccccaaacttgagatcattttctttgctctgattctagttatgtacgtagtgattctaattggcaatggtgttctgatcatagcaagcatcttggattctcgtcttcacatgcccatgtacttcttcctgggcaacctctctttcctggatatctgctatacaacctcctccattccctcaacactggtgagcttaatctcaaagaaaagaaacatttccttctctggatgtgcagtgcagatgttctttgggtttgcaatggggtcaacagaatgtttcctccttggcatgatggcatttgatcgttatgtggccatctgtaaccctctgagataccccatcatcatgaacaaggtggtgtatgtactgctgacttctgtatcatggctttctggtggaatcaattcaactgtgcaaacatcacttgccatgcgatggcctttctgtgggaacaatattattaatcatttcttatgcgagatcttagctgtcctaaaattagcttgttctgatatatctgtcaatattgttaccctagcagtgtcaaatattgctttcctagttcttcctctgctcgtgatttttttctcctatatgttcatcctctacaccatcttgcgaacgaactcggccacaggaagacacaaggcattttctacatgctcagctcacctgactgtggtgatcatattttatggtaccatcttctttatgtatgcaaaacctaagtcccaggacctccttgggaaagacaacttgcaagctacagaggggcttgtttccatgttttatggggttgtgacccccatgttaaaccccataatctatagcttgagaaataaagatgtaaaagctgctataaaatatttgctgagcaggaaagctattaaccagtaa

SEQ ID NO: 19165 - DNA, 1038 bp, Artificial Sequence
  derived and/or modified sequence
atgtttattcaagttattttttacatttgttgcttggctgtgaaaatattatacattgggtcttcctttggcatcctgaaagctgacatggacaagataaaccagacatttgtgagagaattcattcttctgggactctctggttaccccaaacttgagatcattttctttgctctgattctagttatgtacgtagtgattctaattggcaatggtgttctgatcatagcaagcatcttggattctcgtcttcacatgcccatgtacttcttcctgggcaacctctctttcctggatatctgctatacaacctcctccattccctcaacactggtgagcttaatctcaaagaaaagaaacatttccttctctggatgtgcagtgcagatgttctttgggtttgcaatggggtcaacagaatgtttcctccttggcatgatggcatttgatcgttatgtggccatctgtaaccctctgagataccccatcatcatgaacaaggtggtgtatgtactgctgacttctgtatcatggctttctggtggaatcaattcaactgtgcaaacatcacttgccatgcgatggcctttctgtgggaacaatattattaatcatttcttatgcgagatcttagctgtcctaaaattagcttgttctgatatatctgtcaatattgttaccctagcagtgtcaaatattgctttcctagttcttcctctgctcgtgatttttttctcctatatgttcatcctctacaccatcttgcgaacgaactcggccacaggaagacacaaggcattttctacatgctcagctcacctgactgtggtgatcatattttatggtaccatcttctttatgtatgcaaaacctaagtcccaggacctccttgggaaagacaacttgcaagctacagaggggcttgtttccatgttttatggggttgtgacccccatgttaaaccccataatctatagcttgagaaataaagatgtaaaagctgctataaaatatttgctgagcaggaaagctattaac

SEQ ID NO: 19166 - DNA, 957 bp, Artificial Sequence
  derived and/or modified sequence
atggacaagatcaaccagaccttcgtgcgggagttcatcctgctgggactaagtgggtacccaaaactggaaatcatcttcttcgctcttatcctggtcatgtacgtggtcatcctcatcgggaacggggtattgatcatcgcttctatcttagactctcgactgcacatgccaatgtatttctttctgggaaatctctcttttttggacatctgttataccacttcttccataccatccaccctcgtgtctctcataagcaagaaacggaacatttccttcagtggttgcgccgtccagatgttcttcggtttcgcaatgggctctaccgagtgcttcctcctgggtatgatggccttcgatcgatacgttgccatctgcaatccactccgctacccaattatcatgaacaaggtggtttacgttctgttaacgagcgtgagttggctgtccggcggaataaattccaccgttcagacttccctggccatgcgctggcccttttgcggtaataatattatcaatcacttcttatgtgagatcctggcagtgctgaaattagcctgttcggatatatcagtgaacatcgtgactttggccgtgtcaaatatcgcatttctcgtactgccactcctcgtgattttctttagttacatgtttatcttgtacacaatactgcggacaaatagtgccaccggaaggcataaagcttttagcacctgcagcgcccatctgaccgtcgtgattattttttacggcaccattttctttatgtacgcaaagcctaaaagccaggatcttctcggtaaggataacctccaggccaccgagggcttggtgagtatgttctatggagtggttactcctatgctgaaccccatcatttactctctgcgtaacaaggacgtcaaggcggcaatcaagtaccttctgagtcgcaaagctattaaccagtag

SEQ ID NO: 19167 - DNA, 1041 bp, Artificial Sequence
  derived and/or modified sequence
atgttcatccaggtgatcttctacatctgctgcctggccgtgaagatattatatatcggatcaagtttcgggatccttaaagcagatatggacaagattaaccaaacctttgttcgagaattcattctacttggccttagcggttatcccaagttagagatcatttttttcgctctgattcttgtcatgtacgttgtaatacttatcggaaacggcgtgctaatcatcgccagcatacttgatagtcggctacacatgcccatgtattttttcctcggaaacctgtcatttctggacatctgctacacgacttcttcgatcccctctactctcgtatcgttgatttccaagaagagaaacatctcatttagtggctgtgccgtccagatgttttttgggtttgccatggggtccacagagtgctttctgctcggcatgatggcattcgataggtacgtggccatatgtaacccactgaggtaccctattatcatgaataaggttgtttacgtgctcctcacatctgtcagctggttgtccggcgggattaattcaaccgtgcagacctccctagctatgaggtggcccttctgcggaaacaatatcattaaccattttctgtgcgaaattttggcagttctgaaactcgcttgttccgacattagcgtcaacattgtgacactggccgtcagtaacatagcgttcttagtgctccctcttctcgttatcttcttctcatacatgttcatcttatataccatcctcaggaccaatagcgccactggcaggcataaggccttttctacctgttcggcccatctgaccgttgtaatcatcttttacggaacaatcttttttatgtatgcaaagcccaaatctcaggatctactgggcaaagataatctacaggccacagaagggctggtgagcatgttttacggcgtggtgacacccatgctcaatcccatcatctattcgttgcgcaacaaagatgtgaaggcggcgatcaaatatctcctgtcccggaaagcaatcaactag

SEQ ID NO: 19168 - DNA, 957 bp, Artificial Sequence
  derived and/or modified sequence
atggacaaaattaaccaaacatttgtaagggaatttatcctgttgggactcagcggctatcccaaacttgaaataatcttctttgcgctgattctggtgatgtacgtcgttatcttgattggcaacggtgtgttgattatcgcctcaatcctggatagtcgcctgcatatgcccatgtatttctttctgggtaacctctcatttctggacatttgctacaccacatcgtctattccaagcactcttgtgtccctgattagcaagaagcggaacatctcatttagtggctgcgcagtgcagatgttttttggtttcgctatgggtagtaccgagtgctttctgcttggaatgatggccttcgatcgatatgtcgcaatatgtaatcccctgaggtatcctatcatcatgaacaaagtcgtttatgtccttctgacatcagtctcttggttgagcgggggtattaacagcacagtgcagacctcccttgccatgagatggccattttgtggaaataatataattaatcattttctgtgcgaaatcctggccgtgctgaaactggcttgcagcgatatctccgtgaacatcgtaactctggctgtatctaacatcgcctttctggtgttacccttgcttgtcatctttttttcctatatgtttatcctgtataccatactgcgaaccaacagcgcaactggtcggcataaagcctttagcacctgctctgcacatctgactgtggttatcatcttttacggaactatcttcttcatgtatgctaagcccaaaagccaggacttgctgggtaaagacaatctgcaagctacagaggggcttgtgtctatgttctatggcgtggtgactcccatgctgaatccaattatttacagcctgcggaacaaggatgtgaaagccgctataaaatatctccttagtaggaaggccattaatcagtag

SEQ ID NO: 19169 - DNA, 1041 bp, Artificial Sequence
  derived and/or modified sequence
atgttcatccaggtgattttctatatctgctgcctagctgtaaagatcctttatatcggaagcagttttgggatactcaaagccgacatggacaagatcaatcaaacgttcgtccgtgaattcatccttctgggcctgtctggttacccgaagctggagataatctttttcgcattaatcctggtgatgtatgttgtcattctcatcggtaacggtgtcttgattattgctagtatcctcgacagtcgactacatatgcctatgtacttctttcttggcaacttatctttcctggacatctgctataccacttccagcattcctagcactttggtaagtcttatcagcaagaaaaggaacatctcattcagtgggtgcgctgtgcaaatgttcttcggttttgctatgggttcaacggaatgcttccttttgggaatgatggccttcgaccggtacgtggctatatgcaaccccctgcggtatccgatcattatgaataaagtcgtctacgtcttgctgacgagtgtctcatggttgagtggcggaattaattcgaccgtgcagacttctctcgctatgcgctggcctttctgtgggaataacattatcaaccacttcctgtgcgaaattctggctgtcttaaagttggcctgttcagacattagcgtaaacatcgtgaccctggccgtctctaacattgcattcctggtgctccccctgctcgtgatctttttcagctacatgttcatcctctacacaatcctgcgcacaaactcagccaccgggagacacaaagctttctccacgtgttccgctcacctaactgtggtcatcatcttctacggcaccattttcttcatgtatgctaagcccaaatctcaggacctcctgggaaaagataatctccaggctaccgagggactggttagtatgttttacggcgtcgtgacccctatgttgaacccgattatctattctctcagaaataaagacgtcaaagctgctattaagtatttgttatctcgcaaagctataaattag

SEQ ID NO: 19170 - protein, 517 aa, Artificial Sequence
  derived and/or modified sequence
MTVPGGFRSCTETDISSKIFINSTLTPPAGSERHYDATLLTLLVVGSYSLCIIPLLATFTGKKTGNAAVIKYEEKPPKPAFQNGSSGSFYLKPLVSRAHVHLMKTPPKGPSRKNLFTALNAVEKSRQKNPRSLCIQPQTAPDALPPEKTLELTQYKTKCENQSGFILQLKQLLACGNTKFEALTVVIQHLLSEREEALKQHKTLSQELVNLRGELVTASTTCEKLEKARNELQTVYEAFVQQHQAEKTERENRLKEFYTREYEKLRDTYIEEAEKYKMQLQEQFDNLNAAHETSKLEIEASHSEKLELLKKAYEASLSEIKKGHEIEKKSLEDLLSEKQESLEKQINDLKSENDALNEKLKSEEQKRRAREKANLKNPQIMYLEQELESLKAVLEIKNEKLHQQDIKLMKMEKLVDNNTALVDKLKRFQQENEELKARMDKHMAISRQLSTEQAVLQESLEKESKVNKRLSMENEELLWKLHNGDLCSPKRSPTSSAIPLQSPRNSGSFPSPSISPR

SEQ ID NO: 19171 - DNA, 1554 bp, Artificial Sequence
  derived and/or modified sequence
atgaccgtgcccggcggcttcagaagctgcaccgagaccgacatcagcagcaagatcttcatcaacagcaccctgaccccccccgccggcagcgagagacactacgacgccaccctgctgaccctgctggtggtgggcagctacagcctgtgcatcatccccctgctggccaccttcaccggcaagaagaccggcaacgccgccgtgatcaagtacgaggagaagccccccaagcccgccttccagaacggcagcagcggcagcttctacctgaagcccctggtgagcagagcccacgtgcacctgatgaagaccccccccaagggccccagcagaaagaacctgttcaccgccctgaacgccgtggagaagagcagacagaagaaccccagaagcctgtgcatccagccccagaccgcccccgacgccctgccccccgagaagaccctggagctgacccagtacaagaccaagtgcgagaaccagagcggcttcatcctgcagctgaagcagctgctggcctgcggcaacaccaagttcgaggccctgaccgtggtgatccagcacctgctgagcgagagagaggaggccctgaagcagcacaagaccctgagccaggagctggtgaacctgagaggcgagctggtgaccgccagcaccacctgcgagaagctggagaaggccagaaacgagctgcagaccgtgtacgaggccttcgtgcagcagcaccaggccgagaagaccgagagagagaacagactgaaggagttctacaccagagagtacgagaagctgagagacacctacatcgaggaggccgagaagtacaagatgcagctgcaggagcagttcgacaacctgaacgccgcccacgagaccagcaagctggagatcgaggccagccacagcgagaagctggagctgctgaagaaggcctacgaggccagcctgagcgagatcaagaagggccacgagatcgagaagaagagcctggaggacctgctgagcgagaagcaggagagcctggagaagcagatcaacgacctgaagagcgagaacgacgccctgaacgagaagctgaagagcgaggagcagaagagaagagccagagagaaggccaacctgaagaacccccagatcatgtacctggagcaggagctggagagcctgaaggccgtgctggagatcaagaacgagaagctgcaccagcaggacatcaagctgatgaagatggagaagctggtggacaacaacaccgccctggtggacaagctgaagagattccagcaggagaacgaggagctgaaggccagaatggacaagcacatggccatcagcagacagctgagcaccgagcaggccgtgctgcaggagagcctggagaaggagagcaaggtgaacaagagactgagcatggagaacgaggagctgctgtggaagctgcacaacggcgacctgtgcagccccaagagaagccccaccagcagcgccatccccctgcagagccccagaaacagcggcagcttccccagccccagcatcagccccagatag

SEQ ID NO: 19172 - DNA, 1554 bp, Artificial Sequence
  derived and/or modified sequence
atgacagtgcctggaggcttccgctcttgtaccgagacagatatctcaagtaagatcttcatcaactcaacactcaccccacctgcaggtagcgaaagacactacgacgcgacattgctgaccctgctggttgtggggtcttactctctctgcataattcctctgctggcaaccttcaccggcaagaaaaccgggaacgctgccgtcatcaaatacgaggagaaaccccctaaaccagcgtttcaaaatgggagcagtgggagcttctacctgaagccactcgtatcaagagcgcacgtgcacctcatgaagacccccccaaagggaccttcccggaagaatttatttaccgccctgaacgcggtggagaagagtcgccagaagaaccccagatccctctgtattcaaccccagacagcccctgatgcccttccccctgaaaagacactcgagctgacccaatataagaccaaatgcgaaaaccagtcaggatttattttgcagttgaaacagttactcgcatgcggcaacactaagttcgaggcactgacagtggtgatacagcatttgctcagcgaaagagaagaagcgttaaagcagcacaagaccttaagtcaggaattagtgaatctcaggggcgagcttgtcacagcatccaccacgtgtgagaagctggaaaaggcacggaatgaacttcagaccgtctacgaagcttttgttcagcagcaccaagccgaaaagaccgagcgggagaatcggctcaaagagttttatacccgcgaatatgaaaaactacgtgatacctacatcgaggaggcagagaagtacaaaatgcaactgcaggaacagtttgataacctgaacgccgctcacgaaacatctaagttggagatcgaggctagccacagcgagaagctggagctgctgaagaaggcctacgaggcatctttgtcagagattaagaagggacacgagattgaaaaaaagtctctggaggacttgttaagcgaaaagcaggagtccctcgaaaagcaaattaatgatctgaagagcgagaatgacgccctgaacgagaaattaaaaagtgaggaacagaaacggcgcgctagggaaaaggccaatctgaagaacccgcaaatcatgtatctcgagcaggaactggaaagtctgaaagctgtcctggagatcaagaacgaaaagctccatcagcaggacattaagctcatgaaaatggaaaagctagtggacaacaatacggctctggtagacaagttgaagagatttcagcaggagaacgaagaattaaaggcaagaatggacaagcatatggctattagccgccagctctcaacagaacaagccgtgctgcaggagagtcttgagaaagagtctaaagtcaataagcggctctccatggagaatgaagagctgctgtggaaactgcataatggggatctttgtagcccgaagcgttctcccactagttctgccatccctctgcagtctcctcgtaactcaggcagtttccccagcccaagcatctccccacgatag

SEQ ID NO: 19173 - DNA, 1554 bp, Artificial Sequence
  derived and/or modified sequence
atgacagtgcctgggggcttccgcagctgcacagaaacagacatcagcagcaagatcttcatcaacagcaccctgaccccacctgctggcagcgagcggcactatgatgccaccctgctgaccctgctggtggtgggcagctacagcctgtgcatcatccccctgctggccaccttcaccgggaagaagacaggaaatgctgctgtgatcaagtatgaggagaagccacccaagccagccttccagaatggcagcagcggcagcttctacctgaagcccctggtgtcccgggcccacgtgcacctgatgaagaccccacccaagggccccagcaggaagaacctcttcaccgccctgaatgctgtggagaagagccggcagaagaaccccaggagcctgtgcatccagccccagacagccccagatgccctgcccccagagaagaccctggagctgacccagtacaagaccaagtgtgagaaccagagcggcttcatcctgcagctgaagcagctgctggcctgtggcaacaccaagtttgaggccctgactgtggtgatccagcacctgctgtctgagcgggaggaggccctgaagcagcacaagaccctgagccaggagctggtgaacctgcggggggagctggtgacagccagcaccacctgtgagaagctggagaaggccagaaatgagctgcagacagtgtatgaggcctttgtgcagcagcaccaggccgagaagacagaaagagaaaatcggctgaaggagttctacacccgggagtatgagaagctgcgggacacctacatcgaggaggccgagaagtacaagatgcagctgcaggagcagtttgacaacctgaatgctgcccacgagaccagcaagctggagattgaggccagccacagcgagaagctggagctgctgaagaaggcctatgaggccagcctgtctgagatcaagaagggccacgagattgagaagaagagcctggaggacctgctgtctgagaagcaggagagcctggagaagcagatcaatgacctgaagtcagaaaatgatgccctgaatgagaagctgaagtctgaggagcagaagagaagagcccgggagaaggccaacctgaagaacccccagatcatgtacctggagcaggagctggagagcctgaaggctgtgctggagatcaagaatgagaagctgcaccagcaggacatcaagctgatgaagatggagaagctggtggacaacaacacagccctggtggacaagctgaagcgcttccagcaggagaatgaggagctgaaggccaggatggacaagcacatggccatcagccggcagctgagcacagagcaggccgtgctgcaggagagcctggagaaggagagcaaggtgaacaagaggctgtccatggagaatgaggagctgctgtggaagctgcacaatggagacctgtgcagccccaagaggagccccaccagcagcgccatccccctgcagagccccaggaacagcggcagcttccccagccccagcatcagccccaggtag

SEQ ID NO: 19174 - DNA, 3996 bp, Artificial Sequence
  derived and/or modified sequence
agtactgtgtctgatgctcctaaggaggctgtaaagtgcttttgtccattcctttttgtcttttaacaaaggggtttaccatacacccacagagcctgtctagtggcgatgtgttcctgttgcggattaagcattcaaatcagtgagtctctttcttagtttgatttgctagctggtttaatctgttttgtgtagtgccttggagcttacgcatttttttttttttccctccattcgaattcactaagagcaagcatgagggatatgagagtgaacatggctgcagtttttcctgcttaagcttgctttgatccttttaaatgactgtaccaggaggatttcgcagttgtacagaaactgatatttcttcaaaaatctttatcaattctacactcaccccaccggctggttcagagaggcactatgatgctaccttattgacactgctggtcgtgggatcgtacagcctttgtataattcctttgttagccacgtttactgggaaaaaaactggtaatgccgctgtcatcaaatatgaggagaaacctccaaaaccagcatttcagaatggttcctcaggatccttttatttgaagcctttggtatccagggctcatgttcacttgatgaaaactcctccaaaaggtccttcgagaaaaaatttatttacagctcttaatgcagttgaaaagagcaggcaaaagaatcctcgaagcttatgtatccagccacagacagctcccgatgcgctgccccctgagaaaacacttgaattgacgcaatataaaacaaaatgtgaaaaccaaagtggatttatcctgcagctcaagcagcttcttgcctgtggtaataccaagtttgaggcattgacagttgtgattcagcacctgctgtctgagcgggaggaagcactgaaacaacacaaaaccctatctcaagaacttgttaacctccggggagagctagtcactgcttcaaccacctgtgagaaattagaaaaagccaggaatgagttacaaacagtgtatgaagcattcgtccagcagcaccaggctgaaaaaacagaacgagagaatcggcttaaagagttttacaccagggagtatgaaaagcttcgggacacttacattgaagaagcagagaagtacaaaatgcaattgcaagagcagtttgacaacttaaatgctgcgcatgaaacctctaagttggaaattgaagctagccactcagagaaacttgaattgctaaagaaggcctatgaagcctccctttcagaaattaagaaaggccatgaaatagaaaagaaatcgcttgaagatttactttctgagaagcaggaatcgctagagaagcaaatcaatgatctgaagagtgaaaatgatgctttaaatgaaaaattgaaatcagaagaacaaaaaagaagagcaagagaaaaagcaaatttgaaaaatcctcagatcatgtatctagaacaggagttagaaagcctgaaagctgtgttagagatcaagaatgagaaactgcatcaacaggacatcaagttaatgaaaatggagaaactggtggacaacaacacagcattggttgacaaattgaagcgtttccagcaggagaatgaagaattgaaagctcggatggacaagcacatggcaatctcaaggcagctttccacggagcaggctgttctgcaagagtcgctggagaaggagtcgaaagtcaacaagcgactctctatggaaaacgaggagcttctgtggaaactgcacaatggggacctgtgtagccccaagagatcccccacatcctccgccatccctttgcagtcaccaaggaattcgggctccttccctagccccagcatttcacccagatgacacctccccaaagtccacagactctctgaaagcattttgatgcaggtctgcaggactgaccccaaggaggaacgtgggcacaagaggtatatcagcacacgtgtgatcaccgtagggtaactggagcgtcaccaccggcggaatcgcagcttctgagactggaactctggaggaagacttttgcctccgtccaaaagattcctccaaaaaaagatttaaaaaaagatttcggcatcgacacggacgttgttgcacaaagcacttaaagaacgagagcatcttgttcattgcctttttcacctaagcatagggggaaaaactctcagggccctattaagatttataacctttgtaatgttcttcaccacagacaccttcttgtgagttttcagtctgactgtgggggtggggggtgtgaatgaaatggatgtcacagagtgtcatgtgtctgatgcagcctcctctgctgtgtattaaatgtcaaaatctgaatatatctggatatgtactaatcaaataataatcaatcaatcagcatatacatttcagccaaagccatagaagaaaaagcaatagttgcttgaattatgatcatctaccaccaactctgctcagccctgtaacagggtagggagagggtataacaggaagagctttgacttgtccctgtctatacattctctgtatcttttgggggtaacttcttggcagtttttcagtgttcagccatgtcagttgaaactagatttttctgtagattttttacttacccatgtgagcctaacactatcctgtaattcattttctcaggctatgtgtaaatgtagaaccctaatttttctataaaaaaacaaactaactaactaactgtgtaaagaaagaaaaagggaagtaccaatgggtttttccaccttatttttacctttgatctacccttgcagatttaacctgtcttcttccctcccattattctcattttccttttacctttctccaccatccagagccacaaaagcaaaccttctacctcctacctacttttctctgggacaaggataaaggaatatgattttccagagccccagagccagctcatcttccaggtgctgaaaccactttccaaataaactaaagcctggatttgatattacaaattttgggaaatcttagaataaagaacgagaacaaggaagtcattggctagtataattaagaaaggtaggattcagtgcttaccgatgatgcagtacttgatagaagaaaacagtctgggaggatagcgctcatttttcagttaccctttaaggagtccctttgtctttgggaaagtagcagaatggtccgcttctttcccatgagtggaaaatgtggcttgtccaactctcctccaggttgcatttcagtttctttccaaaacttattacctcccctaatcctgagactttggaaaaggtggaaggaagaactgttgctttatctccccctccctgcatgtgtcaacattgtgatgtcagtatttactaatctacattcagtggctgtacaaataacagctgtagtaagaagagattcaggatgctagaggtgaatatttgggtcatttacatgtacactacatagcaagttgatactcatgttgcatgttcttttaaattagtgattttgtgtcttaagtctttaacttccaatacttcatcatgtatgtaaccttccatgtttgcttctgataaatggaaatgtaggttcactgccacttcatgagatatctctgctcacgcttccaagttgttctcaatgacattagccaaagttgggtttgccattcatcccctaggcatggtaaatcttgtgttgttccctgctgtcctccgtattacgtgaccggcaaataaatctcatagcagttaatataaaacatctttggaggatgggagagaacaggagggaagatgggaaacaaaatagagaattcttaagattttgtttaaaccaaatgtttcatgtagaatgcaaaatgttggcacgtcaaaaatatgaatgtgtagacaactgtagttgtgctcagtttgtagtgatgggaagtgtattttactctgatcaaataaataatgctggaatactc

SEQ ID NO: 19175 - DNA, 3650 bp, Artificial Sequence
  derived and/or modified sequence
tatgagagtaagtagctgcataccctggcacttcaggaatactgggatatgtgacttgcaattaaacaggattgttaccagctttactgttggaattttgaaggtgtggcacaaaatcaggcttgcatgtaagagggaactctgaatttgaaaagctggtaatgccgctgtcatcaaatatgaggagaaacctccaaaaccagcatttcagaatggttcctcaggatccttttatttgaagcctttggtatccagggctcatgttcacttgatgaaaactcctccaaaaggtccttcgagaaaaaatttatttacagctcttaatgcagttgaaaagagcaggcaaaagaatcctcgaagcttatgtatccagccacagacagctcccgatgcgctgccccctgagaaaacacttgaattgacgcaatataaaacaaaatgtgaaaaccaaagtggatttatcctgcagctcaagcagcttcttgcctgtggtaataccaagtttgaggcattgacagttgtgattcagcacctgctgtctgagcgggaggaagcactgaaacaacacaaaaccctatctcaagaacttgttaacctccggggagagctagtcactgcttcaaccacctgtgagaaattagaaaaagccaggaatgagttacaaacagtgtatgaagcattcgtccagcagcaccaggctgaaaaaacagaacgagagaatcggcttaaagagttttacaccagggagtatgaaaagcttcgggacacttacattgaagaagcagagaagtacaaaatgcaattgcaagagcagtttgacaacttaaatgctgcgcatgaaacctctaagttggaaattgaagctagccactcagagaaacttgaattgctaaagaaggcctatgaagcctccctttcagaaattaagaaaggccatgaaatagaaaagaaatcgcttgaagatttactttctgagaagcaggaatcgctagagaagcaaatcaatgatctgaagagtgaaaatgatgctttaaatgaaaaattgaaatcagaagaacaaaaaagaagagcaagagaaaaagcaaatttgaaaaatcctcagatcatgtatctagaacaggagttagaaagcctgaaagctgtgttagagatcaagaatgagaaactgcatcaacaggacatcaagttaatgaaaatggagaaactggtggacaacaacacagcattggttgacaaattgaagcgtttccagcaggagaatgaagaattgaaagctcggatggacaagcacatggcaatctcaaggcagctttccacggagcaggctgttctgcaagagtcgctggagaaggagtcgaaagtcaacaagcgactctctatggaaaacgaggagcttctgtggaaactgcacaatggggacctgtgtagccccaagagatcccccacatcctccgccatccctttgcagtcaccaaggaattcgggctccttccctagccccagcatttcacccagatgacacctccccaaagtccacagactctctgaaagcattttgatgcaggtctgcaggactgaccccaaggaggaacgtgggcacaagaggtatatcagcacacgtgtgatcaccgtagggtaactggagcgtcaccaccggcggaatcgcagcttctgagactggaactctggaggaagacttttgcctccgtccaaaagattcctccaaaaaaagatttaaaaaaagatttcggcatcgacacggacgttgttgcacaaagcacttaaagaacgagagcatcttgttcattgcctttttcacctaagcatagggggaaaaactctcagggccctattaagatttataacctttgtaatgttcttcaccacagacaccttcttgtgagttttcagtctgactgtgggggtggggggtgtgaatgaaatggatgtcacagagtgtcatgtgtctgatgcagcctcctctgctgtgtattaaatgtcaaaatctgaatatatctggatatgtactaatcaaataataatcaatcaatcagcatatacatttcagccaaagccatagaagaaaaagcaatagttgcttgaattatgatcatctaccaccaactctgctcagccctgtaacagggtagggagagggtataacaggaagagctttgacttgtccctgtctatacattctctgtatcttttgggggtaacttcttggcagtttttcagtgttcagccatgtcagttgaaactagatttttctgtagattttttacttacccatgtgagcctaacactatcctgtaattcattttctcaggctatgtgtaaatgtagaaccctaatttttctataaaaaaacaaactaactaactaactgtgtaaagaaagaaaaagggaagtaccaatgggtttttccaccttatttttacctttgatctacccttgcagatttaacctgtcttcttccctcccattattctcattttccttttacctttctccaccatccagagccacaaaagcaaaccttctacctcctacctacttttctctgggacaaggataaaggaatatgattttccagagccccagagccagctcatcttccaggtgctgaaaccactttccaaataaactaaagcctggatttgatattacaaattttgggaaatcttagaataaagaacgagaacaaggaagtcattggctagtataattaagaaaggtaggattcagtgcttaccgatgatgcagtacttgatagaagaaaacagtctgggaggatagcgctcatttttcagttaccctttaaggagtccctttgtctttgggaaagtagcagaatggtccgcttctttcccatgagtggaaaatgtggcttgtccaactctcctccaggttgcatttcagtttctttccaaaacttattacctcccctaatcctgagactttggaaaaggtggaaggaagaactgttgctttatctccccctccctgcatgtgtcaacattgtgatgtcagtatttactaatctacattcagtggctgtacaaataacagctgtagtaagaagagattcaggatgctagaggtgaatatttgggtcatttacatgtacactacatagcaagttgatactcatgttgcatgttcttttaaattagtgattttgtgtcttaagtctttaacttccaatacttcatcatgtatgtaaccttccatgtttgcttctgataaatggaaatgtaggttcactgccacttcatgagatatctctgctcacgcttccaagttgttctcaatgacattagccaaagttgggtttgccattcatcccctaggcatggtaaatcttgtgttgttccctgctgtcctccgtattacgtgaccggcaaataaatctcatagcagttaatataaaacatctttggaggatgggagagaacaggagggaagatgggaaacaaaatagagaattcttaagattttgtttaaaccaaatgtttcatgtagaatgcaaaatgttggcacgtcaaaaatatgaatgtgtagacaactgtagttgtgctcagtttgtagtgatgggaagtgtattttactctgatcaaataaataatgctggaatactcaagaattgc

SEQ ID NO: 19176 - DNA, 1554 bp, Artificial Sequence
  derived and/or modified sequence
atgaccgtgcccggcggcttccggagctgcaccgagaccgacatctcttctaagattttcattaacagcactctgacgccacccgctggaagcgaaagacactacgacgcaacactcctgacactgttggttgtgggaagttacagcctatgcatcatacctcttttggcgaccttcaccggcaagaaaaccgggaacgccgcggtcattaagtacgaggaaaagccaccaaagcccgcttttcaaaacggcagttccggatcattctatctcaagcccctggtgtcgagagctcacgtgcatctcatgaagacacccccgaaggggccatcccgcaaaaatctattcacggctctcaacgccgtggagaaatcccgccagaagaacccccgttctctgtgcattcagcctcaaaccgcgccagatgccctgccccccgagaaaacccttgagctgactcagtataaaaccaaatgcgaaaaccagtctggctttattctgcagctgaagcagctgctggcgtgtgggaacaccaaattcgaagccctgactgtcgtgatccaacatctcctgtctgagagggaagaggcgctgaaacagcataaaacgctaagtcaggagcttgtcaatctcagaggggaactggtgactgcgtccactacctgcgaaaagctggagaaggctcggaatgagctgcagaccgtttacgaagcatttgtgcagcaacaccaagctgagaagaccgaacgggagaaccggctgaaggagttctatacacgcgaatacgaaaaactgcgagacacatatattgaggaagctgagaagtacaaaatgcagctccaggaacagtttgataatctaaacgcggcccacgagaccagtaagcttgaaattgaggcaagccatagcgaaaaactggagcttctcaagaaggcctatgaagcctcattgtcagagatcaaaaagggtcacgagattgagaagaagagcttggaggatctgttgagcgaaaagcaagagtccctggagaagcagataaatgacctgaaaagtgaaaacgatgcactgaatgagaagctgaaatctgaggaacagaaacgacgggcccgggaaaaagcaaatttgaagaacccccagataatgtatctcgaacaggagcttgagagcctcaaagcggtcctcgaaattaaaaacgaaaagctccatcagcaggacatcaaattgatgaagatggaaaagctggtagataacaacacagccttggtggacaagctcaagaggttccagcaagagaacgaggaactcaaggcccggatggacaagcacatggcaatctctcgccagctgtctaccgaacaggcagtgcttcaagagtctctggagaaggagagcaaagtgaacaaacgactttccatggaaaacgaggagttgctctggaagctgcataatggggatctgtgcagccctaaacggagtcccacaagcagcgcaatccctctgcagtctccccgaaactcaggcagcttcccatcgccttctatttcaccgaggtag

SEQ ID NO: 19177 - DNA, 1554 bp, Artificial Sequence
  derived and/or modified sequence
atgacggttccgggtgggtttaggtcttgtaccgagaccgatattagttccaagatcttcattaattctactcttacaccacccgcagggtccgaaaggcactatgatgcaaccctgctgaccttgctggtggtcggatcctattctctctgcatcattccgctgctcgctacatttacaggaaagaagaccggcaacgccgctgtcattaaatatgaagaaaaaccgccaaaacctgcctttcaaaacggctcttcaggtagtttttatctaaaacccttagtgtcccgggctcacgtgcacttgatgaaaacgccacctaagggacccagccgaaagaatttgttcaccgccctgaacgccgttgaaaagagcagacaaaagaacccgagatctctgtgcatccagccacaaaccgcgccagacgccctgcctcccgagaagacactggagctcactcagtataaaactaagtgtgaaaaccaaagcggattcatactgcagctgaaacagcttctggcatgcggaaacaccaagttcgaggccctcaccgtggtaatacagcacctcctttcagaacgggaggaggcgctgaagcaacataaaactctgagtcaggagctggtgaatctgcgtggggagctggtgaccgccagcaccacttgcgaaaaactggaaaaggcgaggaatgaactccaaaccgtatatgaagctttcgtgcagcagcatcaggctgagaaaacagagagagaaaatcgactcaaagagttctacactcgggagtatgaaaaactccgagatacctatattgaagaggcagaaaagtacaagatgcaacttcaggagcagtttgataacctcaacgcagcacacgaaacatctaagcttgaaatcgaggcgagccattcggaaaaactcgagctgctaaagaaagcatatgaggccagtctctcagaaataaagaagggccacgagatcgagaagaagtctctcgaggaccttctaagcgaaaaacaggagtccctagagaagcaaatcaacgatctgaaaagcgaaaatgacgctctgaacgagaagctaaaatctgaagagcagaagcggagggccagggagaaggccaacctcaaaaaccctcagattatgtaccttgagcaggagctggaaagcctgaaagctgttctggagatcaagaatgagaaacttcatcagcaggacataaagcttatgaagatggagaaactcgtggacaacaatactgcgctggttgacaaacttaagcgctttcaacaagaaaatgaggagctaaaggcacgcatggataaacatatggctatctcccgccaactcagtaccgaacaggctgtactccaggagtctctggaaaaagagagtaaagtgaacaaacgcctgtccatggagaatgaggaactgctgtggaagctccacaatggcgacctctgctcccccaagcgcagcccaaccagctctgcaatcccactgcagtctcccagaaattcggggagcttccccagccccagcatctcccccagatag

SEQ ID NO: 19178 - protein, 818 aa, Artificial Sequence
  derived and/or modified sequence
MERYKALEQLLTELDDFLKILDQENLSSTALVKKSCLAELLRLYTKSSSSDEEYIYMNKVTINKQQNAESQGKAPEEQGLLPNGEPSQHSSAPQKSLPDLPPPKMIPERKQLAIPKTESPEGYYEEAEPYDTSLNEDGEAVSSSYESYDEEDGSKGKSAPYQWPSPEAGIELMRDARICAFLWRKKWLGQWAKQLCVIKDNRLLCYKSSKDHSPQLDVNLLGSSVIHKEKQVRKKEHKLKITPMNADVIVLGLQSKDQAEQWLRVIQEVSGLPSEGASEGNQYTPDAQRFNCQKPDIAEKYLSASEYGSSVDGHPEVPETKDVKKKCSAGLKLSNLMNLGRKKSTSLEPVERSLETSSYLNVLVNSQWKSRWCSVRDNHLHFYQDRNRSKVAQQPLSLVGCEVVPDPSPDHLYSFRILHKGEELAKLEAKSSEEMGHWLGLLLSESGSKTDPEEFTYDYVDADRVSCIVSAAKNSLLLMQRKFSEPNTYIDGLPSQDRQEELYDDVDLSELTAAVEPTEEATPVADDPNERESDRVYLDLTPVKSFLHGPSSAQAQASSPTLSCLDNATEALPADSGPGPTPDEPCIKCPENLGEQQLESLEPEDPSLRITTVKIQTEQQRISFPPSCPDAVVATPPGASPPVKDRLRVTSAEIKLGKNRTEAEVKRYTEEKERLEKKKEEIRGHLAQLRKEKRELKETLLKCTDKEVLASLEQKLKEIDEECRGEESRRVDLELSIMEVKDNLKKAEAGPVTLGTTVDTTHLENVSPRPKAVTPASAPDCTPVNSATTLKNRPLSVVVTGKGTVLQKAKEWEKKGAS

SEQ ID NO: 19179 - DNA, 2457 bp, Artificial Sequence
  derived and/or modified sequence
atggagagatataaggcactggagcagttgctcacggaactggacgactttctgaagattctcgaccaggagaacctttcttctacggccctcgtgaaaaagtcctgcctggccgagctgttacgcctctatacaaaaagttcaagctccgacgaggaatatatttacatgaacaaggttaccattaacaagcagcagaacgcggagtctcaggggaaagctcctgaagaacaggggctgctacccaacggggagccgtcgcagcattcctccgctccacagaaatcgctcccagacctcccccccccaaagatgatcccggagcggaagcaactggctattcctaagaccgagtcacccgaggggtactacgaggaggccgagccatacgatacgtcactcaatgaggatggagaggcagtgtcctcctcttacgagtcttatgacgaggaggacgggtcaaaaggaaaatccgctccttatcaatggccatcccccgaggcaggtattgaattaatgcgggacgcacgaatttgcgcttttctgtggagaaagaaatggcttgggcaatgggccaagcagttgtgtgtgatcaaggataacaggcttctgtgctacaaatcaagtaaggatcatagccctcagctggatgtaaatctgttaggctcttcagtgattcataaggaaaaacaggttcgcaagaaagagcacaagctgaagatcacgcccatgaatgctgatgtgatcgtcttgggcctgcaaagcaaagaccaggccgagcaatggttaagggtgatccaggaggtgtccggcctcccatccgagggtgctagtgagggaaaccagtatacccctgatgcacaacgttttaactgccagaaaccagacattgccgagaagtacttgtctgcctcagaatatgggtctagtgtggacggccacccggaggtgccggagaccaaggatgtaaaaaaaaagtgttcagccggactcaaattatcgaatctgatgaacttaggtagaaagaaaagcaccagcttggagcctgtggaaagatcactcgaaacgtctagttacttgaatgtcctcgtcaacagccaatggaaaagccgctggtgtagtgtgagagacaatcatttgcatttctaccaagatcgaaatagaagtaaagtggcccaacagcccctgtccctggtggggtgtgaggtagttccggacccttcccccgatcatttgtattcgtttaggatcctgcataagggggaagaactggccaaactggaggcgaaaagttccgaagagatgggccattggttggggttacttctgtccgagagcggtagcaagaccgacccggaggaattcacgtacgactatgtggatgccgaccgagtaagctgcatcgtctcggccgctaagaactcgctgctccttatgcagagaaaattttcggaacccaacacatatattgacggcctgcctagccaggatcgccaggaagagctgtatgacgacgtagatctctccgaactgaccgctgcagtagaaccaaccgaggaggcaacaccagtggccgatgacccgaatgagagggagtctgaccgagtctatctggatttgactcccgtcaagtcattcctgcacggcccaagttctgcccaggcccaagcaagcagcccaactctgtcgtgcctggacaatgcaacagaagcattgccagctgactctggccccggacccaccccagacgagccatgcatcaagtgtccagagaatcttggtgagcagcagctggaaagtctggagcctgaggatccatctctgaggataacaacagtcaagatacagacagaacaacagcgaatcagttttcctccatcctgtccggatgcagtcgtagctacacctccaggcgcaagcccacccgtgaaagatcggctgcgagttacctcagccgagattaagctgggcaagaaccgaacagaggccgaggtcaagcgatacacagaggagaaggagcggctggagaagaagaaagaggagatcagaggtcatcttgcccagctccggaaagaaaaacgggaacttaaagagacccttctgaaatgcaccgacaaggaagtgctggccagcctggagcagaagttaaaggaaattgatgaggagtgcaggggcgaagagtcacgcagggtggatctcgagctgtccatcatggaggtgaaggataatttgaaaaaagcagaggcggggcctgtgaccctgggtacgaccgtggacaccacccatctggaaaacgtaagtcccaggcccaaagccgtgacgcctgccagtgctccagactgtacgcctgtcaattcggctactactctgaaaaaccgcccgctgtctgtggttgtgacagggaagggtacagttttgcagaaggcgaaggagtgggaaaagaagggtgcgtcttag

SEQ ID NO: 19180 - DNA, 2457 bp, Artificial Sequence
  derived and/or modified sequence
atggagcgctacaaggccctggagcagctgctgacagagctggatgacttcctgaagatcctggaccaggagaacctgagcagcacagccctggtgaagaagagctgcctggccgagctgctgcggctgtacaccaagagcagcagcagtgatgaggagtacatctacatgaacaaggtgaccatcaacaagcagcagaatgctgagagccagggcaaggcccctgaggagcagggcctgctgcccaatggagagcccagccagcacagcagcgccccccagaagagcctgcctgacctgcccccacccaagatgatccctgagaggaagcagctggccatccccaagacagagagccctgagggctactatgaggaggccgagccctatgacaccagcctgaatgaagatggagaggccgtgagcagcagctatgagagctatgatgaagaagatggcagcaagggcaagagcgccccctaccagtggcccagccctgaggccggcatcgagctgatgagagatgcccgcatctgtgccttcctgtggaggaagaagtggctgggccagtgggccaagcagctgtgtgtgatcaaggacaaccggctgctgtgctacaagagcagcaaggaccacagcccccagctggatgtgaacctgctgggcagcagcgtcatccacaaggagaagcaggtgaggaagaaggagcacaagctgaagatcacccccatgaatgctgatgtgattgtgctgggcctgcagagcaaggaccaggccgagcagtggctgcgggtcatccaggaggtgtctggcctgcccagcgagggcgccagcgagggcaaccagtacaccccagatgcccagcgcttcaactgccagaagccagacattgctgagaagtacctgagcgcctctgaatatggcagctctgtggatggccaccctgaggtgcctgagaccaaggatgtgaagaagaagtgcagcgctggcctgaagctgagcaacctgatgaacctgggcaggaagaagagcaccagcctggagcctgtggagaggagcctggagaccagcagctacctgaatgtgctggtgaacagccagtggaagagccgctggtgcagcgtgcgggacaaccacctgcacttctaccaggacaggaacagaagcaaggtggcccagcagcccctgagcctggtgggctgtgaggtggtgcctgaccccagcccagaccacctgtacagcttccgcatcctgcacaagggggaggagctggccaagctggaggccaagagcagcgaggagatgggccactggctgggcctgctgctgtctgagagcggcagcaagacagatcctgaggagttcacctatgactatgtggatgctgacagagtgtcctgcatcgtgtctgctgccaagaacagcctgctgctgatgcagaggaagttcagcgagcccaacacctacattgatggcctgcccagccaggaccggcaggaggagctgtatgatgatgtggacctgtctgagctgacagctgctgtggagcccacagaggaggccacccctgtggctgatgaccccaatgaaagagaaagtgacagagtgtacctggacctgacccctgtgaagagcttcctgcacggccccagcagcgcccaggcccaggccagcagccccaccctgagctgcctggacaatgccacagaggccctgcctgctgacagcggccctggccccaccccagatgagccctgcatcaagtgcccagagaacctgggggagcagcagctggagagcctggagcctgaggaccccagcctgcgcatcaccaccgtgaagatccagacagagcagcagaggatctccttcccccccagctgcccagatgctgtggtggccaccccacctggggccagcccccctgtgaaggaccggctgcgggtgaccagcgctgagatcaagctgggcaagaacagaacagaagctgaggtgaagcgctacacagaggagaaggagcggctggagaagaagaaggaggagatccggggccacctggcccagctgaggaaggagaagcgggagctgaaggagaccctgctgaagtgcacagacaaggaggtgctggccagcctggagcagaagctgaaggagattgatgaggagtgccgcggggaggagagcagaagagtggacctggagctgagcatcatggaggtgaaggacaacctgaagaaggccgaggccggccctgtgaccctgggcaccaccgtggacaccacccacctggagaatgtgagcccccggcccaaggctgtgaccccagccagcgccccagactgcacccctgtgaacagcgccaccaccctgaagaaccggcccctgtctgtggtggtgacaggcaagggcaccgtgctgcagaaggccaaggagtgggagaagaagggggccagctag

SEQ ID NO: 19181 - DNA, 2457 bp, Artificial Sequence
  derived and/or modified sequence
atggagcggtacaaggccctggagcagctgctgaccgagctggacgattttttgaagatcttagaccaggagaatctgagctcaactgccctagttaaaaagagttgcctggctgaactgctgcgcctttacaccaagtcaagctcatctgacgaagaatacatatacatgaacaaggtgacaataaacaaacagcagaacgccgagtcacagggcaaggctccagaggagcagggattgctgccaaatggcgagcctagtcaacattccagtgctccccagaagtccctgccggatcttcctccacctaaaatgattcccgagagaaagcagttggcaatccctaagactgaatcacctgaaggatactacgaggaggctgagccttatgacacgagtctcaacgaagacggagaagcagtctcatcctcatacgagagttacgatgaagaagatggttccaaagggaagtctgctccgtatcaatggccctcaccagaggccgggatcgagctaatgagggacgcacgaatctgcgccttcctgtggagaaagaaatggttgggacagtgggcaaagcaactgtgcgtgatcaaagataaccggttgttatgctacaagagttctaaggatcattccccccagcttgacgtaaatctcctgggttccagcgtcatccacaaggagaaacaagtgaggaagaaggagcacaagttgaaaattacccctatgaatgcggacgtgatcgtgctcggtctgcagtctaaagaccaggcagaacagtggctgcgggtgatccaggaagtcagtggactgccgtccgagggcgcgtctgaagggaatcagtacaccccagacgcgcaacggtttaattgccaaaaaccagacattgcggaaaaatacctaagtgcttctgaatatgggtcttcagtcgacggacacccagaggtgcccgaaactaaggatgtcaagaagaaatgttccgcaggcctgaagctgtctaatttaatgaacctgggacggaagaagagtaccagtctcgagcctgtcgagcgaagtttggaaaccagcagctacttgaatgttctcgtgaactcacagtggaagagtcgctggtgctccgttcgcgataaccacctgcatttctaccaggaccggaatagatctaaggtagctcagcaaccactgagcctggtcggttgcgaggttgtgcctgacccaagccctgatcatttatacagcttcagaattttacataagggagaggagttggccaaacttgaggccaagagttctgaggaaatggggcattggctgggactgctgctaagcgaatcagggagtaagactgatccagaagaattcacctacgactacgttgacgctgaccgggttagctgcattgtatccgccgccaagaactccttactgcttatgcaacgcaaattcagcgagcctaacacatacatcgacggactgccgtcccaagacaggcaagaagaactctatgacgacgtcgacctctctgagctgacagccgccgtcgagcccactgaagaagccacacctgtggccgatgacccgaacgagagggagtccgacagggtctatctcgacctgacacctgttaagagcttcttacatggcccctcttccgcccaagctcaggcatcatctcctacactttcttgtctagataacgctacagaggcactccccgctgactccggccctggaccgacccccgacgagccctgtatcaaatgccctgaaaacttgggagagcaacagctggaatccttagaacccgaggatccaagcctccgtatcactactgtgaagatccagacagagcagcagcggattagcttccccccttcgtgtcccgacgcagttgtcgctacacctccaggggccagcccccctgtgaaagaccgcctgagagtgacttctgcagaaattaagttgggaaagaatcgaacggaggccgaggtgaaaagatacaccgaagagaaggaacgcctggaaaagaagaaagaggaaattaggggtcatttagcccagctccgtaaggagaaacgtgagttgaaagagacattgctgaagtgcaccgacaaagaggtcctggcctcgctagagcaaaaactaaaggaaatcgacgaggagtgtaggggcgaggagtcccgccgcgtggatctcgagttgtctattatggaagtgaaagacaacctgaagaaagcggaggccggccctgttacattaggtacaactgtagacactacccacctcgaaaatgtaagcccgcgacctaaggccgtaacgccagcatctgcacccgattgcacccctgtaaactcagccaccaccctgaagaatcgaccactatccgtggtcgtcacaggtaaaggcactgttcttcagaaggctaaggaatgggaaaagaagggcgctagctag

SEQ ID NO: 19182 - DNA, 2457 bp, Artificial Sequence
  derived and/or modified sequence
atggaaaggtataaagctttggagcaattactcacagaattagacgacttcctgaaaattctcgatcaggagaatttgtcctccacagcattggtgaaaaaaagctgtctcgctgaactgttaaggctgtacacaaaatcctcatctagcgacgaagagtacatttacatgaacaaagtgaccataaacaagcagcaaaacgcggagagccagggtaaggcaccagaagaacagggactgttgcctaacggtgaaccaagtcaacactcctccgcaccacaaaaaagcctccctgacctcccgccaccaaaaatgatccctgagagaaagcagctcgccattcctaaaactgagagcccagagggctattacgaagaggctgaaccttatgacacaagtctgaacgaggatggcgaggctgtgagcagtagctacgaaagttacgatgaggaagacggatcaaagggcaagtctgcaccctaccagtggccctctcccgaggccggtatcgagttgatgagggatgcccgaatctgtgccttcttgtggaggaagaaatggctgggccaatgggcgaaacagctgtgtgtcattaaggataatcggctcctgtgctataaatcctctaaagatcattccccacagctggatgtcaatctgctcggcagtagcgtgatacacaaggaaaagcaagtgcggaagaaggaacataaattgaagatcacccctatgaatgccgatgtgattgtgctggggctccagtcaaaggaccaggctgaacagtggttgagagttatccaggaggtatctgggcttccaagtgagggcgcttcagaggggaaccagtacacacccgatgcacagagatttaactgccagaaaccggacatcgccgaaaaatatctttctgcgagtgagtacggaagttctgtagacggtcaccctgaagtccctgaaacgaaagacgtgaaaaagaagtgcagtgccggactgaaattgtcaaatctcatgaacctggggaggaagaaatcgacgtcattagagccggtcgagcgatccctcgaaacatcttcttatctgaatgtgttggtgaacagccagtggaagtcgcgatggtgctctgtacgagacaaccatctgcatttttaccaggacagaaaccgatcaaaggtggcccagcagccactgtccctcgtcggttgcgaagttgtgcctgacccttcaccagaccacctgtatagcttcaggatccttcacaaaggcgaagagctggccaaactcgaagccaagtctagtgaggagatgggccattggcttggtctgctgctgagcgaatctgggagtaagaccgaccccgaggaattcacgtatgattacgtggacgctgatcgggtctcctgtatcgtgagcgctgcaaagaattcgctgctactgatgcaaagaaagttcagcgagcccaacacatacatcgacgggctgccatctcaggatcgccaggaggagctgtacgatgatgtagacctttctgagctgacagccgcagttgaaccaaccgaggaagcgactccagtggcggacgacccgaacgagcgagaaagtgatcgcgtgtatttggacctgacacccgtgaagagctttctgcacggtccatcgtccgcccaggctcaagcctccagtccaaccctcagctgcctggacaatgcaacagaggcactgcccgcagactctgggcctgggccaactcccgacgaaccatgtatcaagtgccccgaaaatcttggcgagcagcagcttgagtccctagaacccgaggatccctcgctgagaattacaaccgtgaagattcaaacagaacaacaacgtatctcttttccacctagctgccctgacgcagtcgttgctacaccaccgggtgcttcaccccctgtcaaagacagactacgggtgactagtgccgaaatcaaactcgggaaaaatagaacagaggcagaagttaaacgctacacagaagagaaagaaaggctcgagaagaagaaggaggagattaggggacacttggcgcagcttcggaaagagaaacgggaactcaaggaaaccctattgaagtgcaccgataaggaagtgctggcgtcactcgaacaaaaacttaaggaaatagacgaagaatgtcggggagaagaaagtagacgcgttgatcttgagttgtctatcatggaagtgaaagacaatctgaagaaggcggaggcaggacctgttacattggggacaaccgttgatacaactcacctagagaacgtgtctccaagacccaaggcagtgaccccagcttctgcacctgattgtacccctgttaactccgcaacaaccttgaaaaataggccactgagtgtggtggtgacaggcaagggcaccgtgctgcaaaaggctaaagaatgggagaagaagggtgcgagctag

SEQ ID NO: 19183 - DNA, 3705 bp, Artificial Sequence
  derived and/or modified sequence
gagccgcgaggagcgcactccgtggccccgatggagcggtacaaagccctggaacagctgctgacagagttggatgacttcctcaagattcttgaccaggagaacctgagcagcacagcactggtgaagaagagctgcctggcggagctcctccggctttacaccaaaagcagcagctctgatgaggagtacatttatatgaacaaagtgaccatcaacaagcaacagaatgcagagtctcaaggcaaagcgcctgaggagcagggcctgctacccaatggggagcccagccagcactcctcggcccctcagaagagccttccagacctcccgccacccaagatgattccagaacggaaacagcttgccatcccaaagacggagtctccagagggctactatgaagaggctgagccatatgacacatccctcaatgaggacggagaggctgtgagcagctcctacgagtcctacgatgaagaggacggcagcaagggcaagtcggccccttaccagtggccctcgccggaggccggcatcgagctgatgcgtgacgcccgcatctgcgccttcctgtggcgcaagaagtggctgggacagtgggccaagcagctctgtgtcatcaaggacaacaggcttctgtgctacaaatcctccaaggaccacagccctcagctggacgtgaacctactgggcagcagcgtcattcacaaggagaagcaagtgcggaagaaggagcacaagctgaagatcacgccgatgaatgccgatgtgattgtgctgggcctgcagagcaaggaccaggctgagcagtggctcagggtcatccaggaagtgagcggcctgccttccgaaggagcatctgaaggaaaccagtacaccccggatgcccagcgctttaactgccagaaaccagatatagctgagaagtacctgtcggcttcagagtatgggagctccgtggatggccaccctgaggtcccagaaaccaaagacgtcaagaagaaatgttctgctggcctcaaactgagcaacctaatgaatctgggcaggaagaaatccacctcactggagcctgtggagaggtccctcgagacatccagttacctgaacgtgctggtgaacagccagtggaagtctcgctggtgctctgtcagggacaatcacctgcacttctaccaggaccggaaccggagcaaggtggcccagcaacccctcagcctggtgggctgcgaggtggtcccagaccccagccccgaccacctctactccttccgcatcctccacaagggcgaggagctggccaagcttgaggccaagtcttccgaggaaatgggccactggctgggtctcctgctctctgagtcaggctccaagacagacccagaagagttcacctacgactatgtggatgccgatagggtctcctgtattgtgagtgcggccaaaaactctctcttactgatgcagagaaagttctcagagcccaacacttacatcgatggcctgcctagccaggaccgccaggaggagctgtatgacgacgtggacctgtcagagctcacagctgcggtggagcctaccgaggaagccacccctgttgcagatgacccaaatgagagagaatctgaccgagtgtacctggacctcacacctgtcaagtcctttctgcatggccccagcagtgcacaggcccaggcctcctccccgacgttgtcctgcctggacaatgcaactgaggccctcccggcagactcaggcccaggtcccaccccagatgagccctgcataaagtgtccagagaacctgggagaacagcagctggagagtttggagccagaggatccttccctgagaatcaccaccgtcaaaatccagacggaacagcagagaatctccttcccaccgagctgcccggatgccgtggtggccaccccacctggtgccagcccacctgtgaaggacaggttgcgcgtgaccagtgcagagatcaagcttggcaagaatcggacagaagctgaggtgaagcggtacacagaggagaaggagaggcttgaaaagaagaaggaagaaatccgggggcacctggctcagctccggaaagagaaacgggagctaaaggaaaccctactgaaatgcacagacaaggaagtcctggcgagcctggagcagaagctgaaggaaattgacgaggagtgccggggcgaggagagcaggcgcgtggacctggagctcagcatcatggaggtgaaggacaacctgaagaaggctgaggcagggcctgtgacgttaggcaccaccgtggacaccacccacctggagaatgtgagcccccgccccaaagctgtcacacctgcctctgccccagactgtaccccagtcaactctgcaaccacactcaagaacaggcctctctcggtcgtggtcacaggcaaaggcactgtactccagaaagccaaggaatgggagaagaaaggagcaagttagaaaacaagcttcatctaaagactctcatgtcaatgtggaccttggtgacaatcctgctttgttaaagcaaaaactatgcgaaagggtgagtctgtttagaagaaaaagcaaagactgaggtactgtgaatggagagcttcagctaagaggaggctctgtcccttttcagagccaaaggaaataatacaacaaaaaggaggcttctttggagacctaagtctattggatgtaaacaagacgttgtatttagggatgttctgtgtttctttcttttttgaagttgtcatcaattgctttactaagatttttaaatagtgaaaacctcctgtttagactttggtggaagatgaatcaaggaagcagggccctgtcttatgggtcacgtgtctttggtgagtgagaagacctaaactcctggccatcatctcttatccaatacttagcagttggggattaaaccatccttgccttcagttctctccaatattaccaggcccaactcagtcttcagtgattttaaacagcattgacatcatctgtaaaaccatcatctgtaaaaccatctatgacatgagttttgagaaacaataatggggaaaatatttgggaccaagctgaagcactaatcccactaagttaaagacttctttccagtccaaggcaggcctgaatcaactgtctttaaataaaattttaagtgatgctgtattatatataggaaaaaatgcttaaaatcctgtcatttagaacagtgaaaagtatcttttgagattaaagtgactctttactgtaggaaaaatattactctgtgtttacagattcattgctgtggtcaggccatttttaagggaagagttatttaatataaatagtctctgattttaagttctgtttaatgttcattctccttccaagaacaaagtggtgatttttggttagggtgatcgccctcttaaaattggcagtgctgttccttgtgctgcccctgtcttttcctctgatggcatttttttttttttttttttaacacaggttgaaacatttcatctattatctctgcctcatttctggagggttgtgtatcagttctctaacacttgttcctgagaactaaatgtcttttttattcttatttcctctctcataaacatttggtgaccttttaccaagtggtgagttagttaggttttttaaaataaaatgttcattgtatttgaa

SEQ ID NO: 19184 - DNA, 2457 bp, Artificial Sequence
  derived and/or modified sequence
atggagagatacaaggccctggagcagctgctgaccgagctggacgacttcctgaagatcctggaccaggagaacctgagcagcaccgccctggtgaagaagagctgcctggccgagctgctgagactgtacaccaagagcagcagcagcgacgaggagtacatctacatgaacaaggtgaccatcaacaagcagcagaacgccgagagccagggcaaggcccccgaggagcagggcctgctgcccaacggcgagcccagccagcacagcagcgccccccagaagagcctgcccgacctgcccccccccaagatgatccccgagagaaagcagctggccatccccaagaccgagagccccgagggctactacgaggaggccgagccctacgacaccagcctgaacgaggacggcgaggccgtgagcagcagctacgagagctacgacgaggaggacggcagcaagggcaagagcgccccctaccagtggcccagccccgaggccggcatcgagctgatgagagacgccagaatctgcgccttcctgtggagaaagaagtggctgggccagtgggccaagcagctgtgcgtgatcaaggacaacagactgctgtgctacaagagcagcaaggaccacagcccccagctggacgtgaacctgctgggcagcagcgtgatccacaaggagaagcaggtgagaaagaaggagcacaagctgaagatcacccccatgaacgccgacgtgatcgtgctgggcctgcagagcaaggaccaggccgagcagtggctgagagtgatccaggaggtgagcggcctgcccagcgagggcgccagcgagggcaaccagtacacccccgacgcccagagattcaactgccagaagcccgacatcgccgagaagtacctgagcgccagcgagtacggcagcagcgtggacggccaccccgaggtgcccgagaccaaggacgtgaagaagaagtgcagcgccggcctgaagctgagcaacctgatgaacctgggcagaaagaagagcaccagcctggagcccgtggagagaagcctggagaccagcagctacctgaacgtgctggtgaacagccagtggaagagcagatggtgcagcgtgagagacaaccacctgcacttctaccaggacagaaacagaagcaaggtggcccagcagcccctgagcctggtgggctgcgaggtggtgcccgaccccagccccgaccacctgtacagcttcagaatcctgcacaagggcgaggagctggccaagctggaggccaagagcagcgaggagatgggccactggctgggcctgctgctgagcgagagcggcagcaagaccgaccccgaggagttcacctacgactacgtggacgccgacagagtgagctgcatcgtgagcgccgccaagaacagcctgctgctgatgcagagaaagttcagcgagcccaacacctacatcgacggcctgcccagccaggacagacaggaggagctgtacgacgacgtggacctgagcgagctgaccgccgccgtggagcccaccgaggaggccacccccgtggccgacgaccccaacgagagagagagcgacagagtgtacctggacctgacccccgtgaagagcttcctgcacggccccagcagcgcccaggcccaggccagcagccccaccctgagctgcctggacaacgccaccgaggccctgcccgccgacagcggccccggccccacccccgacgagccctgcatcaagtgccccgagaacctgggcgagcagcagctggagagcctggagcccgaggaccccagcctgagaatcaccaccgtgaagatccagaccgagcagcagagaatcagcttcccccccagctgccccgacgccgtggtggccaccccccccggcgccagcccccccgtgaaggacagactgagagtgaccagcgccgagatcaagctgggcaagaacagaaccgaggccgaggtgaagagatacaccgaggagaaggagagactggagaagaagaaggaggagatcagaggccacctggcccagctgagaaaggagaagagagagctgaaggagaccctgctgaagtgcaccgacaaggaggtgctggccagcctggagcagaagctgaaggagatcgacgaggagtgcagaggcgaggagagcagaagagtggacctggagctgagcatcatggaggtgaaggacaacctgaagaaggccgaggccggccccgtgaccctgggcaccaccgtggacaccacccacctggagaacgtgagccccagacccaaggccgtgacccccgccagcgcccccgactgcacccccgtgaacagcgccaccaccctgaagaacagacccctgagcgtggtggtgaccggcaagggcaccgtgctgcagaaggccaaggagtgggagaagaagggcgccagctag

SEQ ID NO: 19185 - protein, 503 aa, Artificial Sequence
  derived and/or modified sequence
MSSILEERILGADTSVDLEETGRVLSIGDGIARVHGLRNVQAEEMVEFSSGLKGMSLNLEPDNVGVVVFGNDKLIKEGDIVKRTGAIVDVPVGEELLGRVVDALGNAIDGKGPIGSKTRRRVGLKAPGIIPRISVREPMQTGIKAVDSLVPIGRGQRELIIGDRQTGKTSIAIDTIINQKRFNDGSDEKKKLYCIYVAIGQKRSTVAQLVKRLTDADAMKYTIVVSATASDAAPLQYLAPYSGCSMGEYFRDNGKHALIIYDDLSKQAVAYRQMSLLLRRPPGREAYPGDVFYLHSRLLERAAKMNDAFGGGSLTALPVIETQAGDVSAYIPTNVISITDGQIFLETELFYKGIRPAINVGLSVSRVGSAAQTRAMKQVAGTMKLELAQYREVAAFAQFGSDLDAATQQLLSRGVRLTELLKQGQYSPMAIEEQVAVIYAGVRGYLDKLEPSKITKFENAFLSHVVSQHQALLGTIRADGKISEQSDAKLKEIVTNFLAGFEA

SEQ ID NO: 19186 - protein, 553 aa, Artificial Sequence
  derived and/or modified sequence
MLSVRVAAAVVRALPRRAGLVSRNALGSSFIAARNFHASNTHLQKTGTAEMSSILEERILGADTSVDLEETGRVLSIGDGIARVHGLRNVQAEEMVEFSSGLKGMSLNLEPDNVGVVVFGNDKLIKEGDIVKRTGAIVDVPVGEELLGRVVDALGNAIDGKGPIGSKTRRRVGLKAPGIIPRISVREPMQTGIKAVDSLVPIGRGQRELIIGDRQTGKTSIAIDTIINQKRFNDGSDEKKKLYCIYVAIGQKRSTVAQLVKRLTDADAMKYTIVVSATASDAAPLQYLAPYSGCSMGEYFRDNGKHALIIYDDLSKQAVAYRQMSLLLRRPPGREAYPGDVFYLHSRLLERAAKMNDAFGGGSLTALPVIETQAGDVSAYIPTNVISITDGQIFLETELFYKGIRPAINVGLSVSRVGSAAQTRAMKQVAGTMKLELAQYREVAAFAQFGSDLDAATQQLLSRGVRLTELLKQGQYSPMAIEEQVAVIYAGVRGYLDKLEPSKITKFENAFLSHVVSQHQALLGTIRADGKISEQSDAKLKEIVTNFLAGFEA

SEQ ID NO: 19187 - DNA, 1662 bp, Artificial Sequence
  derived and/or modified sequence
atgttgtctgtccgcgttgccgcagctgtcgtgcgggcattgcctcgtcgagccggactcgtgtcccgtaacgccctgggcagctctttcattgccgctcggaattttcacgcgtccaacactcatttacagaagactggtacggcagagatgtcttctatcttggaggagcgaatcctcggcgcggacaccagcgttgatttggaggaaactggacgcgtgctgagtatcggagacggaattgctcgagtccacgggctgcgaaacgtgcaagccgaagagatggtggagttctcttctgggctcaaggggatgagtttaaacctggaacccgacaatgtgggggtcgtcgtgttcggcaatgataagctgatcaaggaaggggacattgtcaagaggacgggggccattgtggatgtgccagtgggcgaagaactcctgggacgcgtcgtggacgcattaggcaatgcaatcgacggcaagggtcctatcggatctaaaacaagacgacgggtggggcttaaagctcccgggataattccacgcatctccgtccgggaacctatgcaaacaggcattaaagcagtggattctctcgtccccataggacgggggcagcgtgaactgatcattggggaccgacagaccggaaaaaccagcattgccatagataccattattaaccagaaacgctttaatgacgggagcgacgagaagaagaaactctattgcatatacgtggcaataggccaaaagcgatctacagtggcacaattggtgaagcggttaacagatgccgatgcgatgaaatacacaatcgtggtttccgctactgcctcagacgccgctccactgcagtatctcgctccctattccggttgttctatgggagaatactttcgcgacaatggcaaacatgcactgatcatttatgacgacttgtcgaagcaagccgtggcataccgacaaatgtccctgctgcttcggaggccacccggccgagaagcctaccccggcgatgtgttttacctccactcaaggcttctcgagcgcgcggcaaaaatgaatgacgcttttggtggggggtcgctgaccgcattaccggtgatcgagacacaggcaggggatgtgtcagcatatatcccgacaaatgtgatatcaatcacggatggacaaatcttcctcgagaccgaactgttctataagggcatcaggccggctataaacgtcggactatcagtgagtcgggtcggtagcgcagcccagaccagagctatgaagcaggtggccggtactatgaagctcgagcttgcacagtatagggaagtcgcagcattcgcccagttcggttcggacctggatgccgccactcagcagctgttgtcccgcggtgtgaggttgactgagctcttgaagcagggccagtatagcccaatggccatcgaggagcaggtggccgtgatatatgctggcgttaggggatatctggacaaactggagccatcaaaaatcacgaaatttgaaaatgccttcctctctcacgtcgtgagtcagcatcaggccctgctgggaactatccgcgccgatgggaagatctccgaacagtccgacgcaaaattgaaggagattgtgactaacttcttggcgggatttgaggcttag

SEQ ID NO: 19188 - DNA, 1662 bp, Artificial Sequence
  derived and/or modified sequence
atgctgtcagtgagagttgctgccgcggtcgtaagggcacttccaaggcgggccggattagtgtcgcgcaacgcactgggaagttctttcatagccgctaggaacttccacgcaagcaacacccatcttcagaagaccggcactgccgagatgagttccatactggaagagagaatccttggagccgacacttcagttgatctcgaagaaacaggccgcgttctatcgataggtgacggaattgctcgcgtgcacggtttgagaaatgtccaggctgaggagatggtggagttcagctccgggttgaaaggcatgtccctgaatctcgagcctgacaatgtcggtgtggtcgtttttggcaacgataaactcatcaaggagggagatatagtcaagcggaccggggccatcgttgacgtacccgtcggagaagagctgctaggtagagtggttgatgcactgggcaacgccatcgacgggaaaggtccgatcggatctaagacaaggaggcgagtaggcttgaaggctcctggaattatccctcgcattagcgttcgcgagcctatgcaaacagggatcaaagcggtggatagcttagtgccaatagggcgaggccagcgtgagctgatcatcggagatcgccagaccggtaagacgtctatcgctatcgacactattattaaccagaagaggtttaatgatggctccgacgaaaagaagaagctatactgcatctatgttgctatcggacaaaagcgaagcacagtggctcagctcgtaaagcgcctgaccgacgcggatgccatgaagtacacaattgtagtttctgctacagcctctgatgctgcccctctccagtatctagccccttactcagggtgttccatgggcgaatatttccgggacaatgggaaacacgcgctgatcatttacgacgatctgtctaagcaagcggtggcatatcgacagatgtctctgctgctaaggagacctccaggaagggaggcatatcccggagatgtgttctatctgcattctagactcctggagcgggccgccaaaatgaatgatgcgtttgggggggggagcctgaccgccctgccagtgatcgagactcaggccggcgacgtctccgcttatatcccgactaatgtgatcagcatcactgatggccagattttcctagagacagaactattctacaagggcattcgtcctgcaatcaatgtgggactttccgtctcgcgggttgggagtgctgcacaaactcgggcgatgaaacaagtggcaggaactatgaagctcgagcttgcacagtaccgggaggtggctgcgtttgctcagtttggttctgacctggatgccgctacccaacagctgctgtcaagaggggttcgccttacagagctgcttaagcagggtcaatattctccaatggcaattgaagaacaggtcgctgtgatctatgccggagtgcgaggatatctggacaaactggagccttcgaagataacaaaattcgagaacgctttcctgtcccatgtcgtaagtcagcaccaagcgctcctgggtactatcagggcggacggcaaaatctctgaacagagcgatgctaagctgaaagaaatcgtaacaaacttcctggcaggattcgaagcttag

SEQ ID NO: 19189 - DNA, 1662 bp, Artificial Sequence
  derived and/or modified sequence
atgctgtctgtgcgggtggccgctgctgtggtgcgggccctgccccggcgggccggcctggtgtccagaaatgccctgggcagcagcttcatcgccgccaggaacttccacgccagcaacacccacctgcagaagacaggaacagctgagatgagcagcatcctggaggagcgcatcctgggcgctgacacctctgtggacctggaggagaccggccgggtgctgagcattggagatggcatcgcccgggtgcacggcctgagaaatgtgcaggccgaggagatggtggagttcagcagcggcctgaagggcatgagcctgaacctggagccagacaacgtgggcgtggtggtgtttggaaatgacaagctgatcaaggagggggacatcgtgaagaggactggagccatcgtggatgtgcctgtgggggaggagctgctgggccgggtggtggatgccctgggcaatgccattgatggcaagggccccatcggcagcaagacccggcggcgggtgggcctgaaggcccctggcatcatcccccgcatctctgtgcgggagcccatgcagacaggcatcaaggctgtggacagcctggtgcccatcggccggggccagcgggagctgatcattggagaccggcagacaggcaagaccagcatcgccatcgacaccatcatcaaccagaagcgcttcaatgatggcagtgatgagaagaagaagctgtactgcatctacgtggccatcggccagaagaggagcacagtggcccagctggtgaagaggctgacagatgctgatgccatgaagtacaccatcgtggtgtctgccacagccagtgatgctgcccccctgcagtacctggccccctacagcggctgcagcatgggagagtacttccgggacaatggcaagcacgccctgatcatctatgatgacctgagcaagcaggccgtggcctaccggcagatgagcctgctgctgcggcggcccccaggccgggaggcctacccaggagatgtgttctacctgcacagccggctgctggagcgggccgccaagatgaatgatgcctttggaggcggcagcctgacagccctgcccgtcatcgagacccaggccggagatgtgtctgcctacatccccaccaacgtcatcagcatcacagatggccagatcttcctggagacagagctgttctacaagggcatccggcctgccatcaacgtgggcctgtctgtgtcccgggtgggcagcgctgcccagacccgggccatgaagcaggtggccggcaccatgaagctggagctggcccagtaccgggaggtggccgcctttgcccagtttggaagtgacctggatgctgccacccagcagctgctgagccggggcgtgcggctgacagagctgctgaagcagggccagtacagccccatggccatcgaggagcaggtggccgtcatctatgctggggtgcggggctacctggacaagctggagcccagcaagatcaccaagtttgaaaatgccttcctgagccacgtggtgtcccagcaccaggccctgctgggcaccatccgggcagatggcaagatcagcgagcagagtgatgccaagctgaaggagatcgtgaccaacttcctggccggctttgaggcctag

SEQ ID NO: 19190 - DNA, 1662 bp, Artificial Sequence
  derived and/or modified sequence
atgctgagcgtgcgggtggccgccgccgtggtgcgggccctgcccaggcgcgccgggctggtttctagaaacgcattgggatccagcttcatcgctgcaaggaatttccatgcctccaacacccatctgcagaaaaccggaactgccgaaatgagctcaatcttagaggaacgcattctgggcgccgacacctctgtggacctggaagaaacgggcagagtgctttctatcggagatggcatcgctcgggtacacggattgagaaatgtccaggcggaggaaatggtggagtttagctcagggctgaagggcatgtctctgaatctggagcccgataatgtgggtgtggtggtgtttgggaacgacaagttgattaaagaaggcgacatagtcaaacggaccggcgcaatagtcgacgtaccggtcggagaagagcttctgggcagggttgtggacgctctgggtaacgccatcgatgggaagggacccatcggcagtaagactaggaggcgggtgggactcaaagcccccggcataatcccacgaatctccgtgcgagagccgatgcagactgggattaaagctgtggactcactggtgccgattggccgggggcagagagaattaatcataggagatagacaaactggcaagacatccatcgcgattgacactattataaaccagaaaaggttcaatgacggctccgacgaaaagaagaaactatattgcatatatgttgctattggccagaagagatccaccgtggcccaactggtaaaaaggttaacagatgccgatgccatgaaatacacaatcgttgtatcggccactgcctccgatgcggcacctctgcaatatctggctccgtatagtgggtgctccatgggcgaatacttcagagataacggtaagcatgctttgattatctatgacgacctaagtaaacaggctgtggcttatagacagatgagtttactgctgcgtcgtcctcccggacgcgaagcataccccggcgacgtattttaccttcactctagactgttggaacgagcggccaaaatgaatgatgcatttggaggtgggtccctgacagcactccccgtcatcgaaacccaagctggtgacgtcagtgcctatattccaaccaatgtcattagcatcactgatgggcagattttcttggagaccgagctattctacaaagggatcaggcctgccattaatgtgggtctgtctgtgtcccgcgtgggctcggcagcacaaacacgggctatgaagcaggttgctggtaccatgaaactcgaactggctcaataccgtgaagtagcagcctttgctcagttcggctccgacctggacgctgccactcagcagctgctctccagaggcgtgcgcctcaccgagctgttaaagcagggccaatactcccctatggcgatcgaggaacaggttgctgtgatttacgctggggttcgtggctatctggacaagcttgagccgtctaaaatcacaaagttcgaaaatgcgttcctctcacacgtggtctcccaacaccaagccctcttggggacaatcagagccgatggcaagatcagcgaacagtcagatgccaagctgaaagagatcgtgaccaactttctggctgggttcgaggcctag

SEQ ID NO: 19191 - DNA, 1662 bp, Artificial Sequence
  derived and/or modified sequence
atgctgagcgtgcgggtggccgccgccgtggtgcgggccctgcccaggagagcgggcctcgtatctcgcaacgcattgggctcaagcttcatcgctgcgcgaaatttccatgcctccaacacacacctgcagaaaactggaactgccgagatgtcatcgatattggaggagcggatacttggggccgacacttccgtcgacttggaggagacagggcgagttctgtccattggagacggcattgcaagagtgcacggcctccgaaatgtgcaggccgaggagatggtcgagttctcgtccgggcttaaagggatgtcacttaatcttgagcccgacaatgtgggtgtcgtggtgttcggaaatgataagctgatcaaggagggcgatattgtgaagcgtacaggcgccatagtggatgtaccggtgggcgaagagctccttgggcgcgttgtggacgctttagggaacgctatcgacggtaagggcccaatcggttctaagacacgccgccgggttggtctcaaggcccccggtattattccacgcatctctgttagggaacccatgcagacagggattaaggctgtggacagcctcgtaccaatcggtcgcggacagcgagagctaataatcggggaccggcagaccggaaaaaccagtatcgcaattgacactatcataaaccagaagaggttcaatgacggcagcgatgaaaaaaaaaagctctactgcatctatgtggcgatagggcaaaagagatccactgttgcacagctggtgaaacggctgacggacgccgacgccatgaagtataccatcgtggtttctgcaacagcttctgacgcagccccgcttcagtatcttgcaccatacagtggctgcagcatgggcgaatatttccgcgataacggaaagcacgccctgattatttacgacgacctgtccaagcaggccgttgcttataggcaaatgagtttacttctgcgtagacctccggggcgcgaagcatacccaggcgacgtcttctaccttcattctcgactgctcgagcgggcagccaaaatgaacgatgctttcggtggtggcagcttgaccgccttaccagtgatcgagactcaagccggcgatgtttccgcttatatacctactaatgtgatttccataactgacggacagatttttctagaaacagagttgttttacaaaggtattcggccagcaatcaatgtgggcctgtccgtctcaagggtagggagcgctgctcagactcgagcaatgaagcaagtggccggaacgatgaagctagagctggctcaataccgagaggtagccgcattcgcgcaatttgggagcgatctggacgcagccactcaacaactgttgtctagaggagtccgattgacagagttacttaagcaggggcaatactccccaatggctatagaggagcaggtcgctgtcatctatgctggtgtaagagggtatctggataagctcgagccatctaagatcacaaagtttgaaaatgcttttctttctcacgtggtctcacaacatcaggccttgctggggacaatccgcgctgacggcaagattagtgagcagagtgatgccaagttgaaagaaatcgtgacaaatttcctggccgggtttgaagcctag

SEQ ID NO: 19192 - DNA, 1662 bp, Artificial Sequence
  derived and/or modified sequence
atgctctcagtacgggtggctgcagccgtggttagagctctaccgaggcgggcaggacttgtgtctcgcaacgcccttggctccagtttcattgcagcccgtaatttccacgcttccaatacccatctgcaaaaaaccggaactgccgaaatgtcttccatactggaggaaagaattctcggagccgacacgagcgtcgacctcgaggagaccggtagggtactctcaatcggcgatggaatagccagagtgcacggactccggaatgtgcaggctgaggagatggtcgagtttagctccgggctcaaaggcatgtctttgaatctcgaacctgacaatgtcggcgtcgtagtattcgggaatgataagctgatcaaagagggcgacatcgttaagcgtaccggcgctatcgtggatgtgcctgtaggtgaggaacttctggggagggtggttgacgcactcgggaacgccatcgatggcaaagggccaataggcagcaagacgcgcagacgggtaggacttaaagccccaggcatcattcccagaattagtgttcgagagcccatgcagaccgggattaaggccgtggacagtctggtacctattggcaggggtcagagggaactgattatcggtgaccgccagaccggaaaaacaagcatagctatagatactattattaaccagaagaggttcaatgatggctctgatgagaaaaaaaaactgtactgtatttacgtggccatcggacagaagcggagtaccgtggcccagctcgtcaagcggctgaccgatgcagatgccatgaagtatactatcgttgtgtctgccactgccagtgatgcagcccctctccaatacttggccccttatagtggttgctccatgggcgaatactttcgggataacgggaaacatgcactgatcatctatgatgacttgagcaaacaggccgtggcataccgacagatgagcctgctcctgcgcaggccacctggcagggaagcttacccaggtgacgtgttctacttacactcccggctgttagaacgcgcagctaagatgaacgacgcttttgggggtggctctctgaccgctctaccagtgatagagacccaggcaggtgacgtgagtgcatatattcccaccaatgtgatcagcattacagatggacagattttccttgagaccgaactgttctataagggcatcaggccagctatcaatgtgggactgtctgtctcacgagttggaagcgcagcccaaactagagccatgaaacaagttgccggaacaatgaaattggaacttgcacagtacagagaagtggctgccttcgcacagttcggttccgatctggacgccgctacccagcaactgttaagtcggggagttagattgactgagctgctgaaacaaggtcagtattcccctatggctattgaagagcaggtggctgttatttatgcaggtgtcaggggttatctggacaagctggagccctctaagatcaccaagttcgagaatgccttcctatcacacgtcgtgtcccagcaccaggccttgttaggaactatccgggctgacggcaaaatttctgaacagagtgatgctaaactaaaggaaatcgtgaccaactttctagcgggtttcgaagcatag

SEQ ID NO: 19193 - DNA, 1662 bp, Artificial Sequence
  derived and/or modified sequence
atgctgtcagtgcgggtcgccgctgccgtggtgagggcccttccgcgaagggccggtttagtgagtcgaaatgccctggggtccagcttcattgcggctaggaattttcacgcttccaacacacacctgcagaagacgggtaccgctgagatgtccagtattcttgaggagcgcatcctcggagctgatacgtccgtggacctggaggaaaccggccgagtcttgtctattggagatggaatcgcacgcgtgcatggtctgcgaaatgtgcaagccgaagagatggtcgaatttagtagcgggctcaaaggtatgtctttgaatttggagcctgacaatgtaggtgtagtcgtattcgggaacgacaaactgataaaagaaggggatatcgttaaaaggaccggagcaattgttgatgtgccggtgggcgaagagctgctgggccgagtagtcgatgcactgggaaatgctatcgatggtaaaggccctattggttccaagacacgccgtagagttgggctcaaggctcccggaattatcccccgtatcagtgtgagagaaccaatgcaaactgggatcaaagcggttgactctctggttccaattggacggggtcaacgcgaattgattattggcgacagacagaccggaaaaacttcaattgccatcgatactatcataaatcagaaaaggttcaatgacggttccgatgagaagaagaagctatattgtatttatgtcgccatcggccagaaacgaagtactgtggcccagctcgtgaagcgcttgaccgacgcagatgcgatgaaatacaccatcgtcgtgtcggcaacagcatccgatgctgcgccacttcaataccttgcgccttactccggctgttccatgggtgagtattttcgcgacaatgggaagcatgccctgattatttatgacgatctttccaaacaagccgtggcctatcggcagatgagtttgctcttgcgccgaccccctggacgggaagcctacccaggtgacgtgttttacctgcacagcaggttgctcgagagggctgctaaaatgaacgacgctttcggcggaggttctttaaccgcgctcccggtgatcgagacgcaggctggcgacgtcagcgcttatatccctactaatgtgatctcgattaccgatgggcaaatttttctggagacggaactgttctataaaggcattcggccagccatcaatgttggcctgagcgttagtagagtaggcagcgctgcccagaccagggctatgaagcaggtggcaggtaccatgaagttggagctggcccagtatagggaggtggccgcttttgcacaatttggaagcgacttagatgccgcaacacaacagctgcttagccgtggggtgcgcctgacggaactgctgaagcaggggcagtatagccctatggccatcgaggagcaagtggctgtgatctatgccggagtcagaggctatctggataaattagaaccctccaagatcacaaaattcgaaaacgcctttctgtctcacgtcgtttctcagcaccaggccctgctgggcactatacgtgcagacggcaagatctccgagcaaagtgacgctaaactgaaggaaatcgttacaaattttctggctggattcgaggcctag

SEQ ID NO: 19194 - DNA, 2214 bp, Artificial Sequence
  derived and/or modified sequence
accttctttgcggctcggccattttgtcccagtcagtccggaggctgcggctgcagaagtaccgcctgcggagtaactgcaaagatgctgtccgtgcgcgttgctgcggccgtggtccgcgcccttcctcggcgggccggactggtgagcaccgaaggccggcatgatgcaggcggccgggtggggctgcagggtggtggtgcgccggctcgggcgctctctgcaggagggcgaggggctgtggcgaatgccgccatcttgcacccgtggcttctccggctggacagagcaggcgacacaggtgcccttttgctcgtcacctgcgcagaggcagaatggtacagggcagacagttaactcgatggtgtccagagacagggcctcaagattcctgtcttcggctgacagcggccctagaagggggatcttgggtgaaggtcagggcttgggcgctagctctccgaggcctgttctgaatcggtctccagaaatgctttgggttcatctttcattgctgcaaggaacttccatgcctctaacactcatcttcaaaagactgggactgctgagatgtcctctattcttgaagagcgtattcttggagctgatacctctgttgatcttgaagaaactgggcgtgtcttaagtattggtgatggtattgcccgcgtacatgggctgaggaatgttcaagcagaagaaatggtagagttttcttcaggcttaaagggtatgtccttgaacttggaacctgacaatgttggtgttgtcgtgtttggaaatgataaactaattaaggaaggagatatagtgaagaggacaggagccattgtggacgttccagttggtgaggagctgttgggtcgtgtagttgatgcccttggtaatgctattgatggaaagggtccaattggttccaagacgcgtaggcgagttggtctgaaagcccccggtatcattcctcgaatttcagtgcgggaaccaatgcagactggcattaaggctgtggatagcttggtgccaattggtcgtggtcagcgtgaactgattattggtgaccgacagactgggaaaacctcaattgctattgacacaatcattaaccagaaacgtttcaatgatggatctgatgaaaagaagaagctgtactgtatttatgttgctattggtcaaaagagatccactgttgcccagttggtgaagagacttacagatgcagatgccatgaagtacaccattgtggtgtcggctacggcctcggatgctgccccacttcagtacctggctccttactctggctgttccatgggagagtattttagagacaatggcaaacatgctttgatcatctatgacgacttatccaaacaggctgttgcttaccgtcagatgtctctgttgctccgccgaccccctggtcgtgaggcctatcctggtgatgtgttctacctacactcccggttgctggagagagcagccaaaatgaacgatgcttttggtggtggctccttgactgctttgccagtcatagaaacacaggctggtgatgtgtctgcttacattccaacaaatgtcatttccatcactgacggacagatcttcttggaaacagaattgttctacaaaggtatccgccctgcaattaacgttggtctgtctgtatctcgtgtcggatccgctgcccaaaccagggctatgaagcaggtagcaggtaccatgaagctggaattggctcagtatcgtgaggttgctgcttttgcccagttcggttctgacctcgatgctgccactcaacaacttttgagtcgtggcgtgcgtctaactgagttgctgaagcaaggacagtattctcccatggctattgaagaacaagtggctgttatctatgcgggtgtaaggggatatcttgataaactggagcccagcaagattacaaagtttgagaatgctttcttgtctcatgtcgtcagccagcaccaagccttgttgggcactatcagggctgatggaaagatctcagaacaatcagatgcaaagctgaaagagattgtaacaaatttcttggctggatttgaagcttaaactcctgtggattcacatcaaataccagttcagttttgtcattgttctagtaaattagttccatttgtaaaagggttactctcatactccttatgtacagaaatcacatgaaaaataaaggttccataatgc

SEQ ID NO: 19195 - DNA, 1931 bp, Artificial Sequence
  derived and/or modified sequence
attttgtcccagtcagtccggaggctgcggctgcagaagtaccgcctgcggagtaactgcaaagatgctgtccgtgcgcgttgctgcggccgtggtccgcgcccttcctcggcgggccggactggtctccagaaatgctttgggttcatctttcattgctgcaaggaacttccatgcctctaacactcatcttcaaaagactggtaagttattatttctcagtctacgccgcacttactagatgaagatataaattacatacatcgtataactgtgggactgctgagatgtcctctattcttgaagagcgtattcttggagctgatacctctgttgatcttgaagaaactgggcgtgtcttaagtattggtgatggtattgcccgcgtacatgggctgaggaatgttcaagcagaagaaatggtagagttttcttcaggcttaaagggtatgtccttgaacttggaacctgacaatgttggtgttgtcgtgtttggaaatgataaactaattaaggaaggagatatagtgaagaggacaggagccattgtggacgttccagttggtgaggagctgttgggtcgtgtagttgatgcccttggtaatgctattgatggaaagggtccaattggttccaagacgcgtaggcgagttggtctgaaagcccccggtatcattcctcgaatttcagtgcgggaaccaatgcagactggcattaaggctgtggatagcttggtgccaattggtcgtggtcagcgtgaactgattattggtgaccgacagactgggaaaacctcaattgctattgacacaatcattaaccagaaacgtttcaatgatggatctgatgaaaagaagaagctgtactgtatttatgttgctattggtcaaaagagatccactgttgcccagttggtgaagagacttacagatgcagatgccatgaagtacaccattgtggtgtcggctacggcctcggatgctgccccacttcagtacctggctccttactctggctgttccatgggagagtattttagagacaatggcaaacatgctttgatcatctatgacgacttatccaaacaggctgttgcttaccgtcagatgtctctgttgctccgccgaccccctggtcgtgaggcctatcctggtgatgtgttctacctacactcccggttgctggagagagcagccaaaatgaacgatgcttttggtggtggctccttgactgctttgccagtcatagaaacacaggctggtgatgtgtctgcttacattccaacaaatgtcatttccatcactgacggacagatcttcttggaaacagaattgttctacaaaggtatccgccctgcaattaacgttggtctgtctgtatctcgtgtcggatccgctgcccaaaccagggctatgaagcaggtagcaggtaccatgaagctggaattggctcagtatcgtgaggttgctgcttttgcccagttcggttctgacctcgatgctgccactcaacaacttttgagtcgtggcgtgcgtctaactgagttgctgaagcaaggacagtattctcccatggctattgaagaacaagtggctgttatctatgcgggtgtaaggggatatcttgataaactggagcccagcaagattacaaagtttgagaatgctttcttgtctcatgtcgtcagccagcaccaagccttgttgggcactatcagggctgatggaaagatctcagaacaatcagatgcaaagctgaaagagattgtaacaaatttcttggctggatttgaagcttaaactcctgtggattcacatcaaataccagttcagttttgtcattgttctagtaaattagttccatttgtaaaagggttactctcatactccttatgtacagaaatcacatgaaaaataaaggttccataatgc

SEQ ID NO: 19196 - DNA, 1945 bp, Artificial Sequence
  derived and/or modified sequence
tctggcattgcaagcctcgcttcgttgccacttcccagctcttcccgccttccgcggtataatcaacactacgagagatagagccgcctagaaccagtccggaggctgcggctgcagaagtaccgcctgcggagtaactgcaaagatgctgtccgtgcgcgttgctgcggccgtggtccgcgcccttcctcggcgggccggactggtctccagaaatgctttgggttcatctttcattgctgcaaggaacttccatgcctctaacactcatcttcaaaagactgggactgctgagatgtcctctattcttgaagagcgtattcttggagctgatacctctgttgatcttgaagaaactgggcgtgtcttaagtattggtgatggtattgcccgcgtacatgggctgaggaatgttcaagcagaagaaatggtagagttttcttcaggcttaaagggtatgtccttgaacttggaacctgacaatgttggtgttgtcgtgtttggaaatgataaactaattaaggaaggagatatagtgaagaggacaggagccattgtggacgttccagttggtgaggagctgttgggtcgtgtagttgatgcccttggtaatgctattgatggaaagggtccaattggttccaagacgcgtaggcgagttggtctgaaagcccccggtatcattcctcgaatttcagtgcgggaaccaatgcagactggcattaaggctgtggatagcttggtgccaattggtcgtggtcagcgtgaactgattattggtgaccgacagactgggaaaacctcaattgctattgacacaatcattaaccagaaacgtttcaatgatggatctgatgaaaagaagaagctgtactgtatttatgttgctattggtcaaaagagatccactgttgcccagttggtgaagagacttacagatgcagatgccatgaagtacaccattgtggtgtcggctacggcctcggatgctgccccacttcagtacctggctccttactctggctgttccatgggagagtattttagagacaatggcaaacatgctttgatcatctatgacgacttatccaaacaggctgttgcttaccgtcagatgtctctgttgctccgccgaccccctggtcgtgaggcctatcctggtgatgtgttctacctacactcccggttgctggagagagcagccaaaatgaacgatgcttttggtggtggctccttgactgctttgccagtcatagaaacacaggctggtgatgtgtctgcttacattccaacaaatgtcatttccatcactgacggacagatcttcttggaaacagaattgttctacaaaggtatccgccctgcaattaacgttggtctgtctgtatctcgtgtcggatccgctgcccaaaccagggctatgaagcaggtagcaggtaccatgaagctggaattggctcagtatcgtgaggttgctgcttttgcccagttcggttctgacctcgatgctgccactcaacaacttttgagtcgtggcgtgcgtctaactgagttgctgaagcaaggacagtattctcccatggctattgaagaacaagtggctgttatctatgcgggtgtaaggggatatcttgataaactggagcccagcaagattacaaagtttgagaatgctttcttgtctcatgtcgtcagccagcaccaagccttgttgggcactatcagggctgatggaaagatctcagaacaatcagatgcaaagctgaaagagattgtaacaaatttcttggctggatttgaagcttaaactcctgtggattcacatcaaataccagttcagttttgtcattgttctagtaaattagttccatttgtaaaagggttactctcatactccttatgtacagaaatcacatgaaaaataaaggttccataatgcatagtt

SEQ ID NO: 19197 - DNA, 1916 bp, Artificial Sequence
  derived and/or modified sequence
ggggcagtacttccgggtcaggtgggccggctgtcttgaccttctttgcggctcggccattttgtcccagtcagtccggaggctgcggctgcagaagtaccgcctgcggagtaactgcaaagatgctgtccgtgcgcgttgctgcggccgtggtccgcgcccttcctcggcgggccggactggtctccagaaatgctttgggttcatctttcattgctgcaaggaacttccatgcctctaacactcatcttcaaaagactgggactgctgagatgtcctctattcttgaagagcgtattcttggagctgatacctctgttgatcttgaagaaactgggcgtgtcttaagtattggtgatggtattgcccgcgtacatgggctgaggaatgttcaagcagaagaaatggtagagttttcttcaggcttaaagggtatgtccttgaacttggaacctgacaatgttggtgttgtcgtgtttggaaatgataaactaattaaggaaggagatatagtgaagaggacaggagccattgtggacgttccagttggtgaggagctgttgggtcgtgtagttgatgcccttggtaatgctattgatggaaagggtccaattggttccaagacgcgtaggcgagttggtctgaaagcccccggtatcattcctcgaatttcagtgcgggaaccaatgcagactggcattaaggctgtggatagcttggtgccaattggtcgtggtcagcgtgaactgattattggtgaccgacagactgggaaaacctcaattgctattgacacaatcattaaccagaaacgtttcaatgatggatctgatgaaaagaagaagctgtactgtatttatgttgctattggtcaaaagagatccactgttgcccagttggtgaagagacttacagatgcagatgccatgaagtacaccattgtggtgtcggctacggcctcggatgctgccccacttcagtacctggctccttactctggctgttccatgggagagtattttagagacaatggcaaacatgctttgatcatctatgacgacttatccaaacaggctgttgcttaccgtcagatgtctctgttgctccgccgaccccctggtcgtgaggcctatcctggtgatgtgttctacctacactcccggttgctggagagagcagccaaaatgaacgatgcttttggtggtggctccttgactgctttgccagtcatagaaacacaggctggtgatgtgtctgcttacattccaacaaatgtcatttccatcactgacggacagatcttcttggaaacagaattgttctacaaaggtatccgccctgcaattaacgttggtctgtctgtatctcgtgtcggatccgctgcccaaaccagggctatgaagcaggtagcaggtaccatgaagctggaattggctcagtatcgtgaggttgctgcttttgcccagttcggttctgacctcgatgctgccactcaacaacttttgagtcgtggcgtgcgtctaactgagttgctgaagcaaggacagtattctcccatggctattgaagaacaagtggctgttatctatgcgggtgtaaggggatatcttgataaactggagcccagcaagattacaaagtttgagaatgctttcttgtctcatgtcgtcagccagcaccaagccttgttgggcactatcagggctgatggaaagatctcagaacaatcagatgcaaagctgaaagagattgtaacaaatttcttggctggatttgaagcttaaactcctgtggattcacatcaaataccagttcagttttgtcattgttctagtaaattagttccatttgtaaaagggttactctcatactccttatgtacagaaatcacatgaaaaataaaggttccataatgc

SEQ ID NO: 19198 - DNA, 2184 bp, Artificial Sequence
  derived and/or modified sequence
agtcagtccggaggctgcggctgcagaagtaccgcctgcggagtaactgcaaagatgctgtccgtgcgcgttgctgcggccgtggtccgcgcccttcctcggcgggccggactggtgagcaccgaaggccggcatgatgcaggcggccgggtggggctgcagggtggtggtgcgccggctcgggcgctctctgcaggagggcgaggggctgtggcgaatgccgccatcttgcacccgtggcttctccggctggacagagcaggcgacacaggtgcccttttgctcgtcacctgcgcagaggcagaatggtacagggcagacagttaactcgatggtgtccagagacagggcctcaagattcctgtcttcggctgacagcggccctagaagggggatcttgggtgaaggtcagggcttgggcgctagctctccgaggcctgttctgaatcggtctccagaaatgctttgggttcatctttcattgctgcaaggaacttccatgcctctaacactcatcttcaaaagactgggactgctgagatgtcctctattcttgaagagcgtattcttggagctgatacctctgttgatcttgaagaaactgggcgtgtcttaagtattggtgatggtattgcccgcgtacatgggctgaggaatgttcaagcagaagaaatggtagagttttcttcaggcttaaagggtatgtccttgaacttggaacctgacaatgttggtgttgtcgtgtttggaaatgataaactaattaaggaaggagatatagtgaagaggacaggagccattgtggacgttccagttggtgaggagctgttgggtcgtgtagttgatgcccttggtaatgctattgatggaaagggtccaattggttccaagacgcgtaggcgagttggtctgaaagcccccggtatcattcctcgaatttcagtgcgggaaccaatgcagactggcattaaggctgtggatagcttggtgccaattggtcgtggtcagcgtgaactgattattggtgaccgacagactgggaaaacctcaattgctattgacacaatcattaaccagaaacgtttcaatgatggatctgatgaaaagaagaagctgtactgtatttatgttgctattggtcaaaagagatccactgttgcccagttggtgaagagacttacagatgcagatgccatgaagtacaccattgtggtgtcggctacggcctcggatgctgccccacttcagtacctggctccttactctggctgttccatgggagagtattttagagacaatggcaaacatgctttgatcatctatgacgacttatccaaacaggctgttgcttaccgtcagatgtctctgttgctccgccgaccccctggtcgtgaggcctatcctggtgatgtgttctacctacactcccggttgctggagagagcagccaaaatgaacgatgcttttggtggtggctccttgactgctttgccagtcatagaaacacaggctggtgatgtgtctgcttacattccaacaaatgtcatttccatcactgacggacagatcttcttggaaacagaattgttctacaaaggtatccgccctgcaattaacgttggtctgtctgtatctcgtgtcggatccgctgcccaaaccagggctatgaagcaggtagcaggtaccatgaagctggaattggctcagtatcgtgaggttgctgcttttgcccagttcggttctgacctcgatgctgccactcaacaacttttgagtcgtggcgtgcgtctaactgagttgctgaagcaaggacagtattctcccatggctattgaagaacaagtggctgttatctatgcgggtgtaaggggatatcttgataaactggagcccagcaagattacaaagtttgagaatgctttcttgtctcatgtcgtcagccagcaccaagccttgttgggcactatcagggctgatggaaagatctcagaacaatcagatgcaaagctgaaagagattgtaacaaatttcttggctggatttgaagcttaaactcctgtggattcacatcaaataccagttcagttttgtcattgttctagtaaattagttccatttgtaaaagggttactctcatactccttatgtacagaaatcacatgaaaaataaaggttccataatgc

SEQ ID NO: 19199 - DNA, 1662 bp, Artificial Sequence
  derived and/or modified sequence
atgctgagcgtgagagtggccgccgccgtggtgagagccctgcccagaagagccggcctggtgagcagaaacgccctgggcagcagcttcatcgccgccagaaacttccacgccagcaacacccacctgcagaagaccggcaccgccgagatgagcagcatcctggaggagagaatcctgggcgccgacaccagcgtggacctggaggagaccggcagagtgctgagcatcggcgacggcatcgccagagtgcacggcctgagaaacgtgcaggccgaggagatggtggagttcagcagcggcctgaagggcatgagcctgaacctggagcccgacaacgtgggcgtggtggtgttcggcaacgacaagctgatcaaggagggcgacatcgtgaagagaaccggcgccatcgtggacgtgcccgtgggcgaggagctgctgggcagagtggtggacgccctgggcaacgccatcgacggcaagggccccatcggcagcaagaccagaagaagagtgggcctgaaggcccccggcatcatccccagaatcagcgtgagagagcccatgcagaccggcatcaaggccgtggacagcctggtgcccatcggcagaggccagagagagctgatcatcggcgacagacagaccggcaagaccagcatcgccatcgacaccatcatcaaccagaagagattcaacgacggcagcgacgagaagaagaagctgtactgcatctacgtggccatcggccagaagagaagcaccgtggcccagctggtgaagagactgaccgacgccgacgccatgaagtacaccatcgtggtgagcgccaccgccagcgacgccgcccccctgcagtacctggccccctacagcggctgcagcatgggcgagtacttcagagacaacggcaagcacgccctgatcatctacgacgacctgagcaagcaggccgtggcctacagacagatgagcctgctgctgagaagaccccccggcagagaggcctaccccggcgacgtgttctacctgcacagcagactgctggagagagccgccaagatgaacgacgccttcggcggcggcagcctgaccgccctgcccgtgatcgagacccaggccggcgacgtgagcgcctacatccccaccaacgtgatcagcatcaccgacggccagatcttcctggagaccgagctgttctacaagggcatcagacccgccatcaacgtgggcctgagcgtgagcagagtgggcagcgccgcccagaccagagccatgaagcaggtggccggcaccatgaagctggagctggcccagtacagagaggtggccgccttcgcccagttcggcagcgacctggacgccgccacccagcagctgctgagcagaggcgtgagactgaccgagctgctgaagcagggccagtacagccccatggccatcgaggagcaggtggccgtgatctacgccggcgtgagaggctacctggacaagctggagcccagcaagatcaccaagttcgagaacgccttcctgagccacgtggtgagccagcaccaggccctgctgggcaccatcagagccgacggcaagatcagcgagcagagcgacgccaagctgaaggagatcgtgaccaacttcctggccggcttcgaggcctag

SEQ ID NO: 19200 - protein, 313 aa, Artificial Sequence
  derived and/or modified sequence
MLLTDRNTSGTTFTLLGFSDYPELQVPLFLVFLAIYNVTVLGNIGLIVIIKINPKLHTPMYFFLSQLSFVDFCYSSIIAPKMLVNLVVKDRTISFLGCVVQFFFFCTFVVTESFLLAVMAYDRFVAICNPLLYTVNMSQKLCVLLVVGSYAWGVSCSLELTCSALKLCFHGFNTINHFFCEFSSLLSLSCSDTYINQWLLFFLATFNEISTLLIVLTSYAFIVVTILKMRSVSGRRKAFSTCASHLTAITIFHGTILFLYCVPNSKNSRHTVKVASVFYTVVIPMLNPLIYSLRNKDVKDTVTEILDTKVFSY

SEQ ID NO: 19201 - DNA, 225 bp, Artificial Sequence
  derived and/or modified sequence
atgttcgtgatcatcagcctgcacaactgcgtggtgatcagcttcgtgctgttcctgttcggcggcaacaacttcatccagaacttctacctgccccagaactacatcgaccagttcctgctgaccagcttccccaccttcaccagcgtgggcgtgctgatcgtgctggtgctgtgcagcgccttcctgctgctgtggcagggcgagggcgtgaacctgagatag

SEQ ID NO: 19202 - DNA, 942 bp, Artificial Sequence
  derived and/or modified sequence
atgctgctgaccgacagaaacaccagcggcaccaccttcaccctgctgggcttcagcgactaccccgagctgcaggtgcccctgttcctggtgttcctggccatctacaacgtgaccgtgctgggcaacatcggcctgatcgtgatcatcaagatcaaccccaagctgcacacccccatgtacttcttcctgagccagctgagcttcgtggacttctgctacagcagcatcatcgcccccaagatgctggtgaacctggtggtgaaggacagaaccatcagcttcctgggctgcgtggtgcagttcttcttcttctgcaccttcgtggtgaccgagagcttcctgctggccgtgatggcctacgacagattcgtggccatctgcaaccccctgctgtacaccgtgaacatgagccagaagctgtgcgtgctgctggtggtgggcagctacgcctggggcgtgagctgcagcctggagctgacctgcagcgccctgaagctgtgcttccacggcttcaacaccatcaaccacttcttctgcgagttcagcagcctgctgagcctgagctgcagcgacacctacatcaaccagtggctgctgttcttcctggccaccttcaacgagatcagcaccctgctgatcgtgctgaccagctacgccttcatcgtggtgaccatcctgaagatgagaagcgtgagcggcagaagaaaggccttcagcacctgcgccagccacctgaccgccatcaccatcttccacggcaccatcctgttcctgtactgcgtgcccaacagcaagaacagcagacacaccgtgaaggtggccagcgtgttctacaccgtggtgatccccatgctgaaccccctgatctacagcctgagaaacaaggacgtgaaggacaccgtgaccgagatcctggacaccaaggtgttcagctactag

SEQ ID NO: 19203 - DNA, 942 bp, Artificial Sequence
  derived and/or modified sequence
atgcttcttacagaccgcaacaccagtgggactacctttactctcctcgggtttagtgactaccccgagctgcaggtacccctgttcctcgttttcctggccatttataatgttaccgtcctgggcaacatcggactaatcgtgataataaaaattaatcccaagctgcatacgcccatgtacttctttctgtctcagctttcattcgtagacttttgttattcaagcattatcgcgcccaagatgctggtcaacctcgtagtaaaagataggaccatctccttcctgggatgcgtcgtgcagttcttcttcttctgcacctttgtcgtgaccgagtcctttctcctggctgtcatggcttacgaccgctttgtggctatttgcaacccgcttctgtatacagtgaatatgagccagaagctgtgtgtcttactggtcgtgggctcttacgcctggggcgtgtcctgcagcctggaacttacctgtagtgccctcaagctttgctttcacgggtttaatacaattaaccacttcttttgcgaattctcgtcccttctgtcattgagctgctccgacacgtatattaatcagtggcttttgttctttctcgctactttcaatgagatttctactctcctcattgtgctcaccagctacgccttcattgtggtgactattcttaaaatgaggtcagtaagtggaagacggaaagctttttctacatgcgcgtcacaccttaccgccattacaatttttcacgggacaatcctgtttctgtattgcgtgcccaatagcaagaacagtcggcataccgttaaagtggcgagtgtgttttatactgtggtcatcccgatgctcaatcctttaatttactccttacgcaacaaggacgttaaagacacagtgacagagattctcgatactaaggttttctcatattag

SEQ ID NO: 19204 - DNA, 942 bp, Artificial Sequence
  derived and/or modified sequence
atgctgctgacagacaggaacaccagcggcaccaccttcaccctgctgggcttcagtgactacccagagctgcaggtgcccctcttcctggtgttcctggccatctacaacgtgacagtgctgggcaacatcggcctgattgtcatcatcaagatcaaccccaagctgcacacccccatgtacttcttcctgagccagctgagctttgtggacttctgctacagcagcatcatcgcccccaagatgctggtgaacctggtggtgaaggacaggaccatctccttcctgggctgtgtggtgcagttcttcttcttctgcacctttgtggtgacagagagcttcctgctggccgtgatggcctatgacagatttgtggccatctgcaaccccctgctgtacacagtgaacatgagccagaagctgtgtgtgctgctggtggtgggcagctatgcctggggcgtgtcctgcagcctggagctgacctgcagcgccctgaagctgtgcttccacggcttcaacaccatcaaccacttcttctgtgagttcagcagcctgctgagcctgagctgcagcgacacctacatcaaccagtggctgctcttcttcctggccaccttcaatgagatcagcaccctgctgattgtgctgaccagctatgccttcatcgtggtgaccatcctgaagatgaggtctgtgtctggaagaaggaaggccttcagcacctgtgccagccacctgacagccatcaccatcttccacggcaccatcctcttcctgtactgtgtgcccaacagcaagaacagccgccacacagtgaaggtggccagcgtcttctacacagtggtgatccccatgctgaaccccctcatctacagcctgaggaacaaggatgtgaaggacacagtgacagagatcctggacaccaaggtgttctcctactag

SEQ ID NO: 19205 - DNA, 942 bp, Artificial Sequence
  derived and/or modified sequence
atgctgctgaccgaccggaacaccagcggcaccaccttcaccctgctggggtttagtgactatcctgagctgcaggtccctttgttcttggtatttctggctatctataatgtaacagttctggggaatatcggccttattgttatcatcaagattaaccccaaattgcacactcccatgtacttcttcctgtcccagctaagtttcgtcgacttctgctactcctcaatcatcgcccctaaaatgcttgtgaatcttgtagttaaggatcggacgatatcttttttgggttgtgtggttcagttcttcttcttctgtacctttgtggttaccgaaagctttttgttggccgtgatggcatatgaccgtttcgtggccatctgtaaccctcttctttacactgtgaatatgtcacagaaattgtgcgtcctgctagtagtgggaagctacgcctggggggtctcatgttcactcgaactgacctgctctgcccttaagctctgttttcacgggttcaatacaatcaatcatttcttctgcgaattttcttcactcctaagcctcagttgctctgatacatacataaaccagtggctactcttcttccttgctacctttaatgagatatcaaccctgctcatcgttctgacaagctatgctttcatagtggtcacgattctcaagatgcggtccgtttccggaagacgaaaggcattcagcacatgcgccagccatctcaccgctattaccatctttcatgggaccatcctttttctgtattgcgtgcccaatagcaaaaactctagacacactgtgaaggtagccagcgtgttctataccgtggtcatacctatgctgaatcccctcatttattctctcaggaacaaggacgttaaggacaccgtgaccgagatcctcgacaccaaagtcttctcctactag

SEQ ID NO: 19206 - DNA, 988 bp, Artificial Sequence
  derived and/or modified sequence
gattcgaagaaacagaagcgatgctgctgactgatagaaatacaagtgggaccacgttcaccctcttgggcttctcagattacccagaactgcaagtcccactcttcctggtttttctggccatctacaatgtcactgtgctagggaatattgggttgattgtgatcatcaaaatcaaccccaaactgcatacccccatgtactttttcctcagccaactctcctttgtggatttctgctattcctccatcattgctcccaagatgttggtgaaccttgttgtcaaagacagaaccatttcatttttaggatgcgtagtacaattctttttcttctgtacctttgtggtcactgaatcctttttattagctgtgatggcctatgaccgcttcgtggccatttgcaaccctctgctctacacagttaacatgtcccagaaactctgcgtgctgctggttgtgggatcctatgcctggggagtctcatgttccttggaactgacgtgctctgctttaaagttatgttttcatggtttcaacacaatcaatcacttcttctgtgagttctcctcactactctccctttcttgctctgatacttacatcaaccagtggctgctattctttcttgccacctttaatgaaatcagcacactactcatcgttctcacatcttatgcgttcattgttgtaaccatcctcaagatgcgttcagtcagtgggcgccgcaaagccttctccacctgtgcctcccacctgactgccatcaccatcttccatggcaccatcctcttcctttactgtgtgcccaactccaaaaactccaggcacacagtcaaagtggcctctgtgttttacaccgtggtgatccccatgttgaatcccctgatctacagtctgagaaataaagatgtcaaggatacagtcaccgagatactggacaccaaagtcttctcttactgagcctgttactttcatggagtttgtca

SEQ ID NO: 19207 - DNA, 225 bp, Artificial Sequence
  derived and/or modified sequence
atgtttgtcatcatcagcctgcacaactgcgttgtgatcagttttgtcctgtttctgtttggcggtaacaatttcatccagaacttctatctgccccagaattacatcgatcagttccttctgacctcatttcctacatttacaagcgtcggcgtgctcattgtccttgtattatgctcagcattcctgctgctttggcagggggaaggagtgaacctgcgctag

SEQ ID NO: 19208 - DNA, 942 bp, Artificial Sequence
  derived and/or modified sequence
atgctgcttacggacagaaatacttcagggaccaccttcaccctcctgggatttagcgactaccctgagttgcaggtgcccttgttcctggttttcttggctatctataacgtgacagtgctgggaaatattggcctgattgtgattatcaagattaaccctaaactacataccccaatgtatttttttctctcacagctgagcttcgttgacttttgttatagctcaatcattgctcccaagatgctggttaatctagtggtgaaggatcggacaatatcttttcttggctgtgtggttcagtttttctttttctgtacgtttgtggtgacggagtctttcctcctggcagtcatggcctacgaccgtttcgtcgctatctgcaacccattgctctataccgtgaatatgtctcaaaagctgtgcgtgctgctggttgttggttcctatgcctggggagtttcctgctctctggagctgacttgcagcgctctgaaactatgctttcatggctttaacacgattaaccacttcttttgcgagttcagcagcttactgtccctgagttgctctgacacttacattaaccagtggctgctgttttttctcgctacattcaacgagatcagtactctcttaatagtactcacctcttacgctttcattgtcgtgacaatactcaaaatgaggtccgtctctggcagaagaaaggctttcagcacatgcgcatcccacttaacagcaataactatctttcacggaacaattctgttcttgtattgcgtgccaaattctaagaacagccgtcacaccgtgaaagtcgctagcgtgttttatacagtagtcatccctatgctaaaccccctcatctattcactccgaaataaggatgtgaaggacactgtgacagagatactggacacaaaagtgtttagttactag

SEQ ID NO: 19209 - protein, 309 aa, Artificial Sequence
  derived and/or modified sequence
MANRNNVTEFILLGLTENPKMQKIIFVVFSVIYINAMIGNVLIVVTITASPSLRSPMYFFLAYLSFIDACYSSVNTPKLITDSLYENKTILFNGCMTQVFGEHFFRGVEVILLTVMAYDHYVAICKPLHYTTVMKQHVCSLLVGVSWVGGFLHATIQILFICQLPFCGPNVIDHFMCDLYTLINLACTNTHTLGLFIAANSGFICLLNCLLLLVSCVVILYSLKTHSLEARHEALSTCVSHITVVILSFIPCIFVYMRPPATLPIDKAVAVFYTMITSMLNPLIYTLRNAQMKNAIRKLCSRKAISSVK

SEQ ID NO: 19210 - DNA, 930 bp, Artificial Sequence
  derived and/or modified sequence
atggccaacagaaacaacgtgaccgagttcatcctgctgggcctgaccgagaaccccaagatgcagaagatcatcttcgtggtgttcagcgtgatctacatcaacgccatgatcggcaacgtgctgatcgtggtgaccatcaccgccagccccagcctgagaagccccatgtacttcttcctggcctacctgagcttcatcgacgcctgctacagcagcgtgaacacccccaagctgatcaccgacagcctgtacgagaacaagaccatcctgttcaacggctgcatgacccaggtgttcggcgagcacttcttcagaggcgtggaggtgatcctgctgaccgtgatggcctacgaccactacgtggccatctgcaagcccctgcactacaccaccgtgatgaagcagcacgtgtgcagcctgctggtgggcgtgagctgggtgggcggcttcctgcacgccaccatccagatcctgttcatctgccagctgcccttctgcggccccaacgtgatcgaccacttcatgtgcgacctgtacaccctgatcaacctggcctgcaccaacacccacaccctgggcctgttcatcgccgccaacagcggcttcatctgcctgctgaactgcctgctgctgctggtgagctgcgtggtgatcctgtacagcctgaagacccacagcctggaggccagacacgaggccctgagcacctgcgtgagccacatcaccgtggtgatcctgagcttcatcccctgcatcttcgtgtacatgagaccccccgccaccctgcccatcgacaaggccgtggccgtgttctacaccatgatcaccagcatgctgaaccccctgatctacaccctgagaaacgcccagatgaagaacgccatcagaaagctgtgcagcagaaaggccatcagcagcgtgaagtag

SEQ ID NO: 19211 - DNA, 930 bp, Artificial Sequence
  derived and/or modified sequence
atggccaatcgcaacaatgttacagaattcatactgttaggactaaccgaaaaccctaaaatgcagaagatcatatttgtggtgtttagtgtcatctacataaatgcgatgattgggaatgtcttgattgtggttaccatcacagcttcacctagtctccgttctcctatgtatttcttcctggcatatttgtcattcatcgacgcctgttatagtagcgtgaatacaccaaaattgatcacagattcactctatgagaacaagaccatactttttaacggctgtatgactcaggtctttggcgaacattttttccgaggggtggaagtgatcctcctgacagtgatggcctatgaccattacgtggctatctgtaagccgctgcattatacaactgtcatgaaacaacacgtgtgttctctgttggttggcgtgtcttgggttggcggctttttgcacgccacaattcagatcctgtttatttgccaactgcccttctgcggacccaatgttatcgaccactttatgtgcgacctgtatacattgataaatctcgcctgcaccaacacacacacactggggctatttatcgccgcaaactcaggctttatttgtcttctaaactgtcttctgcttctcgtgtcgtgcgtggtcatactgtatagtctgaaaacacattccctggaggccaggcatgaagccctgagcacttgcgtgagtcacatcaccgtggtgatactgtcatttataccctgcatctttgtgtatatgcggcctcccgctacactgccaattgataaggcggttgccgtgttctatactatgatcacaagcatgctgaatccgctgatctacacgctgcgcaatgcccagatgaaaaatgccattaggaagctgtgctcacgcaaagccatttccagtgttaagtag

SEQ ID NO: 19212 - DNA, 930 bp, Artificial Sequence
  derived and/or modified sequence
atggccaacagaaacaacgtgacagagttcatcctgctgggcctgacagagaaccccaagatgcagaagatcatctttgtggtgttcagcgtcatctacatcaatgccatgattggaaatgtgctgattgtggtgaccatcacagccagccccagcctgcggagccccatgtacttcttcctggcctacctgtccttcattgatgcctgctacagctctgtgaacacccccaagctgatcacagacagcctgtatgagaacaagaccatcctcttcaacggctgcatgacccaggtgtttggagagcacttcttccggggcgtggaggtgatcctgctgactgtgatggcctatgaccactacgtggccatctgcaagcccctgcactacaccaccgtgatgaagcagcacgtgtgcagcctgctggtgggcgtgtcctgggtgggcggcttcctgcacgccaccatccagatcctcttcatctgccagctgcccttctgtggccccaacgtcatcgaccacttcatgtgtgacctgtacaccctcatcaacctggcctgcaccaacacccacaccctgggcctcttcatcgccgccaacagcggcttcatctgcctgctgaactgcctgctgctgctggtgtcctgtgtggtgatcctgtacagcctgaagacccacagcctggaggcccggcatgaggccctgagcacctgtgtgagccacatcaccgtggtgatcctgtccttcatcccctgcatctttgtgtacatgaggcccccagccaccctgcccatcgacaaggctgtggccgtgttctacaccatgatcacctccatgctgaaccccctcatctacaccctgagaaatgcccagatgaagaatgccatcaggaagctgtgcagcaggaaggccatcagctctgtgaagtag

SEQ ID NO: 19213 - DNA, 930 bp, Artificial Sequence
  derived and/or modified sequence
atggccaaccggaacaacgtgaccgagttcatcctgctgggcctgacggaaaaccccaagatgcaaaagattattttcgtggtttttagcgtgatttacatcaacgctatgatcggcaacgtcttgattgtcgtcactatcacagccagcccaagtctgagatcccccatgtatttctttttagcttacctgagcttcatcgatgcctgttatagtagcgtgaacacgcccaaattgattaccgattcactctacgagaacaaaacgatcctgtttaacgggtgcatgacccaggtctttggggaacactttttccggggtgttgaagtgatattgctcacagtgatggcctacgatcactacgtagccatctgcaagccactgcattacaccaccgttatgaagcagcacgtgtgctctctcctggtcggggtgtcgtgggtgggaggcttccttcatgccaccattcagatcctgtttatttgtcagctgcccttttgcggtcccaatgttattgatcacttcatgtgcgacttatacaccctgattaatctagcatgtacaaatacccacaccctggggctctttatcgccgcgaattctgggtttatctgtctgctcaactgcctgctcctcctcgtgagttgcgtagttatattgtattccctgaaaactcattctttggaggctcgccacgaggctctgagcacttgtgtgtctcacatcactgtggtgatcctgtcttttatcccttgtatcttcgtctatatgcggccgcctgctacactcccaattgataaagccgtcgcggttttttacacgatgattacctccatgctaaatccactgatttatactctaaggaacgctcaaatgaagaacgccatccggaagttgtgctcccgcaaagccataagttccgtgaagtag

SEQ ID NO: 19214 - DNA, 1029 bp, Artificial Sequence
  derived and/or modified sequence
caggtaatgtaattaaccatcatttgaaatacatggcgaatagaaacaatgtgacagagtttattctattggggcttacagagaatccaaaaatgcagaaaatcatatttgttgtgttttctgtcatctacatcaacgccatgataggaaatgtgctcattgtggtcaccatcactgccagcccatcactgagatcccccatgtactttttcctggcctatctctcctttattgatgcctgctattcctctgtcaatacccctaagctgatcacagattcactctatgaaaacaagactatcttattcaatggatgtatgactcaagtctttggagaacattttttcagaggtgttgaggtcatcctacttactgtaatggcctatgaccactatgtggccatctgcaagcccttgcactataccaccgtcatgaagcagcatgtttgtagcctgctagtgggagtgtcatgggtaggaggctttcttcatgcaaccatacagatcctcttcatctgtcaattacctttctgtggtcctaatgtcatagatcactttatgtgtgatctctacactttgatcaatcttgcctgcactaatacccacactctaggactcttcattgctgccaacagtgggttcatatgcctgttaaactgtctcttgctcctggtctcctgcgtggtcatactgtactccttaaagacccacagcttagaggcaaggcacgaagccctctctacctgtgtctcccacatcacagttgtcatcttatcctttataccctgcatatttgtgtacatgagacctccagctactttacccattgataaagcagttgctgtattctacactatgataacttctatgttaaaccccttaatctacaccttgaggaatgctcaaatgaaaaatgccattaggaaattgtgtagtaggaaagctatttcaagtgtcaaataaatgtgactggagcccaacatgattcagctgaggcaagggtcaaaaggacattttgggtaatgccagc

SEQ ID NO: 19215 - DNA, 930 bp, Artificial Sequence
  derived and/or modified sequence
atggccaaccgaaacaacgtcaccgaattcatcttactggggcttaccgagaacccaaagatgcagaaaataatttttgttgtgttctctgtcatctatattaacgcaatgatcggaaatgttctaatcgtcgtcactatcacggcatccccttccttacggtcccccatgtacttctttcttgcttacctgtcttttatcgatgcctgctattcctccgtcaacacacctaagctgattactgatagcctttatgaaaataagaccattttatttaacgggtgtatgactcaggtatttggagagcatttttttaggggggtagaggtcatcctgctgacagtcatggcctacgaccattatgtggcaatatgcaagccccttcactacaccaccgtcatgaaacagcatgtttgttctttattagtgggcgtctcctgggtcggtggttttctacatgccactatccaaattctctttatctgtcagctacccttctgcggccctaacgttatcgatcatttcatgtgtgatttatacaccctgatcaatcttgcatgcactaatactcacaccttggggcttttcatcgcagccaattcgggattcatttgtttgctcaattgtttgttgcttctggtgagctgcgtcgtgatcctgtattcactcaaaacccacagtcttgaggcccgacatgaggctctatcaacttgtgtatcgcacattactgtcgtcattctgagcttcattccttgcatatttgtctacatgcgacctcccgcaacactgcccatcgacaaagccgtcgcagttttttacacaatgatcacctccatgctgaatccccttatctatactctgaggaacgcacagatgaaaaacgctatccgtaagctctgcagtcgtaaggcaataagctctgttaaatag

SEQ ID NO: 19216 - protein, 347 aa, Artificial Sequence
  derived and/or modified sequence
MIVQLICTVCFLAVNTFHVRSSFDFLKADDMGEINQTLVSEFLLLGLSGYPKIEIVYFALILVMYLVILIGNGVLIIASIFDSHFHTPMYFFLGNLSFLDICYTSSSVPSTLVSLISKKRNISFSGCAVQMFFGFAMGSTECLLLGMMAFDRYVAICNPLRYPIILSKVAYVLMASVSWLSGGINSAVQTLLAMRLPFCGNNIINHFACEILAVLKLACADISLNIITMVISNMAFLVLPLMVIFFSYMFILYTILQMNSATGRRKAFSTCSAHLTVVIIFYGTIFFMYAKPKSQDLIGEEKLQALDKLISLFYGVVTPMLNPILYSLRNKDVKAAVKYLLNKKPIH

SEQ ID NO: 19217 - DNA, 1044 bp, Artificial Sequence
  derived and/or modified sequence
atgatcgtgcagctgatctgcaccgtgtgcttcctggccgtgaacaccttccacgtgagaagcagcttcgacttcctgaaggccgacgacatgggcgagatcaaccagaccctggtgagcgagttcctgctgctgggcctgagcggctaccccaagatcgagatcgtgtacttcgccctgatcctggtgatgtacctggtgatcctgatcggcaacggcgtgctgatcatcgccagcatcttcgacagccacttccacacccccatgtacttcttcctgggcaacctgagcttcctggacatctgctacaccagcagcagcgtgcccagcaccctggtgagcctgatcagcaagaagagaaacatcagcttcagcggctgcgccgtgcagatgttcttcggcttcgccatgggcagcaccgagtgcctgctgctgggcatgatggccttcgacagatacgtggccatctgcaaccccctgagataccccatcatcctgagcaaggtggcctacgtgctgatggccagcgtgagctggctgagcggcggcatcaacagcgccgtgcagaccctgctggccatgagactgcccttctgcggcaacaacatcatcaaccacttcgcctgcgagatcctggccgtgctgaagctggcctgcgccgacatcagcctgaacatcatcaccatggtgatcagcaacatggccttcctggtgctgcccctgatggtgatcttcttcagctacatgttcatcctgtacaccatcctgcagatgaacagcgccaccggcagaagaaaggccttcagcacctgcagcgcccacctgaccgtggtgatcatcttctacggcaccatcttcttcatgtacgccaagcccaagagccaggacctgatcggcgaggagaagctgcaggccctggacaagctgatcagcctgttctacggcgtggtgacccccatgctgaaccccatcctgtacagcctgagaaacaaggacgtgaaggccgccgtgaagtacctgctgaacaagaagcccatccactag

SEQ ID NO: 19218 - DNA, 1044 bp, Artificial Sequence
  derived and/or modified sequence
atgatcgtacagttaatctgtaccgtatgcttccttgcagtcaacacctttcatgtgcggtcatcctttgatttcctgaaggccgacgatatgggagagattaatcaaactctggtttcggaatttctcttattgggactgtccggataccccaaaatcgagatagtgtattttgctctcattctggttatgtacttggtcattctgatcggcaacggagtcctgataatcgcttctatttttgactcccacttccatacacccatgtatttctttctgggcaatctgagcttcctcgatatttgctatacatcctcctccgtcccctccacccttgtgagcttgatttcgaagaagcgaaacattagttttagcgggtgtgcagtccagatgttctttggctttgcgatgggatctacggaatgcctgctcctgggcatgatggctttcgacagatacgtggctatttgcaatcctttgaggtatccaatcattctcagcaaagttgcatacgtacttatggcgtctgtcagttggcttagcggaggcatcaacagtgctgtccagaccctgctggccatgcgacttcctttttgcggcaataacataatcaaccactttgcatgcgaaattcttgccgttctaaagctggcttgtgctgacatcagccttaacatcattaccatggtgatatcaaacatggcctttcttgtccttcctctcatggtgatttttttcagctacatgtttatcctgtatactatcctccaaatgaattctgctactggccgtcgcaaggctttcagcacatgctccgctcatctaaccgtcgttattatcttctatggcacaatcttcttcatgtatgccaagccaaaaagccaagacctcatcggcgaggagaagctgcaagcccttgacaagctcatctctctcttctacggggtcgtaacacccatgctgaaccccattctctatagcctgaggaataaagatgtcaaagcagccgttaagtatctgctgaacaagaaaccaatccattag

SEQ ID NO: 19219 - DNA, 1044 bp, Artificial Sequence
  derived and/or modified sequence
atgattgtgcagctgatctgcaccgtgtgcttcctggccgtgaacaccttccacgtgcgcagcagctttgacttcctgaaggcagatgacatgggagagatcaaccagaccctggtgtctgagttcctgctgctgggcctgagcggctaccccaagattgaaattgtgtactttgccctgatcctggtgatgtacctggtgatcctgattggaaatggagtgctgatcatcgccagcatctttgacagccacttccacacccccatgtacttcttcctgggcaacctgtccttcctggacatctgctacaccagcagctctgtgcccagcaccctggtgtccctcatcagcaagaagaggaacatctccttcagcggctgtgctgtgcagatgttctttggatttgccatgggcagcacagaatgtctgctgctgggcatgatggcctttgacagatatgtggccatctgcaaccccctgcgctaccccatcatcctgagcaaggtggcctacgtgctgatggcctctgtgtcctggctgagcggcggcatcaacagcgctgtgcagaccctgctggccatgaggctgcccttctgtggcaacaacatcatcaaccactttgcctgtgagatcctggccgtgctgaagctggcctgtgccgacatcagcctgaacatcatcaccatggtgatcagcaacatggccttcctggtgctgcccctgatggtgatcttcttctcctacatgttcatcctgtacaccatcctgcagatgaacagcgccaccggccgcaggaaggccttcagcacctgcagcgcccacctgactgtggtgatcatcttctacggcaccatcttcttcatgtatgccaagcccaagagccaggacctgattggagaggagaagctgcaggccctggacaagctgatcagcctcttctacggcgtggtgacccccatgctgaaccccatcctgtacagcctgaggaacaaggatgtgaaggctgctgtgaagtacctgctgaacaagaagcccatccactag

SEQ ID NO: 19220 - DNA, 1108 bp, Artificial Sequence
  derived and/or modified sequence
tcagaacttcaagcaagcactccttctaatatgtgtcaaaagaatgattgttcagttaatttgtactgtttgtttcttggcagtaaatacatttcatgttagatcttcttttgatttcctgaaagcagatgacatgggtgagattaaccagacacttgtgtcagaatttcttcttctgggtctttctggatacccaaagattgagattgtttactttgctctcattctagttatgtacctagtgattctaattggcaatggtgttctaatcatagccagcatctttgattctcattttcacacaccaatgtacttcttcctgggcaacctctctttcctggatatctgctatacatcctcctctgttccctcaacattggtgagcttaatctcaaagaaaagaaacatttccttctctggatgtgcagtgcagatgttctttgggtttgcaatggggtcaacagaatgtctgcttcttggcatgatggcatttgatcgttatgtggccatctgcaacccactgagataccccatcatcctgagcaaggtggcgtatgtattgatggcttctgtgtcctggctgtccggtggaataaattcagctgtgcaaacattacttgccatgagactgcctttctgtgggaataatattatcaatcatttcgcatgtgaaatattagctgtcctcaagctggcctgtgctgatatatccctcaatattatcaccatggtgatatcaaatatggccttcctggttcttccactgatggtcatttttttctcctatatgttcatcctctacaccatcttgcaaatgaattcagccacaggaagacgcaaggcattttccacgtgctcagctcacctgactgtggtgatcatattttacggtaccatcttctttatgtatgcgaaaccgaagtctcaagacctgattggggaagaaaaattgcaagcattagacaagctcatttctctgttttatggggtagtgacacccatgctgaatcctatactctatagcttgagaaataaggatgtaaaagctgctgtaaaatatttgctgaacaaaaaaccaattcactaatgaaaccaggacatgtaggtc

SEQ ID NO: 19221 - DNA, 1044 bp, Artificial Sequence
  derived and/or modified sequence
atgatcgtgcagctgatctgcaccgtgtgcttcctggccgtgaacaccttccacgtgcggagcagcttcgactttttgaaagctgacgacatgggcgagataaaccagaccctagtatccgagtttctactgttagggctgagcggatacccgaaaattgagattgtttattttgccttgatactggtcatgtatctggttatcctcattggtaacggggtgttaataattgcctctatcttcgattcacactttcatacaccaatgtacttctttctcgggaacctgtcattcctggatatctgttacacctcctcttcggtgccctctactctggtttcattgatttcgaaaaagcgcaacatctctttctctggctgcgccgttcagatgttttttggtttcgcaatggggtcaacggagtgcctgcttttaggtatgatggcctttgaccgctacgtagctatctgcaaccccctccgctaccccattattctgagtaaagtggcttacgtgctgatggctagcgtgagctggttgagcggaggcatcaatagcgccgtgcaaacccttctggcaatgcgcctccccttctgcggaaataatataatcaatcatttcgcttgcgaaatattggcagtgttgaagctggcatgcgctgacatcagtcttaatatcatcacaatggtgatttctaatatggccttcctggtgcttcccctcatggtaatattttttagctacatgttcatcctttacacaatactccaaatgaactcagctacgggccgcagaaaggctttctccacctgttctgcccatctgaccgtggtcataatattctatggtaccatattctttatgtacgcaaaacccaagtcccaggatttgattggtgaggaaaagttacaggccctagataagctcatttcactgttctacggagtcgtgacccctatgctaaacccgatcctctatagcctgagaaataaggacgtgaaggcggcagtcaaatatcttctcaacaagaaaccaattcattag

SEQ ID NO: 19222 - DNA, 1044 bp, Artificial Sequence
  derived and/or modified sequence
atgatcgtacaattgatttgcactgtgtgtttcctggcggtgaacacctttcatgtacgatctagcttcgattttctgaaggctgatgatatgggcgaaatcaatcagaccctggtatctgaattccttctgctgggcttgtccggctaccccaagattgaaatagtgtacttcgccttgatccttgtaatgtatctggtcatactcataggcaatggcgttttgatcatcgcatctatcttcgattctcactttcacacgcccatgtatttttttctgggtaatctttccttcctcgatatctgttatacatcatcatctgtgccatcaacgctggtgtctttgattagcaagaaaagaaatatatcatttagtggctgtgccgtccagatgttttttggattcgccatgggatcaacagaatgtttactactgggcatgatggcatttgatagatacgtggctatctgcaatccactgaggtatcccatcatcctgtcaaaggtggcctatgtgctcatggcctccgtgtcctggctgtcaggtggcattaactcagccgtgcagacactgctcgccatgcgtttaccattttgtggtaataacattattaaccacttcgcgtgtgagattttagcggtcctgaagctggcctgtgcggacatctcactgaatatcataactatggtcatcagcaacatggcctttctggtgctgcctctgatggttatcttcttctcatacatgttcatactctatacgattttgcagatgaactctgccaccgggaggcgcaaggcctttagtacttgcagcgcacacctgactgtggttattatcttctacggaactatcttctttatgtacgctaagccgaaaagtcaggacttgattggagaggaaaaattacaggctctggataagcttatatccctcttttacggtgtggtaacgcctatgttgaaccctattctgtatagtctccgcaacaaggacgtgaaggccgcagttaaatatctactgaacaagaaacccatccactag

SEQ ID NO: 19223 - protein, 487 aa, Artificial Sequence
  derived and/or modified sequence
MFSCFCFSLQDNSFSSTTVTECDEDPVSLHEDQTDCSSLRDENNKENYPDAGALVEEHAPPSWEPQQQNVEATVLVDSVLRPSMGNFKSRKPKSIFKAESGRSHGESQETEHVVSSQSECQVRAGTPAHESPQNNAFKCQETVRLQPRIDQRTAISPKDAFETRQDLNEEEAAQVHGVKDPAPASTQSVLADGTDSADPSPVHKDGQNEADSAPEDLHSVGTSRLLYHITDGDNPLLSPRCSIFSQSQRFNLDPESAPSPPSTQQFMMPRSSSRCSCGDGKEPQTITQLTKHIQSLKRKIRKFEEKFEQEKKYRVTKQDKNLIKPLYDRYRIIKQILSTPSLIPTIQEEEDSDEDRPQGSQQPSLADPASHLPVGDHLTYSNETEPVRALLPDEKKEVKPPALSMSNLHEATMPVLLDHLRETRADKKRLRKALREFEEQFFKQTGRSPQKEDRIPMADEYYEYKHIKAKLRLLEVLISKQDVAKTI

SEQ ID NO: 19224 - DNA, 1464 bp, Artificial Sequence
  derived and/or modified sequence
atgttcagctgcttctgcttcagcctgcaggacaacagcttcagcagcaccaccgtgaccgagtgcgacgaggaccccgtgagcctgcacgaggaccagaccgactgcagcagcctgagagacgagaacaacaaggagaactaccccgacgccggcgccctggtggaggagcacgccccccccagctgggagccccagcagcagaacgtggaggccaccgtgctggtggacagcgtgctgagacccagcatgggcaacttcaagagcagaaagcccaagagcatcttcaaggccgagagcggcagaagccacggcgagagccaggagaccgagcacgtggtgagcagccagagcgagtgccaggtgagagccggcacccccgcccacgagagcccccagaacaacgccttcaagtgccaggagaccgtgagactgcagcccagaatcgaccagagaaccgccatcagccccaaggacgccttcgagaccagacaggacctgaacgaggaggaggccgcccaggtgcacggcgtgaaggaccccgcccccgccagcacccagagcgtgctggccgacggcaccgacagcgccgaccccagccccgtgcacaaggacggccagaacgaggccgacagcgcccccgaggacctgcacagcgtgggcaccagcagactgctgtaccacatcaccgacggcgacaaccccctgctgagccccagatgcagcatcttcagccagagccagagattcaacctggaccccgagagcgcccccagcccccccagcacccagcagttcatgatgcccagaagcagcagcagatgcagctgcggcgacggcaaggagccccagaccatcacccagctgaccaagcacatccagagcctgaagagaaagatcagaaagttcgaggagaagttcgagcaggagaagaagtacagagtgaccaagcaggacaagaacctgatcaagcccctgtacgacagatacagaatcatcaagcagatcctgagcacccccagcctgatccccaccatccaggaggaggaggacagcgacgaggacagaccccagggcagccagcagcccagcctggccgaccccgccagccacctgcccgtgggcgaccacctgacctacagcaacgagaccgagcccgtgagagccctgctgcccgacgagaagaaggaggtgaagccccccgccctgagcatgagcaacctgcacgaggccaccatgcccgtgctgctggaccacctgagagagaccagagccgacaagaagagactgagaaaggccctgagagagttcgaggagcagttcttcaagcagaccggcagaagcccccagaaggaggacagaatccccatggccgacgagtactacgagtacaagcacatcaaggccaagctgagactgctggaggtgctgatcagcaagcaggacgtggccaagaccatctag

SEQ ID NO: 19225 - DNA, 1464 bp, Artificial Sequence
  derived and/or modified sequence
atgtttagttgcttctgcttctcactccaggataactctttttcgagtactactgttaccgagtgtgatgaggaccccgtaagcctccacgaagaccagaccgattgcagctctctacgtgatgagaacaacaaggaaaattatcccgatgcaggggctctggttgaggaacatgcaccccccagttgggaaccgcaacaacagaacgtggaagctaccgtgcttgtcgatagtgtgctgcggccctctatgggcaacttcaagtcccggaagcccaaatctatcttcaaagccgagagcggacgctcacatggcgagtctcaggaaacagagcacgtggttagtagtcagtcagagtgccaagttcgggctggaacacccgcacatgaaagccctcaaaataatgccttcaagtgtcaagagacggtacggctacaaccgcggatcgatcagagaacagctatcagtcccaaagacgctttcgagacgcgccaggacctgaacgaggaggaggcagcccaagtgcatggggtaaaggatccagcgccagccagcacgcagagtgttctggccgatggaaccgacagcgctgacccaagtcccgtgcataaggacggacagaatgaggctgattccgcccccgaggacttgcactctgtaggtacttcccggttgctctaccacatcactgatggggataatcccctgctgagccctagatgttcaattttctcacagagccagaggtttaacttagatcccgagagcgcaccatctcccccaagcacgcagcagttcatgatgcccaggtcatccagtcggtgcagctgcggagatggaaaagagccccagactattacccaactaaccaaacatatacagtcactcaagagaaagataaggaagttcgaagaaaagttcgaacaggaaaagaagtaccgcgtaacaaaacaagacaagaatctgatcaagccgctgtacgatcgttatcgtattatcaaacagatcctctctactcctagtctgattcctacaattcaagaggaggaagattccgacgaagaccgcccacagggatcccagcagcccagccttgccgacccagccagccacctgcccgtgggagaccatctgacctatagtaacgaaacagagcccgtgcgggcattactgcctgatgagaaaaaggaagtcaagcctcctgctttatctatgtcaaacttgcacgaagccacgatgccggtcttactcgatcatctcagggagactagagccgacaaaaagaggctgaggaaagcgctccgggagttcgaggaacagtttttcaaacaaacaggaaggtccccccagaaggaagatcgaatccctatggcggacgaatattacgaatataaacacattaaggctaagctcaggctcctcgaagtactgatctctaaacaagacgtggcaaagacgatctag

SEQ ID NO: 19226 - DNA, 3031 bp, Artificial Sequence
  derived and/or modified sequence
gtgcagacagcagcccaaggtagagcgagcgtgccgggcgagcccggagacttgccttgcaatgccatgtttgtgtatgtgctcactcccggagagcaatcagggagacggctccccggccagacttggctgatgttttcttgtttctgtttcagccttcaggataattccttcagcagcaccactgtaacagagtgtgacgaagatccagtctctctacatgaagaccagactgattgctccagtctcagagatgaaaacaataaagagaactaccccgacgcaggggctctggtagaagagcacgcgccgccctcttgggagccgcagcagcagaatgtagaggcgaccgtgctggtggacagcgtattgcgacccagcatgggcaacttcaagtccaggaagcccaagtccatcttcaaagcggagagcgggaggagccacggagaaagtcaggagacagagcatgtggtatccagccagtcagagtgtcaggtgagagcaggaacaccagctcatgagagtccacaaaacaatgccttcaagtgccaagaaacagtgcgacttcaaccaagaatagaccagaggactgccatttcgccaaaggatgcttttgaaactcggcaggacttaaatgaggaagaagctgctcaggtgcatggagtcaaggacccggcgccagcatcaacccagagcgtgcttgccgatgggacagattctgcagacccctcaccagtccacaaagatgggcagaatgaggccgacagtgcaccagaagacctccactctgtggggaccagcaggctgctctatcacatcactgatggtgataacccactgctgtcgccacgatgctccatcttcagccaaagccagagattcaacttagaccccgagtcagccccatctccacccagcactcagcagtttatgatgccgcggagttcttcacgctgcagctgtggagatggcaaggagccacagaccatcacccagctcaccaagcacatccagagcctcaagcggaaaattcggaaatttgaagaaaaatttgaacaagaaaagaaataccgggtaactaagcaagacaagaacctcataaagccgctttatgaccgatacagaattatcaagcaaatcttgtcaacaccttcccttattccaacaattcaggaggaagaggactctgatgaagaccgtccacagggaagccaacaaccttctttggcagatccagcatctcaccttcctgttggtgaccacctcacctactctaatgagactgagcctgttagggcccttttaccagatgaaaagaaagaagtaaaaccaccagctctctccatgtctaatttacatgaggctaccatgcctgtacttcttgaccatctccgagaaactagggctgacaagaagagactgcggaaagccttaagagaatttgaagaacagttttttaaacaaacaggaagaagtccacaaaaggaagataggataccaatggcagatgagtattatgaatataagcacataaaagccaaactgagactattagaggtcctcatcagcaagcaagatgtggccaaaactatttgaggttcaggaaatgttatgatcactttcacccatgatataaagtaaagtttattttcctctgccatccttgctaagtagttttgacacaatgaaaatggaagcactttagtggtagtattagctgtttttaagaaggaatagcaagtttaattatatacaaggagaagggatttaaacggggggaagaatacaacaggtagccatataattgggaaaaaattcagtgtcctccatgccaagcagaaaactcatagtcaatacaagtatttttaaaaatgtctaatattttatcaaatctaaataacatagctaggacacttgttagggaaagtttatttagtatccaaagactgtttatgttgatgtatggaaaagagcatgattttaaaaaatcaatcataggaggaaaagaaattcgcttttcaagtaggaaggaatacagctagcaagaaagcaatttatttgaaacttctaatggatttttgagtgataaaacatttactaccttgtcctttaagtctgctaggctctcagtaccctaaaataaactagattgtgttgctatttttttctttctctataaaaataacacattattttatccgttatttgaaattttacatttctggttaccaaagttcattctgatagcatgtactttgtgaattattatctttgtctataactgacagatgtttatattaaaataaaatattgtattaaaaatttaaaataggtattttggatagatatgtgtctgtagtatataatctaatgtgtccatagtattattgctaatcttttggtttactataagatgatataactattttttcattgggaatatacatttttcttaatgttccaacatctatactttgtaaagtcaaaacatttcccatgagctgtagttattcatccttctgtacaaaatgaaaagtttggaaattgtttgccctgataccttgaaaaagaagccagaatatttatttgcttcatcaacttcagtgtatatcattttgtgttattttatacgaaaacatgtttattattttcatttttgtaaaaggaagtaaaaggtcaacattttctctcatgtaccaaccttgtttgtatttctattttctgtaatgtttaagtatgatgttgaagaaattcacattctcttatagtttggatgggaagactattgactatttcagaaacagacttatttcagaggcttattgttttctctgtatttacctaatattttataacttttatgaatcagaataatgtccttcataaatttgtttaattgaagtcatctacttctaacaggacagatacacaactatttgaggtttacaaattacatctttgataagggaaatggtttcgtgacatgtacacagttgctattaaaatgtaactctatatattctatatgatt

SEQ ID NO: 19227 - DNA, 1464 bp, Artificial Sequence
  derived and/or modified sequence
atgttcagctgcttctgcttcagcctgcaggacaacagcttcagcagcaccaccgtgacagaatgtgatgaggaccctgtgtccctgcacgaggaccagacagactgcagcagcctgagagatgagaacaacaaggagaactacccagatgctggggccctggtggaggagcacgccccacccagctgggagccccagcagcagaatgtggaggccaccgtgctggtggacagcgtgctgcggcccagcatgggcaacttcaagagcaggaagcccaagagcatcttcaaggccgagagcggccgcagccacggggagagccaggagacagagcacgtggtgagcagccagagcgagtgccaggtgcgggccggcaccccagcccacgagagcccccagaacaatgccttcaagtgccaggagaccgtgcggctgcagcccagaattgaccagaggacagccatcagccccaaggatgcctttgagacccggcaggacctgaatgaggaggaggccgcccaggtgcacggcgtgaaggaccctgccccagccagcacccagagcgtgctggctgatggaacagacagcgctgaccccagccctgtgcacaaggatggccagaatgaggccgacagcgcccctgaggacctgcacagcgtgggcaccagccggctgctgtaccacatcacagatggagacaaccccctgctgagcccccgctgcagcatcttcagccagagccagcgcttcaacctggaccctgagagcgcccccagcccccccagcacccagcagttcatgatgcccaggagcagcagccgctgcagctgtggagatggcaaggagccccagaccatcacccagctgaccaagcacatccagagcctgaagaggaagatcaggaagtttgaggagaagtttgagcaggagaagaagtacagagtgaccaagcaggacaagaacctgatcaagcccctgtatgaccgctaccgcatcatcaagcagatcctgagcacccccagcctcatccccaccatccaggaggaggaggacagtgatgaggaccggccccagggcagccagcagcccagcctggccgaccctgccagccacctgcctgtgggggaccacctgacctacagcaatgaaacagagcctgtgcgggccctgctgcctgatgagaagaaggaggtgaagcccccagccctgtccatgagcaacctgcacgaggccaccatgcctgtgctgctggaccacctgcgggagaccagggctgacaagaagaggctgaggaaggccctgcgggagtttgaggagcagttcttcaagcagacaggccgcagcccccagaaggaggaccgcatccccatggctgatgagtactatgagtacaagcacatcaaggccaagctgcggctgctggaggtgctgatcagcaagcaggatgtggccaagaccatctag

SEQ ID NO: 19228 - DNA, 1464 bp, Artificial Sequence
  derived and/or modified sequence
atgttcagctgcttctgcttcagcctgcaggacaacagcttcagctccacgaccgtcaccgaatgcgatgaagaccctgtgtctttgcatgaagatcagactgattgttctagtctgagagatgagaataacaaggagaactaccctgacgccggggccttggtagaagagcacgccccccccagctgggagccacaacaacagaacgtcgaggcaacagtgctcgtcgactctgtcttaagacccagtatgggtaatttcaagagccgcaagccaaaaagcatcttcaaagccgagtccggaagaagccacggcgagtcacaggaaaccgaacatgttgtttcctcccaatccgaatgtcaggtgcgtgcgggtacacccgctcatgagagtccacagaataatgcctttaagtgtcaagagacggtgcggcttcagccaagaattgaccagcgcacagcaatatcccctaaggacgccttcgaaacccgtcaggacctcaacgaagaggaggcagcccaggtacacggcgtcaaagacccagctcccgcttccactcaatccgtgttagcagatggaacagactcggctgacccttcaccagtgcacaaagatggacagaatgaagccgatagtgcgccagaagacttacactcagttggaacgagccgcctgttataccacatcactgacggggacaaccccctgctgtctcctcgctgctcaatcttctctcagtcccagaggttcaacttagatccagaatccgctccttcaccacccagtacacaacagttcatgatgcctaggtccagcagcagatgttcctgcggcgatggtaaggagccacagaccataacacagttgacgaagcacatccagtccctgaagcggaaaattagaaaatttgaagagaagttcgaacaggagaaaaagtacagagtaaccaagcaagataaaaatctgatcaagcccctgtacgaccgataccgaatcatcaagcagatcctgtcgacccctagcctcattcctaccatccaggaagaggaagactcggacgaagaccgcccccaaggctcgcagcagcccagcctcgctgacccagcctcacatcttcccgtaggcgaccatctgacctactctaatgagacggagcctgtgagggccttgctacctgacgagaagaaggaggtgaagcccccagcactcagcatgtctaatttacacgaagccacaatgcctgtgctgctggaccatctgcgagagacgagggcagacaaaaaaaggctgaggaaggccctgagagaatttgaagaacaattttttaagcaaactggcagatcaccccagaaagaagaccgaattcctatggcggatgagtattatgagtacaagcacattaaagcaaaactacggctgcttgaagtcctaatcagcaagcaggatgtagccaaaacgatctag

SEQ ID NO: 19229 - DNA, 1464 bp, Artificial Sequence
  derived and/or modified sequence
atgttctcctgcttctgctttagtcttcaggataactccttcagcagcacaaccgtgactgaatgtgatgaggaccctgtttctctacacgaagaccagactgattgcagttctctccgcgacgaaaacaataaagagaactatcccgatgcaggcgctctggtggaagagcacgcgccacccagctgggagccacagcagcagaacgtggaagcaacagtgctggtggactctgtactgcggcctagcatgggcaacttcaagtcgcgaaagccaaagagtatatttaaagcagagtccggcagatcccatggggaaagccaggaaaccgagcatgtcgttagctcacagagtgaatgtcaggtgcgcgcagggactcccgctcacgaatcgccccaaaataacgcttttaagtgccaggaaaccgtgcgactgcagccacgcatcgaccaacgcactgcgatctcccctaaggacgcttttgagaccaggcaggatttgaacgaggaggaagctgctcaagtgcacggggtcaaggatcccgcaccggcatcaacccagtccgttctggccgacggaaccgattctgctgacccatcacccgtgcataaggacgggcagaacgaggcagattcagctcccgaggatctgcactccgtggggacttctcgactactatatcacatcactgacggagataatccattactctcacctaggtgtagcattttctcccaaagtcagcgattcaatctggatccggaatccgcaccaagtcccccttcaacacagcagttcatgatgccaaggagctcatccaggtgcagttgcggcgatgggaaggagccacagacaataacacagctgaccaagcatattcaaagtctgaagagaaagattcggaaattcgaggagaaattcgaacaggagaagaagtaccgcgtcacaaaacaggataaaaacctgattaagccgttatacgatcgataccggatcattaaacagatactgtctacaccatccttgattcctacaattcaggaggaggaagactcagacgaggaccgaccccaggggtcccagcagccgagtctggctgaccccgcttcgcacctccctgtcggagaccacctgacatattccaatgagacagaacccgtgcgcgcactgctacctgacgagaagaaagaggtaaagccccctgcattgtctatgagcaacctgcacgaagctacaatgccagtactacttgaccatttacgcgagaccagagcagacaagaagcggctgagaaaagccctacgtgaattcgaagaacagttctttaagcagaccggcaggagccctcagaaagaagatagaatcccaatggctgacgagtattatgaatacaaacatattaaggccaaactccggctgttagaagtgctgatctcaaagcaggatgtggctaaaaccatctag

SEQ ID NO: 19230 - protein, 298 aa, Artificial Sequence
  derived and/or modified sequence
MFSRAGVAGLSAWTLQPQWIQVRNMATLKDITRRLKSIKNIQKITKSMKMVAAAKYARAERELKPARIYGLGSLALYEKADIKGPEDKKKHLLIGVSSDRGLCGAIHSSIAKQMKSEVATLTAAGKEVMLVGIGDKIRGILYRTHSDQFLVAFKEVGRKPPTFGDASVIALELLNSGYEFDEGSIIFNKFRSVISYKTEEKPIFSLNTVASADSMSIYDDIDADVLQNYQEYNLANIIYYSLKESTTSEQSARMTAMDNASKNASEMIDKLTLTFNRTRQAVITKELIEIISGAAALD

SEQ ID NO: 19231 - DNA, 897 bp, Artificial Sequence
  derived and/or modified sequence
atgttctcccgggcaggggttgcaggcctgtccgcttggactctgcagccacagtggatccaggttcgtaacatggccacactgaaggatatcacgcgacgcctgaaatcaataaaaaatattcagaagatcacaaagtctatgaagatggtagccgcagctaagtacgcaagggcagagagggagctgaaacctgcgagaatctatggacttgggagcctggcattgtatgaaaaagctgatatcaaaggacccgaagacaagaaaaagcacctgctcattggcgtgagctcagaccgcggactctgcggagcaatccatagtagcatcgctaagcagatgaagtccgaagtggctactctgactgccgcagggaaagaggtcatgctggtcgggatcggtgataagatcaggggaatcctataccgcactcacagcgatcagttcctagtcgcattcaaggaggttgggagaaaaccccctaccttcggtgacgcatcagtgatagctctggaattacttaactccggctacgagtttgacgaagggtctattattttcaacaagtttagatcagtcatctcatataagaccgaagaaaagcccatattctccttgaacaccgttgcttcggcagactccatgagcatttacgacgatatcgacgccgatgtactgcagaactaccaggaatataatctcgccaacattatctactacagtctgaaggaaagtacgaccagcgagcaaagcgcccggatgaccgccatggataacgcaagcaagaatgcctcggaaatgatcgataagttgactctgactttcaacagaacacgccaggccgttatcacgaaggagctgattgaaattatcagcggcgctgccgctctcgactag

SEQ ID NO: 19232 - DNA, 897 bp, Artificial Sequence
  derived and/or modified sequence
atgttcagcagagctggggtggccggcctgagcgcctggaccctgcagccccagtggatccaggtgaggaacatggccaccctgaaggacatcacccggcggctgaagagcatcaagaacatccagaagatcaccaagtccatgaagatggtggccgccgccaagtatgcccgggcagagcgggagctgaagccagcccgcatctacggcctgggcagcctggccctgtatgagaaggctgacatcaagggccctgaggacaagaagaagcacctgctgattggagtgtccagtgaccggggcctgtgtggggccatccacagcagcatcgccaagcagatgaagtctgaggtggccaccctgacagctgctgggaaggaggtgatgctggtgggcattggagacaagatccggggcatcctgtaccgcacccacagcgaccagttcctggtggccttcaaggaggtgggcaggaagccacccacctttggagatgcctctgtgattgccctggagctgctgaacagcggctatgaatttgatgagggcagcatcatcttcaacaagttccgcagcgtcatctcctacaagacagaggagaagcccatcttcagcctgaacacagtggccagcgctgacagcatgagcatctatgatgacattgatgctgatgtgctgcagaactaccaggagtacaacctggccaacatcatctactacagcctgaaggagagcaccaccagcgagcagagcgccaggatgacagccatggacaatgccagcaagaatgccagcgagatgattgacaagctgaccctgaccttcaacagaacccggcaggccgtcatcaccaaggagctgattgagatcatcagcggggctgctgccctggactag

SEQ ID NO: 19233 - DNA, 897 bp, Artificial Sequence
  derived and/or modified sequence
atgttcagccgggccggcgtggccggcctgagcgcctggaccctgcagccccagtggatccaggtgcgcaacatggccactctcaaagacattacccgcagactgaaatctattaaaaatatccagaaaatcaccaagtcaatgaaaatggtcgcggcagcgaaatatgcccgggccgagagagaactgaagccagcgcgaatatatggcctgggttccctggccctgtatgaaaaagcagatatcaagggcccagaggacaaaaagaagcacctgctcatcggagtatcctctgatcggggactctgtggagccatccactcaagcatcgcaaaacagatgaagtccgaggtggctaccctcactgcagcaggcaaggaggtgatgctggtggggatcggcgacaaaattagggggattctgtaccggacccacagtgaccagttcctggttgcattcaaagaggtcgggaggaagccccccactttcggggacgccagtgttatcgccctggaactgttgaatagcggatatgagtttgatgagggttctattatctttaacaagttcagatcagtaatctcatacaaaaccgaagagaagcccatattctcactcaacacggtcgccagtgcagactctatgtccatctatgatgatatcgacgccgacgtcttgcagaactaccaggaatataacctcgccaacataatctactattcgttaaaggaatccacgacatcggaacagtcggcaagaatgaccgccatggacaacgcctccaaaaatgcctccgagatgattgataagctcacccttacttttaaccggaccaggcaagcagtgatcacaaaggaattaattgagatcattagcggtgctgcggctcttgattag

SEQ ID NO: 19234 - DNA, 897 bp, Artificial Sequence
  derived and/or modified sequence
atgttcagccgcgctggggtggcgggactgagtgcttggacgttgcagccacagtggatccaggtgcgcaatatggccacattaaaggacatcacgagacgcctaaagagcatcaaaaatattcagaagattaccaagagcatgaaaatggtggcagccgcaaaatacgccagagctgagcgggagctcaagcctgctagaatctacggtctgggttcactagcattgtacgagaaagctgatatcaaaggccctgaagacaagaagaaacaccttctaattggggtgagttccgaccgcggactgtgtggagctatccactcaagcatcgccaagcagatgaaatccgaagtagcaacattaactgcagctggcaaggaggtgatgctggtcgggattggcgataaaataaggggcattctgtacaggacccatagtgatcagttcctggtggccttcaaagaagtagggaggaaaccccctacattcggagacgctagcgtgatcgcactggaattgctcaactctggatacgaattcgacgagggttccattatatttaataaatttagatcggtcatctcctataagacagaggagaagccaatctttagtctgaatacggtggcttcagctgatagcatgagcatttacgatgatatcgatgcggatgtgctccagaattatcaggagtataatctggctaatattatctactatagcttgaaggagtctaccacctctgagcagtcggccaggatgacagcaatggataatgcatctaagaacgctagtgaaatgattgacaaattaactctgacgttcaaccggacccgacaggccgttatcaccaaagaacttattgaaatcatctccggagccgctgcgcttgactag

SEQ ID NO: 19235 - DNA, 1163 bp, Artificial Sequence
  derived and/or modified sequence
tgggaggggcgcgctggggagcttcggcgcatgcgcgctgaggcctgcctgaccgaccttcagcagggctgtggctaccatgttctctcgcgcgggtgtcgctgggctgtcggcctggaccttgcagccgcaatggattcaagttcgaaatatggcaactttgaaagatatcaccaggagactaaagtccatcaaaaacatccagaaaattaccaagtctatgaaaatggtagcggcagcaaaatatgcccgagctgagagagagctgaaaccagctcgaatatatggattgggatctttagctctgtatgaaaaagctgatatcaaggggcctgaagacaagaagaaacacctccttattggtgtgtcctcagatcgaggactgtgtggtgctattcattcctccattgctaaacagatgaaaagcgaggttgctacactaacagcagctgggaaagaagttatgcttgttggaattggtgacaaaatcagaggcatactttataggactcattctgaccagtttctggtggcattcaaagaagtgggaagaaagccccccacttttggagatgcgtcagtcattgcccttgaattactaaattctggatatgaatttgatgaaggctccatcatctttaataaattcaggtctgtcatctcctataagacagaagaaaagcccatcttttcccttaataccgttgcaagtgctgacagcatgagtatctatgacgatattgatgctgacgtgctgcaaaattaccaagaatacaatctggccaacatcatctactactctctgaaggagtccaccactagtgagcagagtgccaggatgacagccatggacaatgccagcaagaatgcttctgagatgattgacaaattgacattgacattcaaccgtacccgccaagctgtcatcacaaaagagttgattgaaattatctctggtgctgcagctctggattaatgaaaatcaagttccatcctcagacaagaggtaaagaaggaaaattcagccagttgattttgtttttagcttactgctgcctttgtccgaagaaactgttcctccattatttgaattactgaagacagcaagatatttgtaaattatcttaaaataaacaacttaaaataaaatcattgtttttctt

SEQ ID NO: 19236 - DNA, 897 bp, Artificial Sequence
  derived and/or modified sequence
atgttcagcagagccggcgtggccggcctgagcgcctggaccctgcagccccagtggatccaggtgagaaacatggccaccctgaaggacatcaccagaagactgaagagcatcaagaacatccagaagatcaccaagagcatgaagatggtggccgccgccaagtacgccagagccgagagagagctgaagcccgccagaatctacggcctgggcagcctggccctgtacgagaaggccgacatcaagggccccgaggacaagaagaagcacctgctgatcggcgtgagcagcgacagaggcctgtgcggcgccatccacagcagcatcgccaagcagatgaagagcgaggtggccaccctgaccgccgccggcaaggaggtgatgctggtgggcatcggcgacaagatcagaggcatcctgtacagaacccacagcgaccagttcctggtggccttcaaggaggtgggcagaaagccccccaccttcggcgacgccagcgtgatcgccctggagctgctgaacagcggctacgagttcgacgagggcagcatcatcttcaacaagttcagaagcgtgatcagctacaagaccgaggagaagcccatcttcagcctgaacaccgtggccagcgccgacagcatgagcatctacgacgacatcgacgccgacgtgctgcagaactaccaggagtacaacctggccaacatcatctactacagcctgaaggagagcaccaccagcgagcagagcgccagaatgaccgccatggacaacgccagcaagaacgccagcgagatgatcgacaagctgaccctgaccttcaacagaaccagacaggccgtgatcaccaaggagctgatcgagatcatcagcggcgccgccgccctggactag

SEQ ID NO: 19237 - protein, 404 aa, Artificial Sequence
  derived and/or modified sequence
MPYVDRQNRICGFLDIEENENSGKFLRRYFILDTREDSFVWYMDNPQNLPSGSSRVGAIKLTYISKVSDATKLRPKAEFCFVMNAGMRKYFLQANDQQDLVEWVNVLNKAIKITVPKQSDSQPNSDNLSRHGECGKKQVSYRTDIVGGVPIITPTQKEEVNECGESIDRNNLKRSQSHLPYFTPKPPQDSAVIKAGYCVKQGAVMKNWKRRYFQLDENTIGYFKSELEKEPLRVIPLKEVHKVQECKQSDIMMRDNLFEIVTTSRTFYVQADSPEEMHSWIKAVSGAIVAQRGPGRSASSEHPPGPSESKHAFRPTNAATATSHSTASRSNSLVSTFTMEKRGFYESLAKVKPGNFKVQTVSPREPASKVTEQALLRPQSKNGPQEKDCDLVDLDDASLPVSDV

SEQ ID NO: 19238 - protein, 114 aa, Artificial Sequence
  derived and/or modified sequence
MPYVDRQNRICGFLDIEENENSGKFLRRYFILDTREDSFVWYMDNPQNLPSGSSRVGAIKLTYISKVSDATKLRPKAEFCFVMNAGMRKYFLQANDQQDLVEWVNVLNKAIKIT

SEQ ID NO: 19239 - DNA, 1215 bp, Artificial Sequence
  derived and/or modified sequence
atgccatacgttgatcgccagaatagaatttgtgggtttctggatattgaggaaaacgagaactctgggaagttcctccgtagatacttcatcctcgacacacgagaagatagcttcgtatggtacatggataatcctcagaacctgccatctggctcttcccgtgtgggggcaatcaagctgacatatatttctaaggtcagtgatgccactaaacttcgccccaaggctgagttttgcttcgtaatgaatgcaggaatgcgcaaatatttccttcaggctaatgaccagcaggacctggtggagtgggtcaatgtgctgaacaaggccataaagataactgtgccaaagcaaagcgacagccagcccaattccgacaacttatctaggcatggcgaatgtggtaagaaacaagtttcttatagaacagacatcgtggggggcgtgcctataattacaccaacacagaaggaggaggtgaatgagtgtggcgagtctattgataggaataacctgaagagaagtcagtcacatctcccctactttacccctaagccaccccaagactcagctgtgattaaggcggggtattgtgtcaagcaaggagccgtcatgaaaaattggaaacggcgttattttcaactagatgaaaacactatcgggtactttaagtccgagctggaaaaggagcccttgcgggtgatcccacttaaagaggtccacaaagttcaggagtgcaaacagtcagacatcatgatgcgcgacaacctgttcgaaatcgtcactaccagcagaactttctacgtacaggccgacagccctgaagagatgcactcctggatcaaagccgtatccggcgccatagtcgctcagcgcggacctggccggtctgctagttctgagcatccccccggcccttccgagtctaaacacgcctttcgcccgaccaacgcggccacagctacttcgcattctacagctagcaggagcaactccttagtgagcaccttcactatggagaaaaggggattctacgaaagtctcgcaaaagtaaagcctggaaattttaaagtccagaccgttagccctagggaacccgcatccaaggttaccgagcaagccctcctgcggccgcagtctaagaatggccctcaggagaaagactgcgatctcgtggaccttgatgatgcttcactccccgtgtcggacgtctag

SEQ ID NO: 19240 - DNA, 1215 bp, Artificial Sequence
  derived and/or modified sequence
atgccgtacgtggatcgacagaatagaatctgtggttttctggatattgaagaaaacgagaacagcggaaagtttttaaggagatattttatcctggacacacgagaagactcattcgtttggtacatggacaaccctcagaatctgccctcgggaagcagtcgcgtcggtgcaattaagctgacctacatatcgaaagtgtctgacgctaccaaacttagacctaaggcagaattctgcttcgtcatgaacgccgggatgcgaaaatacttcctgcaagctaacgatcagcaggacctggtagagtgggtgaacgtgctgaataaggcaataaagattaccgtcccaaagcagtctgacagccagcctaatagtgataacctgtccagacacggcgagtgtggaaaaaaacaagtgagctataggacagatatcgtgggcggtgtgcccattataacgcccacgcagaaagaagaagtgaacgaatgtggcgagagcatcgacaggaataatctgaaaaggtctcagagtcatctgccgtacttcactcctaaaccaccccaggactctgctgtgattaaggctggatactgtgttaaacaaggcgccgttatgaagaactggaagcgaaggtacttccaactcgacgagaataccatcggatatttcaagagcgaattggagaaggagccactgcgggtaatacctttgaaggaggttcataaggtgcaggagtgcaagcagagcgatatcatgatgagggacaacctgtttgagattgtaactacaagccgcacgttctatgtccaagctgatagccccgaggagatgcactcctggatcaaggctgtgagtggggccatcgtcgcgcagcgtggcccgggacgtagtgctagcagtgagcaccccccaggccctagtgagagtaagcacgcattcaggccaactaatgccgcgactgccacctcccatagcaccgcttcacgctccaatagtttagtgtcgacatttactatggaaaagagaggtttttatgagtcactggctaaagtgaagccgggcaacttcaaagtgcagacggtgagtccaagggagccagcatctaaggttactgagcaggcactgcttagaccacaatcaaaaaacgggccacaggagaaggactgtgatttggtagatctggacgatgcctctctgccagtgtcagacgtgtag

SEQ ID NO: 19241 - DNA, 1215 bp, Artificial Sequence
  derived and/or modified sequence
atgccttatgtcgatcgccagaacagaatttgcgggttcttagacatagaagagaatgagaacagcgggaaatttctgcgccggtatttcattttggatacacgggaggactcattcgtgtggtacatggataatccacagaatttacctagtgggagctctcgcgtaggcgccattaagcttacctacatatccaaggtctctgatgccaccaaactgcgccctaaagcagaattttgtttcgttatgaacgctggtatgcgaaaatatttcctgcaagccaacgaccaacaggatttagtggagtgggtaaatgtcctcaacaaagccatcaagattaccgtccctaagcagtcagactctcaacccaattcagacaacctgtctcgccatggcgaatgtgggaaaaaacaagtgagctacaggacagacatcgtgggcggggtaccaatcatcacacctacgcagaaggaagaagttaacgaatgcggtgaatcaattgataggaacaacttaaaaagatcccaatcacatctcccctacttcacccccaaaccgccgcaggattccgcagtgattaaggcaggatattgcgtgaaacaaggagcagtgatgaagaactggaaaagaaggtactttcagctggatgagaacactattgggtacttcaaaagcgaattggaaaaggagcccctgagggtgatcccgctaaaagaagttcacaaggtgcaggagtgtaaacagagcgacatcatgatgcgggacaacctatttgaaatcgttaccaccagccggaccttttacgtgcaagccgatagccctgaggagatgcatagctggatcaaggcggtgtcaggcgctatcgtagcacagagagggcctggccggagcgcttcaagcgagcatccgcctggaccaagtgaatctaaacatgcattcaggccaacaaacgctgcaaccgctaccagccactctaccgcgtcccgctcgaatagtctggtcagtaccttcacaatggagaaaagaggcttttacgagtccctggctaaggtgaagcccgggaattttaaggtacagaccgtctccccacgagaacccgccagcaaggttactgaacaggccctactgaggccgcagagcaagaatggccctcaagagaaggactgtgacctcgtggacctagacgacgcatccctccccgtgagcgacgtatag

SEQ ID NO: 19242 - DNA, 1215 bp, Artificial Sequence
  derived and/or modified sequence
atgccctacgtggaccggcagaaccgcatctgtggcttcctggacatcgaggagaatgaaaacagcggcaagttcctgcggcgctacttcatcctggacacccgggaggacagctttgtgtggtacatggacaacccccagaacctgcccagcggcagcagccgggtgggcgccatcaagctgacctacatcagcaaggtgtctgatgccaccaagctgcggcccaaggccgagttctgctttgtgatgaatgccggcatgaggaagtacttcctgcaggccaatgaccagcaggacctggtggagtgggtgaatgtgctgaacaaggccatcaagatcaccgtgcccaagcagagcgacagccagcccaacagcgacaacctgagcagacatggagaatgtgggaagaagcaggtgtcctacagaacagacatcgtgggcggcgtgcccatcatcacccccacccagaaggaggaggtgaatgaatgtggggagagcattgacaggaacaacctgaagaggagccagagccacctgccctacttcacccccaagccaccccaggacagcgctgtgatcaaggccggctactgtgtgaagcagggcgctgtgatgaagaactggaagaggcgctacttccagctggatgagaacaccatcggctacttcaagtctgagctggagaaggagcccctgcgggtcatccccctgaaggaggtgcacaaggtgcaggagtgcaagcagagcgacatcatgatgagggacaacctgtttgagatcgtgaccaccagcaggaccttctacgtgcaggccgacagccctgaggagatgcacagctggatcaaggctgtgtctggggccatcgtggcccagaggggccctggccgcagcgccagcagcgagcaccccccaggccccagcgagagcaagcacgccttccggcccaccaatgctgccacagccaccagccacagcacagccagccgcagcaacagcctggtgtccaccttcaccatggagaagaggggcttctatgagagcctggccaaggtgaagccaggcaacttcaaggtgcagacagtgagcccccgggagcccgccagcaaggtgacagagcaggccctgctgcggccccagagcaagaatggcccccaggagaaggactgtgacctggtggacctggatgatgccagcctgcctgtgtctgatgtgtag

SEQ ID NO: 19243 - DNA, 1215 bp, Artificial Sequence
  derived and/or modified sequence
atgccctacgtggaccggcagaaccggatctgcggcttcctggacattgaggagaatgagaactctgggaagtttctgagacggtactttatactggacacccgagaagattcatttgtgtggtacatggataatccccagaacttgcctagcgggtctagccgggtgggagccatcaaactaacatatatctctaaggtatccgacgccaccaagctgcggcctaaggcagagttttgtttcgtcatgaatgcggggatgagaaagtatttccttcaagctaacgaccagcaagaccttgttgaatgggtgaacgtgttgaataaagccatcaagatcacggtgccgaaacaaagcgacagtcagccaaacagcgataacttgagcagacacggcgagtgtggcaagaagcaagtaagctaccgcaccgacatagtaggcggcgtacccatcatcactcccactcagaaggaggaggtaaacgagtgtggggagtctattgataggaataacctgaaacggtcccagtctcatcttccatactttacacctaagccaccgcaggacagcgccgtgattaaggcggggtattgcgttaagcagggtgcagtgatgaagaactggaagcgtcggtacttccagctggatgaaaacactatcggatacttcaaaagcgagttggaaaaggaaccactccgcgttattccgcttaaggaagttcacaaggtccaagaatgcaagcagtctgatattatgatgcgggacaacctctttgaaatcgtgaccacatccaggaccttttacgtgcaggctgattcgcctgaggagatgcattcttggatcaaggcagtcagtggagccatagttgcgcagcgcggcccaggcaggagtgcgtcatctgaacatccacccggaccatccgaatctaaacatgccttccgcccaactaatgccgccacggcgacttcacattccacagccagcaggtcaaactcactggttagtacatttactatggagaaaagaggcttctacgagagccttgccaaggtaaaacccggcaactttaaagtgcagaccgtatctcctcgagagcccgcctccaaagtaactgagcaagctcttctcaggcctcagtcgaagaacgggcctcaagaaaaggactgtgacctggtcgatttggatgatgcatcattgccggtctcggacgtttag

SEQ ID NO: 19244 - DNA, 1215 bp, Artificial Sequence
  derived and/or modified sequence
atgccctacgtggaccggcagaaccggatctgcggcttcctggacatcgaggaaaacgaaaatagcggtaaatttctgcggcgttacttcattctggacacaagggaggatagctttgtgtggtatatggataatccacagaaccttccttctggttcatccagagttggcgctattaagcttacgtatatttctaaagtctctgacgccaccaagctccggccaaaagccgagttctgttttgtgatgaacgccgggatgcggaaatatttcttgcaggcaaacgatcagcaagacctggtggagtgggtgaatgtgctgaacaaagccatcaagatcacagttccaaagcagtccgattcccagccaaattccgataatctgagtcggcatggagaatgtggcaagaaacaggtatcatatcgaacagacattgtgggaggcgtgccaattattacccccactcaaaaggaggaagttaacgaatgcggggagagcattgaccggaacaatctgaagcgctctcagtcacatttaccctacttcactcccaagcctcctcaggattcagccgtgattaaagcgggctattgcgttaagcagggcgctgtaatgaaaaattggaaaagacggtattttcagcttgatgagaacactatcggctattttaaaagcgaactggagaaagagccgttgcgggttattcccctgaaagaagtgcacaaagtgcaagagtgcaaacaatcagacatcatgatgcgggataatctgtttgagattgtgactacctctcggacgttttacgttcaggcggactcaccagaagaaatgcactcctggatcaaggctgtgtcaggagccatagtcgcacagcggggccctgggaggtctgcgagctccgagcatccacccggcccgtccgaatctaagcatgcttttaggcctactaatgctgcaactgcgacatctcacagcacagcaagcagatccaattctctcgtttccacctttacgatggaaaagcggggattttacgaaagtctagcaaaggtcaaacccggaaactttaaagtccagactgtgagcccacgtgaacccgccagtaaagtcacagaacaggctcttctccgacctcagtctaagaacggtccacaggaaaaagattgcgacttggtggatcttgacgacgctagcttacccgtaagcgatgtgtag

SEQ ID NO: 19245 - DNA, 1215 bp, Artificial Sequence
  derived and/or modified sequence
atgccctacgtggaccggcagaaccggatctgcggcttcctggacatcgaagagaatgaaaattcggggaaattcctccgtagatacttcatcttggataccagagaggattccttcgtgtggtatatggataatcctcagaacctcccctccgggagttctcgtgtgggagccattaagctcacctacattagcaaggtgtccgacgctaccaaactaaggccaaaggctgagttttgttttgtaatgaacgccggaatgcgaaagtactttttacaggcgaatgatcagcaggacctagtggaatgggtcaatgtgctgaataaagcaattaagatcacagttccaaagcagtctgattctcagccgaacagcgacaacctcagccgccacggtgaatgcggaaagaagcaagtgagttataggacagatattgtgggtggagtgccaatcattacacccacacagaaggaagaggtgaacgaatgtggggagagcattgacagaaacaacctgaagcgtagccagagccatttgccctattttactccaaaaccaccccaagattctgccgtcataaaggctggatattgtgtgaaacaaggggctgtgatgaagaactggaagaggagatacttccaattagatgagaatacgatcggatattttaaaagtgaattggagaaagagccccttagagtaataccactgaaagaagtccataaggtccaggagtgcaagcagtccgatattatgatgagggataacctgttcgaaattgtgacaacatcgagaaccttctacgtgcaggccgactctcccgaggagatgcatagttggatcaaagcagtctctggcgccatcgtggctcagcgcggccctggcagaagtgcgtcatctgagcacccgcccggtcccagtgagtccaaacacgcatttcggcctaccaacgctgcaacagccactagtcactcgactgcatcccgaagtaactctcttgtatcaactttcaccatggaaaaacgcgggttttacgaaagtttggcaaaggtgaaacccggcaacttcaaggttcagacagtgtcgccccgggagcctgcctcgaaggtcaccgagcaagcgcttctgaggccacagagcaagaacggtccacaggagaaggactgcgatcttgtcgacctggatgatgcatctttacccgtgtcagatgtgtag

SEQ ID NO: 19246 - DNA, 3759 bp, Artificial Sequence
  derived and/or modified sequence
ggggacgcgtgcgcagtgcgcgggctggccgtcgcggacgccgctccgggcagccgagcctctgtgggagccggggccgcggcggcgcgggtgctccgggccgaggccgcgtgtaatgttcaagctcagaaatgccttatgtggatcgtcagaatcgcatttgtggttttctagacattgaagaaaatgaaaacagtgggaaatttcttcgaaggtacttcatactggataccagagaagatagtttcgtgtggtacatggataatccacagaacctaccttctggatcatcacgtgttggagccattaagcttacctacatttcaaaggttagcgatgctactaagctaaggccaaaggcggagttctgttttgttatgaatgcaggaatgaggaagtacttcctacaagccaatgatcagcaggacctagtggaatgggtaaatgtgttaaacaaagctataaaaattacagtaccaaagcagtcagactcacagcctaattctgataacctaagtcgccatggtgaatgtgggaaaaagcaagtgtcttacagaactgatattgttggtggcgtacccatcattactcccactcagaaagaagaagtaaatgaatgtggtgaaagtattgacagaaataatctgaaacggtcacaaagccatcttccttactttactcctaaaccacctcaagatagtgcggttatcaaagctggatattgtgtaaaacaaggagcagtgatgaaaaactggaagagaagatattttcaattggatgaaaacacaataggctacttcaaatctgaactggaaaaggaacctcttcgtgtaataccacttaaagaggttcataaagtccaggaatgtaagcaaagcgacataatgatgagggacaacctctttgaaattgtaacaacgtctcgaactttctatgtgcaggctgatagccctgaagagatgcacagttggattaaagcagtctctggcgccattgtagcacagcggggtcccggcagatctgcgtcttctgagcatccccccggtccttcagaatccaaacacgctttccgtcctaccaacgcagccaccgccacctcacattccacagcctctcgcagcaactctttggtctcaacctttaccatggagaagcgaggattttacgagtctcttgccaaggtcaagccagggaacttcaaggtccagactgtctctccaagagaaccagcttccaaagtgactgaacaagctctgttaagacctcaaagtaaaaatggccctcaggaaaaagattgtgacctagtagacttggacgatgcgagccttccggtcagtgacgtgtgaggcagaagcgcacggagcctgcctgcctctgccgtcctcagtttcctttcatgaggcttctagccaaagatgataaagggggaaatggtttttagtgcgtatattatactgcctcttaggtgtactctttataagctggtaaaccaagaatctagggagtggccaaactaaatataatttctttaaaaaagaaagaaaaaggaaaaatccaaaatatctcagtatcatctgtctgaagcattgtgtgttctcattcgggtggtaacaatgtatgtgtaatatttttttcttagtgattttgacagtttaaatgtttaacaacttaaagcattaaaaatgcttattaataactttggtcatttaaaaaatgctacaatgacttcctattaaaggttcaatatttacacattcttattggttgatattaccacatgaaatattgccagaccaagatacctaaactcatgatgtctgtggtgctgtaaaatttatactaaaatgtggactattttgaaattataaccatttttgatgccctgaatcttgaggtgacttattttgcatagaggatatggatagaccaacagtaagggttgtgggttataccggcatagagaaaagaagaaaactagaattgaaacaactgtgtcttagacatttgtttgaaaaagcttcatcaggccttggagcagtcactgctttattccgcaaaaattatttggtaggaaatttttgggagatctgattttcttatccaagttttgtaaatagttgttatttctatatttggattggtgaaagacctcaagtttatatgtaaagacataactgcccttagtcatgaaattgttgtgacctctactttttgtcactaatagcctacattcaagtgcctgtgttttttcatcttgtttaggaatgttttgagattaatgtgcttaaaagtcctacgtgactgattttaaacattgtgataaaattaattttcagtagaatagttgaatgtgttaagataggattttatgttagagataccagaatgctggtattctactacttgtgcaatatatatgttttaaaaaacaaatttgagaatacatttaatcatagggatatagatataagcacctctctaaagaatctttagtttccgacgttgaattatagaccagtttgagtaagtactgctttttttttttggagacgggctctcgctctgttgctcaggctggagtgcagtggcgtgatctcagctcactacagcctccacctcgtgggttcaaacagttgtgctgcctcagcttcccgagtagctaggattacaggtgcatgccaccacacctggctaatttttgtattttagtagagatggggtttcaccatgttggccaggctcgtctcgaactcctgacttcaggtgatccacccatctcagcctcccaaagtgctgggattacaggcgtgagccaccatgcccggcccataagtaccgtttttgaggttcagtcttaaacatttgctttaagaaaacagtcttgaatttcacatgctgctatttttatattttgccattttacagtactgttttgttttgaattcatgcatatcattgaaaatttctcgttttcattttcttagatgacttcttgtctgagacagaaaaatttcctactacagcagtgcagtccagaggttaagatgtattagaattatacaatatcagtttaaaaatctgtatgcataaagaatgcaccactcaacttttttattcataagctaatatttttttaaagttacattaagattttttctcttttgcagctacatttgaaagtgatagaataaagagattttaatgagttatcactttttcagctgatatattcattttaatggcttttttgaaagttcctttttcatgaacacacccgagaaatcttaaatagacactttgcaatatttaagaacctaatgctgtttaattttggtacagcttccacattgcatgttcactttagtatttgcaatttgatatatttcatggtggcaaaatattagctctgttttgggacattttaaaatagaactatccttgttcgatagcataggaaaatgttctggtgattgtcagggtctcctaatatttatctcaattcttttataagtctatggaaattatttaattattttaaaacgtacacacttttcttgtaaatatgtcacatctgagttcaaaaaaattactttgaataccttaatatttgctgcatttttttccgtatatataacatgtcttctttcagaatgggaatatatgtgtgcctcccaacatttactgttaaagtgtgttatctttatatgtcaaactggttgaacactgtaatgagaataaactgcacagagtttattctga

SEQ ID NO: 19247 - DNA, 1632 bp, Artificial Sequence
  derived and/or modified sequence
gtgcgcagtgcgcgggctggccgtcgcggacgccgctccgggcagccgagcctctgtgggagccggggccgcggcggcgcgggtgctccgggccgaggccgcggtaaagtttagcttgaagaacgcggccgcgctggagcaggggtggtggacggggccaggcgcgaggtggcggcggctgcggggctgcgtgtaatgttcaagctcagaaatgccttatgtggatcgtcagaatcgcatttgtggttttctagacattgaagaaaatgaaaacagtgggaaatttcttcgaaggtacttcatactggataccagagaagatagtttcgtgtggtacatggataatccacagaacctaccttctggatcatcacgtgttggagccattaagcttacctacatttcaaaggttagcgatgctactaagctaaggccaaaggcggagttctgttttgttatgaatgcaggaatgaggaagtacttcctacaagccaatgatcagcaggacctagtggaatgggtaaatgtgttaaacaaagctataaaaattacagtaccaaagcagtcagactcacagcctaattctgataacctaagtcgccatggtgaatgtgggaaaaagcaagtgtcttacagaactgatattgttggtggcgtacccatcattactcccactcagaaagaagaagtaaatgaatgtggtgaaagtattgacagaaataatctgaaacggtcacaaagccatcttccttactttactcctaaaccacctcaagatagtgcggttatcaaagctggatattgtgtaaaacaaggagcagtgatgaaaaactggaagagaagatattttcaattggatgaaaacacaataggctacttcaaatctgaactggaaaaggaacctcttcgtgtaataccacttaaagaggttcataaagtccaggaatgtaagcaaagcgacataatgatgagggacaacctctttgaaattgtaacaacgtctcgaactttctatgtgcaggctgatagccctgaagagatgcacagttggattaaagcagtctctggcgccattgtagcacagcggggtcccggcagatctgcgtcttctgagcatccccccggtccttcagaatccaaacacgctttccgtcctaccaacgcagccaccgccacctcacattccacagcctctcgcagcaactctttggtctcaacctttaccatggagaagcgaggattttacgagtctcttgccaaggtcaagccagggaacttcaaggtccagactgtctctccaagagaaccagcttccaaagtgactgaacaagctctgttaagacctcaaagtaaaaatggccctcaggaaaaagattgtgacctagtagacttggacgatgcgagccttccggtcagtgacgtgtgaggcagaagcgcacggagcctgcctgcctctgccgtcctcagtttcctttcatgaggcttctagccaaagatgataaagggggaaatggtttttagtgcgtatattatactgcctcttaggtgtactctttataagctggtaaaccaagaatctagggagtggccaaactaaatataatttctttaaaaaagaaagaaaaaggaaaa

SEQ ID NO: 19248 - DNA, 3649 bp, Artificial Sequence
  derived and/or modified sequence
agtgtaatgttcaagctcagaaatgccttatgtggatcgtcagaatcgcatttgtggttttctagacattgaagaaaatgaaaacagtgggaaatttcttcgaaggtacttcatactggataccagagaagatagtttcgtgtggtacatggataatccacagaacctaccttctggatcatcacgtgttggagccattaagcttacctacatttcaaaggttagcgatgctactaagctaaggccaaaggcggagttctgttttgttatgaatgcaggaatgaggaagtacttcctacaagccaatgatcagcaggacctagtggaatgggtaaatgtgttaaacaaagctataaaaattacagtaccaaagcagtcagactcacagcctaattctgataacctaagtcgccatggtgaatgtgggaaaaagcaagtgtcttacagaactgatattgttggtggcgtacccatcattactcccactcagaaagaagaagtaaatgaatgtggtgaaagtattgacagaaataatctgaaacggtcacaaagccatcttccttactttactcctaaaccacctcaagatagtgcggttatcaaagctggatattgtgtaaaacaaggagcagtgatgaaaaactggaagagaagatattttcaattggatgaaaacacaataggctacttcaaatctgaactggaaaaggaacctcttcgtgtaataccacttaaagaggttcataaagtccaggaatgtaagcaaagcgacataatgatgagggacaacctctttgaaattgtaacaacgtctcgaactttctatgtgcaggctgatagccctgaagagatgcacagttggattaaagcagtctctggcgccattgtagcacagcggggtcccggcagatctgcgtcttctgagcatccccccggtccttcagaatccaaacacgctttccgtcctaccaacgcagccaccgccacctcacattccacagcctctcgcagcaactctttggtctcaacctttaccatggagaagcgaggattttacgagtctcttgccaaggtcaagccagggaacttcaaggtccagactgtctctccaagagaaccagcttccaaagtgactgaacaagctctgttaagacctcaaagtaaaaatggccctcaggaaaaagattgtgacctagtagacttggacgatgcgagccttccggtcagtgacgtgtgaggcagaagcgcacggagcctgcctgcctctgccgtcctcagtttcctttcatgaggcttctagccaaagatgataaagggggaaatggtttttagtgcgtatattatactgcctcttaggtgtactctttataagctggtaaaccaagaatctagggagtggccaaactaaatataatttctttaaaaaagaaagaaaaaggaaaaatccaaaatatctcagtatcatctgtctgaagcattgtgtgttctcattcgggtggtaacaatgtatgtgtaatatttttttcttagtgattttgacagtttaaatgtttaacaacttaaagcattaaaaatgcttattaataactttggtcatttaaaaaatgctacaatgacttcctattaaaggttcaatatttacacattcttattggttgatattaccacatgaaatattgccagaccaagatacctaaactcatgatgtctgtggtgctgtaaaatttatactaaaatgtggactattttgaaattataaccatttttgatgccctgaatcttgaggtgacttattttgcatagaggatatggatagaccaacagtaagggttgtgggttataccggcatagagaaaagaagaaaactagaattgaaacaactgtgtcttagacatttgtttgaaaaagcttcatcaggccttggagcagtcactgctttattccgcaaaaattatttggtaggaaatttttgggagatctgattttcttatccaagttttgtaaatagttgttatttctatatttggattggtgaaagacctcaagtttatatgtaaagacataactgcccttagtcatgaaattgttgtgacctctactttttgtcactaatagcctacattcaagtgcctgtgttttttcatcttgtttaggaatgttttgagattaatgtgcttaaaagtcctacgtgactgattttaaacattgtgataaaattaattttcagtagaatagttgaatgtgttaagataggattttatgttagagataccagaatgctggtattctactacttgtgcaatatatatgttttaaaaaacaaatttgagaatacatttaatcatagggatatagatataagcacctctctaaagaatctttagtttccgacgttgaattatagaccagtttgagtaagtactgctttttttttttggagacgggctctcgctctgttgctcaggctggagtgcagtggcgtgatctcagctcactacagcctccacctcgtgggttcaaacagttgtgctgcctcagcttcccgagtagctaggattacaggtgcatgccaccacacctggctaatttttgtattttagtagagatggggtttcaccatgttggccaggctcgtctcgaactcctgacttcaggtgatccacccatctcagcctcccaaagtgctgggattacaggcgtgagccaccatgcccggcccataagtaccgtttttgaggttcagtcttaaacatttgctttaagaaaacagtcttgaatttcacatgctgctatttttatattttgccattttacagtactgttttgttttgaattcatgcatatcattgaaaatttctcgttttcattttcttagatgacttcttgtctgagacagaaaaatttcctactacagcagtgcagtccagaggttaagatgtattagaattatacaatatcagtttaaaaatctgtatgcataaagaatgcaccactcaacttttttattcataagctaatatttttttaaagttacattaagattttttctcttttgcagctacatttgaaagtgatagaataaagagattttaatgagttatcactttttcagctgatatattcattttaatggcttttttgaaagttcctttttcatgaacacacccgagaaatcttaaatagacactttgcaatatttaagaacctaatgctgtttaattttggtacagcttccacattgcatgttcactttagtatttgcaatttgatatatttcatggtggcaaaatattagctctgttttgggacattttaaaatagaactatccttgttcgatagcataggaaaatgttctggtgattgtcagggtctcctaatatttatctcaattcttttataagtctatggaaattatttaattattttaaaacgtacacacttttcttgtaaatatgtcacatctgagttcaaaaaaattactttgaataccttaatatttgctgcatttttttccgtatatataacatgtcttctttcagaatgggaatatatgtgtgcctcccaacatttactgttaaagtgtgttatctttatatgtcaaactggttgaacactgtaatgagaataaactgcacagagtttattctg

SEQ ID NO: 19249 - DNA, 1215 bp, Artificial Sequence
  derived and/or modified sequence
atgccttatgttgaccgtcagaatagaatctgcggcttcctggatatcgaggaaaacgaaaattccggtaaatttctgaggcggtacttcattttagacacgcgcgaggactcctttgtgtggtacatggacaacccacagaacttgcccagcggttcaagcagagtcggcgcaatcaagctaacctacatcagcaaagtctcagatgctacaaaactgaggcccaaagccgagttctgtttcgtaatgaatgccggaatgagaaagtactttttgcaggcgaacgatcagcaagacctggtggagtgggtcaatgtgctgaataaagctatcaaaattactgtaccgaagcagtctgattcacagcccaactccgacaatctaagtaggcacggtgaatgcggcaaaaagcaggtgtcttaccgcaccgacatcgtcgggggagttccaatcataacaccaacccaaaaggaggaggttaacgaatgcggagagagcattgaccggaacaacttaaagcgaagccaaagtcacctcccttatttcacccctaagcctccacaggacagtgccgtgattaaggctggctactgtgtcaaacagggagcagttatgaagaattggaaacggaggtactttcagttggatgagaatacaattggctatttcaagtccgaactggagaaagaaccactgagagtgatacccctcaaggaggtccacaaggtgcaggaatgtaagcaatccgatattatgatgcgcgataacctgttcgagatcgttactacatcccgtactttctacgtgcaagcagacagtccagaggagatgcattcatggatcaaggcagtgagcggcgctatagtggctcagcgcggacctggcaggagcgcatcttcggagcacccacccggtccttcagagtcaaaacacgccttcaggcccaccaatgccgctactgctacttctcactccacagcatccagatccaattccctggtaagtactttcaccatggagaaacggggattttacgagtccttggcgaaagtgaagcccggaaactttaaggtgcagaccgtttctcccagagagcctgcttccaaggttaccgaacaggccctcttgcgaccacagtctaagaacgggccacaggaaaaagactgcgaccttgtggacctggacgatgcgtccctgccagtcagcgacgtttag

SEQ ID NO: 19250 - DNA, 1215 bp, Artificial Sequence
  derived and/or modified sequence
atgccgtacgttgacaggcagaacagaatttgtgggttcctcgacatcgaagagaatgaaaatagcgggaagttcctgcgtcgttatttcattcttgatactcgcgaggatagctttgtttggtacatggacaacccgcagaatcttccttccggaagctcaagggtgggggctataaagctgacttacatttcaaaggtgagcgatgcaaccaagcttcgtccaaaggcagaattctgcttcgtgatgaatgccggaatgcgcaagtactttttacaggctaacgatcagcaagacctggttgagtgggtgaatgtgttaaacaaagctattaagataacagttcctaaacagagcgacagccagccaaattccgacaatcttagccggcatggggagtgcggtaagaagcaggttagctaccggaccgatatagtcggcggagtgccaatcattacacctacccagaaagaggaggttaacgaatgcggggagagtatcgatcgcaacaacttgaagcggtcacagagtcacttgccgtatttcacacctaagcctcctcaggactcggcagtgatcaaggccggttactgtgtgaagcaaggcgctgttatgaagaactggaaaaggagatactttcagctggacgaaaatacaatcgggtattttaaaagtgaactggaaaaggagccattacgagttattcccctgaaagaagtacacaaagtacaggaatgcaagcagtcagacattatgatgcgcgataatctgttcgagattgttacaaccagccgaaccttctacgtgcaggctgacagcccggaggagatgcattcctggatcaaggccgtgtcaggggcaatagtggcccagagaggtcccggaaggagcgctagcagcgaacatcccccaggaccctccgagtccaagcacgccttccggccaaccaatgctgcaaccgctacctctcactccaccgccagcagatccaattccctggttagtacgttcaccatggagaaacggggattctatgaatcccttgccaaagtcaaaccagggaactttaaggtgcagacagtgagtccccgagagccagccagcaaggtgactgaacaagccctgttgaggccacagtctaaaaacggccctcaagagaaagactgcgacttggtcgatctggatgatgccagtctcccggtctcggacgtgtag

SEQ ID NO: 19251 - DNA, 1215 bp, Artificial Sequence
  derived and/or modified sequence
atgccctatgtggaccgccaaaataggatctgcggatttcttgacattgaagagaatgagaacagtgggaaatttctccgaagatatttcattctggacacgcgcgaggactcctttgtctggtatatggacaacccccagaacctcccaagtggctcatcccgcgtgggagctattaaactaacctatatctctaaagtaagcgacgccacaaagctgcgaccaaaagccgaattttgctttgtcatgaacgccggtatgaggaagtacttcctccaggcaaacgaccagcaggatctagtcgagtgggtgaacgtactgaacaaagcaatcaagatcactgttccaaagcagagcgactctcagcctaactccgacaatctatctcgccacggtgaatgtgggaagaaacaggttagctatcggacggatatcgtcggaggagtgcctataattacacccacacagaaggaggaagtcaacgagtgcggagaatccattgatagaaacaacctgaaaaggtcccagtcccacctgccctattttactccgaagccaccgcaggactccgccgttattaaggccggatattgtgtcaaacagggcgcagtcatgaaaaactggaaaagacgttacttccaacttgatgagaataccattggctatttcaaatccgaactggagaaagaacccctccgcgtgatacccctgaaagaggtccacaaggtgcaggagtgtaagcagtctgacatcatgatgagagataatctgtttgaaatagtgaccacaagcagaaccttctacgtgcaagccgactcgcccgaagagatgcattcttggataaaggcggtgtccggagctattgtcgcccagagagggcctggtagatcagccagttctgagcaccctcccggacccagtgaatctaagcatgcatttcgacccacaaatgcagccaccgctacttcacactcaacggcatcacggagcaatagccttgtatcgacatttaccatggaaaaacgaggcttctatgagtcactcgctaaggtgaaacctggtaactttaaagtgcagaccgtgagccctagggaacctgcctcgaaagtgactgaacaggccctccttaggccgcagtccaaaaatggtccccaggagaaggattgcgatcttgtggacctcgacgatgcatctctgcctgtcagtgacgtttag

SEQ ID NO: 19252 - DNA, 1215 bp, Artificial Sequence
  derived and/or modified sequence
atgccctacgtggacagacagaacagaatctgcggcttcctggacatcgaggagaacgagaacagcggcaagttcctgagaagatacttcatcctggacaccagagaggacagcttcgtgtggtacatggacaacccccagaacctgcccagcggcagcagcagagtgggcgccatcaagctgacctacatcagcaaggtgagcgacgccaccaagctgagacccaaggccgagttctgcttcgtgatgaacgccggcatgagaaagtacttcctgcaggccaacgaccagcaggacctggtggagtgggtgaacgtgctgaacaaggccatcaagatcaccgtgcccaagcagagcgacagccagcccaacagcgacaacctgagcagacacggcgagtgcggcaagaagcaggtgagctacagaaccgacatcgtgggcggcgtgcccatcatcacccccacccagaaggaggaggtgaacgagtgcggcgagagcatcgacagaaacaacctgaagagaagccagagccacctgccctacttcacccccaagcccccccaggacagcgccgtgatcaaggccggctactgcgtgaagcagggcgccgtgatgaagaactggaagagaagatacttccagctggacgagaacaccatcggctacttcaagagcgagctggagaaggagcccctgagagtgatccccctgaaggaggtgcacaaggtgcaggagtgcaagcagagcgacatcatgatgagagacaacctgttcgagatcgtgaccaccagcagaaccttctacgtgcaggccgacagccccgaggagatgcacagctggatcaaggccgtgagcggcgccatcgtggcccagagaggccccggcagaagcgccagcagcgagcacccccccggccccagcgagagcaagcacgccttcagacccaccaacgccgccaccgccaccagccacagcaccgccagcagaagcaacagcctggtgagcaccttcaccatggagaagagaggcttctacgagagcctggccaaggtgaagcccggcaacttcaaggtgcagaccgtgagccccagagagcccgccagcaaggtgaccgagcaggccctgctgagaccccagagcaagaacggcccccaggagaaggactgcgacctggtggacctggacgacgccagcctgcccgtgagcgacgtgtag

SEQ ID NO: 19253 - protein, 168 aa, Artificial Sequence
  derived and/or modified sequence
MLPAALLRRPGLGRLVRHARAYAEAAAAPAAASGPNQMSFTFASPTQVFFNGANVRQVDVPTLTGAFGILAAHVPTLQVLRPGLVVVHAEDGTTSKYFVSSGSIAVNADSSVQLLAEEAVTLDMLDLGAAKANLEKAQAELVGTADEATRAEIQIRIEANEALVKALE

SEQ ID NO: 19254 - DNA, 507 bp, Artificial Sequence
  derived and/or modified sequence
atgctgcccgccgccctgctgagaagacccggcctgggcagactggtgagacacgccagagcctacgccgaggccgccgccgcccccgccgccgccagcggccccaaccagatgagcttcaccttcgccagccccacccaggtgttcttcaacggcgccaacgtgagacaggtggacgtgcccaccctgaccggcgccttcggcatcctggccgcccacgtgcccaccctgcaggtgctgagacccggcctggtggtggtgcacgccgaggacggcaccaccagcaagtacttcgtgagcagcggcagcatcgccgtgaacgccgacagcagcgtgcagctgctggccgaggaggccgtgaccctggacatgctggacctgggcgccgccaaggccaacctggagaaggcccaggccgagctggtgggcaccgccgacgaggccaccagagccgagatccagatcagaatcgaggccaacgaggccctggtgaaggccctggagtag

SEQ ID NO: 19255 - DNA, 507 bp, Artificial Sequence
  derived and/or modified sequence
atgctgccggcagcactcctcagacgccctggcctcggtagattggttagacatgcacgggcctatgccgaggccgccgcggccccagccgccgcctcgggcccaaatcagatgagctttacctttgcaagcccaacccaggtgttcttcaacggggccaatgtgcggcaagtggacgtgccgacactgaccggcgctttcgggatcctggcagcccatgtgccaacccttcaagtcctccgtccaggactggtagtggtgcacgcagaggatgggactacaagcaaatattttgtgtctagtggctccattgctgtgaatgccgactcttcggtgcagctcttagctgaagaggcagtgacactcgatatgctggatctcggggccgctaaagcaaatctcgagaaggcacaggcagagctggtgggcacggctgatgaggccacacgggccgagattcagatcagaattgaggccaatgaagctttagttaaggcactggagtag

SEQ ID NO: 19256 - DNA, 507 bp, Artificial Sequence
  derived and/or modified sequence
atgctgcctgctgccctgctgcggcggcccggcctgggccgcctggtgagacatgcccgggcctatgcagaggccgctgctgccccagctgctgccagcggccccaaccagatgtccttcacctttgccagccccacccaggtgttcttcaatggagccaacgtgcggcaggtggatgtgcccaccctgaccggggccttcggcatcctggccgcccacgtgcccaccctgcaggtgctgcggcccggcctggtggtggtgcatgctgaagatggcaccaccagcaagtactttgtgagcagcggcagcattgctgtgaatgctgacagctctgtgcagctgctggccgaggaggccgtgaccctggacatgctggacctgggcgccgccaaggccaacctggagaaggcccaggccgagctggtgggcacagcagatgaggccaccagggctgagatccagatcagaattgaggccaatgaggccctggtgaaggccctggagtag

SEQ ID NO: 19257 - DNA, 507 bp, Artificial Sequence
  derived and/or modified sequence
atgctgcccgccgccctgctgcggcggcccggcctgggccggctggtcagacatgcaagggcctacgccgaggcagccgccgcccccgctgcagcctcaggaccaaatcagatgtcctttacctttgcttccccaacacaggtgttctttaacggtgctaacgttagacaggtcgatgtcccaactcttacaggcgcttttgggatccttgccgcacacgtcccaactctgcaagtcttacgtcccggcttggtcgttgtacacgcagaggatgggacaacttccaaatactttgtcagcagcggaagcatcgcagtaaacgcggattcatcagtccagctgctcgccgaggaagcggtgacccttgatatgcttgatctgggggccgccaaagcaaatttggaaaaagcccaggccgagctcgtggggacagcagatgaggccacacgcgccgaaattcaaatacggattgaagcgaacgaagcgcttgtgaaggctttagaatag

SEQ ID NO: 19258 - DNA, 507 bp, Artificial Sequence
  derived and/or modified sequence
atgctgccggctgccctgctccgacggccaggcctgggacgcctggttcgacacgctcgggcttacgctgaagctgcagcagcgcctgctgcagcttccggcccaaatcagatgagcttcactttcgccagtccgactcaggtgtttttcaacggggctaacgtgagacaggttgatgttcctacccttactggggcatttggtatactagctgcacatgttccaacactgcaggtattacggccaggactcgtggtggtccacgcagaagacggtaccacaagcaaatacttcgtgagctccggatctattgcagtcaacgcagactccagcgtccagctgctggcggaggaggccgttaccttggacatgctcgatctcggcgctgccaaagccaacctcgagaaggcacaggcagagttagtgggcacggccgacgaggccacccgcgctgagatccagattcgcatcgaagctaatgaggcacttgtgaaggcattggaatag

SEQ ID NO: 19259 - DNA, 995 bp, Artificial Sequence
  derived and/or modified sequence
cagacgtccctgcgcgtcgtcctcctcgccctccaggccgcccgcgccgcgccggagtccgctgtccgccagctacccgcttcctgccgcccgccgctgccatgctgcccgccgcgctgctccgccgcccgggacttggccgcctcgtccgccacgcccgtgcctatgccgaggccgccgccgccccggctgccgcctctggccccaaccagatgtccttcaccttcgcctctcccacgcaggtgttcttcaacggtgccaacgtccggcaggtggacgtgcccacgctgaccggagccttcggcatcctggcggcccacgtgcccacgctgcaggtcctgcggccggggctggtcgtggtgcatgcagaggacggcaccacctccaaatactttgtgagcagcggttccatcgcagtgaacgccgactcttcggtgcagttgttggccgaagaggccgtgacgctggacatgttggacctgggggcagccaaggcaaacttggagaaggcccaggcggagctggtggggacagctgacgaggccacgcgggcagagatccagatccgaatcgaggccaacgaggccctggtgaaggccctggagtaggcggtgcgtacccggtgtcccgaggcccggccaggggctgggcagggatgccaggtgggcccagccagctcctggggtcccggccacctggggaagccgcgcctgccaaggaggccaccagagggcagtgcaggcttctgcctgggccccaggccctgcctgtgttgaaagctctggggactgggccagggaagctcctcctcagctttgagctgtggctgccacccatggggctctccttccgcctctcaagatccccccagcctgacgggccgcttaccatcccctctgccctgcagagccagccgccaaggttgacctcagcttcggagccacctctggatgaactgcccccagcccccgccccattaaagacccggaagcctg

SEQ ID NO: 19260 - DNA, 699 bp, Artificial Sequence
  derived and/or modified sequence
cagacgtccctgcgcgtcgtcctcctcgccctccaggccgcccgcgccgcgccggagtccgctgtccgccagctacccgcttcctgccgcccgccgctgccatgctgcccgccgcgctgctccgccgcccgggacttggccgcctcgtccgccacgcccgtgcctatgccgaggccgccgccgccccggctgccgcctctggccccaaccagatgtccttcaccttcgcctctcccacgcaggtgttcttcaacggtgccaacgtccggcaggtggacgtgcccacgctgaccggagccttcggcatcctggcggcccacgtgcccacgctgcaggtcctgcggccggggctggtcgtggtgcatgcagaggacggcaccacctccaaatactttgtgagcagcggttccatcgcagtgaacgccgactcttcggtgcagttgttggccgaagaggccgtgacgctggacatgttggacctgggggcagccaaggcaaacttggagaaggcccaggcggagctggtggggacagctgacgaggccacgcgggcagagatccagatccgaatcgaggccaacgaggccctggtgaaggccctggagtaggcgagccagccgccaaggttgacctcagcttcggagccacctctggatgaactgcccccagcccccgccccattaaagacccggaagcctg

SEQ ID NO: 19261 - DNA, 507 bp, Artificial Sequence
  derived and/or modified sequence
atgttacctgctgccttgctccgaagacccggccttggcagacttgtgaggcacgctagggcctacgccgaagcagccgcggctcctgccgccgcgtcgggccccaaccagatgagtttcacttttgcaagccctacgcaggtgttcttcaacggtgccaatgtccgccaagtcgacgtgcccacactgacaggcgcttttggcatcctggctgctcatgtccctacacttcaggttctgagacctggactggtggtggttcacgcggaagatggcaccacatccaagtattttgtttcatccgggagcatcgccgtgaatgctgatagtagtgtccaactactggcggaagaagctgtgaccctggacatgctggatctcggcgctgcgaaggctaatctggaaaaagcccaggctgagctggtgggaaccgcggatgaagctacaagagccgaaatccagatccgtattgaagccaacgaggctctcgtgaaggcccttgagtag

SEQ ID NO: 19262 - DNA, 507 bp, Artificial Sequence
  derived and/or modified sequence
atgctgcccgccgccctgctgcggcggcccggcctgggccggctggtccggcacgcaagggcctacgctgaggccgccgctgcccctgcggcagccagcggccccaaccagatgagcttcacatttgcttccccaacgcaagtcttctttaacggtgccaatgtccggcaagtggatgtgcctactctgaccggcgcctttggaatattggccgcacatgtcccaaccctccaagtgttgagacctgggctggtagtggtccacgcagaggatggcactacatccaaatacttcgtgagttctgggagcatcgcagtgaacgcagacagcagcgtgcagctgctggccgaagaggcagtcactcttgatatgttggatcttggagctgccaaagccaatctggagaaggcccaggccgagttggtgggaactgccgacgaggcaacaagagccgaaattcagatcaggatcgaggcgaacgaggctctcgtcaaggcactggaatag

SEQ ID NO: 19263 - DNA, 507 bp, Artificial Sequence
  derived and/or modified sequence
atgctgcctgccgctctccttcgcaggcccggattgggtaggctggttcgccacgcccgtgcttacgctgaagcggctgccgcacccgcagcagcctctggcccaaaccaaatgtcttttacattcgccagccctacacaggtgttttttaacggagccaacgtgcgccaggtggacgtacccaccctgacaggagcatttggcatcctggcagcacatgttcctacattacaggtcttgcggccaggtctcgtcgtggtgcacgcagaagatggaacgacttcaaaatatttcgtttcttccggaagtatcgctgtcaacgctgacagctccgtccagctgctggcggaggaagccgtcacactggatatgttagatcttggagctgcaaaggccaatctggaaaaagctcaggctgagctcgtgggaactgctgacgaagcgacacgagccgagatccaaattcgcatcgaggcaaatgaagctcttgtgaaagctctcgagtag

SEQ ID NO: 19264 - protein, 518 aa, Artificial Sequence
  derived and/or modified sequence
MAFWAGGSPSVVDYFPSEDFYRCGYCKNESGSRSNGMWAHSMTVQDYQDLIDRGWRRSGKYVYKPVMNQTCCPQYTIRCRPLQFQPSKSHKKVLKKMLKFLAKGEVPKGSCEDEPMDSTMDDAVAGDFALINKLDIQCDLKTLSDDIKESLESEGKNSKKEEPQELLQSQDFVGEKLGSGEPSHSVKVHTVPKPGKGADLSKPPCRKAKEIRKERKRLKLMQQNPAGELEGFQAQGHPPSLFPPKAKSNQPKSLEDLIFESLPENASHKLEVRVVRSSPPSSQFKATLLESYQVYKRYQMVIHKNPPDTPTESQFTRFLCSSPLEAETPPNGPDCGYGSFHQQYWLDGKIIAVGVIDILPNCVSSVYLYYDPDYSFLSLGVYSALREIAFTRQLHEKTSQLSYYYMGFYIHSCPKMKYKGQYRPSDLLCPETYVWVPIEQCLPSLENSKYCRFNQDPEAVDEDRSTEPDRLQVFHKRAIMPYGVYKKQQKDPSEEAAVLQYASLVGQKCSERMLLFRN

SEQ ID NO: 19265 - protein, 515 aa, Artificial Sequence
  derived and/or modified sequence
  misc_feature (1)..(1): Xaa can be any naturally occurring amino acid
XAGGSPSVVDYFPSEDFYRCGYCKNESGSRSNGMWAHSMTVQDYQDLIDRGWRRSGKYVYKPVMNQTCCPQYTIRCRPLQFQPSKSHKKVLKKMLKFLAKGEVPKGSCEDEPMDSTMDDAVAGDFALINKLDIQCDLKTLSDDIKESLESEGKNSKKEEPQELLQSQDFVGEKLGSGEPSHSVKVHTVPKPGKGADLSKPPCRKAKEIRKERKRLKLMQQNPAGELEGFQAQGHPPSLFPPKAKSNQPKSLEDLIFESLPENASHKLEVRVVRSSPPSSQFKATLLESYQVYKRYQMVIHKNPPDTPTESQFTRFLCSSPLEAETPPNGPDCGYGSFHQQYWLDGKIIAVGVIDILPNCVSSVYLYYDPDYSFLSLGVYSALREIAFTRQLHEKTSQLSYYYMGFYIHSCPKMKYKGQYRPSDLLCPETYVWVPIEQCLPSLENSKYCRFNQDPEAVDEDRSTEPDRLQVFHKRAIMPYGVYKKQQKDPSEEAAVLQYASLVGQKCSERMLLFRN

SEQ ID NO: 19266 - DNA, 1548 bp, Artificial Sequence
  derived and/or modified sequence
tgagccggcggcagccccagcgtggtggactacttccccagcgaggacttctacagatgcggctactgcaagaacgagagcggcagcagaagcaacggcatgtgggcccacagcatgaccgtgcaggactaccaggacctgatcgacagaggctggagaagaagcggcaagtacgtgtacaagcccgtgatgaaccagacctgctgcccccagtacaccatcagatgcagacccctgcagttccagcccagcaagagccacaagaaggtgctgaagaagatgctgaagttcctggccaagggcgaggtgcccaagggcagctgcgaggacgagcccatggacagcaccatggacgacgccgtggccggcgacttcgccctgatcaacaagctggacatccagtgcgacctgaagaccctgagcgacgacatcaaggagagcctggagagcgagggcaagaacagcaagaaggaggagccccaggagctgctgcagagccaggacttcgtgggcgagaagctgggcagcggcgagcccagccacagcgtgaaggtgcacaccgtgcccaagcccggcaagggcgccgacctgagcaagcccccctgcagaaaggccaaggagatcagaaaggagagaaagagactgaagctgatgcagcagaaccccgccggcgagctggagggcttccaggcccagggccacccccccagcctgttcccccccaaggccaagagcaaccagcccaagagcctggaggacctgatcttcgagagcctgcccgagaacgccagccacaagctggaggtgagagtggtgagaagcagcccccccagcagccagttcaaggccaccctgctggagagctaccaggtgtacaagagataccagatggtgatccacaagaacccccccgacacccccaccgagagccagttcaccagattcctgtgcagcagccccctggaggccgagaccccccccaacggccccgactgcggctacggcagcttccaccagcagtactggctggacggcaagatcatcgccgtgggcgtgatcgacatcctgcccaactgcgtgagcagcgtgtacctgtactacgaccccgactacagcttcctgagcctgggcgtgtacagcgccctgagagagatcgccttcaccagacagctgcacgagaagaccagccagctgagctactactacatgggcttctacatccacagctgccccaagatgaagtacaagggccagtacagacccagcgacctgctgtgccccgagacctacgtgtgggtgcccatcgagcagtgcctgcccagcctggagaacagcaagtactgcagattcaaccaggaccccgaggccgtggacgaggacagaagcaccgagcccgacagactgcaggtgttccacaagagagccatcatgccctacggcgtgtacaagaagcagcagaaggaccccagcgaggaggccgccgtgctgcagtacgccagcctggtgggccagaagtgcagcgagagaatgctgctgttcagaaactag

SEQ ID NO: 19267 - DNA, 1548 bp, Artificial Sequence
  derived and/or modified sequence
tgagccggaggctcgccgagtgtggtggattactttccgtctgaggacttttaccgctgtgggtattgtaagaatgagtccggcagcagatcgaacgggatgtgggcacactctatgaccgtccaggattatcaggatctgatagaccgtggctggagacgctcagggaagtacgtgtacaagccagtgatgaaccagacttgctgcccgcagtatacaattcgctgtcgacctctgcagttccagccctccaagagccacaagaaggtgttgaagaaaatgctaaagtttctagcaaagggcgaagtacccaaaggatcttgcgaagacgagcctatggacagcacaatggatgatgccgtagccggggactttgccctgataaacaagcttgacattcagtgcgacctcaaaacccttagtgacgatatcaaggaaagcctggaatctgagggtaaaaattcaaagaaagaggagccacaagaacttctgcaaagtcaagatttcgtcggggaaaagctgggctccggtgagccatcccatagcgtcaaggtgcatacagtacctaaacccggcaagggtgccgatctctccaagccgccgtgcagaaaagccaaggagattcgcaaggagagaaagcgcttgaagctcatgcagcagaaccccgcaggcgagctcgagggcttccaagcacaaggtcatcctccttcgctgtttcccccaaaggcaaagtcaaaccaaccaaagagtttggaggatctcatcttcgaatctctgccagagaatgcttcacacaaactggaagtgcgggtggttaggtctagcccacccagttcgcagtttaaagctacgctgctggaatcttaccaagtgtataagcgctatcagatggtcatccataagaacccacctgatactccgacggagtcccagttcactagatttctgtgcagtagtcccctggaggctgagaccccacctaatggacctgattgtggttatggatcttttcatcagcaatattggttggatggtaagattattgccgttggcgtgatcgatatcctccccaactgcgtgagctcagtttacctgtactatgaccctgattacagctttctgtcgctgggcgtctatagcgcactcagggaaatcgcttttaccagacagctgcacgagaaaacgtcccagctttcatattactatatgggtttttacatccattcgtgcccaaaaatgaagtataaagggcaataccggcccagcgacctgctgtgccctgaaacctacgtctgggttccgattgagcagtgtctgccctccctggagaattcaaagtattgccggttcaaccaggatcctgaggctgtggacgaggatcgatctaccgaacccgacagactgcaagtgtttcataaaagggccatcatgccttatggagtctacaaaaaacagcagaaggacccgtccgaagaggcagcagtgcttcagtacgcttcactggttggtcagaaatgctctgagaggatgttgctgtttcgaaattag

SEQ ID NO: 19268 - DNA, 1548 bp, Artificial Sequence
  derived and/or modified sequence
tgagctgggggcagccccagcgtggtggactacttccccagcgaggacttctaccgctgtggctactgcaagaatgaaagtggcagccgcagcaatggcatgtgggcccacagcatgacagtgcaggactaccaggacctgattgaccggggctggaggagaagtggcaagtatgtgtacaagcctgtgatgaaccagacctgctgcccccagtacaccatccgctgccggcccctgcagttccagcccagcaagagccacaagaaggtgctgaagaagatgctgaagttcctggccaagggggaggtgcccaagggcagctgtgaagatgagcccatggacagcaccatggatgatgctgtggccggggactttgccctgatcaacaagctggacatccagtgtgacctgaagaccctgagtgatgacatcaaggagagcctggagagcgagggcaagaacagcaagaaggaggagccccaggagctgctgcagagccaggactttgtgggggagaagctgggcagcggggagcccagccacagcgtgaaggtgcacacagtgcccaagccaggaaaaggagctgacctgagcaagccaccctgcaggaaggccaaggagatcaggaaggagaggaagaggctgaagctgatgcagcagaacccagctggggagctggagggcttccaggcccagggccacccccccagcctcttcccccccaaggccaagagcaaccagcccaagagcctggaggacctgatctttgagagcctgcctgaaaatgccagccacaagctggaggtgcgggtggtgcgcagcagcccccccagcagccagttcaaggccaccctgctggagagctaccaggtgtacaagcgctaccagatggtgatccacaagaaccccccagacacccccacagagagccagttcacccgcttcctgtgcagcagccccctggaggccgagaccccacccaacggccctgactgtggctacggcagcttccaccagcagtactggctggatggcaagatcatcgctgtgggcgtgattgacatcctgcccaactgtgtgtcctctgtgtacctgtactatgaccctgactacagcttcctgagcctgggcgtgtacagcgccctgcgggagatcgccttcacccggcagctgcacgagaagaccagccagctgagctactactacatgggcttctacatccacagctgccccaagatgaagtacaagggccagtaccggcccagcgacctgctgtgcccagagacctacgtgtgggtgcccatcgagcagtgcctgcccagcctggagaacagcaagtactgccgcttcaaccaggaccctgaggccgtggatgaagatagaagcacagagccagaccggctgcaggtgttccacaagagggccatcatgccctatggagtgtacaagaagcagcagaaggaccccagcgaggaggccgctgtgctgcagtatgccagcctggtgggccagaagtgcagcgagaggatgctgctcttcaggaactag

SEQ ID NO: 19269 - DNA, 2212 bp, Artificial Sequence
  derived and/or modified sequence
gggcggcgcgctgcattgtggggtggcggcggcggccgcgctagcgacgcggggccgggcggctgagcgttcgcggggccgaggccatggctttctgggcggggggttcgcccagcgtcgtggactatttccctagcgaggacttctaccgctgcggctactgcaagaacgagtcgggcagccgctccaatggcatgtgggcacattccatgacagtacaggattatcaggatctcatagaccgaggatggcgaagaagtggaaaatatgtgtacaaacctgtcatgaatcaaacatgttgtcctcagtacacaataaggtgccgacctttacaatttcagccttcaaaatctcacaagaaggttttgaaaaaaatgttgaaatttctagctaaaggggaggttcccaaaggaagttgtgaggatgagcccatggattccacaatggatgatgctgttgcgggtgactttgcattgataaataaactggatatacagtgtgatcttaaaacactcagtgatgacatcaaagagagtttagagagtgaaggaaaaaattcaaagaaagaagaacctcaggaattacttcagtcacaagatttcgtaggagagaagttgggctctggtgaaccgtcacattcagttaaagttcacacagttcctaagccaggcaaaggggctgatttgagtaagcctccatgtcgaaaagcaaaggaaatccggaaagaaaggaaaaggttaaaactaatgcagcagaacccagctggagaacttgagggtttccaggctcaaggtcacccaccatctttgtttccaccaaaggctaaatccaaccagccaaaatcactcgaagatttaatttttgagtctttaccagagaatgcatcacacaagttagaggtgagggtggtgagatcatctccaccaagttcgcagttcaaagccacacttctggagtcttaccaggtctataaacgttaccagatggttattcacaagaacccacctgatacgccaaccgaaagccagttcacaagattcctttgcagttcacccttggaggcagagactccccctaatgggccagattgtggctatggctcctttcaccagcagtactggcttgacggaaagatcattgctgtgggggtgattgacatcctcccaaactgtgtatcatctgtgtatttgtactacgatcctgattattcgtttttgtctttgggcgtctactctgcactacgagaaattgcttttactaggcagcttcatgagaaaacttctcaactcagctattattatatgggtttctacattcattcatgtcccaagatgaaatataagggtcagtatagaccttctgatttgctgtgccctgagacatatgtttgggtacccattgagcaatgcctgccttcacttgaaaactccaagtactgccgtttcaaccaggacccagaagcagtggatgaggatcgcagtacggaacctgaccgattgcaggtgtttcacaagagagccatcatgccttacggtgtttataagaaacagcagaaagacccaagtgaggaggctgctgttctgcagtacgccagcctggtggggcagaagtgctccgagcggatgctgctgttcagaaactgacctgttcacctctgccgggaagttcctgtgttgtgctgatgatttgtgccaggatacatattcagtacctgtggggaaataactgtcaccacccacaaattagacattttttattttgactatctatggcttttaaaaaatattttgtggcaatgtatctgtgagaatctcatagttaatataaagattttaaaactgcattatgacctagcccccataattgggatttatcattttggaggattctttctagagcaagatacgctcaaattctcctgtttgtattttgtaaaatgaagaagtgaatctaagtaacttaatcacagttgtgcattttttttggttctgttagagaaattaaaacagactgtttcctcaggcccattttaaactgaacttatgctaggaaaccttaagtatggggaaggtagaaagttcatttcatcacttagaaaatatgtcttctcaagaacaaaactgtgctgttacaactcagtgttcaatgtgaaattgctgccaaatgttatgtagtttaatagagaacttgaaaaaataaaacattaaaatgg

SEQ ID NO: 19270 - DNA, 1548 bp, Artificial Sequence
  derived and/or modified sequence
tgagccggcggcagccccagcgtggtggactacttccccagcgaggacttctacaggtgtggctattgcaagaacgagtcgggtagtcgaagcaacgggatgtgggcccactccatgaccgtgcaggattatcaggaccttattgatcgagggtggagaagaagtggtaaatatgtgtacaagccagtaatgaaccagacatgctgcccacaatacacaatcagatgtcggccactgcagttccagccttccaaatcccataagaaagtcctgaagaagatgcttaagtttttagcaaagggggaggtgccgaagggatcctgtgaagatgagccgatggatagtacaatggacgacgctgtcgccggagacttcgcacttattaacaagctggacattcagtgtgatctcaagacgctttccgatgacatcaaggagagtctcgaatcagagggtaagaattcaaaaaaggaggaacctcaggaactgctgcagtctcaggactttgtgggcgaaaagttaggcagcggtgagccctctcattctgtgaaggtgcacactgttcccaaacctggaaagggagccgacctgtcgaagcctccctgtaggaaggccaaggaaatcagaaaggaaaggaaacgcctaaagttaatgcagcagaatcctgccggggagttagagggattccaggcccaggggcatcctccgtccctgtttcctcctaaagccaaatccaatcaacctaagagcttagaggacctgatctttgagagcctgcccgaaaatgcttcacataaactggaggtgcgggtggttcggtccagcccacctagtagccagttcaaagcaaccctcctggagagctaccaggtctacaagagataccagatggttatacacaaaaatccacccgacactcctactgagagccaattcacccggttcctgtgttcatctccactggaggcagaaactccccccaatggccccgactgtggctacgggagttttcatcagcagtattggctcgacgggaagataatcgccgttggggttatcgacattctaccaaactgtgtgtcctccgtgtacctgtattacgatccggattattcctttctgtctttaggagtctatagtgctctccgagagatcgcttttacacgccagctccacgagaaaacgtcccagctctcctattactatatgggattctacattcatagctgtcccaagatgaagtacaagggacagtatcggccctcagaccttctctgcccggaaacctacgtttgggtacccattgaacagtgtctgcctagtctggaaaactcaaagtactgtaggttcaaccaggaccccgaggcagtggatgaggaccgctctaccgaacccgaccgcctgcaggtttttcataaaagagcaattatgccctacggggtgtacaaaaaacagcagaaggacccatctgaggaagctgcagtgctccaatatgcatcacttgtgggccagaagtgttcggaacgcatgttactgtttaggaattag

SEQ ID NO: 19271 - DNA, 2031 bp, Artificial Sequence
  derived and/or modified sequence
ggcggggggttcgcccagcgtcgtggactatttccctagcgaggacttctaccgctgcggctactgcaagaacgagtcgggcagccgctccaatggcatgtgggcacattccatgacagtacaggattatcaggatctcatagaccgaggatggcgaagaagtggaaaatatgtgtacaaacctgtcatgaatcaaacatgttgtcctcagtacacaataaggtgccgacctttacaatttcagccttcaaaatctcacaagaaggttttgaaaaaaatgttgaaatttctagctaaaggggaggttcccaaaggaagttgtgaggatgagcccatggattccacaatggatgatgctgttgcgggtgactttgcattgataaataaactggatatacagtgtgatcttaaaacactcagtgatgacatcaaagagagtttagagagtgaaggaaaaaattcaaagaaagaagaacctcaggaattacttcagtcacaagatttcgtaggagagaagttgggctctggtgaaccgtcacattcagttaaagttcacacagttcctaagccaggcaaaggggctgatttgagtaagcctccatgtcgaaaagcaaaggaaatccggaaagaaaggaaaaggttaaaactaatgcagcagaacccagctggagaacttgagggtttccaggctcaaggtcacccaccatctttgtttccaccaaaggctaaatccaaccagccaaaatcactcgaagatttaatttttgagtctttaccagagaatgcatcacacaagttagaggtgagggtggtgagatcatctccaccaagttcgcagttcaaagccacacttctggagtcttaccaggtctataaacgttaccagatggttattcacaagaacccacctgatacgccaaccgaaagccagttcacaagattcctttgcagttcacccttggaggcagagactccccctaatgggccagattgtggctatggctcctttcaccagcagtactggcttgacggaaagatcattgctgtgggggtgattgacatcctcccaaactgtgtatcatctgtgtatttgtactacgatcctgattattcgtttttgtctttgggcgtctactctgcactacgagaaattgcttttactaggcagcttcatgagaaaacttctcaactcagctattattatatgggtttctacattcattcatgtcccaagatgaaatataagggtcagtatagaccttctgatttgctgtgccctgagacatatgtttgggtacccattgagcaatgcctgccttcacttgaaaactccaagtactgccgtttcaaccaggacccagaagcagtggatgaggatcgcagtacggaacctgaccgattgcaggtgtttcacaagagagccatcatgccttacggtgtttataagaaacagcagaaagacccaagtgaggaggctgctgttctgcagtacgccagcctggtggggcagaagtgctccgagcggatgctgctgttcagaaactgacctgttcacctctgccgggaagttcctgtgttgtgctgatgatttgtgccaggatacatattcagtacctgtggggaaataactgtcaccacccacaaattagacattttttattttgactatctatggcttttaaaaaatattttgtggcaatgtatctgtgagaatctcatagttaatataaagattttaaaactgcattatgacctagcccccataattgggatttatcattttggaggattctttctagagcaagatacgctcaaattctcctgtttgtattttgtaaaatgaagaagtgaatctaagtaacttaatcacagttgtgcattttttttggttctgttagagaaattaaaacagactgtttcctcaggcccattttaaactgaacttatgctaggaaaccttaagtatggggaaggtagaaagttcatttcatcacttagaaaatatgtcttctcaagaacaaaactgtgctg

SEQ ID NO: 19272 - DNA, 1548 bp, Artificial Sequence
  derived and/or modified sequence
tgagccggagggtctccttccgtcgtagactatttcccttctgaggatttctatagatgtgggtattgtaaaaatgagagcggcagtcgttctaatggaatgtgggcccacagcatgactgtgcaggattaccaggatctgattgatcggggatggcgtcgctctgggaagtatgtctataagcctgtgatgaatcaaacttgttgcccacagtacaccatccggtgtcgaccactgcaattccagccaagcaaatctcacaaaaaggtcctgaagaagatgctgaagttcttggcaaagggtgaagtgcccaagggcagctgcgaggatgaacctatggattctaccatggacgacgccgtggctggggattttgcgctcatcaacaagctagacattcaatgtgatctgaaaactctgtcggacgacatcaaggagagcctcgaaagtgagggtaaaaactccaagaaagaagaaccccaggaactcctacagtcacaagactttgtcggggagaaacttggctctggcgagccgtcccactcagtcaaggtccatacagtgcccaagcccggaaagggtgcagacctcagcaaaccaccatgcaggaaggctaaagaaatcagaaaggagagaaagagactcaaactgatgcagcaaaatcccgcaggggaactcgaagggttccaggcgcagggtcacccaccctctttgtttcctcccaaggctaagtctaaccagcccaagagcctggaggacctcatcttcgaaagtcttccagagaacgcaagtcacaagttagaggtgcgcgtcgtccgatcatccccaccatcatcccagttcaaggccacactcctggagtcttaccaggtctacaaaaggtatcagatggtgattcacaagaacccacctgatacccccactgaatcccaattcactagatttctttgtagcagccctcttgaggcggaaacccctccgaacggtcccgattgtggttacggatccttccaccagcagtactggttagatggtaagatcattgctgtgggagtgatagatattctacccaattgcgttagctcagtttacttatattatgatcccgactactccttcctcagcctcggtgtgtactccgccctgcgcgagatcgcctttactcgtcagttacacgaaaaaaccagccagctgtcatattactacatggggttctatatccattcatgtcccaaaatgaagtacaaaggccagtatagaccatcagacctgctgtgccccgagacgtacgtctgggtgccaatcgagcagtgcctacctagtctcgagaactccaagtactgcaggttcaatcaagatccggaggcggttgatgaggacaggtccactgagccggatcgtttgcaggtgttccacaaaagagccataatgccctatggtgtctacaaaaagcagcaaaaggacccaagtgaggaagcagccgtgctgcagtatgcctccctggtgggacagaagtgctcagaacggatgctgttattcaggaactag

SEQ ID NO: 19273 - DNA, 1616 bp, Artificial Sequence
  derived and/or modified sequence
agcgaggacttctaccgctgcggctactgcaagaacgagtcgggcagccgctccaatggcatgtgggcacattccatgacagtacaggattatcaggatctcatagaccgaggatggcgaagaagtggaaaatatgtgtacaaacctgtcatgaatcaaacatgttgtcctcagtacacaataagatgagcccatggattccacaatggatgatgctgttgcgggtgactttgcattgataaataaactggatatacagtgtgatcttaaaacactcagtgatgacatcaaagagagtttagagagtgaaggaaaaaattcaaagaaagaagaacctcaggaattacttcagtcacaagatttcgtaggagagaagttgggctctggtgaaccgtcacattcagttaaagttcacacagttcctaagccaggcaaaggggctgatttgagtaagcctccatgtcgaaaagcaaaggaaatccggaaagaaaggaaaaggttaaaactaatgcagcagaacccagctggagaacttgagggtttccaggctcaaggtcacccaccatctttgtttccaccaaaggctaaatccaaccagccaaaatcactcgaagatttaatttttgagtctttaccagagaatgcatcacacaagttagaggtgagggtggtgagatcatctccaccaagttcgcagttcaaagccacacttctggagtcttaccaggtctataaacgttaccagatggttattcacaagaacccacctgatacgccaaccgaaagccagttcacaagattcctttgcagttcacccttggaggcagagactccccctaatgggccagattgtggctatggctcctttcaccagcagtactggcttgacggaaagatcattgctgtgggggtgattgacatcctcccaaactgtgtatcatctgtgtatttgtactacgatcctgattattcgtttttgtctttgggcgtctactctgcactacgagaaattgcttttactaggcagcttcatgagaaaacttctcaactcagctattattatatgggtttctacattcattcatgtcccaagatgaaatataagggtcagtatagaccttctgatttgctgtgccctgagacatatgtttgggtacccattgagcaatgcctgccttcacttgaaaactccaagtactgccgtttcaaccaggacccagaagcagtggatgaggatcgcagtacggaacctgaccgattgcaggtgtttcacaagagagccatcatgccttacggtgtttataagaaacagcagaaagacccaagtgaggaggctgctgttctgcagtacgccagcctggtggggcagaagtgctccgagcggatgctgctgttcagaaactgacctgttcacctctgccgggaagttcctgtgttgtgctgatgatttgtgccaggatacatattcagtacctgtggggaaataactgtcaccacccacaaattagacattttttattttgactatctatggcttttaaaaaatattttgtggcaatgtatctgtgagaatctcatagttaatataaagattttaaaactgcattatgacctag

SEQ ID NO: 19274 - DNA, 1557 bp, Artificial Sequence
  derived and/or modified sequence
atggcattctgggccggaggttcccctagtgtggtagactactttccaagcgaggatttctatcggtgcggatattgtaagaatgaatctggtagtcgttccaacggcatgtgggcccatagtatgactgtccaggactaccaggatctaattgatagaggctggcggagatcaggtaaatacgtctacaaaccagtgatgaatcagacctgttgtccccagtacacgattcgctgtcggccgctgcaattccagccctctaagtcacataaaaaggttttgaagaagatgttgaaatttcttgctaagggtgaggtgcctaaagggagttgtgaggacgaaccaatggactcaactatggacgatgctgtcgctggcgattttgcactgattaacaaactcgatatccagtgtgatttgaaaaccttgagtgacgacatcaaggagagcttagaaagcgagggtaagaattcaaaaaaggaggaaccccaggaattgctacagagtcaagactttgtaggggaaaaacttggatccggggaaccaagtcactcagtcaaggtgcacacagtgcccaagcccgggaagggagctgatcttagtaagccaccatgcagaaaagcgaaagagatcaggaaagaaaggaaacgtctaaaattgatgcagcagaatcccgcaggggaattggagggctttcaggcacaggggcacccaccgagtttgttcccccctaaagcgaaatcgaatcaacccaaaagtctcgaggacctgatctttgaaagcttaccggagaatgcatctcataaattggaagttagggtggtgaggtcctccccaccttcaagccagtttaaggctacattgctcgagtcttatcaagtctataagcggtatcagatggtcatccataaaaacccacccgataccccaaccgagtctcagttcacgcgattcctttgttcaagtcccctggaggccgaaactccccccaacggtccagactgcggatacggatcctttcatcaacagtattggctggacggtaagatcattgcagttggcgtaatcgacatcctccctaactgtgtgtcttccgtgtacttgtactatgacccagactacagtttccttagtctgggtgtgtatagcgctctccgggaaatcgcttttacccggcagctgcatgagaaaacctctcagttgagctattattacatgggcttctatatccatagctgccccaaaatgaaatataaagggcaatatagaccttccgacctcctgtgtcctgagacgtatgtgtgggtgcccatcgaacagtgtctcccttcccttgagaattccaagtactgccgcttcaaccaagatcccgaagccgttgatgaggacagatccactgagccagaccgactgcaagtgttccacaagcgagctattatgccatacggggtgtacaagaagcaacagaaggaccccagtgaagaagccgcagtgctccaatatgccagtctggttgggcagaagtgcagcgagagaatgctgctgttccgcaactag

SEQ ID NO: 19275 - DNA, 1557 bp, Artificial Sequence
  derived and/or modified sequence
atggccttctgggccggcggcagccccagcgtggtggactacttccccagcgaggacttctaccgctgtggctactgcaagaatgaaagtggcagccgcagcaatggcatgtgggcccacagcatgacagtgcaggactaccaggacctgattgaccggggctggaggagaagtggcaagtatgtgtacaagcctgtgatgaaccagacctgctgcccccagtacaccatccgctgccggcccctgcagttccagcccagcaagagccacaagaaggtgctgaagaagatgctgaagttcctggccaagggggaggtgcccaagggcagctgtgaagatgagcccatggacagcaccatggatgatgctgtggccggggactttgccctgatcaacaagctggacatccagtgtgacctgaagaccctgagtgatgacatcaaggagagcctggagagcgagggcaagaacagcaagaaggaggagccccaggagctgctgcagagccaggactttgtgggggagaagctgggcagcggggagcccagccacagcgtgaaggtgcacacagtgcccaagccaggaaaaggagctgacctgagcaagccaccctgcaggaaggccaaggagatcaggaaggagaggaagaggctgaagctgatgcagcagaacccagctggggagctggagggcttccaggcccagggccacccccccagcctcttcccccccaaggccaagagcaaccagcccaagagcctggaggacctgatctttgagagcctgcctgaaaatgccagccacaagctggaggtgcgggtggtgcgcagcagcccccccagcagccagttcaaggccaccctgctggagagctaccaggtgtacaagcgctaccagatggtgatccacaagaaccccccagacacccccacagagagccagttcacccgcttcctgtgcagcagccccctggaggccgagaccccaccaaatggaccagactgtggctacggcagcttccaccagcagtactggctggatggcaagatcatcgctgtgggcgtcatcgacatcctgcccaactgtgtgtcctctgtgtacctgtactatgaccctgactacagcttcctgagcctgggcgtgtacagcgccctgcgggagatcgccttcacccggcagctgcacgagaagaccagccagctgagctactactacatgggcttctacatccacagctgccccaagatgaagtacaagggccagtaccggcccagcgacctgctgtgcccagagacctacgtgtgggtgcccatcgagcagtgcctgcccagcctggagaacagcaagtactgccgcttcaaccaggaccctgaggccgtggatgaggacaggagcacagagccagaccggctgcaggtgttccacaagagggccatcatgccctacggcgtgtacaagaagcagcagaaggaccccagcgaggaggccgctgtgctgcagtatgccagcctggtgggccagaagtgcagcgagaggatgctgctcttcagaaattag

SEQ ID NO: 19276 - DNA, 1557 bp, Artificial Sequence
  derived and/or modified sequence
atggccttctgggccggcggcagccccagcgtggtggactacttccctagcgaggacttttacagatgtggctattgtaaaaacgagtcaggaagtaggagtaacggcatgtgggcacactccatgaccgttcaagactaccaggacctgattgatcgcggatggcgccgctctggcaaatacgtttacaagccagtcatgaatcagacctgctgtcctcagtacaccattcggtgtagaccactgcaattccagccaagcaagagccacaaaaaagtgctgaaaaaaatgctcaagttcttggccaagggggaagttcctaaaggaagttgcgaggacgaacccatggactccactatggatgacgctgtggcaggggatttcgccctgattaacaagttagacattcagtgcgatttgaagactctgagcgatgacataaaggaaagtttggagtcggagggcaaaaactctaaaaaggaagagccacaggaactactgcagtcccaggacttcgtaggcgagaaactgggcagcggggaaccgtcccactctgtgaaggtacacactgtcccaaagcccggtaaaggggccgacttgagtaaacccccttgccgcaaagccaaggaaatccgcaaagaacggaaacggcttaagctcatgcagcagaaccccgctggcgagctcgaggggtttcaggcccagggtcaccccccctcactttttccacccaaagcaaaatcgaaccagccgaagagtttggaagacctaatattcgaaagtctgccagagaacgcctcccataagctggaggttagggtggtgaggtcgagtcctccaagttctcaattcaaggcgacacttttagaaagctaccaagtttacaagcggtaccagatggtgatccataaaaacccccccgacaccccaacagaatcacagttcacacgattcttgtgttcttccccactggaggcagagactcctccaaatgggccagactgcggatacggctcctttcatcaacagtactggctcgatgggaaaattatcgctgtgggggtaatcgacatcttgccaaactgcgtgagctcagtatacttatattacgaccccgactacagttttctgtctctcggtgtgtactctgctctgagggagatagcttttacccggcaacttcacgagaagacttctcaactcagttactattatatgggattttacatccactcctgccctaagatgaaatacaaggggcagtataggcctagcgatctgctgtgcccggagacgtacgtgtgggtacccattgagcaatgtcttccctcactggaaaactctaaatactgcagattcaatcaagacccagaagctgtagacgaggaccgttcaaccgagccagatcgactccaggtattccataagcgggccattatgccttatggtgtctacaaaaagcagcaaaaggatccaagcgaggaggccgccgtgctgcagtacgcgagtctggtcgggcagaagtgcagcgaaagaatgcttctatttagaaactag

SEQ ID NO: 19277 - DNA, 1557 bp, Artificial Sequence
  derived and/or modified sequence
atggcgttctgggccggagggagcccttctgtggtggattactttccttcagaagacttttaccgctgtggctactgtaaaaacgagtctggctcccgttcaaatgggatgtgggctcacagtatgacggtgcaggactaccaggatttaatcgaccgagggtggcgtagatctggaaaatacgtttataagcccgtcatgaaccaaacatgctgtcctcagtatacaatacggtgcaggccccttcagtttcagccctccaagagccataagaaagttctcaaaaagatgctgaaatttctggccaagggtgaggtgcctaaaggttcctgcgaagatgaaccaatggactcgactatggacgacgcagtagcaggcgactttgcgctgattaataaattggatatacagtgtgatctcaaaactttgagtgatgatataaaggaatccctcgaatccgagggcaagaatagcaaaaaagaagagccccaggaattactgcagtcccaagattttgtgggtgagaaactggggtctggcgaaccttcgcacagcgtaaaggtccacactgtgcctaaaccgggaaagggagccgacctaagtaagccaccttgccgaaaggctaaggagatcaggaaagagcggaagagactgaagttaatgcaacagaatccggcaggcgagcttgaaggcttccaggctcagggccacccaccttccctgttccctcctaaggcaaaatctaaccagcctaagagcctcgaggatttaatctttgagagtctccccgaaaatgccagccataaactagaagtccgcgtggtgagaagctcacctccgagtagccaatttaaggcgactctgttagagtcgtatcaggtgtataagcgataccaaatggtgatacataaaaacccccctgataccccaacagaaagccagtttacacgctttctgtgttcttcaccactggaggcggagacaccacctaatggtccagattgcgggtatggatctttccatcagcaatactggctggacggtaagattatcgccgtaggcgtgatcgacattcttcctaattgcgtttcatccgtgtacctgtattacgacccggactactctttcctgtcactcggcgtttacagtgcactgagagaaattgctttcactcggcagttacacgagaagacttcacagttgagttattactatatgggattttacattcactcctgtcctaaaatgaagtacaaaggtcaataccggccttcagatctgctgtgccccgaaacctatgtatgggtcccaattgaacagtgcctgccatccctagaaaattccaaatattgccgcttcaatcaagaccctgaagccgtggacgaggatcgcagcacagagcctgatcgcctgcaggtgtttcacaaacgggctatcatgccatatggagtgtacaagaaacagcagaaagacccttctgaggaggccgcagtgctgcagtatgcgtctttggtcgggcagaaatgcagcgagagaatgttgctgttccggaattag

SEQ ID NO: 19278 - DNA, 1557 bp, Artificial Sequence
  derived and/or modified sequence
atggccttctgggccggcggcagccccagcgtggtggactacttccccagcgaggacttctacagatgcggctactgcaagaacgagagcggcagcagaagcaacggcatgtgggcccacagcatgaccgtgcaggactaccaggacctgatcgacagaggctggagaagaagcggcaagtacgtgtacaagcccgtgatgaaccagacctgctgcccccagtacaccatcagatgcagacccctgcagttccagcccagcaagagccacaagaaggtgctgaagaagatgctgaagttcctggccaagggcgaggtgcccaagggcagctgcgaggacgagcccatggacagcaccatggacgacgccgtggccggcgacttcgccctgatcaacaagctggacatccagtgcgacctgaagaccctgagcgacgacatcaaggagagcctggagagcgagggcaagaacagcaagaaggaggagccccaggagctgctgcagagccaggacttcgtgggcgagaagctgggcagcggcgagcccagccacagcgtgaaggtgcacaccgtgcccaagcccggcaagggcgccgacctgagcaagcccccctgcagaaaggccaaggagatcagaaaggagagaaagagactgaagctgatgcagcagaaccccgccggcgagctggagggcttccaggcccagggccacccccccagcctgttcccccccaaggccaagagcaaccagcccaagagcctggaggacctgatcttcgagagcctgcccgagaacgccagccacaagctggaggtgagagtggtgagaagcagcccccccagcagccagttcaaggccaccctgctggagagctaccaggtgtacaagagataccagatggtgatccacaagaacccccccgacacccccaccgagagccagttcaccagattcctgtgcagcagccccctggaggccgagaccccccccaacggccccgactgcggctacggcagcttccaccagcagtactggctggacggcaagatcatcgccgtgggcgtgatcgacatcctgcccaactgcgtgagcagcgtgtacctgtactacgaccccgactacagcttcctgagcctgggcgtgtacagcgccctgagagagatcgccttcaccagacagctgcacgagaagaccagccagctgagctactactacatgggcttctacatccacagctgccccaagatgaagtacaagggccagtacagacccagcgacctgctgtgccccgagacctacgtgtgggtgcccatcgagcagtgcctgcccagcctggagaacagcaagtactgcagattcaaccaggaccccgaggccgtggacgaggacagaagcaccgagcccgacagactgcaggtgttccacaagagagccatcatgccctacggcgtgtacaagaagcagcagaaggaccccagcgaggaggccgccgtgctgcagtacgccagcctggtgggccagaagtgcagcgagagaatgctgctgttcagaaactag

SEQ ID NO: 19279 - protein, 720 aa, Artificial Sequence
  derived and/or modified sequence
MELGCWTQLGLTFLQLLLISSLPREYTVINEACPGAEWNIMCRECCEYDQIECVCPGKREVVGYTIPCCRNEENECDSCLIHPGCTIFENCKSCRNGSWGGTLDDFYVKGFYCAECRAGWYGGDCMRCGQVLRAPKGQILLESYPLNAHCEWTIHAKPGFVIQLRFVMLSLEFDYMCQYDYVEVRDGDNRDGQIIKRVCGNERPAPIQSIGSSLHVLFHSDGSKNFDGFHAIYEEITACSSSPCFHDGTCVLDKAGSYKCACLAGYTGQRCENLLEERNCSDPGGPVNGYQKITGGPGLINGRHAKIGTVVSFFCNNSYVLSGNEKRTCQQNGEWSGKQPICIKACREPKISDLVRRRVLPMQVQSRETPLHQLYSAAFSKQKLQSAPTKKPALPFGDLPMGYQHLHTQLQYECISPFYRRLGSSRRTCLRTGKWSGRAPSCIPICGKIENITAPKTQGLRWPWQAAIYRRTSGVHDGSLHKGAWFLVCSGALVNERTVVVAAHCVTDLGKVTMIKTADLKVVLGKFYRDDDRDEKTIQSLQISAIILHPNYDPILLDADIAILKLLDKARISTRVQPICLAASRDLSTSFQESHITVAGWNVLADVRSPGFKNDTLRSGVVSVVDSLLCEEQHEDHGIPVSVTDNMFCASWEPTAPSDICTAETGGIAAVSFPGRASPEPRWHLMGLVSWSYDKTCSHRLSTAFTKVLPFKDWIERNMK

SEQ ID NO: 19280 - DNA, 2163 bp, Artificial Sequence
  derived and/or modified sequence
atggaactgggctgttggacgcagctcgggctcaccttcttgcaactcctgctgatctccagtctacccagggaatacacggtcataaatgaggcgtgtccgggtgccgagtggaacatcatgtgccgagagtgttgcgaatatgaccaaatagaatgtgtctgtccgggaaagcgggaggttgtcgggtacaccattccatgttgtaggaatgaagagaatgagtgtgactcctgcctgatccatccagggtgtacgatatttgagaactgcaagtcatgcagaaacggatcctggggaggcactctggacgacttctacgttaaggggttttattgtgccgagtgtcgagccggttggtacgggggagactgtatgagatgcgggcaggtattaagagcacccaaggggcagatattactggagtcctatcctcttaacgctcactgtgagtggaccattcatgccaaacctggatttgtgattcaactgaggttcgtaatgctgtcactcgaatttgattacatgtgccagtatgactatgtcgaagtcagagatggggacaatcgagatggacagattatcaaaagggtgtgcggtaacgagcggcctgcccctatccagtcgattgggtccagcctgcacgtgttattccattctgatgggtctaaaaatttcgacggttttcatgcaatctacgaagaaattaccgcgtgtagttcaagcccttgctttcacgatgggacatgtgtactggataaggccggttcatacaagtgtgcctgtctggctggttacacaggacaacggtgcgaaaatctcctggaagaaaggaactgtagtgacccaggtggcccagtcaatggttaccaaaagatcactgggggacctggccttataaatggacggcacgcaaagatcggcaccgtcgtcagttttttctgcaataacagctatgtactcagtggtaacgagaaacggacctgtcagcagaatggcgaatggtccgggaagcagcctatctgcatcaaagcatgcagggagcccaaaatctcagacctggtgagaaggcgggtgctcccaatgcaggtgcagtccagggaaacccccttacatcagctctattctgccgctttttcaaaacagaagttgcagtctgccccaaccaagaagccagctctgcctttcggtgatctgcctatgggataccagcacctccatactcaactccagtatgagtgtatcagccccttttacagacggctgggaagcagtaggagaacctgtttaaggaccggcaagtggagtggacgcgcaccaagttgcatacccatttgtgggaagatcgagaacatcacggctccaaaaacgcagggcctacgctggccatggcaagccgcaatttatcgacgaacttccggggttcacgatggatctctccataagggcgcatggtttctcgtgtgcagcggcgctctcgtcaatgaaagaactgttgtagtggctgctcactgcgtgacagatctgggcaaggtcactatgatcaaaacagccgatctgaaagttgtcttgggcaagttttaccgggatgacgacagggacgaaaaaacaatccagagcctgcagataagtgctataatcctccaccccaattacgaccctattctgctcgatgctgacatcgcaatcctaaagctccttgacaaggccagaatctcgaccagggtgcagcctatatgtctggccgcttccagagacctatccacttcattccaggagagtcatatcaccgtggcaggatggaacgtgttggcagacgtgaggagccccggttttaagaacgacaccttgcgatctggggtcgtgtccgtagtggatagcctactgtgcgaggaacagcatgaagatcatggaattcctgtatcagtaaccgataatatgttctgcgccagctgggaaccaaccgctccctctgatatctgcaccgcagaaaccggaggaatcgccgcagtttcttttccaggaagagcgtccccagagccccgttggcatctcatgggcctcgtatcatggtcctatgataagacgtgtagtcataggctgtcgacagcctttacaaaggtccttcctttcaaggactggatcgaacgcaatatgaagtag

SEQ ID NO: 19281 - DNA, 2163 bp, Artificial Sequence
  derived and/or modified sequence
atggagctgggatgctggactcagcttggtctgaccttcctgcagctcctgctgatctcatccctgccccgtgaatacaccgtgattaacgaggcgtgccctggggcggaatggaatattatgtgccgtgagtgttgcgagtacgaccaaattgagtgtgtatgtccaggaaagcgtgaagtggtgggatataccattccttgctgccgtaacgaagagaacgagtgcgatagctgcctaatccatcccgggtgtaccatattcgagaactgtaaatcttgccgaaatggatcctggggcggaactctagacgacttttatgtgaaaggattctactgcgccgagtgtcgtgcgggctggtatgggggcgactgtatgcgatgcggccaagtgttgagagcacctaagggtcagatactactggagagctatccgcttaatgcacattgtgagtggactatccatgcaaaaccaggatttgtgattcagctccgcttcgtaatgctgtcattggagtttgattatatgtgtcagtatgactatgttgaagtaagggatggggataatcgggacggtcagatcattaagagggtatgtggtaatgagcgcccagcacctatccaaagcattggatcttctctccacgtgctgtttcacagtgatggcagcaaaaactttgatgggtttcacgctatatatgaggaaattacagcttgcagttcctccccgtgtttccacgatggcacatgtgtgctggataaagccgggagctacaaatgcgcatgtctagccggctacacaggccagcggtgcgaaaacttattggaggaacgcaattgttccgacccgggaggcccagtgaatggctatcagaagattacaggaggcccaggactaattaacggaagacacgctaaaatcgggaccgtggtaagctttttctgcaacaatagttacgttctgtcaggaaacgagaagcgaacctgccaacagaacggggagtggtctggaaagcagcctatttgtatcaaggcttgcagagaacccaagatctccgatctggtgcgaagacgggtgctgcctatgcaggtccagtcaagagagaccccgctgcaccagctgtattcagccgcattttccaaacagaagctccagtctgcacctactaaaaaaccagcccttccatttggcgacttgcctatgggatatcagcatctgcacacacagctacagtatgaatgtatctcacctttctatcgaaggctgggaagtagtcgaagaacatgtctgcgcactggtaagtggagtggtcgggcgccgtcatgcattcctatctgtggaaagattgaaaacatcaccgcacccaagacacagggtcttaggtggccatggcaggccgcaatttacagaaggacaagtggcgtacatgatgggagtctgcacaaaggcgcttggttcttggtgtgctcgggcgctctggttaatgaaaggaccgtggtggtcgccgcgcattgcgtgactgacctcggcaaggtgactatgattaaaaccgctgatctgaaagtagttttgggtaagttttacagggacgacgatcgtgacgagaaaactattcagtctttgcagatttctgccattatattgcacccaaattacgaccctatcctccttgacgcagatatcgcaattctgaagctattggacaaggcaagaataagcacccgtgtgcagcccatctgcttggcagctagtcgggacctgagtacctccttccaggaatctcacattaccgtggccggctggaatgtgctagccgacgtgaggagcccaggttttaagaatgacacactaaggtcaggcgttgtgtccgtcgtggactccctcctgtgcgaggaacagcacgaagatcacggcatacctgtcagcgtaacagataacatgttctgcgcttcttgggagcctaccgccccatcagacatatgtacagccgagacaggtgggattgctgccgtatcattccccggacgagcatcaccggaacccagatggcatctgatgggtttggtatcttggagctacgacaaaacctgtagccaccgactctccacagcatttacgaaagtgcttcccttcaaggactggatcgagagaaacatgaaatag

SEQ ID NO: 19282 - DNA, 2163 bp, Artificial Sequence
  derived and/or modified sequence
atggaactgggttgttggacccagcttggcctcacttttttgcagcttctcttaattagctccctgcctagagaatatacggttatcaatgaagcatgtccgggagccgagtggaatatcatgtgcagagaatgctgtgagtacgaccaaattgagtgcgtatgcccagggaagcgggaggtggtagggtacaccattccatgttgtaggaacgaagagaacgagtgtgattcttgcctgattcatccaggatgcacaatcttcgaaaactgcaaaagttgccgaaacggatcatggggaggaactctagacgacttttatgtgaaaggattctactgcgccgagtgtcgtgcgggctggtatgggggcgactgtatgcgatgcggccaagtgttgagagcacctaagggtcagatactactggagagctatccgcttaatgcacattgtgagtggactatccatgcaaaaccaggatttgtgattcagctccgcttcgtaatgctgtcattggagtttgattatatgtgtcagtatgactatgttgaagtaagggatggggataatcgggacggtcagatcattaagagggtatgtggtaacgaaagacccgccccaattcagtccatagggtcatcgctgcacgtgctcttccattctgacgggtctaagaacttcgatgggtttcatgccatctacgaagagattaccgcctgcagctcttctccctgtttccacgatgggacatgtgtgctcgacaaagccggatcatataaatgcgcttgcttagctggttacaccggacagcgttgtgagaatttgctcgaagaaagaaattgctccgatccaggggggccagtcaatggctaccagaagattaccggtgggcctggcctcattaacggaagacacgctaagattggtacggtagtttccttcttctgcaataattcctacgtcctgtccggaaacgagaagcgcacatgccagcagaacggggagtggtccggaaaacagccaatatgtatcaaggcatgccgagagccaaaaatatctgatcttgtgaggagacgagtactgcccatgcaagtccagtctcgcgaaaccccattgcaccagctgtattctgctgcctttagtaaacaaaaacttcagagcgcacccacaaaaaagcctgccctcccctttggtgatttgcccatgggctatcaacacctgcatacacagttgcaatatgaatgcatcagccctttctataggcgattaggatcatccagacgcacatgcctaagaactggaaaatggagcggtcgtgctccatcatgcattcccatctgtggcaagattgaaaacatcaccgcgcccaaaacccagggtctgagatggccctggcaagcagccatctaccgaaggacatctggcgtacatgatggatctcttcacaagggcgcttggtttctcgtgtgttctggggctctcgttaatgaacgcacagtggtcgttgccgcgcattgcgtgaccgatcttggcaaagtgacaatgatcaagaccgccgacctcaaagtggtgctaggtaagttttacagagacgatgacagagacgagaagacgattcaaagcctacaaatctctgcgattatcctccaccccaattacgacccaatattactagatgccgatatagctatcctgaaactgttagacaaggcaagaatatcaacaagagtgcagcctatctgcctcgctgcatcaagagatttgtctacttcttttcaagagtcacatatcaccgtcgcgggctggaatgtgctagccgacgtgaggagcccaggttttaagaatgacacactaaggtcaggcgttgtgtccgtcgtggactccctcctgtgcgaggaacagcacgaagatcacggcatacctgtcagcgtaacagataacatgttctgcgcttcttgggagcctaccgccccatcagacatatgtacagccgagacaggtgggattgctgccgtatcattccccggacgagcatcaccggaacccagatggcatctgatgggtttggtatcttggagctacgacaaaacctgtagccaccgactgtctactgcattcacaaaagtgctgccttttaaagattggatcgaacgtaatatgaaatag

SEQ ID NO: 19283 - DNA, 2163 bp, Artificial Sequence
  derived and/or modified sequence
atggagctgggctgctggacccagctgggcctgaccttcctgcagctgctgctgatcagcagcctgcccagagagtacaccgtgatcaacgaggcctgccccggcgccgagtggaacatcatgtgcagagagtgctgcgagtacgaccagatcgagtgcgtgtgccccggcaagagagaggtggtgggctacaccatcccctgctgcagaaacgaggagaacgagtgcgacagctgcctgatccaccccggctgcaccatcttcgagaactgcaagagctgcagaaacggcagctggggcggcaccctggacgacttctacgtgaagggcttctactgcgccgagtgcagagccggctggtacggcggcgactgcatgagatgcggccaggtgctgagagcccccaagggccagatcctgctggagagctaccccctgaacgcccactgcgagtggaccatccacgccaagcccggcttcgtgatccagctgagattcgtgatgctgagcctggagttcgactacatgtgccagtacgactacgtggaggtgagagacggcgacaacagagacggccagatcatcaagagagtgtgcggcaacgagagacccgcccccatccagagcatcggcagcagcctgcacgtgctgttccacagcgacggcagcaagaacttcgacggcttccacgccatctacgaggagatcaccgcctgcagcagcagcccctgcttccacgacggcacctgcgtgctggacaaggccggcagctacaagtgcgcctgcctggccggctacaccggccagagatgcgagaacctgctggaggagagaaactgcagcgaccccggcggccccgtgaacggctaccagaagatcaccggcggccccggcctgatcaacggcagacacgccaagatcggcaccgtggtgagcttcttctgcaacaacagctacgtgctgagcggcaacgagaagagaacctgccagcagaacggcgagtggagcggcaagcagcccatctgcatcaaggcctgcagagagcccaagatcagcgacctggtgagaagaagagtgctgcccatgcaggtgcagagcagagagacccccctgcaccagctgtacagcgccgccttcagcaagcagaagctgcagagcgcccccaccaagaagcccgccctgcccttcggcgacctgcccatgggctaccagcacctgcacacccagctgcagtacgagtgcatcagccccttctacagaagactgggcagcagcagaagaacctgcctgagaaccggcaagtggagcggcagagcccccagctgcatccccatctgcggcaagatcgagaacatcaccgcccccaagacccagggcctgagatggccctggcaggccgccatctacagaagaaccagcggcgtgcacgacggcagcctgcacaagggcgcctggttcctggtgtgcagcggcgccctggtgaacgagagaaccgtggtggtggccgcccactgcgtgaccgacctgggcaaggtgaccatgatcaagaccgccgacctgaaggtggtgctgggcaagttctacagagacgacgacagagacgagaagaccatccagagcctgcagatcagcgccatcatcctgcaccccaactacgaccccatcctgctggacgccgacatcgccatcctgaagctgctggacaaggccagaatcagcaccagagtgcagcccatctgcctggccgccagcagagacctgagcaccagcttccaggagagccacatcaccgtggccggctggaacgtgctggccgacgtgagaagccccggcttcaagaacgacaccctgagaagcggcgtggtgagcgtggtggacagcctgctgtgcgaggagcagcacgaggaccacggcatccccgtgagcgtgaccgacaacatgttctgcgccagctgggagcccaccgcccccagcgacatctgcaccgccgagaccggcggcatcgccgccgtgagcttccccggcagagccagccccgagcccagatggcacctgatgggcctggtgagctggagctacgacaagacctgcagccacagactgagcaccgccttcaccaaggtgctgcccttcaaggactggatcgagagaaacatgaagtag

SEQ ID NO: 19284 - DNA, 2163 bp, Artificial Sequence
  derived and/or modified sequence
atggaactgggttgctggacacagctgggcctgacctttttgcaactcctgctaatctcatcccttccaagagagtatacagtgatcaatgaagcctgtcctggagccgagtggaatataatgtgccgggaatgttgtgagtacgatcaaatagaatgcgtgtgccccggcaaacgggaagtggttggatacacgataccgtgctgcagaaacgaagaaaatgaatgcgattcatgcctcattcatccaggatgcaccatctttgaaaattgcaagagctgtcggaatggtagttggggcggaacgctggatgatttctatgtgaaggggttctattgcgccgaatgccgcgcaggttggtatggcggtgactgcatgagatgcggacaagtcctccgcgcaccaaagggacagatcctgctcgaaagttatccactgaacgctcactgcgagtggaccatccatgctaagcctggctttgtaatacaactcaggtttgtcatgctttctctggaatttgactacatgtgccaatatgactatgtggaggttcgcgatggagacaatcgggatgggcaaatcatcaagcgggtgtgcggaaacgaaaggcccgctcctatccaatccatcggaagttctctgcacgtgctcttccacagcgacgggtcaaaaaatttcgacggattccacgcgatatacgaagaaattactgcctgctcttcttcaccatgctttcacgacggcacctgtgtgctggacaaagctgggtcttacaaatgtgcctgcttagccggatatacaggccagcggtgcgagaacctccttgaagagaggaattgttctgatcctggcggccctgttaacgggtaccagaagattacggggggccctggattgatcaatggccggcacgcaaagatcggaaccgttgtttcattcttctgcaacaacagctacgtcctgtcaggaaatgagaaaagaacctgccagcaaaacggcgagtggtcaggcaagcagccaatttgcattaaagcatgcagggaacctaagatatcagacctcgtgcggcgcagagtgctcccaatgcaggttcagagccgtgaaacccccctgcaccagttgtactcagctgctttctctaagcaaaagctacagagcgcgccaacaaagaagcccgccctgcctttcggcgatctacctatgggctaccagcacctacatacacagctgcaatacgaatgcatctccccattctacaggcgcttggggtcatcccggaggacctgcctgagaacgggcaagtggtcagggagagctccaagttgtataccaatttgcgggaagattgaaaacatcacagctcctaagacacagggcctgaggtggccctggcaggcagcgatatatagaaggacttccggcgtccatgatggaagcctgcataaaggtgcatggttcctggtgtgctccggcgctctggttaacgaaaggactgtagtagtggccgctcactgtgtaacggaccttggaaaggtcacaatgattaagactgccgacttgaaagtcgtgctcggcaaattctaccgggatgatgatagggacgaaaagactatccaatccctgcaaatctctgccattatcctgcaccctaactacgaccccatcctccttgatgctgacattgcaattttgaagctcctcgataaagctaggatcagcaccagggttcaacccatttgtctggcagctagccgagacttgagtacctccttccaggaaagccacatcaccgtcgctggatggaacgtgctcgccgacgtgcgttcccctggcttcaagaacgatactctacgctctggcgttgtgtccgtggttgactccctcctgtgtgaagaacagcatgaagaccatgggatacctgtgtccgtgaccgataatatgttctgtgccagctgggaaccgaccgccccctctgacatctgtacggctgagacgggcggcatcgccgctgtgtcgttccccggaagagccagccccgaacccaggtggcacttgatgggcctcgtgagttggtcctacgacaagacatgttctcacagactgtctactgcttttaccaaagtccttccctttaaggactggatcgagcggaacatgaagtag

SEQ ID NO: 19285 - DNA, 2163 bp, Artificial Sequence
  derived and/or modified sequence
atggagctgggctgctggacccagctgggcctgaccttcctgcagctgctgctgatcagcagcctgccccgggagtacaccgtcatcaatgaggcctgccctggagctgagtggaacatcatgtgccgggagtgctgtgaatatgaccagattgaatgtgtgtgccctgggaagcgggaggtggtgggctacaccatcccctgctgcagaaatgaagaaaatgaatgtgacagctgcctgatccaccctggctgcaccatctttgagaactgcaagagctgcagaaatggctcctggggcggcaccctggatgacttctacgtgaagggcttctactgtgctgaatgtcgggccggctggtatggaggagactgcatgagatgtggccaggtgctgcgggcccccaagggccagatcctgctggagagctaccccctgaatgcccactgtgagtggaccatccacgccaagccaggcttcgtcatccagctgcgctttgtgatgctgagcctggagtttgactacatgtgccagtatgactatgtggaggtgagagatggagacaacagagatggccagatcatcaagagggtgtgtggaaatgaaagacctgcccccatccagagcatcggcagcagcctgcacgtgctcttccacagtgatggcagcaagaactttgatggcttccacgccatctatgaggagatcacagcctgcagcagcagcccctgcttccatgatggcacctgtgtgctggacaaggccggcagctacaagtgtgcctgcctggccggctacacaggccagagatgtgagaacctgctggaggagaggaactgcagcgaccccggcggccctgtgaatggctaccagaagatcaccggcggccctggcctcatcaatggaagacatgccaagattggaacagtggtgtccttcttctgcaacaacagctatgtgctgtctggaaatgagaagaggacctgccagcagaatggagagtggagcggcaagcagcccatctgcatcaaggcctgccgggagcccaagatcagtgacctggtgagaagaagagtgctgcccatgcaggtgcagagccgggagacccccctgcaccagctgtacagcgctgccttcagcaagcagaagctgcagagcgcccccaccaagaagccagccctgccctttggagacctgcccatgggctaccagcacctgcacacccagctgcagtatgagtgcatcagccccttctaccgccgcctgggcagcagcaggaggacctgcctgaggacaggcaagtggagcggccgggcccccagctgcatccccatctgtgggaagattgagaacatcacagcccccaagacccagggcctgcgctggccctggcaggccgccatctacagaaggaccagcggcgtgcatgatggcagcctgcacaagggggcctggttcctggtgtgcagcggggccctggtgaatgaaagaacagtggtggtggccgcccactgtgtgacagacctgggcaaggtgaccatgatcaagacagctgacctgaaggtggtgctgggcaagttctacagagatgatgacagagatgagaagaccatccagagcctgcagatcagcgccatcatcctgcaccccaactatgaccccatcctgctggatgctgacatcgccatcctgaagctgctggacaaggcccgcatcagcaccagggtgcagcccatctgcctggccgccagccgggacctgagcaccagcttccaggagagccacatcaccgtggccggctggaatgtgctggctgatgtgcgcagccctggcttcaagaatgacaccctgcggtctggagtggtgtctgtggtggacagcctgctgtgtgaggagcagcatgaagatcatggcatccctgtgtctgtgacagacaacatgttctgtgcctcctgggagcccacagcccccagcgacatctgcacagctgagactggaggcattgctgctgtgtccttccctggccgggccagccctgagccccgctggcacctgatgggcctggtgtcctggagctatgacaagacctgcagccaccggctgagcacagccttcaccaaggtgctgcccttcaaggactggattgaaagaaacatgaagtag

SEQ ID NO: 19286 - DNA, 3143 bp, Artificial Sequence
  derived and/or modified sequence
agggcaaagccagctcccgtctcagcctcccgtaggaagatctcccggcctcacctgagcgccccgcagccctgggtacctctgctcccgcccagggtcctatggcccctcctcccagcacccaacactgggaccccacctgtacccaggctggcctccctcccccgcagcttcctttgcagccgccgtccgcgggtctccaggcgtggccacacctcccggggccccgcaagggttaaggcagcagagaggagaggtttgggctgacgtcgctctggctgaaggtggttcccctcagatgaggatgggagagcctggcgagctgaaacccgagctcccgctcagctggggctcggggaggtccctgtaaaacccgcctgcccccggcctccctgggtccctcctctccctccccagtagacgctcgggcaccagccgcggcaaggatggagctgggttgctggacgcagttggggctcacttttcttcagctccttctcatctcgtccttgccaagagagtacacagtcattaatgaagcctgccctggagcagagtggaatatcatgtgtcgggagtgctgtgaatatgatcagattgagtgcgtctgccccggaaagagggaagtcgtgggttataccatcccttgctgcaggaatgaggagaatgagtgtgactcctgcctgatccacccaggttgtaccatctttgaaaactgcaagagctgccgaaatggctcatgggggggtaccttggatgacttctatgtgaaggggttctactgtgcagagtgccgagcaggctggtacggaggagactgcatgcgatgtggccaggttctgcgagccccaaagggtcagattttgttggaaagctatcccctaaatgctcactgtgaatggaccattcatgctaaacctgggtttgtcatccaactaagatttgtcatgttgagcctggagtttgactacatgtgccagtatgactatgttgaggttcgtgatggagacaaccgcgatggccagatcatcaagcgtgtctgtggcaacgagcggccagctcctatccagagcataggatcctcactccacgtcctcttccactccgatggctccaagaattttgacggtttccatgccatttatgaggagatcacagcatgctcctcatccccttgtttccatgacggcacgtgcgtccttgacaaggctggatcttacaagtgtgcctgcttggcaggctatactgggcagcgctgtgaaaatctccttgaagaaagaaactgctcagaccctgggggcccagtcaatgggtaccagaaaataacagggggccctgggcttatcaacggacgccatgctaaaattggcaccgtggtgtctttcttttgtaacaactcctatgttcttagtggcaatgagaaaagaacttgccagcagaatggagagtggtcagggaaacagcccatctgcataaaagcctgccgagaaccaaagatttcagacctggtgagaaggagagttcttccgatgcaggttcagtcaagggagacaccattacaccagctatactcagcggccttcagcaagcagaaactgcagagtgcccctaccaagaagccagcccttccctttggagatctgcccatgggataccaacatctgcatacccagctccagtatgagtgcatctcacccttctaccgccgcctgggcagcagcaggaggacatgtctgaggactgggaagtggagtgggcgggcaccatcctgcatccctatctgcgggaaaattgagaacatcactgctccaaagacccaagggttgcgctggccgtggcaggcagccatctacaggaggaccagcggggtgcatgacggcagcctacacaagggagcgtggttcctagtctgcagcggtgccctggtgaatgagcgcactgtggtggtggctgcccactgtgttactgacctggggaaggtcaccatgatcaagacagcagacctgaaagttgttttggggaaattctaccgggatgatgaccgggatgagaagaccatccagagcctacagatttctgctatcattctgcatcccaactatgaccccatcctgcttgatgctgacatcgccatcctgaagctcctagacaaggcccgtatcagcacccgagtccagcccatctgcctcgctgccagtcgggatctcagcacttccttccaggagtcccacatcactgtggctggctggaatgtcctggcagacgtgaggagccctggcttcaagaacgacacactgcgctctggggtggtcagtgtggtggactcgctgctgtgtgaggagcagcatgaggaccatggcatcccagtgagtgtcactgataacatgttctgtgccagctgggaacccactgccccttctgatatctgcactgcagagacaggaggcatcgcggctgtgtccttcccgggacgagcatctcctgagccacgctggcatctgatgggactggtcagctggagctatgataaaacatgcagccacaggctctccactgccttcaccaaggtgctgccttttaaagactggattgaaagaaatatgaaatgaaccatgctcatgcactccttgagaagtgtttctgtatatccgtctgtacgtgtgtcattgcgtgaagcagtgtgggcctgaagtgtgatttggcctgtgaacttgggctgtgccagggcttctgacttcagggacaaaactcagtgaagggtgagtagacctccattgctggtaggctgatgccgcgtccactactaggacagccaattggaagatgccagggcttgcaagaagtaagtttcttcaaagaagaccatatacaaaacctctccactccactgacctggtggtcttccccaactttcagttatacgaatgccatcagcttgaccagggaagatctgggcttcatgaggccccttttgaggctctcaagttctagagagctgcctgtgggacagcccagggcagcagagctgggatgtggtgcatgcctttgtgtacatggccacagtacagtctggtccttttccttccccatctcttgtacacattttaataaaataagggttggcttctgaactacaaaacaaa

SEQ ID NO: 19287 - DNA, 2163 bp, Artificial Sequence
  derived and/or modified sequence
atggagctgggctgctggacccagctgggcctgaccttcctgcagctcctcctcatctcttctctcccacgggaatatactgtgattaacgaagcctgtcccggggctgaatggaatatcatgtgccgcgagtgctgcgagtacgatcagatagagtgcgtctgccctggaaagcgggaggtggtgggatacacaatcccatgttgtaggaacgaggaaaacgagtgtgatagctgtctgatccatccaggatgcacaatcttcgagaactgcaagagttgtcgcaatggatcctggggaggaacacttgacgacttttacgtgaagggcttttattgtgctgagtgtcgagcaggctggtacgggggggattgtatgcggtgcgggcaagttctccgcgcaccaaaagggcaaatcctgctagagtcttatcccctcaatgcccattgtgagtggacaatccacgccaagcccggatttgtcatccagttgcgcttcgtaatgttgagccttgaatttgattatatgtgtcagtatgactatgtagaagtgcgtgatggggataaccgcgatggacagataataaaacgggtatgtggaaatgagcggcccgcaccaatccaaagtataggttcgtctttacacgttctctttcacagtgatggatccaagaattttgatggctttcatgccatctatgaggaaatcacggcatgctcgagctccccgtgttttcacgacggcacctgcgtgctcgataaggctggttcatacaagtgcgcatgcttagcgggctatactggccagcggtgcgaaaacctccttgaggagcgtaattgtagcgacccgggcggtccagtcaatggttaccagaaaataactggcggccctggtcttatcaatggtaggcacgctaagatcggtacagtagttagcttcttttgtaacaactcctacgtgttatccggcaacgaaaagcggacctgtcaacaaaatggcgaatggagtgggaaacagccaatttgcattaaagcctgtcgggagcccaagattagcgatctggtgcggcggcgcgtgcttccaatgcaggtgcagagcagagagacacctttgcaccagctctatagcgcagcattcagcaagcaaaaactgcaaagcgcccctacaaagaaaccagctttgccctttggagacctacccatgggttaccagcaccttcatacccagctccagtatgagtgtatctcaccattttacagacgcctggggtccagcaggaggacatgccttcgcaccggaaaatggagcggacgcgctcctagttgcattcccatttgtggcaaaattgagaatatcactgctccaaagactcaaggactgcgttggccatggcaggccgcaatctacagacgcacttcaggggttcatgacggctcactccacaagggtgcctggttccttgtctgttctggcgccctagttaacgagagaacagtcgtcgtggcagcccattgcgtcacagatctcggcaaagtcaccatgatcaaaacggcagacctgaaggtcgtgttgggcaaattttacagagatgacgaccgggacgaaaagactattcagtccctccagatctcagccatcatactgcaccctaattatgaccccatacttctcgatgctgatattgctattttaaaactgttagataaagcccgaattagcaccagagtccagcctatctgcctggcagcctcaagagatcttagcacttcgttccaggaaagccatataacagtcgctgggtggaatgtgctcgccgacgtccgatcacccggctttaaaaatgacacacttaggtctggggtcgtgtcagtcgttgacagcctgctttgtgaggaacagcacgaggaccatggaataccggtcagtgtgactgataatatgttctgtgcatcttgggaacctacagcaccatctgatatttgtacggccgagactggagggattgccgccgtttctttccccgggcgcgcttccccagagccacgctggcacctgatgggcttggtgagctggtcctacgataaaacgtgttctcatcgcctgtctacagctttcactaaagtgttgccgttcaaggactggatagaacgcaatatgaagtag

SEQ ID NO: 19288 - RNA, 2163 nt, Artificial Sequence
  derived and/or modified sequence
auggagcugggaugcuggacucagcuuggucugaccuuccugcagcuccugcugaucucaucccugccccgugaauacaccgugauuaacgaggcgugcccuggggcggaauggaauauuaugugccgugaguguugcgaguacgaccaaauugaguguguauguccaggaaagcgugaaguggugggauauaccauuccuugcugccguaacgaagagaacgagugcgauagcugccuaauccaucccggguguaccauauucgagaacuguaaaucuugccgaaauggauccuggggcggaacucuagacgacuuuuaugugaaaggauucuacugcgccgagugucgugcgggcugguaugggggcgacuguaugcgaugcggccaaguguugagagcaccuaagggucagauacuacuggagagcuauccgcuuaaugcacauugugaguggacuauccaugcaaaaccaggauuugugauucagcuccgcuucguaaugcugucauuggaguuugauuauaugugucaguaugacuauguugaaguaagggauggggauaaucgggacggucagaucauuaagaggguaugugguaaugagcgcccagcaccuauccaaagcauuggaucuucucuccacgugcuguuucacagugauggcagcaaaaacuuugauggguuucacgcuauauaugaggaaauuacagcuugcaguuccuccccguguuuccacgauggcacaugugugcuggauaaagccgggagcuacaaaugcgcaugucuagccggcuacacaggccagcggugcgaaaacuuauuggaggaacgcaauuguuccgacccgggaggcccagugaauggcuaucagaagauuacaggaggcccaggacuaauuaacggaagacacgcuaaaaucgggaccgugguaagcuuuuucugcaacaauaguuacguucugucaggaaacgagaagcgaaccugccaacagaacggggaguggucuggaaagcagccuauuuguaucaaggcuugcagagaacccaagaucuccgaucuggugcgaagacgggugcugccuaugcagguccagucaagagagaccccgcugcaccagcuguauucagccgcauuuuccaaacagaagcuccagucugcaccuacuaaaaaaccagcccuuccauuuggcgacuugccuaugggauaucagcaucugcacacacagcuacaguaugaauguaucucaccuuucuaucgaaggcugggaaguagucgaagaacaugucugcgcacugguaaguggaguggucgggcgccgucaugcauuccuaucuguggaaagauugaaaacaucaccgcacccaagacacagggucuuagguggccauggcaggccgcaauuuacagaaggacaaguggcguacaugaugggagucugcacaaaggcgcuugguucuuggugugcucgggcgcucugguuaaugaaaggaccgugguggucgccgcgcauugcgugacugaccucggcaaggugacuaugauuaaaaccgcugaucugaaaguaguuuuggguaaguuuuacagggacgacgaucgugacgagaaaacuauucagucuuugcagauuucugccauuauauugcacccaaauuacgacccuauccuccuugacgcagauaucgcaauucugaagcuauuggacaaggcaagaauaagcacccgugugcagcccaucugcuuggcagcuagucgggaccugaguaccuccuuccaggaaucucacauuaccguggccggcuggaaugugcuagccgacgugaggagcccagguuuuaagaaugacacacuaaggucaggcguuguguccgucguggacucccuccugugcgaggaacagcacgaagaucacggcauaccugucagcguaacagauaacauguucugcgcuucuugggagccuaccgccccaucagacauauguacagccgagacaggugggauugcugccguaucauuccccggacgagcaucaccggaacccagauggcaucugauggguuugguaucuuggagcuacgacaaaaccuguagccaccgacucuccacagcauuuacgaaagugcuucccuucaaggacuggaucgagagaaacaugaaauag

SEQ ID NO: 19289 - RNA, 2163 nt, Artificial Sequence
  derived and/or modified sequence
auggaacuggguuguuggacccagcuuggccucacuuuuuugcagcuucucuuaauuagcucccugccuagagaauauacgguuaucaaugaagcauguccgggagccgaguggaauaucaugugcagagaaugcugugaguacgaccaaauugagugcguaugcccagggaagcgggaggugguaggguacaccauuccauguuguaggaacgaagagaacgagugugauucuugccugauucauccaggaugcacaaucuucgaaaacugcaaaaguugccgaaacggaucauggggaggaacucuagacgacuuuuaugugaaaggauucuacugcgccgagugucgugcgggcugguaugggggcgacuguaugcgaugcggccaaguguugagagcaccuaagggucagauacuacuggagagcuauccgcuuaaugcacauugugaguggacuauccaugcaaaaccaggauuugugauucagcuccgcuucguaaugcugucauuggaguuugauuauaugugucaguaugacuauguugaaguaagggauggggauaaucgggacggucagaucauuaagaggguaugugguaacgaaagacccgccccaauucaguccauagggucaucgcugcacgugcucuuccauucugacgggucuaagaacuucgauggguuucaugccaucuacgaagagauuaccgccugcagcucuucucccuguuuccacgaugggacaugugugcucgacaaagccggaucauauaaaugcgcuugcuuagcugguuacaccggacagcguugugagaauuugcucgaagaaagaaauugcuccgauccaggggggccagucaauggcuaccagaagauuaccggugggccuggccucauuaacggaagacacgcuaagauugguacgguaguuuccuucuucugcaauaauuccuacguccuguccggaaacgagaagcgcacaugccagcagaacggggagugguccggaaaacagccaauauguaucaaggcaugccgagagccaaaaauaucugaucuugugaggagacgaguacugcccaugcaaguccagucucgcgaaaccccauugcaccagcuguauucugcugccuuuaguaaacaaaaacuucagagcgcacccacaaaaaagccugcccuccccuuuggugauuugcccaugggcuaucaacaccugcauacacaguugcaauaugaaugcaucagcccuuucuauaggcgauuaggaucauccagacgcacaugccuaagaacuggaaaauggagcggucgugcuccaucaugcauucccaucuguggcaagauugaaaacaucaccgcgcccaaaacccagggucugagauggcccuggcaagcagccaucuaccgaaggacaucuggcguacaugauggaucucuucacaagggcgcuugguuucucguguguucuggggcucucguuaaugaacgcacaguggucguugccgcgcauugcgugaccgaucuuggcaaagugacaaugaucaagaccgccgaccucaaaguggugcuagguaaguuuuacagagacgaugacagagacgagaagacgauucaaagccuacaaaucucugcgauuauccuccaccccaauuacgacccaauauuacuagaugccgauauagcuauccugaaacuguuagacaaggcaagaauaucaacaagagugcagccuaucugccucgcugcaucaagagauuugucuacuucuuuucaagagucacauaucaccgucgcgggcuggaaugugcuagccgacgugaggagcccagguuuuaagaaugacacacuaaggucaggcguuguguccgucguggacucccuccugugcgaggaacagcacgaagaucacggcauaccugucagcguaacagauaacauguucugcgcuucuugggagccuaccgccccaucagacauauguacagccgagacaggugggauugcugccguaucauuccccggacgagcaucaccggaacccagauggcaucugauggguuugguaucuuggagcuacgacaaaaccuguagccaccgacugucuacugcauucacaaaagugcugccuuuuaaagauuggaucgaacguaauaugaaauag

SEQ ID NO: 19290 - protein, 246 aa, Artificial Sequence
  derived and/or modified sequence
MGCFECCIKCLGGVPYASLVATILCFSGVALFCGCGHVALAGTVAILEQHFSTNASDHALLSEVIQLMQYVIYGIASFFFLYGIILLAEGFYTTSAVKELHGEFKTTACGRCISGMFVFLTYVLGVAWLGVFGFSAVPVFMFYNIWSTCEVIKSPQTNGTTGVEQICVDIRQYGIIPWNAFPGKICGSALENICNTNEFYMSYHLFIVACAGAGATVIALLIYMMATTYNYAVLKFKSREDCCTKF

SEQ ID NO: 19291 - DNA, 540 bp, Artificial Sequence
  derived and/or modified sequence
atgcagtacgtgatttacggcattgcctcttttttcttcctatacggcattatcctgcttgctgagggcttttacacaaccagcgccgtgaaggagcttcacggcgagttcaagacaactgcctgtggccgctgtatatctggcatgtttgtgtttctgacctacgtgttgggcgtggcctggttgggtgtcttcggatttagtgctgttcctgtattcatgttttataacatttggagcacctgtgaggtaatcaaatcgccacagaccaatggcactacaggggtcgaacagatttgtgtggacatcagacaatacggtatcataccttggaacgccttcccaggcaaaatttgtggcagcgcccttgagaacatatgtaacaccaacgaattttacatgagttaccacctttttatagtagcctgcgccggtgccggagctacagtcattgccctgctcatatatatgatggccacgacgtacaactatgccgtcctaaaatttaagagtagggaagactgctgcaccaagttctag

SEQ ID NO: 19292 - DNA, 741 bp, Artificial Sequence
  derived and/or modified sequence
atggggtgctttgagtgttgtattaagtgtcttggcggcgtcccgtacgcctctttagtggcgaccatactttgtttcagcggcgtggccttgttttgcgggtgcgggcacgtggcactggccggaacagttgccatattggagcaacacttctcgacgaacgcttcagatcacgcacttcttagcgaggttatccagcttatgcagtacgtgatctacggcatcgcttctttcttttttctttatggtatcatcctgcttgcggaaggtttctatacaacttctgccgtcaaagagctacatggcgaattcaagacgactgcttgcggccgctgtatctccggtatgtttgtcttcttgacttacgtgttgggggttgcgtggctaggcgtttttggtttcagcgcagtcccggtgttcatgttctacaacatctggtctacttgcgaagtgattaagtcccctcagactaatggcaccaccggcgtggaacagatctgtgttgatatcagacaatatgggatcatcccatggaacgccttcccgggtaaaatctgtgggagcgctctggagaatatatgcaacacaaacgagttctacatgtcataccatctgttcatcgtggcctgcgccggggctggggccaccgtgatcgcactgctgatctacatgatggctactacctacaattatgctgtcctgaaattcaaaagcagagaggattgctgcaccaaattctag

SEQ ID NO: 19293 - DNA, 3957 bp, Artificial Sequence
  derived and/or modified sequence
agcgcagcccgcagaagcccggtcagcgcacgtgcccgcgagacctgcaaacttgtgccaccggctctgcccgtccccggggagcccgaacgccccgcagccctcacccctcccgccagtctccagccatgggctgctttgaatgctgcatcaagtgtctgggaggagtcccctacgcctccctggtggccaccatcctctgcttctccggggtggccttattctgcggctgtgggcatgtggctctcgcaggcaccgtggcgattcttgagcaacacttctccaccaacgccagtgaccatgccttgctgagcgaggtgatacaactgatgcagtatgtcatctatggaattgcgtcctttttcttcttgtatgggatcattctgttggcagaaggcttttacaccacaagtgcagtgaaagaactgcacggtgagtttaaaacaaccgcttgtggccgatgcatcagtggaatgttcgttttcctcacctatgtgcttggagtggcctggctgggtgtgtttggtttctcagcggtgcccgtgtttatgttctacaacatatggtcaacttgtgaagtcatcaagtcaccgcagaccaacgggaccacgggtgtggagcagatctgtgtggatatccgacaatacggtatcattccttggaatgctttccccggaaaaatatgtggctctgccctggagaacatctgcaacacaaacgagttctacatgtcctatcacctgttcattgtggcctgtgcaggagctggtgccaccgtcattgccctgctgatctacatgatggctactacatataactatgcggttttgaagtttaagagtcgggaagattgctgcactaaattctaaattgcataaggagttttagagagctatgctctgtagcatgaaatatcactgacactccagactaaagcagagtctaggtttctgcaattttgttacagtaatttgtaaatagctttagtaaactcaccttgcatggtagattaataagatgacttactgtacatgaattacacaataatgagatctggtggctatttccacattttgaaaaggattcagttatttactgacagtggtgagcatcctttttaaaataatgttctcatacttaaacattagagagcagtatctttaaatgaattattaacactttggaatacttacattttctgttatttttgattgcctgataaccagtttcaatgatgaaaatgaaaacaagtgctgaagatgaaatggaagagaaccgttttaatctggattttgttttgtcacacctggaaaatactttgcaaatatgttctaaattgaaaacaatttttttatgatcacatggttcactaccaaatgaccctcaaataagccagatgaaaatttgaagaaaaaggtcacccagttctctggaaaaaaaaaaaaaaaaaaaaaaaaaaggatttatatgtgggtagttttttttttggtacaacacaatcattctgttagagcccacaaaattggtaaccttaaattgtgtgttttggtaagtaataactaactgtttcctcatagctagttctcaagctgcatgtaagattttaacgggaagagaaaataggcctggacctgaaggtctcaaatatgttgagaagaaagtatgaactataaggaacttgagatgtagatttattttgcaggaaatacgaggaaaataggaaagaagtgtttgccgcatcaagtgtaaagaatgatactgaggatttttacattttatgaaatgaaataatggcatttacaaaatgaaaaatgtagtttcacaactaagttttgttaacagagactgcatgctttgcttatagttcttaattttggttttgacattcatttaattttttccatgttaaatatgtagtttaattatttactcaaaataaacattgttcatgcttttaggcctttgggggaattgatttttatccacaggtagaaaatggtctttgcacacactacacttatttcaaatatacaatgtgctcccgaactttcgcattagtctttaaaattactctcaaaatggtattaaaaaaaaaaaaaaaagcaccctctcgtatttcatttttgctttttcttaacaatacctttggccatttttttccagttcactatgtttgtatactaacttttcttcagccttttaatgcgaagccaactagtagagcatgctttcaggatctgacagctctgctagtagagcgagtatttattaatacagaattaaccttcgcccctttaaagtcaagtctgtctaatctaactagcgcctcgctttgccttctcacaatgctcactagccatcatgctcacccttctcttccagatccacttcctcatgatactgtcttctaactgggcttacttaaaggatgcgagcaaaatgcaggcttaccaggatatcaaagcaaaggaagaacaggaactgcaagatatccagtctcggtcaaaagaacaactcaattcttacacataaatgtttgccagagtgtttcggccgacgtatttacagctctgacaaatcatcagacagctgctctgcagtacagatgtgtatcccaccaaactaatgtagatgtacaaacacttcactgtctgtctcaagctgctgggatgtatctctaggaaaaccttccagtgggtaaatctttttctttagaacaaatattggaggtttcatgttagccattttaaaaggcaacactttgacaaaatgatcgttcatactttgggaatttgtggcatgttcacatttattgctagggcaattctaccaagacactcaatggaatatgtcacactccttaatagggacctgtgactccttaataaggacctgtgacatgcccagcatcaagggataagaccgtaaattcacatatatgccatctgtcctcaagtgttatctacataggaaataaaatggaattgatgtaaagttccatttctgacagctgacatttattaaactttggatcaaagataatgtgattcttatgattgatttctcaaactagcttttccctcccaagtccaggacccattaatttcctgagccaatcagaaatatatttttcaataatgctaaaattagctacaattctgctgaccctactattaaagaatctggatgctggactcactgacaagctttccagaagcaattttataacagatttcattttaacaaaatactgatccaattttcattattcttgagaaatgtcagctttgccttaatgagtatttgctttaaatttctaagaatttatatcataactagagacccaaatatctttcacagaattttgttccataaatgtttttcttaattattaagaagtgttaccttattaaaatgaccaccattctaaaccatttttcagtggtctggatacgaagtttacagtttcataccaactatctaaaacctaattgcaaattgaccacagacctctaacctcctacttttatagacttgaatacttaagtaatttaaattagggttggtatttcatttttttcttatctaaatcttagtttcctggaataataaagtttgatgttcagcaagagaactgcttgagtttaagccattttcaaaagaaacttgccttttacattattgtgttccagaacattaagtgactgtaggtactgggtattagtgatggtaaactttgtgttgctctttatgaaatgatccatataactgttgggtgcatcagtgcttttcaaaggggctgcttactatagggttaactatgtatattcattgttaagagttaacttgtggtttggctgtttcctggattttataacatacatgtgcagaaatgtattcaaatgaaaggaagcatacctttatcaagatgctattaaaattgaacatcaagtataa

SEQ ID NO: 19294 - DNA, 540 bp, Artificial Sequence
  derived and/or modified sequence
atgcagtatgtgatctacggcatcgccagcttcttcttcctgtatggcatcatcctgctggccgagggcttctacaccaccagcgctgtgaaggagctgcacggggagttcaagaccacagcctgtggccgctgcatcagcggcatgtttgtgttcctgacctacgtgctgggcgtggcctggctgggcgtgtttggcttctctgctgtgcctgtgttcatgttctacaacatctggagcacctgtgaggtgatcaagagcccccagaccaacggcaccaccggggtggagcagatctgtgtggacatccggcagtatggcatcatcccctggaatgccttccctgggaagatctgtggcagcgccctggagaacatctgcaacaccaatgagttctacatgagctaccacctgttcatcgtggcctgtgccggggccggggccaccgtgattgccctgctgatctacatgatggccaccacctacaactatgctgtgctgaagttcaagagccgggaggactgctgcaccaagttctag

SEQ ID NO: 19295 - DNA, 741 bp, Artificial Sequence
  derived and/or modified sequence
atgggctgctttgagtgctgcatcaagtgcctgggcggcgtgccctatgccagcctggtggccaccatcctgtgcttctctggagtggccctcttctgtggctgcggccacgtggccctggccggcaccgtggccatcctggagcagcacttcagcaccaatgccagtgaccacgccctgctgtctgaggtgatccagctgatgcagtatgtgatctatggaattgccagcttcttcttcctgtatggcatcatcctgctggccgagggcttctacaccaccagcgctgtgaaggagctgcatggagagttcaagaccacagcctgtggccgctgcatcagcggcatgtttgtgttcctgacctacgtgctgggcgtggcctggctgggcgtgtttggcttctctgctgtgcctgtgttcatgttctacaacatctggagcacctgtgaggtgatcaagagcccccagaccaacggcaccactggagtggagcagatctgtgtggacatccggcagtatggcatcatcccctggaatgccttccctgggaagatctgtggcagcgccctggagaacatctgcaacaccaatgagttctacatgagctaccacctgttcatcgtggcctgtgccggggccggggccaccgtcatcgccctgctgatctacatgatggccaccacctacaactatgctgtgctgaagttcaagagccgggaggactgctgcaccaagttctag

SEQ ID NO: 19296 - DNA, 540 bp, Artificial Sequence
  derived and/or modified sequence
atgcagtacgtgatctacggcatcgccagcttcttcttcctgtacggtatcatcctgcttgccgagggcttttacacaacctccgccgtgaaggagttgcatggcgagtttaagaccacagcgtgtggccgttgtataagcggtatgtttgtgtttctgacctatgtcctgggcgtggcctggctgggtgtgttcggctttagtgccgtgccagtgtttatgttttacaacatatggagcacctgtgaggtgataaagagtccacagacaaatggaactactggagttgaacaaatatgtgtggacataaggcagtacggcataataccctggaatgcttttccaggaaaaatctgcggctcagccttggaaaatatctgtaatacaaatgaattttatatgtcttatcatctcttcattgtggcctgtgccggggcaggggcaacagtgattgccctcctcatatatatgatggcaacaacatacaattatgcggtgctgaagttcaagtcccgcgaagactgttgcacgaaattttag

SEQ ID NO: 19297 - DNA, 741 bp, Artificial Sequence
  derived and/or modified sequence
atgggctgcttcgagtgctgcatcaagtgcctgggcggcgtgccctatgcctcacttgttgccaccatcctatgtttctccggggtggccttattctgtgggtgcggacatgtggccttggcagggactgtggcaattcttgagcagcacttctctaccaatgctagcgaccatgctctgctgagcgaagtcatccagctaatgcagtatgtgatttatggtatagcgagctttttcttcctctacggaattatcttactggcagagggcttctatacgacttcggcagtgaaggaattgcatggcgagtttaagacaaccgcttgcggtcgctgtatctctggcatgttcgtgttcctaacatatgtgctgggcgtagcttggctcggagtcttcgggttctctgccgtgccagtcttcatgttttacaatatctggtccacatgcgaggttataaaatcccctcagaccaatgggacaacaggcgtagagcaaatctgcgtggacattcgccaatacggtatcatcccatggaatgcctttcctggcaagatctgtggatccgcattggaaaatatctgcaataccaatgagttctacatgtcctaccacctattcatcgtcgcttgtgctggtgcaggggctacagtaattgcactgctgatatatatgatggctaccacatacaactatgccgtgcttaaattcaaaagtcgagaagattgctgtactaaattttag

SEQ ID NO: 19298 - DNA, 540 bp, Artificial Sequence
  derived and/or modified sequence
atgcagtacgtgatttacggtattgccagtttcttcttcctgtatggtatcatcttgcttgctgaggggttttataccactagcgccgtgaaagagctgcatggagaatttaagacgaccgcatgtggccgatgcataagtggcatgtttgtgttcctgacctacgtgctgggcgtcgcttggttgggcgtattcggattcagtgccgtgccagtgttcatgttctacaacatctggtctacctgcgaagtcattaagagcccacagacgaatgggactaccggggtggagcaaatctgtgtcgacatccgacagtacggaattattccatggaacgccttccccggtaagatttgtggctccgcccttgagaatatctgcaacaccaacgagttctatatgtcctatcacctgtttattgtcgcttgtgctggcgctggtgctacagtgattgctctgctgatttacatgatggcaaccacgtataattatgcagtgctgaagtttaaaagcagagaagactgctgcacgaagttctag

SEQ ID NO: 19299 - DNA, 741 bp, Artificial Sequence
  derived and/or modified sequence
atgggctgttttgagtgttgcatcaagtgtctcggcggagttccttacgcctccctggtcgccacgatattgtgtttctcaggtgtggcactcttttgcgggtgtggccacgtcgccctagctggaacagtagccatcttggaacagcacttttctaccaatgcatcggatcacgcactgctatctgaggtcatccagctcatgcagtatgtaatctacggcattgcctccttcttttttctgtacgggataattctattggctgagggattctatactacatctgcagtgaaggaactgcacggcgaattcaagacgaccgcctgtgggaggtgcatctccgggatgttcgtgtttttgacttatgtgctgggcgtagcctggctgggcgtgtttggtttcagcgcagtcccagtcttcatgttctataacatctggtctacctgtgaggtgattaagtcaccccaaacaaatggcactactggcgtagagcagatttgtgtggacattcgccagtacggcatcattccctggaatgctttcccaggcaagatctgcgggtccgccttagagaacatctgtaacactaacgaattttacatgtcctaccatcttttcattgtggcctgcgcaggtgccggtgctaccgtcatcgccctgctaatttatatgatggccaccacttataactacgccgtcctcaagttcaagagtcgtgaagattgttgtactaagttctag

SEQ ID NO: 19300 - DNA, 540 bp, Artificial Sequence
  derived and/or modified sequence
atgcagtacgtgatctacggcatcgccagcttcttcttcctgtacggcatcatcctgctggccgagggcttctacaccaccagcgccgtgaaggagctgcacggcgagttcaagaccaccgcctgcggcagatgcatcagcggcatgttcgtgttcctgacctacgtgctgggcgtggcctggctgggcgtgttcggcttcagcgccgtgcccgtgttcatgttctacaacatctggagcacctgcgaggtgatcaagagcccccagaccaacggcaccaccggcgtggagcagatctgcgtggacatcagacagtacggcatcatcccctggaacgccttccccggcaagatctgcggcagcgccctggagaacatctgcaacaccaacgagttctacatgagctaccacctgttcatcgtggcctgcgccggcgccggcgccaccgtgatcgccctgctgatctacatgatggccaccacctacaactacgccgtgctgaagttcaagagcagagaggactgctgcaccaagttctag

SEQ ID NO: 19301 - DNA, 741 bp, Artificial Sequence
  derived and/or modified sequence
atgggctgcttcgagtgctgcatcaagtgcctgggcggcgtgccctacgccagcctggtggccaccatcctgtgcttcagcggcgtggccctgttctgcggctgcggccacgtggccctggccggcaccgtggccatcctggagcagcacttcagcaccaacgccagcgaccacgccctgctgagcgaggtgatccagctgatgcagtacgtgatctacggcatcgccagcttcttcttcctgtacggcatcatcctgctggccgagggcttctacaccaccagcgccgtgaaggagctgcacggcgagttcaagaccaccgcctgcggcagatgcatcagcggcatgttcgtgttcctgacctacgtgctgggcgtggcctggctgggcgtgttcggcttcagcgccgtgcccgtgttcatgttctacaacatctggagcacctgcgaggtgatcaagagcccccagaccaacggcaccaccggcgtggagcagatctgcgtggacatcagacagtacggcatcatcccctggaacgccttccccggcaagatctgcggcagcgccctggagaacatctgcaacaccaacgagttctacatgagctaccacctgttcatcgtggcctgcgccggcgccggcgccaccgtgatcgccctgctgatctacatgatggccaccacctacaactacgccgtgctgaagttcaagagcagagaggactgctgcaccaagttctag

SEQ ID NO: 19302 - protein, 328 aa, Artificial Sequence
  derived and/or modified sequence
MKPAMETAAEENTEQSQERKVNSRAEMEIGRYHWMYPGSKNHQYHPVPTLGDRASPLSSPGCFECCIKCLGGVPYASLVATILCFSGVALFCGCGHVALAGTVAILEQHFSTNASDHALLSEVIQLMQYVIYGIASFFFLYGIILLAEGFYTTSAVKELHGEFKTTACGRCISGMFVFLTYVLGVAWLGVFGFSAVPVFMFYNIWSTCEVIKSPQTNGTTGVEQICVDIRQYGIIPWNAFPGKICGSALENICNTNEFYMSYHLFIVACAGAGATVIALIHFLMILSSNWAYLKDASKMQAYQDIKAKEEQELQDIQSRSKEQLNSYT

SEQ ID NO: 19303 - protein, 302 aa, Artificial Sequence
  derived and/or modified sequence
MEIGRYHWMYPGSKNHQYHPVPTLGDRASPLSSPGCFECCIKCLGGVPYASLVATILCFSGVALFCGCGHVALAGTVAILEQHFSTNASDHALLSEVIQLMQYVIYGIASFFFLYGIILLAEGFYTTSAVKELHGEFKTTACGRCISGMFVFLTYVLGVAWLGVFGFSAVPVFMFYNIWSTCEVIKSPQTNGTTGVEQICVDIRQYGIIPWNAFPGKICGSALENICNTNEFYMSYHLFIVACAGAGATVIALIHFLMILSSNWAYLKDASKMQAYQDIKAKEEQELQDIQSRSKEQLNSYT

SEQ ID NO: 19304 - DNA, 987 bp, Artificial Sequence
  derived and/or modified sequence
atgaagccagctatggagaccgctgctgaggaaaacactgagcagtcgcaggagaggaaagtcaactcaagagccgagatggagattgggcgctaccattggatgtacccaggctctaaaaaccaccagtaccacccagtgccaacgcttggcgacagagcttcccctctgagtagtccaggttgcttcgagtgttgtatcaaatgccttggaggcgtgccctatgcaagcttggtcgctactattctgtgcttctcaggcgtagcccttttctgtgggtgcgggcacgtcgcactggccggtactgtcgccattctcgagcagcatttcagtacaaacgccagcgatcacgctctcctgtctgaggtgattcaactcatgcagtacgtgatctatggtattgcctctttcttctttctatatggcattattttgttggccgaagggttctatacgacatcagccgtgaaggagcttcatggagagttcaagacaacggcttgcggacgctgcattagtggaatgtttgtgttcctgacatacgtgctgggagtggcctggttaggcgtgtttgggtttagcgctgtgcccgtgtttatgttctataatatatggtccacctgtgaggtgattaaaagcccccagaccaatggcacaacaggggttgagcagatctgcgtagacattcgccagtacggcatcatcccttggaatgcttttccaggtaaaatctgcggctccgccctcgaaaacatctgcaatactaatgaattctacatgagttaccacctgttcattgttgcctgcgctggagctggcgccacggtgattgccctcatccatttcctaatgatcctatcaagcaattgggcctacctgaaagacgcaagtaaaatgcaggcctatcaagatataaaggccaaagaggagcaggaactccaggatattcaaagcaggagtaaagagcagctgaacagctacacttag

SEQ ID NO: 19305 - DNA, 3275 bp, Artificial Sequence
  derived and/or modified sequence
agaagaaatgaggtggggagaaagagagagagagagagagatcgagattgagatcttaagaaagagagcaaggaggaagagcccggtggggagcaggtccttctcccccacccccctacccccaactcccactggagccgcattgagactgtaggcaccaccgggcgccgaatggctgttttctaactgggatcctcggtgacgtatggctgcctgccccttggcagctgtctttatggaccagtaggcagagcgaaattgacgctgacaagacttttgcatcttggaagggactgtaatctactgtagtgaagaacagagcctctcaatcagacgggtgtaaataagagacggaggggagtccaaaagaaaaggaagaggaggaaaaacaagtgtgtgttggggggaacagggggaaaagcatttttggtggatggtatgaagccagccatggaaactgcagccgaggaaaatactgaacaaagccaagagagaaaagtgaacagcagagctgaaatggaaattggcaggtaccactggatgtacccaggctcaaagaaccaccagtaccatcccgtgccaaccctgggggacagggctagccccttgagcagtccaggctgctttgaatgctgcatcaagtgtctgggaggagtcccctacgcctccctggtggccaccatcctctgcttctccggggtggccttattctgcggctgtgggcatgtggctctcgcaggcaccgtggcgattcttgagcaacacttctccaccaacgccagtgaccatgccttgctgagcgaggtgatacaactgatgcagtatgtcatctatggaattgcgtcctttttcttcttgtatgggatcattctgttggcagaaggcttttacaccacaagtgcagtgaaagaactgcacggtgagtttaaaacaaccgcttgtggccgatgcatcagtggaatgttcgttttcctcacctatgtgcttggagtggcctggctgggtgtgtttggtttctcagcggtgcccgtgtttatgttctacaacatatggtcaacttgtgaagtcatcaagtcaccgcagaccaacgggaccacgggtgtggagcagatctgtgtggatatccgacaatacggtatcattccttggaatgctttccccggaaaaatatgtggctctgccctggagaacatctgcaacacaaacgagttctacatgtcctatcacctgttcattgtggcctgtgcaggagctggtgccaccgtcattgccctgatccacttcctcatgatactgtcttctaactgggcttacttaaaggatgcgagcaaaatgcaggcttaccaggatatcaaagcaaaggaagaacaggaactgcaagatatccagtctcggtcaaaagaacaactcaattcttacacataaatgtttgccagagtgtttcggccgacgtatttacagctctgacaaatcatcagacagctgctctgcagtacagatgtgtatcccaccaaactaatgtagatgtacaaacacttcactgtctgtctcaagctgctgggatgtatctctaggaaaaccttccagtgggtaaatctttttctttagaacaaatattggaggtttcatgttagccattttaaaaggcaacactttgacaaaatgatcgttcatactttgggaatttgtggcatgttcacatttattgctagggcaattctaccaagacactcaatggaatatgtcacactccttaatagggacctgtgactccttaataaggacctgtgacatgcccagcatcaagggataagaccgtaaattcacatatatgccatctgtcctcaagtgttatctacataggaaataaaatggaattgatgtaaagttccatttctgacagctgacatttattaaactttggatcaaagataatgtgattcttatgattgatttctcaaactagcttttccctcccaagtccaggacccattaatttcctgagccaatcagaaatatatttttcaataatgctaaaattagctacaattctgctgaccctactattaaagaatctggatgctggactcactgacaagctttccagaagcaattttataacagatttcattttaacaaaatactgatccaattttcattattcttgagaaatgtcagctttgccttaatgagtatttgctttaaatttctaagaatttatatcataactagagacccaaatatctttcacagaattttgttccataaatgtttttcttaattattaagaagtgttaccttattaaaatgaccaccattctaaaccatttttcagtggtctggatacgaagtttacagtttcataccaactatctaaaacctaattgcaaattgaccacagacctctaacctcctacttttatagacttgaatacttaagtaatttaaattagggttggtatttcatttttttcttatctaaatcttagtttcctggaataataaagtttgatgttcagcaagagaactgcttgagtttaagccattttcaaaagaaacttgccttttacattattgtgttccagaacattaagtgactgtaggtactgggtattagtgatggtaaactttgtgttgctctttatgaaatgatccatataactgttgggtgcatcagtgcttttcaaaggggctgcttactatagggttaactatgtatattcattgttaagagttaacttgtggtttggctgtttcctggattttataacatacatgtgcagaaatgtattcaaatgaaaggaagcatacctttatcaagatgctattaaaattgaacatcaagtataatatttcatttggattctcttttttggttaatgcctaaaaatgcctatttgggatttttttttttttttaaattaagagaagctctcttctgtgtagaacagttgttccaaaatagcttagtgttttgttttcctgttgcatgacagatttaactattctttccagcagtggaggtgctgtcagagtccagtgttctagaagaggcagtgtctaaagcctaattttacttttctaattctggtagctattaccaggaatttttgaaagttttgtttaagtagtctaatattttttatgtaaagagcattaaattttgctatgtataaatttttgtaacctaacagtgaatcaatattttctatcagtgccaagggcttcctgtagttctattcaagtgttacaataaatatttgtagataatagtc

SEQ ID NO: 19306 - DNA, 987 bp, Artificial Sequence
  derived and/or modified sequence
atgaagccagccatggagacagctgctgaagaaaatacagagcagagccaggagaggaaggtgaacagcagagctgagatggagatcggccgctaccactggatgtacccaggcagcaagaaccaccagtaccaccctgtgcccaccctgggggaccgggccagccccctgagcagccctggctgctttgagtgctgcatcaagtgcctgggcggcgtgccctatgccagcctggtggccaccatcctgtgcttcagcggcgtggccctcttctgtggctgcggccacgtggccctggccggcaccgtggccatcctggagcagcacttcagcaccaatgccagtgaccacgccctgctgtctgaggtgatccagctgatgcagtatgtgatctacggcatcgccagcttcttcttcctgtatggcatcatcctgctggccgagggcttctacaccaccagcgctgtgaaggagctgcacggggagttcaagaccacagcctgtggccgctgcatcagcggcatgtttgtgttcctgacctacgtgctgggcgtggcctggctgggcgtgtttggcttctctgctgtgcctgtgttcatgttctacaacatctggagcacctgtgaggtgatcaagagcccccagaccaacggcaccaccggggtggagcagatctgtgtggacatccggcagtatggcatcatcccctggaatgccttccctgggaagatctgtggcagcgccctggagaacatctgcaacaccaatgagttctacatgagctaccacctgttcatcgtggcctgtgccggggccggggccaccgtgattgccctgatccacttcctgatgatcctgagcagcaactgggcctacctgaaggatgccagcaagatgcaggcctaccaggacatcaaggccaaggaggagcaggagctgcaggacatccagagccgcagcaaggagcagctgaacagctacacctag

SEQ ID NO: 19307 - DNA, 987 bp, Artificial Sequence
  derived and/or modified sequence
atgaagcccgccatggagaccgccgccgaggagaacaccgagcagagtcaggaaagaaaagtaaactcccgggcagaaatggagatagggcgttaccactggatgtatcctggctctaaaaaccaccagtatcacccagtccctacactcggcgatagagcgagtccactaagttccccaggctgctttgaatgctgcatcaagtgccttggaggagttccctacgccagtctagtggcgacgatactgtgtttcagtggcgttgcgctcttctgcggctgtggccacgtggcattagccggaaccgttgcaatcctggagcagcatttcagcaccaacgccagcgatcatgcattgctctcggaagttatacagctgatgcaatacgtgatctatgggatcgcaagcttcttctttctctatggaattattctgcttgctgaagggttctatactactagcgcagtcaaggagctgcacggggagtttaaaaccaccgcttgcgggaggtgcatatctggaatgtttgtgtttcttacatatgtactcggcgtggcatggctcggtgtcttcgggtttagtgccgtccccgtctttatgttctataacatctggagtacttgtgaagtgattaaaagccctcagaccaatggaaccacaggagtcgagcaaatttgcgtcgacatcaggcagtacgggatcattccatggaatgcctttcctggcaaaatctgcgggtccgctctcgaaaatatctgcaatacgaatgaattctatatgtcctaccacctgttcatcgttgcatgtgctggggctggcgcaactgtgatcgctctaatccacttcctcatgatcctgtcttcaaattgggcctatctgaaggacgcttccaaaatgcaagcttatcaggacattaaagccaaggaagaacaggaactgcaggacatccagagtagaagcaaggaacaactgaatagttatacatag

SEQ ID NO: 19308 - DNA, 987 bp, Artificial Sequence
  derived and/or modified sequence
atgaagcctgcaatggaaaccgccgctgaagaaaacacggaacagtcccaggagagaaaggttaattcacgagctgagatggaaatcgggagataccactggatgtatcccggttctaaaaaccatcagtaccatcccgtaccaaccctcggcgaccgcgcttcaccattgagttcccctgggtgctttgagtgctgcatcaagtgtcttggcggagtgccatacgccagcttggttgcaacgattttatgttttagcggcgttgcccttttctgtggctgcggccatgtcgccctcgccggaactgtcgctatattggagcagcacttcagtactaacgccagcgatcacgctctgttaagtgaggtgattcaattaatgcaatatgtgatttacggcatcgcctcttttttttttctatacgggataatattgctcgccgagggattttacacgacctctgctgtgaaagaactccacggtgaatttaaaaccacagcctgcggaagatgcatcagcgggatgtttgttttcctgacttacgtcttgggcgtggcatggctgggtgtctttgggttctctgcagtaccagtgttcatgttttacaacatttggtccacctgcgaggtgattaagtccccccagaccaatggcacaaccggcgtcgagcaaatctgcgtcgatatacgccaatacggcatcatcccctggaatgccttcccaggcaagatatgtgggtccgctctggagaatatttgtaacaccaatgagttctatatgagttaccacttgtttattgtagcatgtgcgggtgccggagccaccgttatcgcactgatccactttcttatgattctctcttcaaattgggcctatctgaaggatgcatccaagatgcaggcgtaccaggatatcaaggcaaaagaagagcaagagctacaagacatccagagcaggtccaaagaacagctgaactcttacacctag

SEQ ID NO: 19309 - DNA, 987 bp, Artificial Sequence
  derived and/or modified sequence
atgaagcccgccatggagaccgccgccgaggagaacaccgagcagagccaggagagaaaggtgaacagcagagccgagatggagatcggcagataccactggatgtaccccggcagcaagaaccaccagtaccaccccgtgcccaccctgggcgacagagccagccccctgagcagccccggctgcttcgagtgctgcatcaagtgcctgggcggcgtgccctacgccagcctggtggccaccatcctgtgcttcagcggcgtggccctgttctgcggctgcggccacgtggccctggccggcaccgtggccatcctggagcagcacttcagcaccaacgccagcgaccacgccctgctgagcgaggtgatccagctgatgcagtacgtgatctacggcatcgccagcttcttcttcctgtacggcatcatcctgctggccgagggcttctacaccaccagcgccgtgaaggagctgcacggcgagttcaagaccaccgcctgcggcagatgcatcagcggcatgttcgtgttcctgacctacgtgctgggcgtggcctggctgggcgtgttcggcttcagcgccgtgcccgtgttcatgttctacaacatctggagcacctgcgaggtgatcaagagcccccagaccaacggcaccaccggcgtggagcagatctgcgtggacatcagacagtacggcatcatcccctggaacgccttccccggcaagatctgcggcagcgccctggagaacatctgcaacaccaacgagttctacatgagctaccacctgttcatcgtggcctgcgccggcgccggcgccaccgtgatcgccctgatccacttcctgatgatcctgagcagcaactgggcctacctgaaggacgccagcaagatgcaggcctaccaggacatcaaggccaaggaggagcaggagctgcaggacatccagagcagaagcaaggagcagctgaacagctacacctag

SEQ ID NO: 19310 - protein, 305 aa, Artificial Sequence
  derived and/or modified sequence
MKPAMETAAEENTEQSQERKVNSRAEMEIGRYHWMYPGSKNHQYHPVPTLGDRASPLSSPGCFECCIKCLGGVPYASLVATILCFSGVALFCGCGHVALAGTVAILEQHFSTNASDHALLSEVIQLMQYVIYGIASFFFLYGIILLAEGFYTTSAVKELHGEFKTTACGRCISGMFVFLTYVLGVAWLGVFGFSAVPVFMFYNIWSTCEVIKSPQTNGTTGVEQICVDIRQYGIIPWNAFPGKICGSALENICNTNEFYMSYHLFIVACAGAGATVIALLIYMMATTYNYAVLKFKSREDCCTKF

SEQ ID NO: 19311 - DNA, 918 bp, Artificial Sequence
  derived and/or modified sequence
atgaaacctgctatggagactgccgccgaggagaacaccgagcagtcccaggaaaggaaggtgaacagccgcgccgaaatggaaatagggagatatcattggatgtacccagggtctaagaatcaccagtatcaccccgtccccacactgggagaccgggcaagcccgctgagttctcccggatgctttgaatgttgtatcaagtgtctcggcggagtcccctacgcctctttggtcgcaacaattctgtgttttagcggcgtggctctattttgtggatgtggacatgtggcattggcggggacagtggccattttagagcagcacttttccaccaatgcttccgaccacgctctgctcagcgaggtgatccagctgatgcagtacgtcatttacggaattgcatcttttttctttttgtacgggattattctgctggcggagggattctataccactagcgcggtcaaggaattgcatggcgaatttaagacgacggcatgtggcaggtgtatcagcggaatgtttgtcttcctgacatacgttttgggggtggcctggctcggggtgtttggcttcagcgccgtccccgtattcatgttttacaacatttggagcacgtgcgaggttatcaaaagcccgcagactaacgggaccacgggtgtggagcagatctgtgtggacatccgccagtatggcatcatcccatggaatgccttcccaggtaagatttgcgggagcgcgcttgaaaacatttgcaacaccaacgagttttacatgtcctaccatctgttcattgtggcttgtgctggagccggagcaaccgtgattgctctcctcatatatatgatggccaccacatacaactacgcggtacttaagtttaagtctcgagaggactgctgtactaaattttag

SEQ ID NO: 19312 - DNA, 1673 bp, Artificial Sequence
  derived and/or modified sequence
cttttgcatcttggaagggactgtaatctactgtagtgaagaacagagcctctcaatcagacgggtgtaaataagagacggaggggagtccaaaagaaaaggaagaggaggaaaaacaagtgtgtgttggggggaacagggggaaaagcatttttggtggatggtatgaagccagccatggaaactgcagccgaggaaaatactgaacaaagccaagagagaaaagtgaacagcagagctgaaatggaaattggcaggtaccactggatgtacccaggctcaaagaaccaccagtaccatcccgtgccaaccctgggggacagggctagccccttgagcagtccaggctgctttgaatgctgcatcaagtgtctgggaggagtcccctacgcctccctggtggccaccatcctctgcttctccggggtggccttattctgcggctgtgggcatgtggctctcgcaggcaccgtggcgattcttgagcaacacttctccaccaacgccagtgaccatgccttgctgagcgaggtgatacaactgatgcagtatgtcatctatggaattgcgtcctttttcttcttgtatgggatcattctgttggcagaaggcttttacaccacaagtgcagtgaaagaactgcacggtgagtttaaaacaaccgcttgtggccgatgcatcagtggaatgttcgttttcctcacctatgtgcttggagtggcctggctgggtgtgtttggtttctcagcggtgcccgtgtttatgttctacaacatatggtcaacttgtgaagtcatcaagtcaccgcagaccaacgggaccacgggtgtggagcagatctgtgtggatatccgacaatacggtatcattccttggaatgctttccccggaaaaatatgtggctctgccctggagaacatctgcaacacaaacgagttctacatgtcctatcacctgttcattgtggcctgtgcaggagctggtgccaccgtcattgccctgctgatctacatgatggctactacatataactatgcggttttgaagtttaagagtcgggaagattgctgcactaaattctaaattgcataaggagttttagagagctatgctctgtagcatgaaatatcactgacactccagactaaagcagagtctaggtttctgcaattttgttacagtaatttgtaaatagctttagtaaactcaccttgcatggtagattaataagatgacttactgtacatgaattacacaataatgagatctggtggctatttccacattttgaaaaggattcagttatttactgacagtggtgagcatcctttttaaaataatgttctcatacttaaacattagagagcagtatctttaaatgaattattaacactttggaatacttacattttctgttatttttgattgcctgataaccagtttcaatgatgaaaatgaaaacaagtgctgaagatgaaatggaagagaaccgttttaatctggattttgttttgtcacacctggaaaatactttgcaaatatgttctaaattgaaaacaatttttttatgatcacatggttcactaccaaatgaccctcaaataagccagatgaaaatttgaagaaaaaggtcacccagttctctggaaaaaaaaaaaaaaaaaaaaaaaaaa

SEQ ID NO: 19313 - DNA, 918 bp, Artificial Sequence
  derived and/or modified sequence
atgaagccagccatggagacagctgctgaagaaaatacagagcagagccaggagaggaaggtgaacagcagagctgagatggagatcggccgctaccactggatgtacccaggcagcaagaaccaccagtaccaccctgtgcccaccctgggggaccgggccagccccctgagcagccctggctgctttgagtgctgcatcaagtgcctgggcggcgtgccctatgccagcctggtggccaccatcctgtgcttcagcggcgtggccctcttctgtggctgcggccacgtggccctggccggcaccgtggccatcctggagcagcacttcagcaccaatgccagtgaccacgccctgctgtctgaggtgatccagctgatgcagtatgtgatctacggcatcgccagcttcttcttcctgtatggcatcatcctgctggccgagggcttctacaccaccagcgctgtgaaggagctgcacggggagttcaagaccacagcctgtggccgctgcatcagcggcatgtttgtgttcctgacctacgtgctgggcgtggcctggctgggcgtgtttggcttctctgctgtgcctgtgttcatgttctacaacatctggagcacctgtgaggtgatcaagagcccccagaccaacggcaccaccggggtggagcagatctgtgtggacatccggcagtatggcatcatcccctggaatgccttccctgggaagatctgtggcagcgccctggagaacatctgcaacaccaatgagttctacatgagctaccacctgttcatcgtggcctgtgccggggccggggccaccgtgattgccctgctgatctacatgatggccaccacctacaactatgctgtgctgaagttcaagagccgggaggactgctgcaccaagttctag

SEQ ID NO: 19314 - DNA, 918 bp, Artificial Sequence
  derived and/or modified sequence
atgaagcccgccatggagaccgccgccgaggagaacaccgagcagagtcaggaacggaaggttaattctcgtgctgagatggagataggtaggtatcactggatgtatccaggcagcaaaaatcatcagtaccacccggtgcccaccctcggcgacagggccagcccactatcaagtccaggatgtttcgagtgttgcatcaagtgtttgggaggagtcccgtacgctagcctggtggcaacgatcttgtgcttctccggagtcgcacttttttgtggatgcggccacgttgcccttgcaggcacagtagcaatactcgagcagcatttttccaccaatgcatcagatcatgctctattgagcgaggtgatccagctaatgcagtacgtcatttacgggatcgctagtttcttcttcctgtatggaataattctgttagctgaaggattctatacgacaagcgcagttaaagaattacatggtgaattcaaaacgactgcttgcggtagatgcatctccggcatgttcgtattcctgacttacgtgctaggcgtggcatggctgggtgtgttcgggtttagtgctgtgccagtgtttatgttttataatatttggagcacgtgcgaagtgataaaaagcccacaaaccaatgggacaaccggggtggagcaaatctgcgttgacataagacagtatggcataattccatggaatgcctttcctggcaagatatgtggaagcgcccttgagaacatctgcaacaccaacgaattctacatgtcttatcacctcttcattgtggcctgcgcaggtgcgggcgcaactgtgatcgcccttttgatctacatgatggccactacctataattacgcagttctcaaattcaagtctcgagaagattgctgcaccaagttctag

SEQ ID NO: 19315 - DNA, 918 bp, Artificial Sequence
  derived and/or modified sequence
atgaagcccgctatggagaccgctgctgaggagaatacagagcagagtcaggaacggaaggtgaacagcagggcggagatggagattgggaggtaccattggatgtacccgggatccaaaaaccaccagtatcacccagtgcccacactgggagaccgggcttctcccctatcctctcctggctgtttcgagtgctgcatcaagtgtctcggtggagtaccatacgcatccttggtcgcgacgattctgtgcttctcgggtgtcgctctgttttgtggttgtggacacgtcgcgctggccggaactgtggcaatcctagagcaacacttctccacaaatgcctccgaccatgccctgctgtcggaagttattcagctcatgcaatatgtaatttatggcatcgcatcattcttctttctatatggaattattctgctggcagaggggttttacaccacatctgccgtgaaggagctccacggtgagttcaagacaaccgcttgcggtcgctgcatctcgggaatgttcgtgttcctcacctatgtgctcggagtagcttggctgggcgtcttcggattcagtgccgtgcctgtctttatgttctacaatatctggtccacctgcgaagttatcaagagcccccagaccaacgggacaacaggagttgagcaaatctgtgtcgatattaggcagtacggtatcatcccttggaatgcttttcccggaaaaatttgcggaagcgccttagaaaacatctgcaataccaacgaattctacatgagctatcacctgtttatcgtggcctgtgccggagccggtgctaccgttatcgccctactgatatatatgatggccaccacttacaactacgctgtgctgaaattcaagtcgagagaagattgctgcaccaaattctag

SEQ ID NO: 19316 - DNA, 918 bp, Artificial Sequence
  derived and/or modified sequence
atgaagcccgccatggagaccgccgccgaggagaacaccgagcagagccaggagagaaaggtgaacagcagagccgagatggagatcggcagataccactggatgtaccccggcagcaagaaccaccagtaccaccccgtgcccaccctgggcgacagagccagccccctgagcagccccggctgcttcgagtgctgcatcaagtgcctgggcggcgtgccctacgccagcctggtggccaccatcctgtgcttcagcggcgtggccctgttctgcggctgcggccacgtggccctggccggcaccgtggccatcctggagcagcacttcagcaccaacgccagcgaccacgccctgctgagcgaggtgatccagctgatgcagtacgtgatctacggcatcgccagcttcttcttcctgtacggcatcatcctgctggccgagggcttctacaccaccagcgccgtgaaggagctgcacggcgagttcaagaccaccgcctgcggcagatgcatcagcggcatgttcgtgttcctgacctacgtgctgggcgtggcctggctgggcgtgttcggcttcagcgccgtgcccgtgttcatgttctacaacatctggagcacctgcgaggtgatcaagagcccccagaccaacggcaccaccggcgtggagcagatctgcgtggacatcagacagtacggcatcatcccctggaacgccttccccggcaagatctgcggcagcgccctggagaacatctgcaacaccaacgagttctacatgagctaccacctgttcatcgtggcctgcgccggcgccggcgccaccgtgatcgccctgctgatctacatgatggccaccacctacaactacgccgtgctgaagttcaagagcagagaggactgctgcaccaagttctag

SEQ ID NO: 19317 - protein, 348 aa, Artificial Sequence
  derived and/or modified sequence
MPHIDNDVKLDFKDVLLRPKRSTLKSRSEVDLTRSFSFRNSKQTYSGVPIIAANMDTVGTFEMAKVLCKFSLFTAVHKHYSLVQWQEFAGQNPDCLESIWLPAQAQALLTLSSWNRSWKLFPRKYICLDVANGYSEHFVEFVKDVRKRFPQHTIMAGNVVTGEMVEELILSGADIIKVGIGPGSVCTTRKKTGVGYPQLSAVMECADAAHGLKGHIISDGGCSCPGDVAKAFGAGADFVMLGGMLAGHSESGGELIERDGKKYKLFYGMSSEMAMKKYAGGVAEYRASEGKTVEVPFKGDVEHTIRDILGGIRSTCTYVGAAKLKELSRRTTFIRVTQQVNPIFSEAC

SEQ ID NO: 19318 - DNA, 1047 bp, Artificial Sequence
  derived and/or modified sequence
atgccacacatagataatgacgtaaaattggatttcaaagatgtgctgctgcggcctaagcggtcaacactcaagtctagatccgaagtcgacctcactcggtcattttctttccgcaattctaagcagacatattcgggagtacctatcattgccgccaatatggacaccgtcggaaccttcgagatggccaaagtgctctgtaaatttagtctttttaccgccgtacataaacattatagcctcgtgcagtggcaagaattcgccgggcaaaatcctgactgcttggagcacctcgctgccagcagcggcacaggcagttcggacttcgaacaactggagcagattctggaagcaatcccacaggtgaagtacatttgtttagatgtcgctaacggttatagcgagcacttcgtcgagttcgtaaaggacgtaaggaagagattcccgcagcacacgattatggcgggcaacgttgtgactggcgagatggtcgaagaactgatcctcagcggggcagacataatcaaagtaggaattggccccggatcagtctgcaccacgagaaagaagacaggcgtagggtacccacagttgtctgctgttatggagtgcgccgacgccgcccatgggctgaagggacacattatctctgacggcggatgttcgtgccccggggacgtggccaaagccttcggggccggcgccgacttcgtgatgctaggcggcatgctcgcaggacattccgagagtgggggcgagctgatagagagggatggtaagaagtataaactgttctatggtatgtcttcggagatggccatgaaaaaatatgccggaggagtggcggagtatcgggcgagtgagggcaaaacagtggaagtgccttttaagggggacgtggaacacacaatacgcgacattctgggtggtattcggtccacctgtacctacgtcggcgctgctaagcttaaggagctgtcccgacgaaccaccttcatccgggtcacacaacaagtgaatcccatcttctccgaagcttgttag

SEQ ID NO: 19319 - DNA, 1047 bp, Artificial Sequence
  derived and/or modified sequence
atgcctcacattgataacgacgtcaagctggacttcaaagatgtgctcttaaggccgaagcgatccactttaaaaagtcggtccgaagtggacctgactcggagtttctccttccgcaatagcaagcagacctattctggggtccctattatcgccgccaatatggatacagttggcaccttcgagatggcaaaggtgctatgcaagtttagtctgtttaccgctgtgcataagcactatagtctggtgcagtggcaggaattcgccggccaaaaccctgactgcctggagcatcttgccgccagctctggaaccgggagttccgacttcgagcagctggagcagatcctggaggccatccctcaggtgaaatacatctgcctggatgttgccaatggatactccgaacattttgtggagtttgtcaaagatgtgcggaagcgtttcccccagcacaccatcatggcaggtaacgtggtgaccggcgagatggtggaggaactgatacttagcggcgccgacattatcaaggtgggtataggccctggctccgtctgcaccacaaggaaaaagactggagtaggataccctcagctgtctgctgtgatggagtgtgcggacgccgctcatggactgaaaggacatattattagcgatgggggctgctcgtgtcctggagacgtggccaaagctttcggtgctggcgccgattttgttatgctggggggaatgctggctggccacagcgagtctggaggcgagctaattgagcgtgatggaaaaaaatataaactattttatggaatgtcatctgaaatggcaatgaagaagtacgcaggcggcgtcgctgaatatcgagcctccgaaggtaagacagttgaagtgccttttaagggggatgttgagcacacgattagagacatcttgggcggaattcgtagtacatgtacatacgttggtgcagcaaagcttaaagaactcagccggcgaaccaccttcatacgagtgactcagcaggttaaccctattttcagtgaggcctgctag

SEQ ID NO: 19320 - DNA, 1047 bp, Artificial Sequence
  derived and/or modified sequence
atgcctcacatcgataatgacgtgaagctggacttcaaggacgtgctgctgcgcccaaaacggagcactctgaagtcccgctccgaggtagacttgacccgcagcttttcctttcgtaactctaaacaaacctacagcggggttcctattatcgccgctaatatggacacggtcgggactttcgaaatggcgaaagttctctgcaagtttagtttgttcaccgcagtgcataaacattactcccttgtacagtggcaagaattcgcaggacagaacccagactgcctcgaaagcatttggttgcctgcacaggcccaggccctccttacactatcatcatggaataggagctggaagcttttcccccggaagtatatttgtttggatgtagctaatgggtattcagaacattttgttgagttcgtcaaggacgttcggaagcgctttcctcaacataccatcatggcagggaacgtagtgacaggggagatggtggaggagctcatacttagtggagcggacatcattaaagtggggattggtccagggtctgtgtgcaccactcgcaaaaaaactggtgtgggctatccccagctatccgccgtgatggagtgcgctgatgcagcccatggactaaagggacacattatttccgatgggggatgttcttgccctggtgacgtggcaaaagcattcggagctggcgccgatttcgtgatgctgggaggaatgctcgcaggccactccgaatctggcggcgaactaatagagagagatgggaaaaaatacaagctgttctatggcatgagctccgaaatggcaatgaaaaagtatgccggcggagtggcagagtaccgagcctctgaaggtaagaccgtggaggtcccatttaagggagacgtggagcatactatccgagatatcttggggggaatccggagcacctgcacgtacgtgggagctgcaaagctcaaggagctctctaggcgaacaacattcatacgggtaacccagcaggttaaccccattttcagcgaggcttgctag

SEQ ID NO: 19321 - DNA, 1047 bp, Artificial Sequence
  derived and/or modified sequence
atgcctcacatcgataacgacgtcaagctggacttcaaggacgtgctcttaagaccaaaacggtccactttgaagtctcgatccgaagtagacttaactagatcattcagctttcggaacagcaaacaaacatactctggcgttcctatcattgctgcaaatatggatactgtggggacattcgagatggctaaggtgttatgtaagttctcgctcttcaccgcagtgcacaaacattattctctggtgcagtggcaggaattcgccggacagaatccggactgcctcgagcacctcgcagcttcctctggtaccgggagctccgatttcgaacagttggagcaaatcttggaggccatcccccaagtaaagtacatctgccttgacgtcgcaaatggctactctgagcattttgttgagtttgtgaaggacgtacggaaacgattcccccagcataccatcatggccggaaacgtggtgacgggggaaatggttgaggagcttatcctctccggtgccgacatcatcaaggtggggattggcccaggttccgtctgtaccactcggaagaaaacaggcgtaggctatccccagcttagtgcagtgatggagtgcgccgatgccgcccacgggctgaaaggacacatcatctccgatggaggctgcagctgccctggcgacgtcgctaaggcttttggagccggcgccgatttcgtaatgctgggcggaatgctggcagggcacagcgagagtggcggcgaattgattgagagagatggcaaaaagtacaagctgttctacggcatgtcctccgaaatggctatgaagaagtatgccgggggcgttgccgagtatcgtgctagcgaaggaaagacagtagaggtgcccttcaagggggacgtggaacatacgatacgagacattctgggcggtatcaggtccacttgcacctacgtgggtgcggccaaactgaaggaattgtctcgccgtactacttttatccgcgtcactcagcaggtgaacccaatcttttccgaagcctgttag

SEQ ID NO: 19322 - DNA, 1047 bp, Artificial Sequence
  derived and/or modified sequence
atgccccacatcgacaatgatgtgaagctggacttcaaggatgtgctgctgcggcccaagaggagcaccctgaagagccgctctgaggtggacctgaccaggagcttctccttcaggaacagcaagcagacctacagcggcgtgcccatcatcgccgccaacatggacacagtgggcacctttgagatggccaaggtgctgtgcaagttcagcctcttcaccgctgtgcacaagcactacagcctggtgcagtggcaggagtttgctggccagaacccagactgcctggagcacctggccgccagcagcggcaccggcagcagtgactttgagcagctggagcagatcctggaggccatcccccaggtgaagtacatctgcctggatgtggccaacggctacagcgagcactttgtggagtttgtgaaggatgtgaggaagcgcttcccccagcacaccatcatggctggaaatgtggtgactggagagatggtggaggagctgatcctgtctggagctgacatcatcaaggtgggcatcggccctggctctgtgtgcaccaccaggaagaagacaggagtgggctacccccagctgtctgctgtgatggagtgtgctgatgctgcccacggcctgaagggccacatcatcagtgatggcggctgcagctgccctggagatgtggccaaggccttcggggccggggctgactttgtgatgctgggcggcatgctggccggccacagcgagagcggcggggagctgattgaaagagatggcaagaagtacaagctgttctacggcatgagcagcgagatggccatgaagaagtatgctgggggcgtggccgagtaccgggccagcgagggcaagacagtggaggtgcccttcaagggagatgtggagcacaccatccgggacatcctgggcggcatccgcagcacctgcacctacgtgggcgccgccaagctgaaggagctgagcaggaggaccaccttcatccgggtgacccagcaggtgaaccccatcttcagcgaggcctgctag

SEQ ID NO: 19323 - DNA, 1047 bp, Artificial Sequence
  derived and/or modified sequence
atgccccacatcgacaatgatgtgaagctggacttcaaggatgtgctgctgcggcccaagaggagcaccctgaagagccgctctgaggtggacctgaccaggagcttctccttcaggaacagcaagcagacctacagcggcgtgcccatcatcgccgccaacatggacacagtgggcacctttgagatggccaaggtgctgtgcaagttcagcctcttcaccgctgtgcacaagcactacagcctggtgcagtggcaggagtttgctggccagaacccagactgcctggagagcatctggctgcctgcccaggcccaggccctgctgaccctgagctcctggaacagatcctggaagctgttccccaggaagtacatctgcctggatgtggccaacggctacagcgagcactttgtggagtttgtgaaggatgtgaggaagcgcttcccccagcacaccatcatggctggaaatgtggtgactggagagatggtggaggagctgatcctgtctggagctgacatcatcaaggtgggcatcggccctggctctgtgtgcaccaccaggaagaagacaggagtgggctacccccagctgtctgctgtgatggagtgtgctgatgctgcccacggcctgaagggccacatcatcagtgatggcggctgcagctgccctggagatgtggccaaggccttcggggccggggctgactttgtgatgctgggcggcatgctggccggccacagcgagagcggcggggagctgattgaaagagatggcaagaagtacaagctgttctacggcatgagcagcgagatggccatgaagaagtatgctgggggcgtggccgagtaccgggccagcgagggcaagacagtggaggtgcccttcaagggagatgtggagcacaccatccgggacatcctgggcggcatccgcagcacctgcacctacgtgggcgccgccaagctgaaggagctgagcaggaggaccaccttcatccgggtgacccagcaggtgaaccccatcttcagcgaggcctgctag

SEQ ID NO: 19324 - DNA, 1047 bp, Artificial Sequence
  derived and/or modified sequence
atgccccacatcgacaacgacgtgaagctggacttcaaggacgtgttgctccggccgaagaggagtaccctgaaaagcagatcagaggttgacctcaccagatcttttagctttaggaatagcaagcagacttactcaggtgtcccaataatcgccgcaaacatggataccgtgggaacttttgaaatggccaaggttctttgcaaattttcactcttcacggctgtgcacaaacattattctttggtacagtggcaggaattcgcagggcagaaccccgactgtctcgagcatttagcagcctctagcggaacgggttcaagcgactttgaacagttagaacagattctagaagctatcccccaggttaaatacatttgtctggacgtggctaatggctactccgaacattttgtggagtttgttaaggatgtgagaaaacgctttccccagcacaccattatggcaggcaacgttgttaccggagagatggtggaagagctgattctgtccggcgcagacatcattaaagttggtataggtcccggttcggtttgtacaacccggaagaaaactggcgttgggtatccccagctgtcagcagtgatggagtgtgctgacgcagctcacgggcttaaaggacatatcatttccgatggtggatgtagctgtccgggagacgtagccaaggcctttggagctggtgcggacttcgtgatgctgggcggtatgcttgccggacattccgagagtggaggagaactcatcgagcgtgatggaaaaaaatacaaacttttttacgggatgtcatcggaaatggcaatgaagaaatatgcggggggtgtggccgagtaccgcgctagcgaggggaagactgtcgaggtgccctttaagggagacgtggagcatacgatccgagacatcctgggaggtatcagaagcacatgcacatatgtcggggcggccaaactgaaggaattatcccgcagaaccaccttcattagggtgacccaacaggttaacccaatctttagtgaggcctgttag

SEQ ID NO: 19325 - DNA, 1047 bp, Artificial Sequence
  derived and/or modified sequence
atgccccacatcgacaacgacgtgaagctggacttcaaggacgtgcttctccggccaaagcgctcaactttgaaatcacggtcggaagtggacctcactcgcagcttttccttccggaactctaaacagacatatagtggcgtcccaatcatcgccgctaatatggacacagtgggcacctttgaaatggctaaagtcctctgcaaattctcgctgtttacagcggtgcataaacactacagcctggtccagtggcaggagttcgcaggtcaaaacccagactgcctcgagcaccttgcagcgtcctcggggaccggttcgtccgactttgagcaacttgagcagatccttgaggccatcccccaagttaagtatatatgcctcgacgtggctaatggctactcagaacacttcgtggaattcgtaaaggacgtgagaaaacggtttccccaacatacaatcatggcagggaatgtggtcactggagagatggtggaagagttgattctttccggggccgacataattaaagtcgggattggaccagggtctgtttgtaccaccaggaaaaagaccggggtgggctacccacagctgagtgcagttatggagtgcgctgatgctgctcatggtctcaaggggcacattatttctgacggagggtgttcgtgtcccggggacgtggctaaagccttcggagccggcgccgactttgtcatgctgggaggtatgctggcaggacattcagaatccggcggggaattgatcgagagggatggcaaaaagtataaacttttctatggaatgtcttcagaaatggctatgaaaaagtacgccggaggcgtcgccgagtaccgcgcttcagaaggaaagaccgtcgaagtgccttttaagggcgatgtggaacatactatcagggatatactaggggggattcgctcaacctgcacctacgttggggcagcgaagctgaaggaattgagtcggagaacaacttttataagggtgacacagcaagtcaaccctatcttctccgaagcatgctag

SEQ ID NO: 19326 - DNA, 1047 bp, Artificial Sequence
  derived and/or modified sequence
atgccccacatcgacaacgacgtgaagctggacttcaaggacgtgctcctgaggccaaaaagaagtaccctcaagagcaggtctgaagtggacctgacaagatcctttagctttcgcaatagtaaacagacttacagcggcgtgccgatcatcgctgccaatatggatactgtggggactttcgagatggcgaaggtcctctgcaagttctccctcttcacagccgtgcataagcattattccctcgtgcagtggcaggagttcgccggccagaacccggactgtctcgagtcaatttggctcccagctcaggctcaggccctgcttaccctgagcagctggaatcgctcctggaagctctttccacgaaaatacatctgtttggacgtcgctaacggttactcagagcacttcgtggagtttgtcaaagacgtgagaaaaaggtttccgcagcacaccatcatggcaggcaatgtggtaaccggcgagatggtagaggagttgatcctgtccggagcagacattatcaaggtaggcatcggtcctgggtcagtgtgcactacacgcaagaagactggggttggttatccccaactctcagcagtaatggagtgcgccgatgctgctcacggcctcaaaggacacataatctcagatggtggctgcagctgtccaggcgacgttgctaaagccttcggtgcgggcgctgacttcgtcatgctagggggaatgttggccggccatagcgagtcaggcggagagctaatagaacgcgatggaaaaaaatacaaactgttctatggaatgagttctgaaatggccatgaaaaaatatgccggcggagtggcagaatatcgggccagcgagggcaaaaccgtggaggtgcctttcaagggtgatgtcgagcatacaatccgagacatcctgggtgggattcgtagtacctgcacgtatgtgggtgccgctaagttgaaagaacttagtcgccgaaccacttttattcgggtgactcaacaagtgaacccgattttcagcgaggcttgctag

SEQ ID NO: 19327 - DNA, 1047 bp, Artificial Sequence
  derived and/or modified sequence
atgccccacatcgacaacgacgtgaagctggacttcaaggacgtgctgctcagacctaaaaggagcacacttaagtcacgaagcgaagtcgaccttacacggtcattctcctttaggaacagtaaacagacctacagcggggtgcctattatagctgccaatatggatactgtgggcaccttcgagatggctaaagtgctctgcaagttctcattgtttacagcagtccacaagcattatagcctcgtgcaatggcaggagtttgcgggtcaaaatcctgactgcctggagcatctggccgcgtcttccggaaccggttcttcagacttcgaacagctggagcagatactagaagctataccccaggtgaaatacatctgtctggatgttgcaaacggatacagcgagcatttcgtcgagtttgtgaaagacgttcgtaaaagatttccgcagcatacaatcatggccggcaacgtggtgaccggagaaatggttgaagaattaatcttgagcggggccgacatcattaaggtcggaattggacctgggagcgtctgcacgacccgtaagaagacgggagtcggatacccacagctgtccgccgtgatggagtgcgcagatgctgcccatgggctcaaagggcatatcatttcagacggcggctgctcatgtcctggcgacgtggcaaaggcatttggtgctggagcggatttcgtgatgctcggcgggatgctggccggacacagcgaatctggaggagagctaatcgagagggacggcaagaaatacaagcttttttacggcatgtcatctgaaatggccatgaagaagtacgccggtggagtcgctgagtatcgggccagtgagggcaagactgtggaagtgccttttaaaggggatgtggaacacaccatccgtgacatcctcgggggcatccgatccacttgcacatatgtgggagccgccaagttgaaggagttgagcaggcggaccaccttcattagggtgactcagcaggtaaatccaatattctctgaggcgtgctag

SEQ ID NO: 19328 - DNA, 1047 bp, Artificial Sequence
  derived and/or modified sequence
atgcctcacatagataatgacgttaagttagactttaaggacgttttgttgcggccaaaacgctctacactgaaatccaggtccgaggttgacttaacccggtcattctctttccggaactccaagcagacatacagcggtgtgccaattattgctgccaatatggatacggtgggaactttcgagatggcaaaagtgctctgcaaattttcactgttcaccgcggtccacaaacactattcccttgtacaatggcaggagttcgcaggccagaatccggattgcctggaacatctggctgcttctagcggaaccgggtcatcagatttcgagcagttggagcagatccttgaagccatcccacaagtcaaatatatttgcctggacgtggcgaatgggtacagcgagcattttgtggaatttgtgaaagatgtgagaaagcgctttcctcagcataccattatggcaggaaacgtggtaactggggaaatggttgaagagctcatcctgtcaggcgcagatatcattaaagtgggaatcgggccaggctcagtgtgcaccactaggaaaaagactggagttggctacccacaactctccgcggttatggaatgcgctgacgccgctcatggtctgaaaggccacattatcagcgatggcggttgtagctgtcctggagatgtggcaaaggcattcggcgctggagccgactttgttatgcttggcggaatgctggcgggtcacagcgaaagcggaggtgagctcattgagcgcgacggcaagaagtacaaactcttttatggaatgagcagtgagatggccatgaagaagtacgcaggtggtgtggctgagtaccgggcaagcgaggggaagacagtggaagttcctttcaagggcgacgtggagcacactatccgcgatatactggggggaatccgcagcacctgcacgtacgttggggctgccaagcttaaagagcttagtagacggaccacattcatccgggtgacccagcaggtgaatcccattttttctgaggcttgttag

SEQ ID NO: 19329 - DNA, 1047 bp, Artificial Sequence
  derived and/or modified sequence
atgcctcatatagacaatgacgtaaagctagattttaaagatgtactccttcgacctaaacgctccaccctcaaatccaggagtgaagtggatcttacacgctcttttagttttcgaaactccaagcagacttactctggagttcctatcatcgctgccaacatggatacagtgggtaccttcgaaatggcaaaagttctatgtaagtttagtctttttacagccgttcacaaacactacagtttagttcagtggcaggagttcgccggtcaaaatcccgactgcttggagcacctggcagcctcatctgggactgggtcgagtgattttgaacaactcgagcagatcctggaagccatcccccaggtgaagtacatctgtcttgacgtcgctaacgggtactcggaacatttcgtagaattcgtgaaggacgtgcggaagaggtttcctcagcatacaataatggctgggaacgtggtgaccggagagatggtagaggaacttatcctgtccggcgcagacatcattaaggtcggaatcggacccggtagcgtatgcacaacaagaaaaaagaccggggtcgggtacccccagctctctgccgtcatggagtgcgctgatgccgctcacggactaaagggacacataatcagtgacggaggatgtagttgtcccggagacgtcgcgaaagcatttggggcaggggcagactttgtgatgttaggtggaatgttggccggtcactccgaaagcgggggagagctgattgagagagatggcaagaaatataaacttttctacggtatgtcctcagaaatggcaatgaaaaaatacgcaggcggtgtggccgaatatcgcgcttcagagggaaaaactgtggaagtgccgtttaaaggggacgtggaacatactataagagatatcttggggggaatcagatctacctgtacctacgtgggcgctgcgaagcttaaggagctgtcgcgccgtaccactttcatccgggtcacccagcaggtcaaccctatattttcagaggcatgctag

SEQ ID NO: 19330 - DNA, 1047 bp, Artificial Sequence
  derived and/or modified sequence
atgccacacattgacaacgacgtcaaactggacttcaaagacgtactgctgcgcccaaagaggtctaccctcaaaagcagatctgaggtagatctaactcgctcgttctctttccggaacagcaagcaaacatacagtggcgtgcctatcattgcggcaaacatggacacggttggaactttcgagatggccaaggtgctctgcaaattctctctcttcacagcagtgcacaagcattacagtctggtccaatggcaggaattcgctggtcagaacccggactgtctcgagtccatttggctccccgctcaggcacaggcgctgctcactctctcgagttggaatagatcctggaaactgtttcctaggaaatacatctgtctggacgtggctaatgggtactccgagcatttcgtggagttcgtgaaagacgtgaggaagcgtttcccacaacacaccataatggctggtaacgtggtcaccggagaaatggtggaagaactgatcttgagcggcgctgacattatcaaagtaggaataggccctggatcggtttgcacaactcgaaagaagacaggagtgggctatcctcaactttccgctgtaatggagtgcgccgacgctgctcacggactgaagggacacattatttccgatggagggtgttcttgcccgggtgatgttgctaaagcattcggggctggagccgatttcgtgatgcttggtgggatgctcgctgggcacagcgaaagtgggggagagctgattgagcgagatggcaaaaaatacaaactgttctatgggatgagcagcgaaatggccatgaagaaatatgccggtggtgtagcagagtaccgagcttccgaagggaagaccgtcgaggtccccttcaagggagacgtcgaacacactatccgagacattttgggtggaattcgatctacatgtacatatgtcggggcagcaaagctaaaggaactatcccgcagaaccaccttcataagagtgacacagcaggtgaacccgattttcagcgaagcctgctag

SEQ ID NO: 19331 - DNA, 1047 bp, Artificial Sequence
  derived and/or modified sequence
atgccacacatcgacaatgacgtcaagctcgatttcaaggatgtgctgctcaggccaaagcgaagtacactcaaatcgcggtctgaggtggatctgactaggtcattctcatttcgcaattcaaagcaaacgtattctggtgttccaatcattgccgctaatatggataccgtgggcacattcgagatggccaaggttttatgcaagttttctctgttcaccgccgtgcacaagcattactctctggtgcagtggcaggagttcgctggccagaaccccgattgcttggagcacctggccgctagctccggaacaggctcctcagatttcgagcagttggagcagatactcgaagctatccctcaggtgaagtacatatgccttgacgttgcaaacggatactctgagcatttcgttgagtttgtgaaggacgtgaggaaacgcttcccacaacatacaatcatggccggaaacgtcgtcaccggtgagatggtagaggaactaatcctgtccggagcagacatcatcaaggtcggtatcggcccagggagcgtgtgcacaactcgcaagaagaccggggtcggctacccacagttgtcagctgtcatggagtgcgccgatgcagcgcatgggctcaaaggacacattatcagtgacggcggatgctcatgccccggagatgtcgccaaggcctttggagccggtgcagatttcgtgatgctgggtgggatgcttgccggacatagtgagtctggcggtgaattaatcgagagagacgggaaaaagtataagctgttttacggcatgtcctctgaaatggccatgaagaagtacgctggaggggttgctgagtatagggctagcgaggggaaaaccgtggaagtgcccttcaaaggggacgtggagcacacaataagagatattctaggcggaatcagaagcacttgtacctacgtcggtgcagccaagctgaaagagctctcccgtcgcaccactttcatcagggtgacgcagcaggtgaaccccattttttctgaggcctgttag

SEQ ID NO: 19332 - DNA, 1047 bp, Artificial Sequence
  derived and/or modified sequence
atgccccacatcgacaacgacgtgaagctggacttcaaggacgtgctgctgagacccaagagaagcaccctgaagagcagaagcgaggtggacctgaccagaagcttcagcttcagaaacagcaagcagacctacagcggcgtgcccatcatcgccgccaacatggacaccgtgggcaccttcgagatggccaaggtgctgtgcaagttcagcctgttcaccgccgtgcacaagcactacagcctggtgcagtggcaggagttcgccggccagaaccccgactgcctggagcacctggccgccagcagcggcaccggcagcagcgacttcgagcagctggagcagatcctggaggccatcccccaggtgaagtacatctgcctggacgtggccaacggctacagcgagcacttcgtggagttcgtgaaggacgtgagaaagagattcccccagcacaccatcatggccggcaacgtggtgaccggcgagatggtggaggagctgatcctgagcggcgccgacatcatcaaggtgggcatcggccccggcagcgtgtgcaccaccagaaagaagaccggcgtgggctacccccagctgagcgccgtgatggagtgcgccgacgccgcccacggcctgaagggccacatcatcagcgacggcggctgcagctgccccggcgacgtggccaaggccttcggcgccggcgccgacttcgtgatgctgggcggcatgctggccggccacagcgagagcggcggcgagctgatcgagagagacggcaagaagtacaagctgttctacggcatgagcagcgagatggccatgaagaagtacgccggcggcgtggccgagtacagagccagcgagggcaagaccgtggaggtgcccttcaagggcgacgtggagcacaccatcagagacatcctgggcggcatcagaagcacctgcacctacgtgggcgccgccaagctgaaggagctgagcagaagaaccaccttcatcagagtgacccagcaggtgaaccccatcttcagcgaggcctgctag

SEQ ID NO: 19333 - DNA, 1047 bp, Artificial Sequence
  derived and/or modified sequence
atgccccacatcgacaacgacgtgaagctggacttcaaggacgtgctgctgagacccaagagaagcaccctgaagagcagaagcgaggtggacctgaccagaagcttcagcttcagaaacagcaagcagacctacagcggcgtgcccatcatcgccgccaacatggacaccgtgggcaccttcgagatggccaaggtgctgtgcaagttcagcctgttcaccgccgtgcacaagcactacagcctggtgcagtggcaggagttcgccggccagaaccccgactgcctggagagcatctggctgcccgcccaggcccaggccctgctgaccctgagcagctggaacagaagctggaagctgttccccagaaagtacatctgcctggacgtggccaacggctacagcgagcacttcgtggagttcgtgaaggacgtgagaaagagattcccccagcacaccatcatggccggcaacgtggtgaccggcgagatggtggaggagctgatcctgagcggcgccgacatcatcaaggtgggcatcggccccggcagcgtgtgcaccaccagaaagaagaccggcgtgggctacccccagctgagcgccgtgatggagtgcgccgacgccgcccacggcctgaagggccacatcatcagcgacggcggctgcagctgccccggcgacgtggccaaggccttcggcgccggcgccgacttcgtgatgctgggcggcatgctggccggccacagcgagagcggcggcgagctgatcgagagagacggcaagaagtacaagctgttctacggcatgagcagcgagatggccatgaagaagtacgccggcggcgtggccgagtacagagccagcgagggcaagaccgtggaggtgcccttcaagggcgacgtggagcacaccatcagagacatcctgggcggcatcagaagcacctgcacctacgtgggcgccgccaagctgaaggagctgagcagaagaaccaccttcatcagagtgacccagcaggtgaaccccatcttcagcgaggcctgctag

SEQ ID NO: 19334 - protein, 610 aa, Artificial Sequence
  derived and/or modified sequence
MSQTSLKQKKNEPGMRSSKESLEAEKRKESDKTGVRLSNQMRRAVNPNHSLRCCPFQGHSSCRRCLCAAEGTALGPCHTIRIYIHMCLLWEQGQQITMMRGSQESSLRKTDSRGYLVRSQWSRISRSPSTKAPSIDEPRSRNTSAKLPSSSTSSRTPSTSPSLHDSSPPPLSGQPSLQPPASPQLPRSLDSRPPTPPEPDPGSRRSTKMQENPEAWAQGIVREIRQTRDSQPLEYSRTSPTEWKSSSQRRGIYPASTQLDRNSLSEQQQQQREDEDDYEAAYWASMRSFYEKNPSCSRPWPPKPKNAITIALSSCALFNMVDGRKIYEQEGLEKYMEYQLTNENVILTPGPAFRFVKALQYVNARLRDLYPDEQDLFDIVLMTNNHAQVGVRLINSVNHYGLLIDRFCLTGGKDPIGYLKAYLTNLYIAADSEKVQEAIQEGIASATMFDGAKDMAYCDTQLRVAFDGDAVLFSDESEHFTKEHGLDKFFQYDTLCESKPLAQGPLKGFLEDLGRLQKKFYAKNERLLCPIRTYLVTARSAASSGARVLKTLRRWGLEIDEALFLAGAPKSPILVKIRPHIFFDDHMFHIEGAQRLGSIAAYGFNKKFSS

SEQ ID NO: 19335 - DNA, 1833 bp, Artificial Sequence
  derived and/or modified sequence
atgagccagaccagcctgaagcagaagaagaacgagcccggcatgagaagcagcaaggagagcctggaggccgagaagagaaaggagagcgacaagaccggcgtgagactgagcaaccagatgagaagagccgtgaaccccaaccacagcctgagatgctgccccttccagggccacagcagctgcagaagatgcctgtgcgccgccgagggcaccgccctgggcccctgccacaccatcagaatctacatccacatgtgcctgctgtgggagcagggccagcagatcaccatgatgagaggcagccaggagagcagcctgagaaagaccgacagcagaggctacctggtgagaagccagtggagcagaatcagcagaagccccagcaccaaggcccccagcatcgacgagcccagaagcagaaacaccagcgccaagctgcccagcagcagcaccagcagcagaacccccagcaccagccccagcctgcacgacagcagccccccccccctgagcggccagcccagcctgcagccccccgccagcccccagctgcccagaagcctggacagcagaccccccaccccccccgagcccgaccccggcagcagaagaagcaccaagatgcaggagaaccccgaggcctgggcccagggcatcgtgagagagatcagacagaccagagacagccagcccctggagtacagcagaaccagccccaccgagtggaagagcagcagccagagaagaggcatctaccccgccagcacccagctggacagaaacagcctgagcgagcagcagcagcagcagagagaggacgaggacgactacgaggccgcctactgggccagcatgagaagcttctacgagaagaaccccagctgcagcagaccctggccccccaagcccaagaacgccatcaccatcgccctgagcagctgcgccctgttcaacatggtggacggcagaaagatctacgagcaggagggcctggagaagtacatggagtaccagctgaccaacgagaacgtgatcctgacccccggccccgccttcagattcgtgaaggccctgcagtacgtgaacgccagactgagagacctgtaccccgacgagcaggacctgttcgacatcgtgctgatgaccaacaaccacgcccaggtgggcgtgagactgatcaacagcgtgaaccactacggcctgctgatcgacagattctgcctgaccggcggcaaggaccccatcggctacctgaaggcctacctgaccaacctgtacatcgccgccgacagcgagaaggtgcaggaggccatccaggagggcatcgccagcgccaccatgttcgacggcgccaaggacatggcctactgcgacacccagctgagagtggccttcgacggcgacgccgtgctgttcagcgacgagagcgagcacttcaccaaggagcacggcctggacaagttcttccagtacgacaccctgtgcgagagcaagcccctggcccagggccccctgaagggcttcctggaggacctgggcagactgcagaagaagttctacgccaagaacgagagactgctgtgccccatcagaacctacctggtgaccgccagaagcgccgccagcagcggcgccagagtgctgaagaccctgagaagatggggcctggagatcgacgaggccctgttcctggccggcgcccccaagagccccatcctggtgaagatcagaccccacatcttcttcgacgaccacatgttccacatcgagggcgcccagagactgggcagcatcgccgcctacggcttcaacaagaagttcagcagctag

SEQ ID NO: 19336 - DNA, 2475 bp, Artificial Sequence
  derived and/or modified sequence
agcaagggaagtgacaggaaatggagctggggagacaaaaatgtggataacaacaaaagaatttcaacaggtaaaaaaatgagtcaaacatctctcaaacagaaaaagaatgagcctggaatgaggtcctcaaaagagagtctagaagcagaaaaaagaaaggaatctgacaaaacaggagttcgtctgagcaatcagatgaggcgtgcagtcaatccgaatcactcgctgagatgttgccccttccagggtcactcgtcgtgtagacgctgcctttgtgcagctgagggaacagcccttggcccctgccacacaatacgtatttatattcacatgtgcctgttgtgggagcagggccagcagatcaccatgatgaggggatcacaagaatcatcactgcggaagacagactctcgagggtaccttgtgcgcagtcaatggtctagaatatcccggagcccatccaccaaggctccatccatagatgagcctagaagcaggaacaccagtgctaagctccccagcagctccacgagctcccggactccatccacctccccaagcctgcatgactcctcaccgccgccgctgtccgggcagccctcgctccagccacccgcgtcgccccagctgccccggtcgctggactcgcggcctcccacgcccccagagcccgatcctggctcccggcgcagcaccaaaatgcaagagaatccggaggcctgggcccaaggcatcgtgcgggaaatccgccagacccgggactcgcagccgctggaatattcgcgcacgtcccccaccgagtggaagtcctccagccagcgcagggggatctaccccgcctccacccagctggaccgcaactctctgtccgagcagcagcagcagcagcgggaggacgaggacgactacgaggctgcctactgggcatccatgaggtcgttctacgagaagaacccgagctgctcgcgcccctggccgcccaaacccaagaacgccatcaccattgctctctcatcctgcgcgctcttcaacatggtggacggcaggaaaatctacgagcaagagggtctggaaaagtacatggagtatcagctcaccaatgagaacgtcatcctgaccccgggcccggcgttccgcttcgtcaaggcactacagtatgtcaatgctagactccgtgatctatatcctgatgaacaggacttatttgatattgtactgatgactaataaccatgcccaagtgggagtgcggcttataaacagcgtcaatcactacggcttactgattgaccgcttctgtctgaccgggggaaaagaccccattggctatttgaaggcatatcttaccaacttgtatattgctgcagattctgaaaaagtgcaagaggcaatacaagaaggtattgcctctgcgacaatgtttgatggagccaaagacatggcttactgtgacactcagctccgtgtagcctttgatggggatgctgtcctcttctctgatgagtctgaacattttaccaaggagcatgggctcgacaaattcttccagtatgatacattatgtgaaagtaagcctcttgctcagggtcccctaaaaggctttctggaagatttaggcagactgcaaaagaagttctatgccaaaaatgaacggttactttgtcctatcaggacctacctggttacagctaggagtgcagccagttcaggcgcccgtgtgctgaagacccttcgacgctggggtctagagatagacgaagctcttttccttgctggagcccccaaaagtcccatcttggtgaagatccggccccacatcttctttgatgaccacatgttccacattgaaggggcacagaggttaggttccatcgcagcttatggctttaataaaaaattcagtagttaggggcagggaggagaaataaagtggtgatagtctggtgttacagaagccacttcttttggctctctaggataattagataggtatttcagaaaattggaccttaaaactttgcttctttggaaaggttttctcctgattttttggaaaaccttttgaaccctcaagttaccatcaaactacttctctttgaactaccaatactgttgaatgccattacacctatctctgtgtaagtcataatgatgactctttaggataagtttagaacttgaatatttgcatgcttaaggcactgttttagaagcttacttagttttataaacactgctcatttttggatgtttgtagataacaatgaattgttacccatcagcattgtagaatagtgtcttcaaaggtagaaggagtatggttaagcacactcttgaaaactggagctttgtattctgtgactgctatggctagctttgtaaccaaagcaaaatgagaatttcactctacctgcatgagtataacaattttgatactgctcatttagaaataaatcatctggttgttcctcca

SEQ ID NO: 19337 - DNA, 1833 bp, Artificial Sequence
  derived and/or modified sequence
atgagccaaacctccctgaaacagaaaaagaatgagcctggaatgcgctcttctaaagaaagcctggaggccgagaagagaaaagaatccgacaaaacaggtgtccggttgtcaaaccagatgagacgcgccgtaaacccaaaccattctttgaggtgctgtccatttcagggccacagttcctgcaggcgatgcctgtgcgcagccgaaggaacagccctgggcccgtgccatacaatcaggatctatatccacatgtgcctgctgtgggagcagggtcagcaaattacaatgatgcgagggtctcaggagagttcacttaggaagactgacagtagggggtatctggttaggtctcaatggtctagaatcagcagatctcccagtaccaaagcgccaagcatcgacgagccacggtctcgcaacaccagcgcaaaattgcccagcagctctacttctagccggacaccttctaccagtccgtcccttcacgattcctctccgcctccactttctggccagccatccctccagccgcccgcttctccacagctgcccaggagtctggattctcggccccccactccccccgagccagaccccggcagtcgacgctcaaccaagatgcaggaaaaccctgaagcttgggcgcagggtatagtgcgggagatcaggcaaactcgcgatagtcagcccctcgagtattccagaacttcccctacagaatggaagagcagtagtcagaggcgcgggatataccctgcctctacacagctcgacagaaattctctatctgagcagcagcagcagcagcgcgaggacgaggatgattacgaagcagcctactgggcatctatgcgctcattttacgagaaaaacccaagctgcagcaggccttggccacccaagcctaaaaacgccatcactattgctctgagtagttgtgccctcttcaacatggttgatggcaggaagatctatgaacaagagggcttggaaaaatatatggaatatcagttaacgaacgagaatgtgattctgacaccggggcccgcctttaggtttgtcaaagcattgcagtacgtgaacgctcggctaagagacctgtaccctgacgagcaggatctgttcgacatcgttcttatgacaaacaaccacgctcaggtcggcgtgaggttaataaattcagtgaatcattacggattgctcattgacagattttgtctcactggtggcaaggacccaataggctatctcaaggcctacctgacaaacctgtatattgctgctgactccgaaaaagtgcaagaagccattcaggagggcatcgcatccgctaccatgttcgatggagcaaaggacatggcatactgtgacacacagctgcgggtcgcgtttgacggcgacgccgtactgttcagtgatgaaagcgaacactttacaaaagagcacgggctagataagttcttccagtacgatacactctgcgaatccaaaccactggcccaggggccgctgaagggattcctggaagacctgggacgactccagaagaagttctatgctaaaaacgagaggctgctgtgccctatacgcacataccttgtgactgcgcggtccgccgcctcctcaggagctcgggttctcaaaaccctgagacgttggggactagaaatcgacgaggctctatttctggcaggagcacccaagagtccaatccttgtgaaaattcgtcctcatatttttttcgatgaccacatgttccacatcgaaggtgctcagagactggggagtatcgctgcatatgggtttaacaaaaaattctcgtcctag

SEQ ID NO: 19338 - DNA, 1833 bp, Artificial Sequence
  derived and/or modified sequence
atgagccagaccagcctgaagcagaagaagaatgaacctggcatgaggagcagcaaggagagcctggaggccgagaagaggaaggagagtgacaagacaggagtgcggctgagcaaccagatgagaagagctgtgaaccccaaccacagcctgcgctgctgccccttccagggccacagcagctgccgccgctgcctgtgtgccgctgagggcacagccctgggcccctgccacaccatccgcatctacatccacatgtgcctgctgtgggagcagggccagcagatcaccatgatgaggggcagccaggagagcagcctgaggaagacagacagccggggctacctggtgcgcagccagtggagccgcatcagccgcagccccagcaccaaggcccccagcattgatgagcccaggagcaggaacaccagcgccaagctgcccagcagcagcaccagcagcaggacccccagcaccagccccagcctgcatgacagcagccccccacccctgagcggccagcccagcctgcagcccccagccagcccccagctgcccaggagcctggacagcaggcctcccaccccacctgagccagaccccggcagccgccgcagcaccaagatgcaggagaaccctgaggcctgggcccagggcatcgtgcgggagatccggcagacccgggacagccagcccctggagtacagcaggaccagccccacagagtggaagagcagcagccagaggcggggcatctacccagccagcacccagctggacaggaacagcctgtctgagcagcagcagcagcagagagaagatgaagatgattatgaggccgcctactgggcctccatgaggagcttctatgagaagaaccccagctgcagccggccctggccacccaagcccaagaatgccatcaccatcgccctgagcagctgtgccctcttcaacatggtggatggcaggaagatctatgagcaggagggcctggagaagtacatggagtaccagctgaccaatgaaaatgtcatcctgaccccaggccctgccttccgctttgtgaaggccctgcagtatgtgaatgcccggctgcgggacctgtacccagatgagcaggacctgtttgatattgtgctgatgaccaacaaccacgcccaggtgggcgtgcggctcatcaacagcgtgaaccactacggcctgctgattgaccgcttctgcctgaccggcggcaaggaccccatcggctacctgaaggcctacctgaccaacctgtacatcgctgctgacagcgagaaggtgcaggaggccatccaggagggcatcgccagcgccaccatgtttgatggagccaaggacatggcctactgtgacacccagctgcgggtggcctttgatggagatgctgtgctcttcagtgatgaaagtgagcacttcaccaaggagcacggcctggacaagttcttccagtatgacaccctgtgtgagagcaagcccctggcccagggccccctgaagggcttcctggaggacctgggccgcctgcagaagaagttctacgccaagaatgaaaggctgctgtgccccatccgcacctacctggtgacagcccggtctgctgccagcagcggggcccgggtgctgaagaccctgcggcgctggggcctggagattgatgaggccctcttcctggccggggcccccaagagccccatcctggtgaagatccggccccacatcttctttgatgaccacatgttccacatcgagggcgcccagaggctgggcagcattgctgcctacggcttcaacaagaagttcagcagctag

SEQ ID NO: 19339 - DNA, 1833 bp, Artificial Sequence
  derived and/or modified sequence
atgagccagaccagcctgaagcagaagaagaacgagcccggcatgaggagttcaaaagaaagtctggaagctgaaaaaaggaaggagtcagataaaacaggggtgcgtttgagtaatcagatgcggcgggcggtgaaccctaaccacagcctgcgatgctgtccattccagggccactctagctgccgcaggtgcttgtgcgctgctgagggaactgccctgggcccatgccacactatccgaatctatatccacatgtgcctgctctgggagcagggtcagcagatcacgatgatgagggggtcccaggagtcctctcttcgcaagaccgatagtcgtgggtatctcgtgaggagtcagtggtccagaatcagccgcagcccctcaactaaggctcccagcatcgacgaaccccgtagccggaacactagcgccaagctgcctagttcctcaaccagttctcgcacccctagcacaagtccaagcctgcacgattccagtccccctccactgtcaggccaaccctcactccaaccccccgcttctccccagctgccccgaagcctggattcccggcccccaactccgcctgaacctgatcctgggagtaggcggagtacaaaaatgcaagaaaaccccgaggcctgggcccagggaatagtgagagagatccgacagacccgtgactcgcagccactggagtactctcgaacttcaccaaccgaatggaagtcctcatcacagcgcagagggatttatccagctagcacccagctggatcgtaattccctgagtgaacagcagcagcaacagcgggaggatgaggacgattacgaagctgcctactgggcaagtatgagaagtttctacgagaaaaacccttcctgcagcagaccttggccgcctaaacccaaaaacgcaattacaatagcattaagcagttgtgctctctttaatatggtggatggaagaaagatctatgaacaggagggcctcgagaaatatatggagtaccagctcaccaatgaaaacgtcatcttgacccccggacctgccttccggtttgtgaaggctctgcagtatgtgaatgctcgcctgcgggatctgtaccccgacgagcaggatctgtttgacatcgtgcttatgacaaataaccatgcacaggttggggtccgactgataaacagtgtgaatcactacgggctgctgatcgatcggttctgcctcacagggggtaaggatcctattgggtacttgaaggcttacctgactaacctgtatattgcagcggacagtgaaaaagtccaagaggcaatccaagagggcattgcatctgccacaatgttcgacggagccaaagatatggcatactgtgatacacagctgagggtcgcctttgatggggatgcagtgttattctccgacgagtcggagcattttaccaaagagcacgggttagacaaattcttccagtatgacaccctttgcgaaagtaaaccgctggctcaggggccgctcaagggcttcctggaagatctgggccggctacagaagaagttctatgctaagaacgagcggctgttgtgcccaattagaacatatttggtcacagcgaggtcagctgccagctctggagcacgggtcttgaagaccctgcgacgttggggactggagatcgatgaagcgctgtttctcgcgggagcacctaaatcccccatcttggtcaaaatccggcctcatatctttttcgacgaccacatgttccatattgaaggtgcccaacgtctcggaagcatagccgcctacggtttcaacaaaaaattttccagctag

SEQ ID NO: 19340 - DNA, 1833 bp, Artificial Sequence
  derived and/or modified sequence
atgtctcaaacatcactcaaacaaaaaaaaaatgagcccggtatgaggagttcaaaggagtccctagaagctgaaaaaagaaaggaatcagacaaaaccggggttcggctgagcaatcagatgcggcgagctgtgaatccgaatcactccttgcggtgctgccccttccaaggtcacagtagttgtaggcgctgcctgtgtgcagcagagggcacagcactggggccttgtcacaccatccgcatctacatccatatgtgcttgctttgggaacaggggcagcagatcactatgatgaggggttctcaggagtcctccctccgcaagacggactctaggggctacctcgtgcgctcccagtggtcccgcatctccaggtcgccttcaacaaaagcgccttcgatagacgagcctcgcagtcgcaacacgagcgccaaacttccctcatcaagcacttcatccaggaccccctctacctccccatccctccacgattcctcgccgcctcctcttagtggacagcccagtctgcagccccctgctagtcctcagcttcccagaagcctggacagccgccctccgactcccccagagcctgatcccggaagtcgccgaagtacgaaaatgcaggagaatcccgaggcctgggctcagggaattgtccgggaaatacgtcagactcgagattcacagccccttgaatacagtcgcaccagcccaacagagtggaaaagctcttcacagagacggggtatctatccggcttccacacagctcgaccgcaactcgttgagcgagcagcagcaacagcagcgggaagatgaagatgattatgaagctgcgtattgggcctccatgcgcagtttctacgaaaagaatccttcctgcagcagaccttggcccccaaaaccaaagaatgccattactatcgcactttctagctgcgccctgtttaacatggttgatggcaggaagatctatgaacaagaaggattggaaaagtacatggagtatcagttgacaaacgaaaatgtaatcctgacaccaggccctgcctttcgttttgttaaagcgcttcagtacgtgaacgctaggctgcgagatctttaccctgacgagcaggacctgtttgacatagtgctcatgactaataatcatgcgcaggtgggggttcggttgatcaattccgtgaatcattacgggttactcatagataggttctgtctgactggaggcaaagaccccataggctatctcaaggcttatttgaccaatctgtacattgcggctgactctgaaaaagtccaagaagccattcaggaagggattgcctctgccaccatgttcgacggcgcaaaggacatggcctactgcgatactcaactgcgcgtggcctttgacggcgatgcagtgctcttttcagacgagtctgaacacttcacaaaggaacacggacttgataaattttttcagtatgatacactgtgtgagagtaagccccttgcacagggacccttgaaggggtttctggaagacctgggtagactccaaaagaagttctatgcgaagaatgaaagactgctctgccctattcggacttatttagtgactgctagaagcgcggcatcttctggggcaagagtgctcaagactcttcgcagatggggcctcgaaattgacgaggcactctttttggcaggcgctcctaaatcccccatcctggtaaagatccgacctcacatcttcttcgacgatcacatgttccacattgagggcgcacaaaggcttggttcaattgccgcatatggatttaacaagaagttttcctcatag

SEQ ID NO: 19341 - protein, 336 aa, Artificial Sequence
  derived and/or modified sequence
MRAPSMDRAAVARVGAVASASVCALVAGVVLAQYIFTLKRKTGRKTKIIEMMPEFQKSSVRIKNPTRVEEIICGLIKGGAAKLQIITDFDMTLSRFSYKGKRCPTCHNIIDNCKLVTDECRKKLLQLKEKYYAIEVDPVLTVEEKYPYMVEWYTKSHGLLVQQALPKAKLKEIVAESDVMLKEGYENFFDKLQQHSIPVFIFSAGIGDVLEEVIRQAGVYHPNVKVVSNFMDFDETGVLKGFKGELIHVFNKHDGALRNTEYFNQLKDNSNIILLGDSQGDLRMADGVANVEHILKIGYLNDRVDELLEKYMDSYDIVLVQDESLEVANSILQKIL

SEQ ID NO: 19342 - protein, 285 aa, Artificial Sequence
  derived and/or modified sequence
MPEFQKSSVRIKNPTRVEEIICGLIKGGAAKLQIITDFDMTLSRFSYKGKRCPTCHNIIDNCKLVTDECRKKLLQLKEKYYAIEVDPVLTVEEKYPYMVEWYTKSHGLLVQQALPKAKLKEIVAESDVMLKEGYENFFDKLQQHSIPVFIFSAGIGDVLEEVIRQAGVYHPNVKVVSNFMDFDETGVLKGFKGELIHVFNKHDGALRNTEYFNQLKDNSNIILLGDSQGDLRMADGVANVEHILKIGYLNDRVDELLEKYMDSYDIVLVQDESLEVANSILQKIL

SEQ ID NO: 19343 - DNA, 1011 bp, Artificial Sequence
  derived and/or modified sequence
atgcgcgctccatccatggaccgcgccgccgtggcacgagttggtgctgttgcttcagcaagcgtctgcgctcttgttgcgggggttgtccttgctcaatacatttttacccttaagcggaaaacaggccggaaaaccaaaatcatcgaaatgatgcctgaattccagaagtcttcagtcagaattaagaatccaacaagggttgaggaaattatttgtggcctgataaaggggggcgccgccaaactccagatcattacagatttcgacatgactctgtctagattcagctataaaggaaagcgctgtccgacatgtcacaacatcatagataattgcaaactcgttacagatgagtgccggaaaaagcttttgcaactaaaagagaaatactatgccatagaggttgacccagtgctgacagttgaggaaaaatacccttatatggtggaatggtatactaaaagccacgggctgctggtgcaacaggcacttcctaaggccaagctcaaggagatcgtcgctgagtctgacgtgatgctcaaagaaggatatgagaacttttttgacaaactacagcagcactcaattcccgtgtttattttctccgctggaatcggtgatgtacttgaagaagtaattcgtcaggccggagtctatcaccctaacgtaaaagttgtctcgaacttcatggatttcgatgagacgggggtcctgaaaggatttaagggcgagctcatccacgtgttcaacaagcatgatggcgctttacgcaacactgaatatttcaatcagctcaaagataatagcaacattattctgcttggcgactctcagggggacctgcgtatggctgacggagtggcgaatgtggagcatatccttaagatcgggtatctgaacgaccgggtggatgaactcctggagaagtacatggacagctatgacatagtcctcgtccaggatgaatccctcgaagtagccaattctattttgcaaaaaatattgtag

SEQ ID NO: 19344 - DNA, 1011 bp, Artificial Sequence
  derived and/or modified sequence
atgagggcccccagcatggacagagctgctgtggcccgggtgggcgctgtggccagcgcctctgtgtgtgccctggtggccggcgtggtgctggcccagtacatcttcaccctgaagaggaagacaggcaggaagaccaagatcatcgagatgatgcctgagttccagaagagctctgtgcgcatcaagaaccccaccagggtggaggagatcatctgtggcctcatcaagggcggggccgccaagctgcagatcatcacagactttgacatgaccctgagccgcttctcctacaagggcaagcgctgccccacctgccacaacatcatcgacaactgcaagctggtgacagatgaatgtaggaagaagctgctgcagctgaaggagaagtactatgccatcgaggtggaccctgtgctgactgtggaggagaagtacccctacatggtggagtggtacaccaagagccacggcctgctggtgcagcaggccctgcccaaggccaagctgaaggagatcgtggccgagagtgatgtgatgctgaaggagggctatgagaacttctttgacaagctgcagcagcacagcatccctgtgttcatcttctctgctggcattggagatgtgctggaggaggtgatccggcaggccggcgtgtaccaccccaacgtgaaggtggtgagcaacttcatggactttgatgagaccggggtgctgaagggcttcaagggggagctgatccacgtgttcaacaagcatgatggagccctgaggaacacagagtacttcaaccagctgaaggacaacagcaacatcatcctgctgggggacagccagggcgacctgaggatggctgatggagtggccaacgtggagcacatcctgaagattggctacctgaatgacagagtggatgagctgctggagaagtacatggacagctatgacatcgtgctggtgcaggatgagagcctggaggtggccaacagcatcctgcagaagatcctgtag

SEQ ID NO: 19345 - DNA, 1011 bp, Artificial Sequence
  derived and/or modified sequence
atgcgggcccccagcatggaccgggccgccgtggcccgggtgggcgccgtcgccagcgccagtgtgtgtgcactggtagccggagtcgtgctggctcagtacatatttactttaaaaaggaaaacaggccggaagacaaagatcatcgaaatgatgccagaattccaaaagagctccgttcggattaagaatcctacccgggtggaggagattatctgcggactcatcaagggcggcgctgcgaagctgcaaattataactgattttgatatgactctgtcgagattctcctataagggtaaacgctgcccaacttgccacaatatcatcgataactgtaagctcgtcactgacgaatgcaggaaaaaactcttgcagttaaaagaaaagtattatgctattgaggtggatcccgtcctgacagtcgaggagaagtacccatacatggtggagtggtataccaagtctcacggcctcctcgtacagcaagcgcttccgaaagcaaaattgaaagagatagtcgctgaatcggacgttatgctgaaggagggatatgagaatttcttcgacaaactccaacagcactcaattcctgtgttcatattctcggctggcatcggagacgtgcttgaggaagtgataagacaagctggggtgtaccaccccaatgttaaagttgtttccaactttatggattttgacgagactggcgtgttaaaaggattcaagggagagttgatccatgtgtttaataaacatgacggagccctgaggaacaccgaatactttaaccagctcaaagataattctaatatcatcctattaggggattctcagggagatctgagaatggccgacggcgtcgccaacgtggaacatattttgaagattggctacctcaatgatcgtgttgacgagcttcttgagaaatacatggacagttatgatatcgtactggttcaagacgagagcttggaggttgcgaatagcatcctccaaaaaatcctctag

SEQ ID NO: 19346 - DNA, 1011 bp, Artificial Sequence
  derived and/or modified sequence
atgagggctccatcaatggaccgcgctgctgttgccagggtgggcgctgtggcgtccgcctccgtatgtgcccttgtggctggagtcgtccttgctcagtacatcttcacactcaaacgtaagactgggagaaagacaaagatcattgagatgatgcccgaatttcagaaaagttccgtaaggattaaaaatccaacccgtgtggaagaaattatttgcggtctcatcaaaggaggggcagccaagctccaaatcattacggacttcgacatgactctgtcccggtttagctacaaggggaagaggtgccctacgtgtcataacattatcgataactgtaagctggttacagacgaatgcagaaaaaaacttctccaattaaaggaaaaatattatgctatagaagtcgacccagtgttgacagtggaagagaagtatccttacatggttgagtggtacacaaaatctcacggactgctggtgcagcaagcactgccaaaagccaaacttaaggagatagtagccgaatcagatgtgatgctgaaagaggggtacgagaacttcttcgacaagttacagcagcatagcattcctgtattcatcttttccgccggaattggagacgtgttggaggaagttatacgccaggctggcgtgtaccatcctaacgtgaaggttgtgagcaatttcatggacttcgatgagaccggcgtcctcaagggctttaagggagaactgatacatgtgttcaataaacacgacggagcactgaggaatacggaatacttcaaccagctcaaggacaactccaatataatcttgctcggcgacagccagggcgatctgcgtatggccgacggcgtggccaatgtagagcatattctcaagataggatatctgaacgaccgagttgatgagctactggaaaagtacatggatagctatgacattgtcctggttcaggacgagagcctagaagttgcaaattctattctgcaaaagatcttgtag

SEQ ID NO: 19347 - DNA, 1670 bp, Artificial Sequence
  derived and/or modified sequence
cgtgatgctctgggatcccgcgcttccgagactcgcagtctacgcgagctgcctgtttttttcctgcttggacgcgcatgagggccccgtccatggaccgcgcggccgtggcgagggtgggcgcggtagcgagcgccagcgtgtgcgccctggtggcgggggtggtgctggctcagtacatattcaccttgaagaggaagacggggcggaagaccaagatcatcgagatgatgccagaattccagaaaagttcagttcgaatcaagaaccctacaagagtagaagaaattatctgtggtcttatcaaaggaggagctgccaaacttcagataataacggactttgatatgacactcagtagattttcatataaagggaaaagatgcccaacatgtcataatatcattgacaactgtaagctggttacagatgaatgtagaaaaaagttattgcaactaaaggaaaaatattacgctattgaagttgatcctgttcttactgtagaagagaagtacccttatatggtggaatggtatactaaatcacatggtttgcttgttcagcaagctttaccaaaagctaaacttaaagaaattgtggcagaatctgacgttatgctcaaagaaggatatgagaatttctttgataagctccaacaacatagcatccccgtgttcatattttcggctggaatcggcgatgtactagaggaagttattcgtcaagctggtgtttatcatcccaatgtcaaagttgtgtccaattttatggattttgatgaaactggggtgctcaaaggatttaaaggagaactaattcatgtatttaacaaacatgatggtgccttgaggaatacagaatatttcaatcaactaaaagacaatagtaacataattcttctgggagactcccaaggagacttaagaatggcagatggagtggccaatgttgagcacattctgaaaattggatatctaaatgatagagtggatgagcttttagaaaagtacatggactcttatgatattgttttagtacaagatgaatcattagaagtagccaactctattttacagaagattctataaacaagcattctccaagaagacctctctcctgtgggtgcaattgaactgttcatccgttcatcttgctgagagacttatttataatatatccttactctcgaagtgttccctttgtataactgaagtattttcagatatggtgaatgcattgactggaagctccttttctccacctctctcaacacactcctcaccgtatcttttaacccatttaaaaaaaaaaaaaagctaaaattagaaaaataactccctacttttccaaagtgaattttgtagtttaatgttatcatgcagcttttgaggagtcttttacactgggaaagtttgtagaaattttaaaataagttttatgaaatggtgaaataatatgcatgattttaagtattgccatttttgtaatttgggttattatgctgatggtatcaccatctcttgaaattgtgttaggtttggttattttgtctggggaaaaaatatttactggaaaagactagcagttagtgttggaaaaacctggtggtgtttacaatgttgctaatcattacaaaacattctatattgaagcactgataataaatatga

SEQ ID NO: 19348 - DNA, 1011 bp, Artificial Sequence
  derived and/or modified sequence
atgagagcccccagcatggacagagccgccgtggccagagtgggcgccgtggccagcgccagcgtgtgcgccctggtggccggcgtggtgctggcccagtacatcttcaccctgaagagaaagaccggcagaaagaccaagatcatcgagatgatgcccgagttccagaagagcagcgtgagaatcaagaaccccaccagagtggaggagatcatctgcggcctgatcaagggcggcgccgccaagctgcagatcatcaccgacttcgacatgaccctgagcagattcagctacaagggcaagagatgccccacctgccacaacatcatcgacaactgcaagctggtgaccgacgagtgcagaaagaagctgctgcagctgaaggagaagtactacgccatcgaggtggaccccgtgctgaccgtggaggagaagtacccctacatggtggagtggtacaccaagagccacggcctgctggtgcagcaggccctgcccaaggccaagctgaaggagatcgtggccgagagcgacgtgatgctgaaggagggctacgagaacttcttcgacaagctgcagcagcacagcatccccgtgttcatcttcagcgccggcatcggcgacgtgctggaggaggtgatcagacaggccggcgtgtaccaccccaacgtgaaggtggtgagcaacttcatggacttcgacgagaccggcgtgctgaagggcttcaagggcgagctgatccacgtgttcaacaagcacgacggcgccctgagaaacaccgagtacttcaaccagctgaaggacaacagcaacatcatcctgctgggcgacagccagggcgacctgagaatggccgacggcgtggccaacgtggagcacatcctgaagatcggctacctgaacgacagagtggacgagctgctggagaagtacatggacagctacgacatcgtgctggtgcaggacgagagcctggaggtggccaacagcatcctgcagaagatcctgtag

SEQ ID NO: 19349 - protein, 384 aa, Artificial Sequence
  derived and/or modified sequence
MAGNAEPPPAGAACPQDRRSCSGRAGGDRVWEDGEHPAKKLKSGGDEERREKPPKRKIVLLMAYSGKGYHGMQRNVGSSQFKTIEDDLVSALVRSGCIPENHGEDMRKMSFQRCARTDKGVSAAGQVVSLKVWLIDDILEKINSHLPSHIRILGLKRVTGGFNSKNRCDARTYCYLLPTFAFAHKDRDVQDETYRLSAETLQQVNRLLACYKGTHNFHNFTSQKGPQDPSACRYILEMYCEEPFVREGLEFAVIRVKGQSFMMHQIRKMVGLVVAIVKGYAPESVLERSWGTEKVDVPKAPGLGLVLERVHFEKYNQRFGNDGLHEPLDWAQEEGKVAAFKEEHIYPTIIGTERDERSMAQWLSTLPIHNFSATALTAGGTGAK

SEQ ID NO: 19350 - protein, 399 aa, Artificial Sequence
  derived and/or modified sequence
MAGNAEPPPAGAACPQDRRSCSGRAGGDRVWEDGEHPAKKLKSGGDEERREKPPKRKIVLLMAYSGKGYHGMQRNVGSSQFKTIEDDLVSALVRSGCIPENHGEDMRKMSFQRCARTDKGVSAAGQVVSLKVWLIDDILEKINSHLPSHIRILGLKRVTGGFNSKNRCDARTYCYLLPTFAFAHKDRDVQDETYRLSAETLQQVNRLLACYKGTHNFHNFTSQKGPQDPSACRYILEMYCEEPFVREGLEFAVIRVKGQSFMMHQIRKMVGLVVAIVKGYAPESVLERSWGTEKVDVPKAPGLGLVLERVHFEKYNQRFGNDGLHEPLDWAQEEGKVAAFKEEHIYPTIIGTERDERSMAQWLSTLPIHNFSATALTAGGTGAKVPSPLEGSEGDGDTD

SEQ ID NO: 19351 - protein, 154 aa, Artificial Sequence
  derived and/or modified sequence
MAGNAEPPPAGAACPQDRRSCSGRAGGDRVWEDGEHPAKKLKSGGDEERREKPPKRKIVLLMAYSGKGYHGMQRNVGSSQFKTIEDDLVSALVRSGCIPENHGEDMRKMSFQRCARTDKGVSAAGQVVSLKVWLIDDILEKINSHLPSHIRILG

SEQ ID NO: 19352 - DNA, 1155 bp, Artificial Sequence
  derived and/or modified sequence
atggctgggaacgcagaaccccctcccgccggcgcggcttgccctcaagacagaaggtcctgtagtggccgcgctgggggggacagagtgtgggaagacggggagcaccctgcaaagaagctgaagagtggcggtgatgaagagaggcgggagaagccccccaaacgcaagatcgtcctgctgatggcttactcaggcaaggggtatcatggcatgcagcgcaacgtgggctcatcacaattcaaaaccatagaggatgatctggtgagtgccctggtgaggtccgggtgtatcccggagaaccacggggaggacatgagaaagatgtctttccagaggtgcgccaggaccgacaagggggtctcagctgcgggtcaggttgtgtcacttaaagtttggctgatcgacgatatcctcgagaagatcaacagtcatctcccgagtcatatcagaatcctcggtctgaagcgtgttactggagggttcaattctaaaaacagatgcgacgcacgtacatactgctacctgcttcctactttcgctttcgcccataaggaccgggatgtacaggatgaaacgtaccgcctgtccgcagaaactctccagcaggtcaaccggttgctggcatgttacaaaggcacgcacaactttcataactttaccagccagaagggccctcaggaccctagcgcctgtaggtacatattagaaatgtattgcgaagagccctttgtccgggagggtctcgagtttgcagtcattcgcgtgaagggccagagttttatgatgcaccagatcagaaaaatggtggggctggtggttgccatcgttaaaggctatgctccagagtcagtgttggaacgctcctggggcacagaaaaagtcgacgtccccaaggcccccggactgggcctggtgctggagcgtgtccacttcgagaagtacaaccagaggtttggaaacgatgggctccatgagcccctagattgggcccaggaggaaggcaaagtagctgcgttcaaggaggaacacatttatcctacaatcattggcactgagagagatgaacgtagcatggctcaatggttgagcactctgccaattcacaatttcagtgccacagcccttacagccgggggcaccggggctaaatag

SEQ ID NO: 19353 - DNA, 1200 bp, Artificial Sequence
  derived and/or modified sequence
atggccggaaacgccgaacctcctccagcgggagcggcctgtccacaggaccggaggagttgtagcggtagagctggtggggacagagtgtgggaggatggagagcatcccgccaagaaactcaagtctggcggggatgaggaacggcgggagaagcctccaaagagaaaaatcgtactgttaatggcgtactccgggaagggctaccacgggatgcagcgcaacgtgggctcttcccagtttaaaacgattgaggatgacctcgtttctgccttagtcaggagcgggtgcatccccgaaaaccatggagaagatatgcggaagatgtcgttccagcgatgtgctcgaaccgacaagggagttagcgccgctgggcaagtcgtcagcctcaaggtgtggctgattgatgacatccttgagaagattaattcacacctccctagtcatattaggatattaggcctgaagagagtgactggagggttcaatagcaaaaatcgctgcgatgcacgtacgtactgttacctcctgccaacatttgctttcgcacacaaggatcgggatgtgcaagatgagacttacagactgagcgctgagacgctgcagcaggttaatcgactgctagcttgctacaagggaacccacaactttcataatttcacttcgcagaagggaccccaggaccctagcgcttgccgatacattctggaaatgtactgtgaagaaccatttgtaagggagggactggagttcgcggtaatcagggtgaagggccagtcattcatgatgcatcaaattaggaagatggtgggtcttgtcgtcgctatcgtgaagggctacgcccccgagtcagtgttagagaggtcttggggtactgagaaagtggacgtgccaaaggcacctggtctcggcctggtcctggagagggtgcactttgaaaagtataatcaacgcttcggtaacgatggcctccacgaacccctggattgggcacaggaggaaggcaaagtcgcagccttcaaagaggaacacatctacccaacaattataggaaccgagagagatgagcggtccatggctcagtggctttcaactctgccaattcataattttagtgcaacagccctcacagccggtggcacgggagccaaggtaccttctcctctcgaggggagcgaaggagacggggacaccgattag

SEQ ID NO: 19354 - DNA, 1200 bp, Artificial Sequence
  derived and/or modified sequence
atggcggggaatgcagaacccccccctgccggtgctgcctgtccacaggaccggcgctcgtgctccggacgggcgggaggtgatcgagtctgggaggacggggagcaccccgcaaaaaaactgaagtccggaggagatgaagagcgaagggaaaagccaccgaagcgaaagatcgtcctgttgatggcctactcggggaagggctatcacggcatgcaacgtaacgtcggttcttctcagttcaagacaattgaggacgatcttgtcagcgcattggtgcgctccgggtgtattcctgagaaccacggggaggatatgcggaagatgagctttcagcgatgcgccagaaccgataaaggggtgagcgctgctgggcaggtggtgagtctaaaggtgtggcttatcgatgacatacttgaaaagataaacagtcatctgcctagccacattcggatactgggtctaaagcgggtgactggcggtttcaacagtaaaaatcgatgcgatgcaagaacttactgctatctccttcctacattcgcttttgcacacaaagatcgggatgtgcaggatgagacttataggctgtctgcggagacactgcagcaagtgaatcggctactagcctgttataaaggaacccataatttccacaacttcactagtcagaagggtccacaggatcccagcgcttgtaggtacatcttagaaatgtactgtgaggagccttttgtgcgcgaagggctggagtttgccgtgattcgcgttaaggggcagtcattcatgatgcaccagattaggaaaatggtaggtctcgtagtggccattgtcaagggctacgccccagagtctgtgttggagcggtcatggggaaccgagaaggtagacgtccctaaggctcccggtctaggcctggtgctcgagcgggtgcacttcgagaaatacaaccagagattcgggaacgacgggctccacgaaccattagattgggctcaggaggagggaaaagtggccgcatttaaagaggagcacatctaccccacaattatcggtactgagcgagatgagcgctctatggcccagtggctgtctactttgcccatccacaatttcagcgctaccgccctgacagccgggggcaccggtgctaaagtacccagccctctcgaggggtctgaaggcgatggcgacaccgactag

SEQ ID NO: 19355 - DNA, 465 bp, Artificial Sequence
  derived and/or modified sequence
atggccggtaatgctgagcccccacccgcaggcgccgcctgcccacaggacagaagatcatgtagtgggcgtgccgggggtgatcgggtctgggaagacggcgagcatcccgcaaagaaattaaagtcaggcggggatgaagaacgaagagagaaaccacccaagcgcaagattgtactgttaatggcctactccggaaagggatatcatggaatgcagagaaatgtcggaagttcccagtttaagactatcgaagacgacctggtcagtgcactggtccgcagcggctgtatccccgagaatcatggtgaagatatgaggaaaatgagctttcaaaggtgtgcaaggacagacaaaggcgttagtgcagcagggcaggtggtgtccctcaaggtctggctgattgatgacatcctggaaaagattaactcacatcttcctagccacatcaggatactaggatag

SEQ ID NO: 19356 - DNA, 1155 bp, Artificial Sequence
  derived and/or modified sequence
atggctggaaatgctgagcccccacctgctggggccgcctgcccccaggaccggcgcagctgcagcggccgggccggcggggacagagtgtgggaggatggagagcacccagccaagaagctgaagtctggaggagatgaggagcggcgggagaagccacccaagaggaagatcgtgctgctgatggcctacagcggcaagggctaccacggcatgcagagaaatgtgggcagcagccagttcaagaccattgaagatgacctggtgtctgccctggtgcgcagcggctgcatccctgagaaccacggggaggacatgaggaagatgtccttccagagatgtgccaggacagacaagggcgtgtctgctgctggccaggtggtgtccctgaaggtgtggctgattgatgacatcctggagaagatcaacagccacctgcccagccacatccgcatcctgggcctgaagagggtgactggaggcttcaacagcaagaacagatgtgatgcccggacctactgctacctgctgcccacctttgcctttgcccacaaggacagagatgtgcaggatgagacctaccgcctgtctgctgagaccctgcagcaggtgaaccggctgctggcctgctacaagggcacccacaacttccacaacttcaccagccagaagggcccccaggaccccagcgcctgccgctacatcctggagatgtactgtgaggagccctttgtgcgggagggcctggagtttgctgtgatccgggtgaagggccagagcttcatgatgcaccagatcaggaagatggtgggcctggtggtggccatcgtgaagggctacgcccctgagagcgtgctggagaggtcctggggcacagagaaggtggatgtgcccaaggcccctggcctgggcctggtgctggagcgggtgcactttgagaagtacaaccagagatttggaaatgatggcctgcacgagcccctggactgggcccaggaggagggcaaggtggccgccttcaaggaggagcacatctaccccaccatcatcggcacagaaagagatgagaggtccatggcccagtggctgagcaccctgcccatccacaacttcagcgccacagccctgacagctgggggcactggagccaagtag

SEQ ID NO: 19357 - DNA, 1200 bp, Artificial Sequence
  derived and/or modified sequence
atggctggaaatgctgagcccccacctgctggggccgcctgcccccaggaccggcgcagctgcagcggccgggccggcggggacagagtgtgggaggatggagagcacccagccaagaagctgaagtctggaggagatgaggagcggcgggagaagccacccaagaggaagatcgtgctgctgatggcctacagcggcaagggctaccacggcatgcagagaaatgtgggcagcagccagttcaagaccattgaagatgacctggtgtctgccctggtgcgcagcggctgcatccctgagaaccacggggaggacatgaggaagatgtccttccagagatgtgccaggacagacaagggcgtgtctgctgctggccaggtggtgtccctgaaggtgtggctgattgatgacatcctggagaagatcaacagccacctgcccagccacatccgcatcctgggcctgaagagggtgactggaggcttcaacagcaagaacagatgtgatgcccggacctactgctacctgctgcccacctttgcctttgcccacaaggacagagatgtgcaggatgagacctaccgcctgtctgctgagaccctgcagcaggtgaaccggctgctggcctgctacaagggcacccacaacttccacaacttcaccagccagaagggcccccaggaccccagcgcctgccgctacatcctggagatgtactgtgaggagccctttgtgcgggagggcctggagtttgctgtgatccgggtgaagggccagagcttcatgatgcaccagatcaggaagatggtgggcctggtggtggccatcgtgaagggctacgcccctgagagcgtgctggagaggtcctggggcacagagaaggtggatgtgcccaaggcccctggcctgggcctggtgctggagcgggtgcactttgagaagtacaaccagagatttggaaatgatggcctgcacgagcccctggactgggcccaggaggagggcaaggtggccgccttcaaggaggagcacatctaccccaccatcatcggcacagaaagagatgagaggtccatggcccagtggctgagcaccctgcccatccacaacttcagcgccacagccctgacagctgggggcactggagccaaggtgcccagccccctggagggctctgaaggagatggagacacagactag

SEQ ID NO: 19358 - DNA, 465 bp, Artificial Sequence
  derived and/or modified sequence
atggctggaaatgctgagcccccacctgctggggccgcctgcccccaggaccggcgcagctgcagcggccgggccggcggggacagagtgtgggaggatggagagcacccagccaagaagctgaagtctggaggagatgaggagcggcgggagaagccacccaagaggaagatcgtgctgctgatggcctacagcggcaagggctaccacggcatgcagagaaatgtgggcagcagccagttcaagaccattgaagatgacctggtgtctgccctggtgcgcagcggctgcatccctgagaaccacggggaggacatgaggaagatgtccttccagagatgtgccaggacagacaagggcgtgtctgctgctggccaggtggtgtccctgaaggtgtggctgattgatgacatcctggagaagatcaacagccacctgcccagccacatccgcatcctgggctag

SEQ ID NO: 19359 - DNA, 1155 bp, Artificial Sequence
  derived and/or modified sequence
atggccggcaacgccgagcccccccccgccggcgccgcctgcccccaagatcgtcgatcttgctcggggagagctgggggagacagggtgtgggaagacggggagcatcccgccaaaaagctgaagtccgggggcgacgaggaacggagagagaaaccaccaaaacgcaagatcgtgcttttgatggcttactccggcaaaggctaccacggaatgcagcgaaacgtgggctcttctcagttcaagaccatagaagacgacctcgtatccgccctggtcagaagcggctgtattccagagaaccatggcgaggacatgagaaagatgtcctttcagcggtgcgcccgtactgataagggtgtctcggcagccggccaggtggtgtccctgaaggtatggctgattgacgatattctagaaaagatcaattctcacctgccttctcatatacgcattctggggttaaagcgtgttacgggaggatttaattcaaaaaacaggtgcgacgctcgcacctattgttacttgctgccgacatttgccttcgctcacaaggaccgcgatgtgcaagacgagacatacaggctctccgccgaaaccttgcagcaggtgaaccgcctgttggcctgctataaagggacacacaacttccataacttcacatcacaaaaggggccacaggatccctccgcttgccggtatatcctggaaatgtactgtgaagaaccatttgtcagggagggcctggaatttgcagtgattcgggtcaagggccagagtttcatgatgcatcagatccgaaaaatggtgggactcgtagtggcaatcgtcaaggggtatgcacctgaatctgttctggaaagatcttggggcacggagaaggttgatgtgcccaaagcccctggcttagggcttgtgctcgaaagggtccatttcgaaaagtataaccagagatttggaaacgacggcctccatgagcccctcgactgggcccaggaagaagggaaagtggctgccttcaaagaagaacacatctacccaactataatcggtacagagcgcgacgagcgaagcatggctcagtggctgtccacactgcccattcataacttttccgctacggctcttaccgccgggggaaccggcgctaagtag

SEQ ID NO: 19360 - DNA, 1200 bp, Artificial Sequence
  derived and/or modified sequence
atggccggcaacgccgagcccccccccgccggcgccgcctgcccccaggatcggcggtcttgttccggccgggccggaggggacagggtctgggaggacggcgagcaccctgccaaaaaactgaagtcgggaggagacgaggagcggagagaaaaaccccctaaaaggaaaatagtgttattaatggcctattcaggaaaaggctatcatggaatgcaaaggaatgtgggttcttcccaatttaaaacaattgaggacgaccttgtgtctgcattggtccgcagtgggtgtattccggagaaccacggggaggatatgagaaagatgtcatttcagaggtgcgcacgcactgacaagggtgtgtccgcagcaggccaagtggtgagcctaaaggtctggctaatcgacgatatcctggagaagataaattcccacctcccaagtcacatcagaattctgggactgaaaagggtgactggaggattcaactctaagaacagatgtgatgctagaacctattgttatctcctccctacgttcgctttcgcccataaggatagagatgtgcaggacgagacatatcggctgtccgcagagacacttcagcaggtgaatcggttgttagcctgttacaaagggacacacaactttcacaacttcacatcccagaaagggccccaagacccctccgcctgtaggtatatcctggagatgtactgcgaagagcccttcgtcagggaaggattagagttcgctgtgatccgggtgaaaggacagagctttatgatgcatcagatcagaaagatggttggcttggtggtcgctattgtgaaagggtacgcccccgaatccgtgctggagaggtcttggggcaccgagaaagtggatgtgccaaaagctcctggcttggggctcgttctggagagagtgcacttcgaaaaatacaatcaacgcttcggcaatgatggcctccatgagccactggattgggcccaagaggaaggtaaagttgcagccttcaaggaggaacacatctaccccactatcataggcaccgagagggatgaacggagcatggcacagtggttgtctacgctccctatacataactttagcgctaccgctctgaccgcaggcggcactggcgccaaagtgccgagcccgcttgaaggttctgaaggggacggagacacagattag

SEQ ID NO: 19361 - DNA, 1200 bp, Artificial Sequence
  derived and/or modified sequence
atggccggcaacgccgagcccccccccgccggcgccgcctgcccccaggacaggagaagctgcagtggacgcgctggaggggatcgcgtctgggaggatggagagcaccccgccaaaaagctcaaatctgggggtgatgaggaaagaagagagaaaccgccgaaacgcaagatcgtgttactaatggcttattccggaaaagggtaccatgggatgcagagaaatgtgggctccagccagttcaagacaattgaggatgaccttgtctcggcactggtacgctcaggttgcattcccgaaaaccacggagaggacatgcgcaagatgtccttccagagatgcgcaaggaccgacaaaggggtctcggccgccggccaggtcgtgtcattaaaggtatggctgattgacgatatactggagaaaatcaactctcacctgccatcccatataaggatcctcgggttaaaacgagtgaccggcggatttaatagtaaaaatagatgcgatgctaggacttactgctatctgctaccgaccttcgctttcgctcacaaagaccgggatgtgcaggatgaaacatatcggctgtccgccgaaaccctccagcaagtaaaccgcctcttggcctgctataaaggcacacataacttccataactttacatcccagaagggcccacaggatccaagcgcctgccgctacattctggaaatgtattgcgaagagccttttgtgagagaaggtctggagttcgccgtaataagggtgaagggtcagtcatttatgatgcatcagattaggaagatggttgggctggtggtggcaatagtcaagggttacgcccctgagagcgtgctggagcgtagctggggaaccgagaaagtggacgtgccaaaagctcctggactcggactggtgttggaaagagtccacttcgagaagtataaccaacggtttggcaatgatgggcttcacgaacctcttgactgggcccaggaagagggcaaagtggctgcattcaaggaggagcacatatatccgacaattattggcacagaaagggatgaaaggagcatggcacagtggttgagcactctgccaatacacaatttcagcgcgacagctcttacagcaggcggcacgggcgctaaggtcccctcgcccctcgagggcagcgagggggacggtgataccgactag

SEQ ID NO: 19362 - DNA, 465 bp, Artificial Sequence
  derived and/or modified sequence
atggccggcaacgccgagcccccccccgccggcgccgcctgcccccaagataggcgatcatgttcaggcagggccggcggggacagagtgtgggaagacggggagcatccagccaaaaagttaaagtccggtggggacgaggagagacgggaaaagcccccaaagcgaaagatagtgctccttatggcctatagtggaaaaggctaccacggaatgcaaaggaacgtgggcagctcacagtttaagaccattgaggacgatctggttagtgccctcgtgaggtctggatgcataccagagaaccatggggaggatatgcgaaaaatgtctttccagagatgcgcccgaactgacaaaggcgtctctgctgctgggcaggtggtgtccctaaaagtctggctgatcgacgacattctcgaaaagattaacagccacttgcccagtcatatccgaatcctggggtag

SEQ ID NO: 19363 - DNA, 1155 bp, Artificial Sequence
  derived and/or modified sequence
atggccggtaacgctgagccgccaccagccggtgcagcctgtccccaggaccggcgatcttgcagcggtcgagccggtggagaccgagtgtgggaagatggtgagcatcccgctaagaaattaaaatccggcggagatgaagagagacgggagaaaccgcctaaaaggaagatcgttctcttaatggcttacagcgggaagggatatcatggaatgcagcgaaacgtgggcagctcccaatttaagacaatcgaagatgatcttgtcagcgcgctagttcgaagcggatgcatcccagagaatcatggggaagacatgaggaagatgtcttttcagcggtgtgcaagaaccgacaagggtgtgtccgctgctgggcaagttgtgtcactcaaggtgtggctgatcgacgacatcctggagaagataaactcgcacctgccatctcatatccgcatcctggggcttaagcgcgtcacgggcggatttaactccaagaaccggtgtgatgctcggacttattgctaccttctacctaccttcgcctttgctcacaaggaccgagatgttcaggacgagacttaccggctgtccgcagaaactcttcagcaggtcaacaggctcctagcgtgttataaaggtacacataactttcacaattttactagtcaaaaagggccacaagacccctccgcctgcagatatatcttagaaatgtattgtgaagaaccctttgtgcgcgagggccttgagttcgccgtgataagagtgaagggccaatctttcatgatgcaccagattcgaaaaatggtcggccttgtagttgcaatcgttaagggatatgcccctgaatctgtgttagaacggtcatggggcactgaaaaagtagatgtcccgaaggctcccggattggggctggtgctggaacgcgtgcactttgagaaatacaaccagcggttcggtaacgacggtctacacgagccactggattgggcccaggaagagggcaaagtcgcagccttcaaagaagagcacatttaccctactattattggaaccgaaagggatgaaagaagcatggcccagtggctctctacgcttccaattcataacttcagtgccaccgcactgacagcaggcggaactggcgctaaatag

SEQ ID NO: 19364 - DNA, 1200 bp, Artificial Sequence
  derived and/or modified sequence
atggctggcaatgcagagcctcctcctgccggtgccgcatgcccccaagataggcggagctgttctggaagagccggaggcgatcgcgtgtgggaagacggtgaacaccctgctaaaaaacttaaatcggggggtgatgaagagaggagagagaaacccccaaagagaaagatcgtactgctgatggcttacagcggtaagggataccacggaatgcagcgaaacgttgggagttctcagttcaaaaccattgaagacgacctggtgtccgccctcgtacgcagcggttgcatccccgagaatcacggggaagacatgcgcaagatgtcatttcagaggtgcgcccgaaccgataagggagtgtcagcagccggacaagtcgtcagtcttaaggtgtggctcatagatgacatcctggagaagattaatagtcatctccctagccatattcgaatactgggactgaagcgcgtgaccggcggattcaattctaaaaatcgatgtgacgccaggacctactgttacctgctccccactttcgcatttgctcataaggaccgggatgtacaagatgaaacttaccgactgagcgccgaaactcttcaacaggtcaatcgcctgttggcctgctataagggtacacacaattttcataactttaccagtcagaagggccctcaagacccctccgcctgtagatacattctcgaaatgtattgcgaggagccgtttgttagagaggggctggagtttgcagtgatccgcgtaaaagggcagagcttcatgatgcaccaaataagaaagatggttggactcgttgttgcaatagttaagggatatgcccctgagagcgtgctggagagaagctggggtactgaaaaagttgatgtgcctaaggcccctggactcgggctcgttttggaaagggtccacttcgaaaaatacaaccagagatttgggaatgatggcctccacgaacctttggattgggcacaggaagagggcaaggtggcggctttcaaagaggagcatatatacccaacgattatcggtacagagagagatgagagatctatggctcagtggctcagcactcttcccatacataacttttccgccacagctcttactgcgggagggacgggcgctaaagtgcccagtcccctggaaggttcagaaggggacggtgacacggactag

SEQ ID NO: 19365 - DNA, 1200 bp, Artificial Sequence
  derived and/or modified sequence
atggccggtaacgccgaaccgccacctgcgggagctgcatgtcctcaggaccgcaggtcctgtagtggcagggctgggggtgatagagtatgggaagatggcgagcacccagccaagaaattaaaaagcggaggtgatgaggagcgcagagaaaagccaccaaagcggaagatagtccttcttatggcgtactccggcaagggctatcatggtatgcagaggaatgtcggatcctcccagttcaagacgatcgaggacgatctcgtaagtgcccttgtaagatcaggctgcatccccgagaaccacggggaggacatgcgaaaaatgtccttccagagatgcgctcgaaccgataagggagtgtctgctgcaggacaggtggtgagtctaaaggtgtggcttattgacgacatcctcgagaagatcaactctcacctgcctagccacatacgcatcctcgggttaaaaagagtgactggcggatttaatagtaagaacaggtgtgatgctaggacatattgttacctgctgcctaccttcgcttttgctcacaaagaccgggatgtgcaagatgagacctatagattgagtgcagaaaccctgcaacaggttaataggctgctcgcctgttacaaaggaacccacaactttcataacttcacttcacagaagggaccacaggacccttcggcttgcagatacatcctggaaatgtattgcgaggaaccatttgtccgtgaaggactggagtttgcggtgattcgcgtcaaagggcaatcattcatgatgcatcaaatacgtaaaatggtgggactggtggtcgccatagtgaagggatacgctccagaaagcgtgctggaacgatcatggggaacagaaaaggttgatgttccaaaagccccaggcctcggtctggtgcttgagcgggtgcatttcgaaaagtataatcagagattcggaaatgatggactgcatgagccactcgactgggcccaggaagaagggaaagtggcagcttttaaagaggagcacatctaccccaccattatcgggaccgagcgtgacgagagaagcatggctcaatggctgtcaactctgcctattcataatttttccgccactgctctcactgctggtggcaccggcgctaaagtccccagccctctagaaggatcagagggtgatggcgacacggactag

SEQ ID NO: 19366 - DNA, 465 bp, Artificial Sequence
  derived and/or modified sequence
atggctggcaatgctgagcccccaccagcaggagccgcatgcccccaggatcgcagatcatgcagtggacgcgcaggaggcgatcgcgtttgggaggatggtgagcacccagccaagaaattaaagagcggtggcgacgaggaaagacgcgagaagcctccaaagcggaagatagtcttgctgatggcgtacagtgggaaaggctatcacggcatgcagcggaatgttggctcgtctcagtttaagactatcgaagatgacctggtgagcgcccttgttagatccggttgcatacccgagaatcatggcgaggatatgcgtaagatgagctttcaacgctgcgcgagaacagacaagggcgtcagcgctgccggtcaggtggtaagcctgaaagtctggctaatcgacgatatcctcgagaagattaattcccatctgcccagccatatcagaatcctggggtag

SEQ ID NO: 19367 - DNA, 1155 bp, Artificial Sequence
  derived and/or modified sequence
atggccggcaacgccgagcccccccccgccggcgccgcctgcccccaggacagaagaagctgcagcggcagagccggcggcgacagagtgtgggaggacggcgagcaccccgccaagaagctgaagagcggcggcgacgaggagagaagagagaagccccccaagagaaagatcgtgctgctgatggcctacagcggcaagggctaccacggcatgcagagaaacgtgggcagcagccagttcaagaccatcgaggacgacctggtgagcgccctggtgagaagcggctgcatccccgagaaccacggcgaggacatgagaaagatgagcttccagagatgcgccagaaccgacaagggcgtgagcgccgccggccaggtggtgagcctgaaggtgtggctgatcgacgacatcctggagaagatcaacagccacctgcccagccacatcagaatcctgggcctgaagagagtgaccggcggcttcaacagcaagaacagatgcgacgccagaacctactgctacctgctgcccaccttcgccttcgcccacaaggacagagacgtgcaggacgagacctacagactgagcgccgagaccctgcagcaggtgaacagactgctggcctgctacaagggcacccacaacttccacaacttcaccagccagaagggcccccaggaccccagcgcctgcagatacatcctggagatgtactgcgaggagcccttcgtgagagagggcctggagttcgccgtgatcagagtgaagggccagagcttcatgatgcaccagatcagaaagatggtgggcctggtggtggccatcgtgaagggctacgcccccgagagcgtgctggagagaagctggggcaccgagaaggtggacgtgcccaaggcccccggcctgggcctggtgctggagagagtgcacttcgagaagtacaaccagagattcggcaacgacggcctgcacgagcccctggactgggcccaggaggagggcaaggtggccgccttcaaggaggagcacatctaccccaccatcatcggcaccgagagagacgagagaagcatggcccagtggctgagcaccctgcccatccacaacttcagcgccaccgccctgaccgccggcggcaccggcgccaagtag

SEQ ID NO: 19368 - DNA, 1200 bp, Artificial Sequence
  derived and/or modified sequence
atggccggcaacgccgagcccccccccgccggcgccgcctgcccccaggacagaagaagctgcagcggcagagccggcggcgacagagtgtgggaggacggcgagcaccccgccaagaagctgaagagcggcggcgacgaggagagaagagagaagccccccaagagaaagatcgtgctgctgatggcctacagcggcaagggctaccacggcatgcagagaaacgtgggcagcagccagttcaagaccatcgaggacgacctggtgagcgccctggtgagaagcggctgcatccccgagaaccacggcgaggacatgagaaagatgagcttccagagatgcgccagaaccgacaagggcgtgagcgccgccggccaggtggtgagcctgaaggtgtggctgatcgacgacatcctggagaagatcaacagccacctgcccagccacatcagaatcctgggcctgaagagagtgaccggcggcttcaacagcaagaacagatgcgacgccagaacctactgctacctgctgcccaccttcgccttcgcccacaaggacagagacgtgcaggacgagacctacagactgagcgccgagaccctgcagcaggtgaacagactgctggcctgctacaagggcacccacaacttccacaacttcaccagccagaagggcccccaggaccccagcgcctgcagatacatcctggagatgtactgcgaggagcccttcgtgagagagggcctggagttcgccgtgatcagagtgaagggccagagcttcatgatgcaccagatcagaaagatggtgggcctggtggtggccatcgtgaagggctacgcccccgagagcgtgctggagagaagctggggcaccgagaaggtggacgtgcccaaggcccccggcctgggcctggtgctggagagagtgcacttcgagaagtacaaccagagattcggcaacgacggcctgcacgagcccctggactgggcccaggaggagggcaaggtggccgccttcaaggaggagcacatctaccccaccatcatcggcaccgagagagacgagagaagcatggcccagtggctgagcaccctgcccatccacaacttcagcgccaccgccctgaccgccggcggcaccggcgccaaggtgcccagccccctggagggcagcgagggcgacggcgacaccgactag

SEQ ID NO: 19369 - DNA, 465 bp, Artificial Sequence
  derived and/or modified sequence
atggccggcaacgccgagcccccccccgccggcgccgcctgcccccaggacagaagaagctgcagcggcagagccggcggcgacagagtgtgggaggacggcgagcaccccgccaagaagctgaagagcggcggcgacgaggagagaagagagaagccccccaagagaaagatcgtgctgctgatggcctacagcggcaagggctaccacggcatgcagagaaacgtgggcagcagccagttcaagaccatcgaggacgacctggtgagcgccctggtgagaagcggctgcatccccgagaaccacggcgaggacatgagaaagatgagcttccagagatgcgccagaaccgacaagggcgtgagcgccgccggccaggtggtgagcctgaaggtgtggctgatcgacgacatcctggagaagatcaacagccacctgcccagccacatcagaatcctgggctag

SEQ ID NO: 19370 - protein, 261 aa, Artificial Sequence
  derived and/or modified sequence
MAVTACQGLGFVVSLIGIAGIIAATCMDQWSTQDLYNNPVTAVFNYQGLWRSCVRESSGFTECRGYFTLLGLPAMLQAVRALMIVGIVLGAIGLLVSIFALKCIRIGSMEDSAKANMTLTSGIMFIVSGLCAIAGVSVFANMLVTNFWMSTANMYTGMGGMVQTVQTRYTFGAALFVGWVAGGLTLIGGVMMCIACRGLAPEETNYKAVSYHASGHSVAYKPGGFKASTGFGSNTKNKKIYDGGARTEDEVQSYPSKHDYV

SEQ ID NO: 19371 - DNA, 786 bp, Artificial Sequence
  derived and/or modified sequence
atggccgtgaccgcctgccagggcctgggcttcgtggtgagcctgatcggcatcgccggcatcatcgccgccacctgcatggaccagtggagcacccaggacctgtacaacaaccccgtgaccgccgtgttcaactaccagggcctgtggagaagctgcgtgagagagagcagcggcttcaccgagtgcagaggctacttcaccctgctgggcctgcccgccatgctgcaggccgtgagagccctgatgatcgtgggcatcgtgctgggcgccatcggcctgctggtgagcatcttcgccctgaagtgcatcagaatcggcagcatggaggacagcgccaaggccaacatgaccctgaccagcggcatcatgttcatcgtgagcggcctgtgcgccatcgccggcgtgagcgtgttcgccaacatgctggtgaccaacttctggatgagcaccgccaacatgtacaccggcatgggcggcatggtgcagaccgtgcagaccagatacaccttcggcgccgccctgttcgtgggctgggtggccggcggcctgaccctgatcggcggcgtgatgatgtgcatcgcctgcagaggcctggcccccgaggagaccaactacaaggccgtgagctaccacgccagcggccacagcgtggcctacaagcccggcggcttcaaggccagcaccggcttcggcagcaacaccaagaacaagaagatctacgacggcggcgccagaaccgaggacgaggtgcagagctaccccagcaagcacgactacgtgtag

SEQ ID NO: 19372 - DNA, 3431 bp, Artificial Sequence
  derived and/or modified sequence
aaccgcctccattacatggtccgttcctgacgtgtacaccagcctctcagagaaaactccatccctacactcggtagtctcagaattgcgctgtccacttgtcgtgtggctctgtgtcgacactgtgcgccaccatggccgtgactgcctgtcagggcttggggttcgtggtttcactgattgggattgcgggcatcattgctgccacctgcatggaccagtggagcacccaagacttgtacaacaaccccgtaacagctgttttcaactaccaggggctgtggcgctcctgtgtccgagagagctctggcttcaccgagtgccggggctacttcaccctgctggggctgccagccatgctgcaggcagtgcgagccctgatgatcgtaggcatcgtcctgggtgccattggcctcctggtatccatctttgccctgaaatgcatccgcattggcagcatggaggactctgccaaagccaacatgacactgacctccgggatcatgttcattgtctcaggtctttgtgcaattgctggagtgtctgtgtttgccaacatgctggtgactaacttctggatgtccacagctaacatgtacaccggcatgggtgggatggtgcagactgttcagaccaggtacacatttggtgcggctctgttcgtgggctgggtcgctggaggcctcacactaattgggggtgtgatgatgtgcatcgcctgccggggcctggcaccagaagaaaccaactacaaagccgtttcttatcatgcctcaggccacagtgttgcctacaagcctggaggcttcaaggccagcactggctttgggtccaacaccaaaaacaagaagatatacgatggaggtgcccgcacagaggacgaggtacaatcttatccttccaagcacgactatgtgtaatgctctaagacctctcagcacgggcggaagaaactcccggagagctcacccaaaaaacaaggagatcccatctagatttcttcttgcttttgactcacagctggaagttagaaaagcctcgatttcatctttggagaggccaaatggtcttagcctcagtctctgtctctaaatattccaccataaaacagctgagttatttatgaattagaggctatagctcacattttcaatcctctatttctttttttaaatataactttctactctgatgagagaatgtggttttaatctctctctcacattttgatgatttagacagactccccctcttcctcctagtcaataaacccattgatgatctatttcccagcttatccccaagaaaacttttgaaaggaaagagtagacccaaagatgttattttctgctgtttgaattttgtctccccacccccaacttggctagtaataaacacttactgaagaagaagcaataagagaaagatatttgtaatctctccagcccatgatctcggttttcttacactgtgatcttaaaagttaccaaaccaaagtcattttcagtttgaggcaaccaaacctttctactgctgttgacatcttcttattacagcaacaccattctaggagtttcctgagctctccactggagtcctctttctgtcgcgggtcagaaattgtccctagatgaatgagaaaattattttttttaatttaagtcctaaatatagttaaaataaataatgttttagtaaaatgatacactatctctgtgaaatagcctcacccctacatgtggatagaaggaaatgaaaaaataattgctttgacattgtctatatggtactttgtaaagtcatgcttaagtacaaattccatgaaaagctcactgatcctaattctttccctttgaggtctctatggctctgattgtacatgatagtaagtgtaagccatgtaaaaagtaaataatgtctgggcacagtggctcacgcctgtaatcctagcactttgggaggctgaggaggaaggatcacttgagcccagaagttcgagactagcctgggcaacatggagaagccctgtctctacaaaatacagagagaaaaaatcagccagtcatggtggcctacacctgtagtcccagcattccgggaggctgaggtgggaggatcacttgagcccagggaggttggggctgcagtgagccatgatcacaccactgcactccagccaggtgacatagcgagatcctgtctaaaaaaataaaaaataaataatggaacacagcaagtcctaggaagtaggttaaaactaattctttaaaaaaaaaaaaaagttgagcctgaattaaatgtaatgtttccaagtgacaggtatccacatttgcatggttacaagccactgccagttagcagtagcactttcctggcactgtggtcggttttgttttgttttgctttgtttagagacggggtctcactttccaggctggcctcaaactcctgcactcaagcaattcttctaccctggcctcccaagtagctggaattacaggtgtgcgccatcacaactagctggtggtcagttttgttactctgagagctgttcacttctctgaattcacctagagtggttggaccatcagatgtttgggcaaaactgaaagctctttgcaaccacacaccttccctgagcttacatcactgcccttttgagcagaaagtctaaattccttccaagacagtagaattccatcccagtaccaaagccagataggccccctaggaaactgaggtaagagcagtctctaaaaactacccacagcagcattggtgcaggggaacttggccattaggttattatttgagaggaaagtcctcacatcaatagtacatatgaaagtgacctccaaggggattggtgaatactcataaggatcttcaggctgaacagactatgtctggggaaagaacggattatgccccattaaataacaagttgtgttcaagagtcagagcagtgagctcagaggcccttctcactgagacagcaacatttaaaccaaaccagaggaagtatttgtggaactcactgcctcagtttgggtaaaggatgagcagacaagtcaactaaagaaaaaagaaaagcaaggaggagggttgagcaatctagagcatggagtttgttaagtgctctctggatttgagttgaagagcatccatttgagttgaaggccacagggcacaatgagctctcccttctaccaccagaaagtccctggtcaggtctcaggtagtgcggtgtggctcagctgggtttttaattagcgcattctctatccaacatttaattgtttgaaagcctccatatagttagattgtgctttgtaattttgttgttgttgctctatcttattgtatatgcattgagtattaacctgaatgttttgttacttaaatattaaaaacactgttatcctacagtt

SEQ ID NO: 19373 - DNA, 786 bp, Artificial Sequence
  derived and/or modified sequence
atggcagtaactgcttgtcaggggttgggctttgtcgtgtcacttatcggaatcgccggcattattgccgccacctgtatggaccagtggtctacgcaagacctttataacaacccagtcacggctgtgttcaattatcagggactctggcgttcctgcgtgcgagagtcgtccggctttaccgaatgtcgaggatactttaccttactgggccttcccgccatgcttcaggccgtcagggctcttatgatcgttggcatagtgctgggcgcaattggattgttagttagcatttttgcactgaagtgtattcgcatcggctccatggaggactctgctaaggcaaacatgacgctgacaagcgggatcatgttcatcgtgtccgggctgtgcgcaatcgcaggagttagtgtgttcgccaatatgttggtgacgaacttttggatgtctacagcgaacatgtacacggggatgggtggaatggtacagacagtgcaaactaggtacactttcggagcagctttatttgtgggatgggtcgccggggggctgacactcatcggaggggtgatgatgtgcatcgcttgccgcggactagctccagaggagaccaattataaggccgtttcctaccacgcatcagggcattctgtggcatataaacctggaggattcaaggcctcgactggctttggctccaatacgaagaacaagaaaatatacgacggcggcgcccggacagaggacgaagtgcagtcctaccctagtaaacacgattacgtgtag

SEQ ID NO: 19374 - DNA, 786 bp, Artificial Sequence
  derived and/or modified sequence
atggctgtgacagcctgccagggcctgggctttgtggtgtccctcatcggcattgctggcatcatcgccgccacctgcatggaccagtggagcacccaggacctgtacaacaaccctgtgacagctgtgttcaactaccagggcctgtggaggagctgtgtgcgggagagcagcggcttcacagagtgccggggctacttcaccctgctgggcctgcctgccatgctgcaggccgtgcgggccctgatgattgtgggcatcgtgctgggcgccatcggcctgctggtgtccatctttgccctgaagtgcatccgcatcggctccatggaggacagcgccaaggccaacatgaccctgaccagcggcatcatgttcatcgtgtctggcctgtgtgccatcgccggcgtgtctgtgtttgccaacatgctggtgaccaacttctggatgagcacagccaacatgtacacaggcatgggcggcatggtgcagacagtgcagacccgctacacctttggagctgccctgtttgtgggctgggtggccggcggcctgaccctgattggaggagtgatgatgtgcatcgcctgccggggcctggcccctgaggagaccaactacaaggctgtgtcctaccacgccagcggccacagcgtggcctacaagccaggcggcttcaaggccagcactggatttggcagcaacaccaagaacaagaagatctatgatggaggagccaggacagaagatgaggtgcagagctaccccagcaagcatgactatgtgtag

SEQ ID NO: 19375 - DNA, 786 bp, Artificial Sequence
  derived and/or modified sequence
atggccgtgaccgcctgccagggcctgggcttcgtggtgagcctgattggaatcgccggaattattgctgccacttgcatggatcagtggtccacacaagacctgtataacaatccagtgacagcagtcttcaattatcagggattgtggcgctcttgcgtgcgagaatcttccggttttactgagtgtcgtgggtacttcactctgttaggtcttcctgccatgctgcaggcagtgagggccctcatgatcgtggggatcgtcttaggtgccattgggttactggtgtccattttcgccctcaaatgtatcaggatcggaagcatggaagattccgcgaaagctaatatgacccttacaagcggcatcatgttcattgtctccggcctctgcgccattgccggcgtaagcgtcttcgccaatatgctcgtgacgaatttctggatgagcaccgcaaacatgtacacaggcatgggaggaatggttcagacagttcagacccggtacactttcggtgccgctctatttgtcggctgggttgccggagggctcaccttaatcggaggagtcatgatgtgtatcgcgtgcaggggtttggccccagaagaaacgaactataaggcagtttcatatcatgcctccggccacagcgtcgcttacaagccaggagggttcaaggcatccactggattcggttccaatactaaaaataaaaagatctacgatgggggtgctcggactgaggacgaagtacagtcctacccctccaaacacgactacgtgtag

SEQ ID NO: 19376 - DNA, 786 bp, Artificial Sequence
  derived and/or modified sequence
atggcagtgactgcatgtcaggggttgggtttcgttgtgtccctgatcggcatcgcgggaatcatcgctgccacctgcatggatcagtggtccactcaggacttatacaacaatcccgtcacagcagtcttcaactaccagggcctctggcgttcctgcgttagggagagctccggttttacagagtgcagagggtatttcacactgctagggctgccagcaatgttgcaggccgtgcgcgcactcatgatagtaggcattgtccttggtgctattgggctgcttgtctccatattcgcactcaagtgtattcggattggctcaatggaggactctgctaaggccaatatgacgttgacgtcaggcatcatgtttatcgtgagcgggctgtgtgcaattgctggcgtcagcgtttttgccaacatgctggtgacgaacttttggatgtctaccgctaacatgtacaccgggatgggaggtatggtgcaaaccgttcagacacgttacactttcggcgcagcactgttcgtaggctgggtggcgggtgggctaacccttatcggaggcgttatgatgtgtattgcttgtcgcggactagcaccagaggagacgaactataaagccgtgtcttaccatgcctccggacactctgttgcgtacaagcctggaggttttaaggcaagtacaggttttgggtcgaatactaaaaataagaagatctacgacggcggagctcgcaccgaggatgaggtgcagagttacccctctaaacatgattacgtgtag

SEQ ID NO: 19377 - protein, 511 aa, Artificial Sequence
  derived and/or modified sequence
MAKGLSVQNDKHPGYQPALLLSPGAPLFADGPAYALLHLLLHEGKAEMADQAAAWLTRQGSFQGGFRSTQDTVIALDALSAYWIASHTTEERGLNVTLSSTGRNGFKSHALQLNNRQIRGLEEELQFSLGSKINVKVGGNSKGTLKVLRTYNVLDMKNTTCQDLQIEVTVKGHVEYTMEANEDYEDYEYDELPAKDDPDAPLQPVTPLQLFEGRRNRRRREAPKVVEEQESRVHYTVCIWRNGKVGLSGMAIADVTLLSGFHALRADLEKLTSLSDRYVSHFETEGPHVLLYFDSVPTSRECVGFEAVQEVPVGLVQPASATLYDYYNPERRCSVFYGAPSKSRLLATLCSAEVCQCAEGKCPRQRRALERGLQDEDGYRMKFACYYPRVEYGFQVKVLREDSRAAFRLFETKITQVLHFTKDVKAAANQMRNFLVRASCRLRLEPGKEYLIMGLDGATYDLEGHPQYLLDSNSWIEEMPSERLCRSTRQRAACAQLNDFLQEYGTQGCQV

SEQ ID NO: 19378 - protein, 270 aa, Artificial Sequence
  derived and/or modified sequence
MCPEDSLQVPLKDAKSCGLHQLLRGPEVQLVAHSPWLKDSLSRTTNIQGINLLFSSRRGHLFLQTDQPIYNPGQRVRYRVFALDQKMRPSTDTITVMVENSHGLRVRKKEVYMPSSIFQDDFVIPDISEPGTWKISARFSDGLESNSSTQFEVKKYVLPNFEVKITPGKPYILTVPGHLDEMQLDIQARYIYGKPVQGVAYVRFGLLDEDGKKTFFRGLESQTKLVNGQSHISLSKAEFQDALEKLNMGITDLQGLRLYVAAAIIESPGG

SEQ ID NO: 19379 - protein, 1744 aa, Artificial Sequence
  derived and/or modified sequence
MRLLWGLIWASSFFTLSLQKPRLLLFSPSVVHLGVPLSVGVQLQDVPRGQVVKGSVFLRNPSRNNVPCSPKVDFTLSSERDFALLSLQVPLKDAKSCGLHQLLRGPEVQLVAHSPWLKDSLSRTTNIQGINLLFSSRRGHLFLQTDQPIYNPGQRVRYRVFALDQKMRPSTDTITVMVENSHGLRVRKKEVYMPSSIFQDDFVIPDISEPGTWKISARFSDGLESNSSTQFEVKKYVLPNFEVKITPGKPYILTVPGHLDEMQLDIQARYIYGKPVQGVAYVRFGLLDEDGKKTFFRGLESQTKLVNGQSHISLSKAEFQDALEKLNMGITDLQGLRLYVAAAIIESPGGEMEEAELTSWYFVSSPFSLDLSKTKRHLVPGAPFLLQALVREMSGSPASGIPVKVSATVSSPGSVPEVQDIQQNTDGSGQVSIPIIIPQTISELQLSVSAGSPHPAIARLTVAAPPSGGPGFLSIERPDSRPPRVGDTLNLNLRAVGSGATFSHYYYMILSRGQIVFMNREPKRTLTSVSVFVDHHLAPSFYFVAFYYHGDHPVANSLRVDVQAGACEGKLELSVDGAKQYRNGESVKLHLETDSLALVALGALDTALYAAGSKSHKPLNMGKVFEAMNSYDLGCGPGGGDSALQVFQAAGLAFSDGDQWTLSRKRLSCPKEKTTRKKRNVNFQKAINEKLGQYASPTAKRCCQDGVTRLPMMRSCEQRAARVQQPDCREPFLSCCQFAESLRKKSRDKGQAGLQRALEILQEEDLIDEDDIPVRSFFPENWLWRVETVDRFQILTLWLPDSLTTWEIHGLSLSKTKGLCVATPVQLRVFREFHLHLRLPMSVRRFEQLELRPVLYNYLDKNLTVSVHVSPVEGLCLAGGGGLAQQVLVPAGSARPVAFSVVPTAATAVSLKVVARGSFEFPVGDAVSKVLQIEKEGAIHREELVYELNPLDHRGRTLEIPGNSDPNMIPDGDFNSYVRVTASDPLDTLGSEGALSPGGVASLLRLPRGCGEQTMIYLAPTLAASRYLDKTEQWSTLPPETKDHAVDLIQKGYMRIQQFRKADGSYAAWLSRGSSTWLTAFVLKVLSLAQEQVGGSPEKLQETSNWLLSQQQADGSFQDLSPVIHRSMQGGLVGNDETVALTAFVTIALHHGLAVFQDEGAEPLKQRVEASISKASSFLGEKASAGLLGAHAAAITAYALTLTKAPADLRGVAHNNLMAMAQETGDNLYWGSVTGSQSNAVSPTPAPRNPSDPMPQAPALWIETTAYALLHLLLHEGKAEMADQAAAWLTRQGSFQGGFRSTQDTVIALDALSAYWIASHTTEERGLNVTLSSTGRNGFKSHALQLNNRQIRGLEEELQFSLGSKINVKVGGNSKGTLKVLRTYNVLDMKNTTCQDLQIEVTVKGHVEYTMEANEDYEDYEYDELPAKDDPDAPLQPVTPLQLFEGRRNRRRREAPKVVEEQESRVHYTVCIWRNGKVGLSGMAIADVTLLSGFHALRADLEKLTSLSDRYVSHFETEGPHVLLYFDSVPTSRECVGFEAVQEVPVGLVQPASATLYDYYNPERRCSVFYGAPSKSRLLATLCSAEVCQCAEGKCPRQRRALERGLQDEDGYRMKFACYYPRVEYGFQVKVLREDSRAAFRLFETKITQVLHFTKDVKAAANQMRNFLVRASCRLRLEPGKEYLIMGLDGATYDLEGHPQYLLDSNSWIEEMPSERLCRSTRQRAACAQLNDFLQEYGTQGCQV

SEQ ID NO: 19380 - protein, 1744 aa, Artificial Sequence [sequence omitted]

SEQ ID NO: 19381 - protein, 268 aa, Artificial Sequence
  derived and/or modified sequence
MCPEDSLQVPLKDAKSCGLHQLLRGPEVQLVAHSPWLKDSLSRTTNIQGINLLFSSRRGHLFLQTDQPIYNPGQRVRYRVFALDQKMRPSTDTITVMVENSHGLRVRKKEVYMPSSIFQDDFVIPDISEPGTWKISARFSDGLESNSSTQFEVKKYVLPNFEVKITPGKPYILTVPGHLDEMQLDIQARYIYGKPVQGVAYVRFGLLDEDGKKTFFRGLESQTKLVNGQSHISLSKAEFQDALEKLNMGITDLQGLRLYVAAAIIESP

SEQ ID NO: 19382 - protein, 650 aa, Artificial Sequence
  derived and/or modified sequence
MGSQCRGWHMCALGSQQQADGSFQDLSPVIHRSMQGGLVGNDETVALTAFVTIALHHGLAVFQDEGAEPLKQRVEASISKASSFLGEKASAGLLGAHAAAITAYALTLTKAPADLRGVAHNNLMAMAQETGDNLYWGSVTGSQSNAVSPTPAPRNPSDPMPQAPALWIETTAYALLHLLLHEGKAEMADQAAAWLTRQGSFQGGFRSTQDTVIALDALSAYWIASHTTEERGLNVTLSSTGRNGFKSHALQLNNRQIRGLEEELQFSLGSKINVKVGGNSKGTLKVLRTYNVLDMKNTTCQDLQIEVTVKGHVEYTMEANEDYEDYEYDELPAKDDPDAPLQPVTPLQLFEGRRNRRRREAPKVVEEQESRVHYTVCIWRNGKVGLSGMAIADVTLLSGFHALRADLEKLTSLSDRYVSHFETEGPHVLLYFDSVPTSRECVGFEAVQEVPVGLVQPASATLYDYYNPERRCSVFYGAPSKSRLLATLCSAEVCQCAEGKCPRQRRALERGLQDEDGYRMKFACYYPRVEYGFQVKVLREDSRAAFRLFETKITQVLHFTKDVKAAANQMRNFLVRASCRLRLEPGKEYLIMGLDGATYDLEGHPQYLLDSNSWIEEMPSERLCRSTRQRAACAQLNDFLQEYGTQGCQV

SEQ ID NO: 19383 - DNA, 5235 bp, Artificial Sequence
  derived and/or modified sequence
atgagactcctgtggggtcttatttgggcatcctccttctttactctgagcctgcagaagccccgtctacttctgttctcccctagcgtggtgcatctcggcgtgcctctatccgtgggtgtgcagctccaggacgtacctagaggtcaggtggtaaagggctcagtatttctcaggaacccaagccggaacaatgtgccttgctccccaaaagtggacttcaccttgagtagtgaaagagatttcgctctgctgagcctgcaggtcccgctgaaggacgctaagtcttgtgggctgcatcaactccttcgcggacctgaagtgcagctggtggcccattcgccatggctgaaggacagcctgagcagaaccaccaatattcaggggatcaacttgctcttctcttcgaggcgcggacatctttttctgcagacagaccaacccatctataaccctggccagagagtcaggtacagagtatttgctctcgaccagaagatgaggccgtccacggacactatcaccgtgatggtggagaattctcatgggctacgggtaagaaagaaggaagtttacatgcctagctctattttccaggatgactttgtcatccccgatatttctgagcccggaacttggaagatcagtgcgcggttcagcgacggcctggagagtaattcctccacccagtttgaagtaaagaagtatgtcctgcctaactttgaggtgaagatcacgcccggaaagccgtatattcttactgtcccaggacatttagacgagatgcagctggatatccaagctaggtatatctatggcaagcccgtgcagggtgtcgcttatgtcaggttcggtctgctggatgaggatggcaagaaaacgttttttcgcggtctggagagtcagactaagttggtcaatgggcagtcccacataagtctgagcaaagctgaattccaggatgccctagagaagctgaatatgggtatcactgacttgcaaggattaagactatatgtggccgccgccatcatagaatctcccggcggtgaaatggaggaggccgagctgaccagctggtacttcgtaagttccccattctccttagacctctccaagacgaaacgccatctggtaccaggtgctccattcctcttgcaggcccttgtccgggaaatgagtggaagcccagcctccgggattcccgtgaaggtttcagctacggtgtccagccccggttccgtgcccgaggtccaggatatccaacaaaatacagacggcagtggacaggtgtcaattcccattatcatacctcaaacaatctctgaacttcaattgtccgtgtctgcaggctcacctcaccctgctatcgcgcgcttgacggtggctgcaccaccctccggaggtcctgggttcctcagtatcgagcggcctgatagccgacctccacgcgtgggcgatacacttaatctaaatcttagagctgtgggatcaggcgccacattctctcactactactacatgatcttgtcccgcggccagatcgtattcatgaatagggaaccgaagcggacacttacaagcgtctcggtctttgtcgaccaccatctggctccttctttttactttgtggcattctattatcacggcgaccacccagttgcaaactccttgcgagtggatgtccaggcaggggcctgcgaggggaaactggagctgtccgtggatggggctaaacagtatagaaacggggagagtgtgaagctgcatttagaaacagactctctggccctggtcgccctgggggcactagacacagccttgtacgctgcaggctccaaaagtcacaagcccctcaatatggggaaagtgttcgaagccatgaattcctatgacctcggatgcgggcccggtggtggggattccgccctccaggtgttccaagccgccggccttgctttctcagatggagaccagtggactttgtctcgaaaaaggctttcctgtccaaaagagaagaccacacgcaaaaaacgtaatgttaacttccaaaaggctatcaacgagaagttggggcagtatgcaagccccacagccaaaagatgttgccaagatggcgtaactagactccccatgatgcgcagttgtgagcagcgtgctgccagggtgcagcagcccgattgtcgcgaaccatttttgtcctgttgtcagtttgccgaatcgctgcgaaagaagtcgagggacaaaggacaagcgggcctccagcgtgcactggagatcttgcaagaggaggatttgatagacgaagacgatatccccgtccggtcattctttcccgaaaactggttgtggcgtgtggagaccgtggatcgctttcagatccttactctgtggctgcctgatagcctaacaacctgggaaatccacggcttgagcctttctaagaccaaaggcctgtgcgttgccacccctgtccagctgagagtgttccgtgaattccacctccacttgcgcctaccaatgtccgtgaggaggttcgaacagctggaattgaggccagtactctacaactacctggataagaatctgacggtgtcggtgcacgtctctccagttgagggactctgcctggctggcggcggcggcctggcccagcaggtgctggtgcccgctggatctgcccgccccgtggccttctccgtggtcccaaccgccgcaactgccgtttcattaaaagtggtagcccgcggtagttttgagttccccgtgggggatgccgtctcgaaagtcctgcagattgagaaggagggagcgatccatagggaggagttggtttatgaattaaatccattggaccaccgcggtagaactctggagatcccaggaaactcagaccctaacatgatcccagatggggactttaatagctatgtgcgcgtgacagcttcagaccctctagacacactcggaagcgagggcgcactttctcccggaggcgtggcatctcttctccgactcccacgcgggtgcggcgaacagacgatgatctacctggcacctactctcgcagcctctagatacctggataagactgaacagtggagcacattgccacctgagactaaggatcacgcggtggacctgatccagaaaggttacatgcgcatacaacagttcaggaaagccgatggatcttatgcggcttggctgtcgcggggaagttccacgtggctaaccgctttcgttctcaaagtgctgtccctggcccaggaacaggtaggaggaagtcccgaaaagttgcaggagacaagcaactggctcctctcccagcaacaggccgatggctccttccaggacttatctcccgtgattcaccgatcaatgcagggggggctggttggaaacgatgagaccgtggcactcacagcctttgtcacaatcgctctgcaccacggccttgcagtgtttcaggacgagggggcagagcctctcaaacagcgcgttgaggcctcgatctctaaggcgtccagtttcctgggcgagaaagcatccgccggactgttgggggcccacgcggcagccatcaccgcgtacgctctgacgttgactaaggcacctgccgatctccgcggcgttgcccataacaacttaatggccatggcccaggagaccggcgataatctgtactgggggtcggtcactggctcccagagcaacgccgtttcccccacacccgctcctagaaatccctctgatcctatgcctcaggccccagccttgtggatagagactaccgcttatgcccttctgcacctactgttacacgaaggcaaggctgaaatggctgatcaagcagctgcatggcttacacgacagggtagttttcagggcgggttccgcagtactcaggataccgtcattgccctggatgccctgtccgcatattggatcgccagccatactacagaggaaaggggactcaatgttactttatcaagcaccgggcgcaacggcttcaagagccacgctctgcagctgaacaatcgacagataagaggattggaggaagagttgcagttctctcttgggagcaaaattaacgtgaaagtgggaggcaatagcaaaggcaccttaaaagtgttgcgtacctacaacgttctcgacatgaagaacacaacgtgtcaggatctgcagattgaggttaccgtcaaaggccatgtcgagtatacaatggaggcaaacgaagattacgaagactacgaatatgatgagttgccagcaaaagacgaccccgacgcgcccctgcaacccgttactccactgcaactttttgaaggcaggcggaatcgccgccggagggaagcacctaaggttgtggaggagcaggaatccagggttcactataccgtgtgcatctggaggaacgggaaagtcggactctcaggcatggccatcgcagatgtgaccctgctgagtgggtttcacgcgcttagggccgatttggaaaagttaacatctctgtcagaccgctacgtctcccattttgagaccgaggggcctcacgttctgctgtacttcgacagcgtaccgacatcccgtgagtgtgtcggtttcgaggccgtgcaggaagtacctgtgggcctcgttcaacccgccagcgccaccttgtatgattattacaaccctgagcgccgatgttcagtcttttatggcgctccttctaagtcccgactgttggccacgctttgttcagcagaggtatgccagtgtgcagaggggaagtgtccccgccaaaggagggcccttgaaaggggccttcaggacgaggacggctaccggatgaagttcgcatgctactacccccgagtggagtacggtttccaagtgaaggtgctccgggaagatagcagagcagcgttccggttgtttgagaccaagatcactcaggtgctccactttactaaggatgttaaagccgccgccaatcagatgagaaattttctcgtgcgcgcatcctgtagactgagattagaaccaggaaaggagtacttgatcatgggactcgacggagctacatacgacctagaaggccatcctcagtatcttctggactccaactcatggatcgaggaaatgccttcggagcgcctgtgccggtcaactagacagcgcgccgcatgcgcacaactaaatgactttttgcaagaatacggcacccaaggatgtcaggtttag

SEQ ID NO: 19384 - DNA, 5235 bp, Artificial Sequence
  derived and/or modified sequence
atgcggctattatggggcctgatttgggccagttcatttttcacactgagcttacagaagccgaggctgcttttgttctctccatctgtggtgcatctgggggtgccactgagcgtaggggtccagctgcaggatgtaccaagaggccaggtggttaaggggagcgtattcctgaggaacccttctcggaataatgtgccctgcagtcccaaggtggacttcacactgagcagtgaaagggacttcgcgcttctgtcgctgcaggtgcctttaaaagatgccaagagctgcggcctccaccagctcctacgcggtcctgaagttcagctggtggctcacagcccgtggctaaaagatagcctctccaggactaccaacattcagggcatcaacctcttgttcagttctcggagagggcacctctttctgcagaccgatcagcctatatacaaccctggtcagagagtgcgctacagagtgtttgcccttgaccaaaaaatgcgccccagcaccgacacaattaccgtgatggtggaaaacagccacggcctgcgggtgaggaagaaggaagtctacatgcctagttccattttccaagacgactttgtcatccctgatataagcgaaccgggcacttggaagatctcagctcggttctcagatgggctggagagtaactcctcgacccaatttgaagttaagaaatatgtgcttcccaactttgaggtaaagatcactcctggaaagccatacattcttacagtgccgggccatctcgacgaaatgcagctggacatccaagctcgctatatctatggaaaacccgtccagggcgtcgcttatgtgaggtttggattactcgatgaagacggcaaaaaaaccttcttcaggggcctcgagtcgcagacgaaactggtgaatggacagagccacatatccctgtccaaggctgaattccaggatgctttagagaagttgaatatgggtattactgatctccagggtctgaggctttacgtggccgcggctataatcgagtctccaggcggtgaaatggaagaggccgaacttacaagttggtatttcgtcagcagcccttttagcctggacttatccaaaaccaagagacacctggtgcctggtgcaccttttcttctacaggccctcgtgagagagatgtccggttcccccgcttcggggattccagttaaggtgtccgcaactgtaagctcgcccggatctgttcctgaagtgcaggacatacagcagaataccgacgggtcagggcaggtaagtatccccatcatcatcccgcagactatctccgagcttcaactatcagtgtcagcaggcagcccccaccctgctattgcccgccttaccgtggccgcacccccaagtggtggaccaggcttcctgtcaatcgagaggcctgatagcagaccaccccgcgtcggggatacgttaaatctcaacctccgagccgttggatccggggccactttctcccattactactatatgattctatcccggggccagattgtattcatgaaccgggagccaaagagaacacttacgtctgtatcagtgttcgtggaccaccacttagctccttcattctactttgtggcattttactatcatggagatcacccagtagcgaattccttaagggtcgacgtgcaagcaggagcctgtgaagggaagctggagttatctgttgatggagccaagcaataccgtaatggagaatcagtgaagctccacctcgagactgatagcctggctctcgttgctctgggggccctggacaccgccctgtacgccgccggctcaaaatcacacaagcctttgaatatgggaaaggttttcgaagcaatgaatagctacgatctcggctgcggcccaggaggaggtgactcggctcttcaggtgtttcaggccgccggactcgctttcagcgacggagatcagtggaccttgtcccgaaagagattgtcatgtcctaaagagaaaacaaccagaaaaaagaggaacgtgaacttccagaaggcaatcaatgaaaaactgggccagtacgcatcacctaccgctaagcgttgttgccaggacggagttaccagacttccgatgatgaggtcctgtgaacaaagagcagctcgtgtgcagcagcccgattgccgcgagccctttttaagttgctgccagttcgccgagagccttcgaaagaaaagccgagacaagggtcaagctggtttgcagcgggctctggagatcctgcaggaggaggatctaatcgatgaagatgatataccagttcgaagctttttcccagagaattggctgtggcgggtagaaacagttgatcggttccagattctgaccctgtggctgccagattccttgaccacctgggagattcatggactgtccctaagcaagaccaaaggcttgtgcgtggcaacaccggtgcaactgagggtgttccgggaattccatctgcacctgcgactgccaatgagcgtgcggcgattcgagcagctcgaactccgccctgtgctgtataattacctggacaagaatttgactgtcagcgtccatgtatccccagtggaggggttgtgcttggcgggcggaggcgggctggcgcagcaggtcttagtgccagccgggtctgcacgcccagttgctttcagcgtcgtgcctaccgctgctacggcagttagtctgaaggttgtcgctagaggcagctttgaatttcctgtgggtgatgcggttagtaaagtactgcaaattgaaaaggagggagcaatacatagagaggagctcgtttacgagctcaacccactagaccacagggggcgcaccttggagatccccgggaatagcgatcctaatatgatccctgatggagatttcaactcttacgtcagggtgacagcatccgatcctcttgacacactgggatctgaaggcgctctaagccctgggggagttgcttccttactcagactccccaggggctgtggcgaacagacaatgatatacctggccccaaccctggctgcctcccggtacttggataagaccgaacagtggtccacactcccccccgagaccaaggaccatgccgtagatctgatccaaaaaggctatatgaggatacagcagttccgcaaggccgacggctcttatgcagcttggctaagtagaggttcctcaacttggctgacagcttttgtcttgaaagtccttagcctggcccaagagcaagtcgggggctctccagagaagcttcaagaaactagcaactggctgctgtcccagcaacaggccgatggttcttttcaggaccttagccccgtcattcaccggtccatgcaaggcggccttgtcggcaatgacgagacagtcgcgcttacagccttcgtgactattgcgttgcatcatgggctggccgtcttccaggacgagggggccgagccattaaaacaacgcgtcgaagcctcaatcagtaaggcgtcaagtttccttggagagaaagcctcggctggcctgctcggcgctcatgcagcagcgatcactgcctatgccctgaccctgactaaagctcctgcagacttgcgtggggtcgcccacaataatctgatggctatggcccaggagacgggtgacaacctatattggggatcagtgacaggaagtcagtcaaacgcggtgtctccgacgcccgccccgaggaatcccagtgatcccatgccccaagcccccgccctctggatagagaccaccgcatacgccttgcttcacctcctgctccacgaagggaaagccgaaatggcagaccaggccgcggcctggctaacgagacagggaagctttcagggcgggttcagaagcactcaggacaccgtcatcgcgttagatgccctgagcgcctactggatcgccagccacacaactgaagaacgaggcctgaacgttacacttagttcaactggccgtaacggctttaagagccacgctctgcagctcaataaccgacagatccgaggactggaggaagaactgcagttctcactggggtctaagattaacgtgaaggtgggagggaactctaaagggacccttaaagtgcttagaacatacaatgtgcttgacatgaagaacacaacgtgtcaggacctgcagatagaagtaaccgtcaaaggccacgtggaatacacaatggaggctaacgaggattacgaggattacgaatacgatgagttgcccgcgaaggatgaccccgacgcacccctccagcctgtgacacctctgcagctcttcgaaggcagacgcaacaggagaagaagagaagcccccaaggttgtggaagaacaagaatcccgagtacactatacagtgtgcatttggcgcaatggcaaagttggcctctcagggatggccatcgcagacgttacccttctgtccggatttcacgccctcagggccgacctggagaaattaaccagcctcagtgaccggtatgtatcccacttcgaaaccgaaggaccccacgtgttattatactttgactccgtcccgacctctagggaatgcgtaggtttcgaggccgtgcaagaggtacccgtgggcttggtacaaccggctagcgccaccctatatgattattataatcctgagaggcgatgctccgtgttttatggcgctccttccaagtctcggcttctcgctacactgtgctcggctgaagtttgccagtgtgctgagggcaagtgtccgagacagcgcagggccctcgaacgcggactgcaggacgaggatggataccgtatgaagtttgcctgttattatcctagggtggaatacgggtttcaggttaaggtgctgcgggaagactcccgagctgcattccgattgttcgagaccaagatcacacaggtgctccacttcaccaaggacgtgaaagccgctgcgaatcagatgaggaatttcctcgtgcgggcctcctgtaggctccggcttgaaccaggtaaggaatacttgattatgggtcttgacggagctacctatgacctggaagggcacccacagtacctcctcgatagtaacagttggatcgaggagatgccttccgagagactgtgcaggtcaacacgtcagagggccgcctgtgctcagctgaatgattttctccaggagtatggcacccagggctgccaggtgtag

SEQ ID NO: 19385 - DNA, 5235 bp, Artificial Sequence
  derived and/or modified sequence
atgaggttgctgtggggactcatctgggcttcatcatttttcactctgtctcttcagaagcccaggctcttgctcttcagcccatccgtggtgcacctgggcgtccctttgtctgtaggagtacagctgcaggatgtgcccagggggcaggtcgtcaaggggtctgtgtttctgcgcaacccgagccgaaataatgtgccttgctccccaaaggttgattttacgctcagttccgagcgggatttcgctctcctgagcttgcaggtgcccctgaaagacgcaaagtcttgcggtttacaccagctgctgagaggcccggaggtccaactagttgctcattcaccatggttgaaagactcccttagccgcacgacaaacatccaggggatcaatctgctgttcagttcccgcaggggccatctgtttctccagacagatcagcctatctacaacccaggacagagggtgcggtacagggtgttcgctctggaccagaaaatgagaccttccaccgataccataaccgtgatggtggagaattctcatggtctgagagtccgcaaaaaggaagtgtacatgcctagcagcatctttcaagacgacttcgtgatccctgatatatcggaacccgggacatggaaaatatccgccaggttctctgacgggctggagtcaaattcatctacacagtttgaggtcaaaaaatacgttttgcccaattttgaagtgaagatcacgccggggaaaccttacatacttactgtgcctggccatctcgatgagatgcaactggacatacaggcacggtacatctatggtaagccagtgcagggcgttgcctatgtgcgctttggtctacttgatgaagatggtaaaaaaactttcttcaggggcctcgaatcgcagaccaagttggttaacggacagtcccatataagtctgagtaaggccgagttccaggacgcattggagaagctgaacatgggcattacggacttgcagggccttagattgtacgtggcagcagccattatcgagagcccaggcggggagatggaagaggcggaactcacgagttggtactttgtgtcaagtcctttcagcctggatttaagtaagactaagaggcacctggttccaggcgcgcctttcctgctacaagcattggtacgggaaatgagtggatcacctgccagtggcatccccgtcaaagtctccgctacagtctcctcaccaggctctgttcccgaggtccaagacatccaacagaatacggatgggagtgggcaggtgtccattcccattatcatccctcagactatatccgaactgcagctgtcggtgagcgcagggagcccacaccccgcaatagctagactgacagtcgctgcccctccatccggaggacccggcttcctgtccatagaacgacccgattccagaccccccagggtgggcgatactctgaatcttaaccttagggctgtgggctccggagccaccttcagccactattattatatgatcttgagccggggtcagattgtatttatgaatcgtgagccgaagcgaaccctcacctccgtctccgttttcgtcgatcaccacctggccccatctttctatttcgttgctttctattaccatggtgatcaccctgtcgctaatagtttgcgagtggacgtgcaggcaggggcctgtgaaggaaagctggagctctccgtcgatggagctaaacaataccgcaatggcgagtccgtcaaactgcatctagagaccgattctcttgccctcgtcgctcttggggcactggacacagcactgtatgccgctggctctaaaagccacaagcccctcaatatgggtaaggttttcgaagccatgaatagctatgatctaggctgtgggccgggcggcggagactcagctctgcaagtctttcaggcagctggcctggctttcagtgacggggatcagtggacgctgtcaaggaaacgcctgtcgtgtccaaaggagaagacaacccgcaagaagcgaaatgtcaattttcaaaaagccattaatgagaagctaggccagtacgcctcaccaacggcaaagcgctgctgccaggacggggtcacacgattacctatgatgcggtcgtgcgagcaacgagccgctagagttcagcagcccgattgtcgagagcctttcctgtcctgttgccagtttgccgagagcctacgtaaaaagtcgagggataagggacaggccggcctgcagagggctctagagattctccaggaagaagacctgatcgatgaggatgatattccggtacggagctttttcccggaaaattggctgtggcgagtggagacagtggatcgcttccagatcctcaccttatggcttccggacagcctgaccacttgggagatccacgggctgtcactcagcaagaccaaaggcctatgcgtggctacgcccgtgcaactgagagtattcagagagttccatctgcacctaagactaccgatgtccgtcagaaggttcgagcagcttgagttaagaccagtgttgtacaattatctcgacaaaaacctgacagtcagcgtgcacgtgtctcccgtggagggtctgtgtcttgccggaggcggcggtctggcccagcaggtgctggtgcccgctgggtccgctcggccagtggcttttagcgttgtgccaacagctgccgctgccgttagcctgaaggtcgtagcccgtggcagcttcgagttccctgtgggggatgccgtgtccaaggtgctccagattgagaaggagggagcaattcatagagaggagttggtatatgaactgaaccccctggatcacagggggagaactctggagatccccggaaacagtgaccccaacatgattcccgacggcgatttcaattcctacgtgcgggtcacggcatccgatcccctggacactctaggatcagagggcgcgctgtcccccggaggcgtggccagtctgctccgactgcccaggggttgcggcgaacaaaccatgatttatttggctcccacgcttgccgcttcacgctatttggacaagactgagcagtggtccaccctgcctcctgaaaccaaggatcatgctgtggatctgatccagaaggggtacatgcgcattcagcagttccgcaaagctgacgggtcttacgccgcatggctgtcgcgtgggagctcaacttggcttaccgccttcgtgctgaaggtgctatcattggcccaagagcaggtgggtggctcacctgagaagctccaggaaaccagcaactggttattgtctcagcagcaggctgatggatcatttcaagatctctcacctgtcatccacaggagtatgcagggggggctggtgggcaacgacgaaaccgtggcgttgactgccttcgtgactatcgcactgcaccacggcctggctgtgtttcaggatgaaggcgctgagccattgaaacagcgcgttgaggcatccatcagcaaggctaactcattcctgggagaaaaggcttcagccggtctgctcggcgctcacgctgctgctatcaccgcatatgctctgacactcacgaaggcccccgcagatctacggggggtagcccataacaatctgatggctatggcccaggagaccggtgacaatctttactggggatccgtgactgggtcccagagcaatgcggtcagccctactcctgcccctaggaatccgtcggacccaatgccgcaagcccctgcactttggatcgagaccaccgcctatgccctgctccacttattactgcatgaagggaaggccgaaatggcggatcaggccgctgcctggcttaccaggcaggggtcgtttcagggtggatttagatccacgcaggatacagtgatagcactggatgctctgagcgcctattggattgccagccacactacggaggaaagaggcctcaatgtgactctatcttctaccggaaggaacggctttaagagtcacgcactccagctcaacaataggcagatcagaggcttagaagaagagctccagttctcgttaggctcaaagattaatgtaaaagtcggcggtaattccaagggcaccctgaaggtattgagaacctataatgtgttggatatgaagaacacaacgtgccaggaccttcagatcgaggttacagtgaagggccacgtggaatataccatggaggcaaacgaagactatgaggactacgagtacgatgaactccctgccaaagatgacccagacgcccccctacagccggttactccactgcagctgtttgaaggaaggcgaaacaggcgaaggcgggaggctcctaaggtggtggaggagcaagaatctcgcgtccactacactgtgtgcatctggcggaatggtaaggtggggctgagtgggatggcgatcgccgatgttacccttctgagcggtttccacgccctcagagcggaccttgaaaagttgacctctctgagcgaccgctatgtgtcccactttgaaactgaggggccacatgtcttgctctatttcgactctgtccctacatcccgcgagtgtgtcggctttgaggctgttcaggaggtgccggtggggttggtgcagcctgccagcgcaacactgtatgactactacaaccctgagcgccgctgctcggtcttttacggcgcgccttccaagtctagattgctggcaaccctgtgttctgcagaagtttgccaatgcgctgaaggcaaatgtccacgccagcggagggctctcgaaaggggcctgcaagatgaagacggataccgcatgaaattcgcgtgttactacccgcgggtagaatatggtttccaagtcaaagtgctgagagaggattctcgggctgccttccgactctttgagactaagattactcaagttctgcatttcacaaaagacgtgaaagccgccgcgaaccaaatgaggaactttctcgttcgggccagttgccgcctcagactcgaacccggaaaggagtacctcattatgggactggacggcgctacctacgacttggaaggtcatccgcagtacctcttggatagcaactcgtggattgaggaaatgccatcagaacgactatgccggtctacacggcagcgtgcagcatgtgcgcagctgaacgattttctgcaggagtatggcacccaggggtgtcaggtgtag

SEQ ID NO: 19386 - DNA, 5235 bp, Artificial Sequence
  derived and/or modified sequence
atgaggctgctgtggggcctcatctgggccagcagcttcttcaccctgagcctgcagaagccccggctgctgctcttcagccccagcgtggtgcacctgggcgtgcccctgtctgtgggcgtgcagctgcaggatgtgccccggggccaggtggtgaagggctctgtgttcctgaggaaccccagcagaaataatgtgccctgcagccccaaggtggacttcaccctgagcagcgagcgggactttgccctgctgagcctgcaggtgcccctgaaggatgccaagagctgtggcctgcaccagctgctgcggggccctgaggtgcagctggtggcccacagcccctggctgaaggacagcctgagcaggaccaccaacatccagggcatcaacctgctcttcagcagcagaagaggccacctgttcctgcagacagaccagcccatctacaaccctggccagagggtgcgctacagagtgtttgccctggaccagaagatgaggcccagcacagacaccatcaccgtgatggtggagaacagccacggcctgcgggtgaggaagaaggaggtgtacatgcccagcagcatcttccaggatgactttgtgatcccagacatcagcgagcccggcacctggaagatcagcgcccgcttcagtgatggcctggagagcaacagcagcacccagtttgaggtgaagaagtatgtgctgcccaactttgaggtgaagatcaccccaggcaagccctacatcctgactgtgcccggccacctggatgagatgcagctggacatccaggcccgctacatctacggcaagcctgtgcagggcgtggcctacgtgcgcttcggcctgctggatgaagatggcaagaagaccttcttccggggcctggagagccagaccaagctggtgaatggccagagccacatcagcctgagcaaggccgagttccaggatgccctggagaagctgaacatgggcatcacagacctgcagggcctgcggctgtatgtggccgccgccatcatcgagagccctggaggagagatggaggaggccgagctgacctcctggtactttgtgagcagccccttcagcctggacctgagcaagaccaagaggcacctggtgcctggggcccccttcctgctgcaggccctggtgcgggagatgagcggcagccctgccagcggcatccctgtgaaggtgtctgccaccgtgagcagccctggctctgtgcctgaggtgcaggacatccagcagaacacagatggcagcggccaggtgtccatccccatcatcatcccccagaccatcagcgagctgcagctgtctgtgtctgctggcagcccccacccagccatcgcccggctgactgtggccgcccctccttctgggggccctggcttcctgagcattgaaagaccagacagccggcccccccgggtgggggacaccctgaacctgaacctgcgggctgtgggcagcggggccaccttcagccactactactacatgatcctgagccggggccagatcgtgttcatgaaccgggagcccaagaggaccctgacctctgtgtctgtgtttgtggaccaccacctggcccccagcttctactttgtggccttctactaccatggagaccaccctgtggccaacagcctgcgggtggatgtgcaggccggggcctgtgagggcaagctggagctgtctgtggatggagccaagcagtacagaaatggagagagcgtgaagctgcacctggagacagacagcctggccctggtggccctgggcgccctggacacagccctgtatgctgctggcagcaagagccacaagcccctgaacatgggcaaggtgtttgaggccatgaacagctatgacctgggctgcggccctgggggcggggacagcgccctgcaggtgttccaggccgccggcctggccttcagtgatggagaccagtggaccctgagcaggaagaggctgagctgccccaaggagaagaccaccaggaagaagagaaatgtgaacttccagaaggccatcaatgagaagctgggccagtatgccagccccacagccaagcgctgctgccaggatggagtgacccggctgcccatgatgaggagctgtgagcagagagctgcccgggtgcagcagcctgactgccgggagcccttcctgagctgctgccagtttgctgagagcctgaggaagaagagccgggacaagggccaggccggcctgcagagggccctggagatcctgcaggaggaggacctgattgatgaagatgacatccctgtgcgctccttcttccctgagaactggctgtggagggtggagaccgtggaccgcttccagatcctgaccctgtggctgcctgacagcctgaccacctgggagatccacggcctgagcctgagcaagaccaagggcctgtgtgtggccacccctgtgcagctgcgggtcttccgggagttccacctgcacctgcggctgcccatgtctgtgagaagatttgagcagctggagctgcggcctgtgctgtacaactacctggacaagaacctgactgtgtctgtgcacgtgtcccctgtggagggcctgtgcctggccggcggcggcggcctggcccagcaggtgctggtgcctgctggcagcgcccggcctgtggccttctctgtggtgcccacagctgccacagctgtgtccctgaaggtggtggcccggggcagctttgagttccctgtgggagatgctgtgtccaaggtgctgcagatcgagaaggagggcgccatccaccgggaggagctggtgtatgagctgaaccccctggaccaccggggccgcaccctggagatccctggcaacagcgaccccaacatgatcccagatggagacttcaacagctatgtgcgggtgacagccagtgaccccctggacaccctgggcagcgagggcgccctgagccctggaggagtggccagcctgctgcggctgccccggggctgtggggagcagaccatgatctacctggcccccaccctggccgccagccgctacctggacaagacagagcagtggagcaccctgcccccagagaccaaggaccatgctgtggacctgatccagaagggctacatgaggatccagcagttcaggaaggcagatggcagctatgctgcctggctgagccggggcagcagcacctggctgacagcctttgtgctgaaggtgctgagcctggcccaggagcaggtgggcggcagccctgagaagctgcaggagaccagcaactggctgctgagccagcagcaggctgatggcagcttccaggacctgagccctgtgatccaccgctccatgcagggcggcctggtgggcaatgatgagaccgtggccctgacagcctttgtgaccatcgccctgcaccacggcctggccgtgttccaggatgagggcgctgagcccctgaagcagagggtggaggccagcatcagcaaggccagcagcttcctgggggagaaggccagcgctggcctgctgggcgcccacgccgccgccatcacagcctatgccctgaccctgaccaaggccccagctgacctgcggggcgtggcccacaacaacctgatggccatggcccaggagaccggggacaacctgtactggggctctgtgacaggcagccagagcaatgctgtgagccccaccccagcccccaggaaccccagcgaccccatgccccaggccccagccctgtggattgagaccacagcctatgccctgctgcacctgctgctgcacgagggcaaggccgagatggctgaccaggccgccgcctggctgacccggcagggcagcttccagggcggcttccgcagcacccaggacacagtgattgccctggatgccctgagcgcctactggatcgccagccacaccacagaggagcggggcctgaatgtgaccctgagcagcactggaagaaatggcttcaagagccacgccctgcagctgaacaaccggcagatccggggcctggaggaggagctgcagttcagcctgggcagcaagatcaacgtgaaggtgggcggcaacagcaagggcaccctgaaggtgctgcggacctacaacgtgctggacatgaagaacaccacctgccaggacctgcagatcgaggtgacagtgaagggccacgtggagtacaccatggaggccaatgaagattatgaggactatgaatatgatgagctgcctgccaaggatgatcctgatgcccccctgcagcctgtgacccccctgcagctgtttgagggcagaagaaacagaagaagaagagaggcccccaaggtggtggaggagcaggagagccgggtgcactacacagtgtgcatctggagaaatggcaaggtgggcctgagcggcatggccatcgcagatgtgaccctgctgagcggcttccacgccctgcgggctgacctggagaagctgaccagcctgagtgacagatatgtgagccactttgaaacagagggcccccacgtgctgctgtactttgacagcgtgcccaccagccgggagtgtgtgggctttgaggccgtgcaggaggtgcctgtgggcctggtgcagcctgccagcgccaccctgtatgactactacaaccctgagcggcgctgcagcgtcttctacggggcccccagcaagagccggctgctggccaccctgtgcagcgctgaggtgtgccagtgtgccgagggcaagtgcccccggcagaggcgggccctggagcggggcctgcaggatgaagatggctacaggatgaagtttgcctgctactacccccgggtggagtatggcttccaggtgaaggtgctgcgggaggacagccgggccgccttccggctgtttgagaccaagatcacccaggtgctgcacttcaccaaggatgtgaaggccgccgccaaccagatgaggaacttcctggtgcgggccagctgccgcctgcggctggagcccgggaaggagtacctgatcatgggcctggatggagccacctatgacctggagggccacccccagtacctgctggacagcaacagctggattgaggagatgcccagcgagcggctgtgccgcagcacccggcagagagctgcctgtgcccagctgaatgacttcctgcaggagtatggcacccagggctgccaggtgtag

SEQ ID NO: 19387 - DNA, 5235 bp, Artificial Sequence
  derived and/or modified sequence
atgaggctgctgtggggcctcatctgggccagcagcttcttcaccctgagcctgcagaagccccggctgctgctcttcagccccagcgtggtgcacctgggcgtgcccctgtctgtgggcgtgcagctgcaggatgtgccccggggccaggtggtgaagggctctgtgttcctgaggaaccccagcagaaataatgtgccctgcagccccaaggtggacttcaccctgagcagcgagcgggactttgccctgctgagcctgcaggtgcccctgaaggatgccaagagctgtggcctgcaccagctgctgcggggccctgaggtgcagctggtggcccacagcccctggctgaaggacagcctgagcaggaccaccaacatccagggcatcaacctgctcttcagcagcagaagaggccacctgttcctgcagacagaccagcccatctacaaccctggccagagggtgcgctacagagtgtttgccctggaccagaagatgaggcccagcacagacaccatcaccgtgatggtggagaacagccacggcctgcgggtgaggaagaaggaggtgtacatgcccagcagcatcttccaggatgactttgtgatcccagacatcagcgagcccggcacctggaagatcagcgcccgcttcagtgatggcctggagagcaacagcagcacccagtttgaggtgaagaagtatgtgctgcccaactttgaggtgaagatcaccccaggcaagccctacatcctgactgtgcccggccacctggatgagatgcagctggacatccaggcccgctacatctacggcaagcctgtgcagggcgtggcctacgtgcgcttcggcctgctggatgaagatggcaagaagaccttcttccggggcctggagagccagaccaagctggtgaatggccagagccacatcagcctgagcaaggccgagttccaggatgccctggagaagctgaacatgggcatcacagacctgcagggcctgcggctgtatgtggccgccgccatcatcgagagccctggaggagagatggaggaggccgagctgacctcctggtactttgtgagcagccccttcagcctggacctgagcaagaccaagaggcacctggtgcctggggcccccttcctgctgcaggccctggtgcgggagatgagcggcagccctgccagcggcatccctgtgaaggtgtctgccaccgtgagcagccctggctctgtgcctgaggtgcaggacatccagcagaacacagatggcagcggccaggtgtccatccccatcatcatcccccagaccatcagcgagctgcagctgtctgtgtctgctggcagcccccacccagccatcgcccggctgactgtggccgcccctccttctgggggccctggcttcctgagcattgaaagaccagacagccggcccccccgggtgggggacaccctgaacctgaacctgcgggctgtgggcagcggggccaccttcagccactactactacatgatcctgagccggggccagatcgtgttcatgaaccgggagcccaagaggaccctgacctctgtgtctgtgtttgtggaccaccacctggcccccagcttctactttgtggccttctactaccatggagaccaccctgtggccaacagcctgcgggtggatgtgcaggccggggcctgtgagggcaagctggagctgtctgtggatggagccaagcagtacagaaatggagagagcgtgaagctgcacctggagacagacagcctggccctggtggccctgggcgccctggacacagccctgtatgctgctggcagcaagagccacaagcccctgaacatgggcaaggtgtttgaggccatgaacagctatgacctgggctgcggccctgggggcggggacagcgccctgcaggtgttccaggccgccggcctggccttcagtgatggagaccagtggaccctgagcaggaagaggctgagctgccccaaggagaagaccaccaggaagaagagaaatgtgaacttccagaaggccatcaatgagaagctgggccagtatgccagccccacagccaagcgctgctgccaggatggagtgacccggctgcccatgatgaggagctgtgagcagagagctgcccgggtgcagcagcctgactgccgggagcccttcctgagctgctgccagtttgctgagagcctgaggaagaagagccgggacaagggccaggccggcctgcagagggccctggagatcctgcaggaggaggacctgattgatgaagatgacatccctgtgcgctccttcttccctgagaactggctgtggagggtggagaccgtggaccgcttccagatcctgaccctgtggctgcctgacagcctgaccacctgggagatccacggcctgagcctgagcaagaccaagggcctgtgtgtggccacccctgtgcagctgcgggtcttccgggagttccacctgcacctgcggctgcccatgtctgtgagaagatttgagcagctggagctgcggcctgtgctgtacaactacctggacaagaacctgactgtgtctgtgcacgtgtcccctgtggagggcctgtgcctggccggcggcggcggcctggcccagcaggtgctggtgcctgctggcagcgcccggcctgtggccttctctgtggtgcccacagctgctgctgctgtgtccctgaaggtggtggcccggggcagctttgagttccctgtgggagatgctgtgtccaaggtgctgcagatcgagaaggagggcgccatccaccgggaggagctggtgtatgagctgaaccccctggaccaccggggccgcaccctggagatccctggcaacagcgaccccaacatgatcccagatggagacttcaacagctatgtgcgggtgacagccagtgaccccctggacaccctgggcagcgagggcgccctgagccctggaggagtggccagcctgctgcggctgccccggggctgtggggagcagaccatgatctacctggcccccaccctggccgccagccgctacctggacaagacagagcagtggagcaccctgcccccagagaccaaggaccatgctgtggacctgatccagaagggctacatgaggatccagcagttcaggaaggcagatggcagctatgctgcctggctgagccggggcagcagcacctggctgacagcctttgtgctgaaggtgctgagcctggcccaggagcaggtgggcggcagccctgagaagctgcaggagaccagcaactggctgctgagccagcagcaggctgatggcagcttccaggacctgagccctgtgatccaccgctccatgcagggcggcctggtgggcaatgatgagaccgtggccctgacagcctttgtgaccatcgccctgcaccacggcctggccgtgttccaggatgagggcgctgagcccctgaagcagagggtggaggccagcatcagcaaggccaacagcttcctgggggagaaggccagcgctggcctgctgggcgcccacgccgccgccatcacagcctatgccctgaccctgaccaaggccccagctgacctgcggggcgtggcccacaacaacctgatggccatggcccaggagaccggggacaacctgtactggggctctgtgacaggcagccagagcaatgctgtgagccccaccccagcccccaggaaccccagcgaccccatgccccaggccccagccctgtggattgagaccacagcctatgccctgctgcacctgctgctgcacgagggcaaggccgagatggctgaccaggccgccgcctggctgacccggcagggcagcttccagggcggcttccgcagcacccaggacacagtgattgccctggatgccctgagcgcctactggatcgccagccacaccacagaggagcggggcctgaatgtgaccctgagcagcactggaagaaatggcttcaagagccacgccctgcagctgaacaaccggcagatccggggcctggaggaggagctgcagttcagcctgggcagcaagatcaacgtgaaggtgggcggcaacagcaagggcaccctgaaggtgctgcggacctacaacgtgctggacatgaagaacaccacctgccaggacctgcagatcgaggtgacagtgaagggccacgtggagtacaccatggaggccaatgaagattatgaggactatgaatatgatgagctgcctgccaaggatgatcctgatgcccccctgcagcctgtgacccccctgcagctgtttgagggcagaagaaacagaagaagaagagaggcccccaaggtggtggaggagcaggagagccgggtgcactacacagtgtgcatctggagaaatggcaaggtgggcctgagcggcatggccatcgcagatgtgaccctgctgagcggcttccacgccctgcgggctgacctggagaagctgaccagcctgagtgacagatatgtgagccactttgaaacagagggcccccacgtgctgctgtactttgacagcgtgcccaccagccgggagtgtgtgggctttgaggccgtgcaggaggtgcctgtgggcctggtgcagcctgccagcgccaccctgtatgactactacaaccctgagcggcgctgcagcgtcttctacggggcccccagcaagagccggctgctggccaccctgtgcagcgctgaggtgtgccagtgtgccgagggcaagtgcccccggcagaggcgggccctggagcggggcctgcaggatgaagatggctacaggatgaagtttgcctgctactacccccgggtggagtatggcttccaggtgaaggtgctgcgggaggacagccgggccgccttccggctgtttgagaccaagatcacccaggtgctgcacttcaccaaggatgtgaaggccgccgccaaccagatgaggaacttcctggtgcgggccagctgccgcctgcggctggagcccgggaaggagtacctgatcatgggcctggatggagccacctatgacctggagggccacccccagtacctgctggacagcaacagctggattgaggagatgcccagcgagcggctgtgccgcagcacccggcagagagctgcctgtgcccagctgaatgacttcctgcaggagtatggcacccagggctgccaggtgtag

SEQ ID NO: 19388 - DNA, 5235 bp, Artificial Sequence
  derived and/or modified sequence
atgcggctgctgtggggcctgatctgggccagcagcttcttcaccctgtcacttcagaagccaagacttctgctgttctccccttccgtagtacacttaggtgtccccctttccgtcggggttcagctccaggatgtgccccgcgggcaggtcgtgaaaggctcagtcttcctaaggaatccgagccggaacaatgttccgtgttcccctaaagtggacttcactttaagtagtgaacgtgactttgctttgctctccctgcaggtacctctcaaggacgctaagagctgtggtctccatcagctgcttagaggtccagaggtccagctggtagcacattcaccttggctgaaagacagcttgagcaggacaacgaacatccagggcattaaccttctctttagttcacgccgcggtcatttgtttttacagacggatcaaccaatatacaacccaggccaaagggtgcggtatagggtttttgcactggaccagaagatgcgaccttctacagacacaattactgtcatggttgagaattcccatggcctgcgggtacgcaagaaggaggtctacatgccctcctcaatttttcaggatgacttcgttatcccggacattagtgaaccaggcacgtggaagatatctgcccgcttttcggatggcttggaaagcaattcctctacccagtttgaagtgaaaaagtacgtcctgccaaactttgaagttaagattacgccagggaagccttacatcctgactgtccccggacacttggatgaaatgcagttggatattcaggcgcgctacatctacggcaagcccgtacagggagtggcatatgtacgcttcggtctcctggatgaggatggaaagaaaacattttttcgcggtctggagagccagacaaaactggtgaacggccagtcccacatttccctgtcaaaggcggagttccaggatgctttggaaaagcttaacatgggcattaccgatcttcagggcctgagactgtatgtggcggctgccatcattgaatccccgggaggcgaaatggaagaagctgagctcacctcatggtatttcgtctcatcccccttttccctcgacttatccaaaaccaaaaggcacctggtcccaggtgcgccctttttgttacaggcccttgtgcgcgagatgagcggaagtccggcatcgggaataccagtcaaagtgagtgccaccgtgagtagccccggaagcgtccccgaagttcaagatatccaacagaacacggatggatcaggtcaagtttctatccctataatcatccctcaaactatcagcgaactgcagctgtccgtcagcgccgggagcccgcacccggcgatcgctcgactgaccgtcgccgcccccccttctggcggcccaggtttcctgtcgatcgaacgcccagatagccggccaccccgggtgggtgatacacttaatctgaatttgcgagctgtcggatctggagcaactttctcccactattactatatgattttaagccgtggccagattgtctttatgaaccgggaaccaaagaggacactgactagtgtttccgtgttcgtagaccaccacctggctccttccttctatttcgtggccttttactatcacggtgaccaccccgttgccaatagcctgcgcgtagacgtgcaggccggtgcttgcgagggaaaactggaactgagcgtcgatggcgcgaaacagtatcgaaacggcgagagcgtgaagctccacttggagacagatagcctggctttagtcgcgctgggcgccctcgataccgccctgtacgcagccggctctaaatcgcacaaacctttaaatatggggaaagtcttcgaagcaatgaattcttatgatctaggctgcggccctggggggggggattccgcccttcaggtattccaggctgcggggctggctttctccgatggcgatcaatggacattgagtcgtaagagactctcttgtcccaaggagaaaacaactaggaaaaaacggaacgtcaattttcagaaagccattaacgaaaaacttggtcagtatgccagccctaccgcaaaaaggtgctgccaggacggggtgacgcgacttcccatgatgcggtcttgcgaacaacgcgccgccagagtgcagcagcctgattgccgggaaccattcctgtcgtgttgtcagtttgctgaaagtctgagaaaaaagagtcgagacaaagggcaagccgggctacagagggccttagagatcctgcaggaagaggatcttatcgacgaggatgatatccctgtccgttctttttttccagagaactggttgtggcgggtcgaaactgtggatcgctttcagatactgaccctgtggctgcctgatagtctcacaacatgggagattcacggtctgtcactctcaaagaccaagggcttgtgcgtcgccacgcccgtgcagctgagagttttccgggagtttcatctgcacctgcggctgcctatgtccgtaagacgcttcgagcagctggagctgcggccagttctttataattacctggacaaaaacctcaccgtgagcgtgcatgtatcaccagtggaaggcttatgcttggctggagggggtggtctggcacagcaggttttagttcccgccggctccgctagacctgtcgccttctcagttgtacctacagctgcgaccgccgtttcccttaaagtcgtcgcccggggatcttttgaattccccgtgggtgacgccgtgtctaaagtactgcagatcgagaaagaaggtgcaatccatagagaagagctggtctacgaacttaaccccttggaccaccgggggcggactctcgagatcccaggaaatagtgatcccaacatgattcctgatggagacttcaactcgtatgtccgcgtcacggcaagtgatccattagatacactcggaagcgaaggggcgctgagcccaggcggtgtggcttccctcctgcgcctcccccgcggctgcggagagcagactatgatttaccttgcccctactcttgcggccagtaggtatcttgataaaaccgaacagtggagcacactacccccggaaacaaaagaccatgcagtcgacctcattcagaaggggtacatgcgcatacaacagtttaggaaggctgacggtagctatgctgcttggttaagccgcggctcgtcaacctggttaacagccttcgtgttaaaagtgttgtcacttgctcaggaacaggtcgggggatctccggaaaagctccaagaaacttctaattggctgctgtctcagcagcaggctgacggctcatttcaggatctatcacccgtgatacatcggtcaatgcaaggcggcctggtcggcaatgatgagaccgttgctttgaccgccttcgtgactattgcgctgcatcacggtctggctgtcttccaagatgagggggcagagcctctcaagcagcgggttgaggcaagtatttctaaggctagcagcttcctgggagagaaggcaagcgcagggttgctcggagcgcacgccgcagcaatcactgcatatgccctgacactgactaaggcccccgccgacctgcggggagtcgctcacaataatcttatggctatggcgcaggaaaccggcgataacttgtattggggcagtgtaaccgggagtcagagcaacgccgtgtctcccacacctgcccctagaaacccttctgatccgatgccccaggctcctgccctttggattgagactaccgcctacgcactgctacatttgctgcttcatgagggtaaggccgagatggccgatcaggctgcagcttggctcacacgtcagggcagcttccagggcgggttccggtccacacaggatacggttatagcgctcgacgccctgtcggcctactggattgcatcccataccactgaggagaggggccttaacgtgaccctgtcctccactggcaggaatggtttcaagagccacgccttacaactgaataatcgacaaatcagaggtctggaagaggagctacagttctcactgggatccaagataaatgtgaaggtaggtggaaattcaaagggcacgcttaaggtgctcagaacgtataatgtgcttgacatgaaaaatactacctgtcaggacctccagatcgaagtgaccgtgaaaggacacgttgaatataccatggaggctaacgaagattatgaagattatgagtacgacgagctcccagctaaggatgaccccgatgctccattacagccagtgaccccgctccaactttttgaagggaggagaaatcggcgacggagagaggcccccaaggtggtggaagagcaggagtcacgggtgcattataccgtgtgcatttggcgtaatggcaaggtgggcctgagcggtatggccatcgccgacgtgacactgctgtccgggtttcacgcactgagagcggatttggagaagctaacttcactgtcagaccgctacgtgagccatttcgagacggaggggcctcatgtgctgctgtactttgactctgtcccaacatcacgcgagtgcgtgggttttgaagctgttcaggaagtccccgttggcctggtgcaaccagctagcgcaacgctgtacgattactataatccggagcgacgatgctccgtcttctatggcgcaccctcaaagagtcggctcctcgccacgctttgttctgcagaggtctgccagtgtgccgagggaaaatgccctagacaaaggagagccctagagcgaggcttgcaagatgaagatggctaccgtatgaagtttgcctgctattaccctagggtggagtacggtttccaggtgaaagtgctgagagaagatagcagagctgctttccggctcttcgagacaaagataactcaggtgctccatttcaccaaagatgtgaaagcggccgctaaccagatgagaaacttcctggtgcgcgcctcttgccgtttgcggctggagcccggcaaagaatatctgattatgggactcgatggggcgacttacgacctggaaggtcacccccagtacctgttggatagtaacagctggatcgaggagatgccgtcagaacgactgtgcaggagtacgcgccagcgcgcagcgtgtgcacaactcaacgatttcttgcaggagtacgggacgcaaggatgccaggtgtag

SEQ ID NO: 19389 - DNA, 5235 bp, Artificial Sequence
  derived and/or modified sequence
atgcggctgctgtggggcctgatctgggccagcagcttcttcaccctgtcactgcagaaaccgaggctccttctatttagcccttctgtcgtgcaccttggtgtgccccttagcgtgggggttcaacttcaggacgtccctcgcggacaagttgtgaaaggaagtgtgtttttgaggaacccatctaggaataatgtaccatgtagccctaaagtggatttcacattgtcaagcgagagagactttgctctgctgagcctgcaagtccctttgaaagacgccaagtcctgtgggcttcatcagttgctaagagggcctgaggtgcaattggttgctcactccccgtggctgaaggactcgctaagcaggaccactaacattcaaggcattaatttgctgtttagctctagacgtgggcacctcttccttcagacagaccagcccatatataaccccgggcagagagtgcgatatcgggtgtttgctttggaccaaaagatgcggcctagcaccgataccatcacagtgatggttgaaaactctcatggtcttcgagttcggaaaaaagaagtttacatgccctcatcgatttttcaagacgatttcgtgataccagacatcagcgagcctgggacatggaagatttccgccagatttagcgacggtctagagtccaattcctcaacacaatttgaagtcaagaaatacgtcctgcccaattttgaggtgaagatcaccccgggcaagccgtacatcctcacagttcccggccaccttgatgaaatgcaattagacatccaggcaagatatatctatggcaagcccgtacagggtgttgcatatgtccggttcgggttgttagacgaagacggcaaaaaaacatttttcagaggccttgagtcacagacaaagctggtcaacgggcagtcccatatttcactgtctaaagccgagtttcaggacgcccttgagaaacttaatatgggcattacggatttacaaggcctccgtctgtacgtggctgcagctataatagaaagtcctggcggcgaaatggaggaggctgagctgacaagttggtactttgtgagcagtccattctccctcgacctctccaaaacaaaaagacacctggttccaggggccccctttcttttgcaagctcttgttcgagaaatgtcaggcagcccagcaagcggtatcccagtcaaagtcagcgcaacagtttcgtcccctgggagcgtgcctgaagtgcaagacatccagcaaaacactgacggttctggtcaggtgtctattcccataataataccacagacaatctccgaactgcagctttcggtcagcgcagggtcccctcatcctgctatagcacggctgacagttgctgctccgccctcagggggacctgggttcctatctattgagcgccctgactcaagaccacctagggtcggtgataccttgaacctgaacctgagggctgtagggtccggggccacctttagtcactactattatatgattctgtccagaggacagatcgtcttcatgaacagggaacccaaacgcacacttacttcggtcagtgtgtttgtagaccaccatcttgctccctctttctacttcgtggcattctattaccacggcgaccatcccgtagcaaactcgttacgcgtagatgtgcaggcaggagcctgcgagggcaagctcgaactgtcggtggacggagccaaacagtatcggaacggcgaatctgtgaaattacaccttgagaccgacagtctcgccttggtggctcttggtgctctcgacacagccctgtacgccgcgggcagcaagtcccacaaaccgctcaatatgggtaaagtgttcgaagcaatgaattcttatgatctcgggtgcgggcccgggggaggagatagtgccctgcaagttttccaggccgccggcctggcttttagcgacggagaccagtggacactgtcaaggaagcgcttaagttgccccaaagagaagacaacaagaaaaaagcggaacgtgaatttccaaaaggcaatcaacgagaagctgggacagtatgccagccctactgctaaacgctgctgccaggacggcgtcacccgcctgcctatgatgagaagctgcgagcagcgagccgcgcgggttcagcagccagactgccgagagccatttctgtcctgctgccagttcgctgagtctttacgcaaaaaatctcgagataaaggccaggctggcctgcagagggcgctggaaattctgcaggaggaagatctgattgatgaggacgacattcctgttcgcagtttctttcctgagaactggctgtggagggtggagaccgtagaccgttttcagatactgactctgtggctccctgattcgctaacaacatgggagatccacgggctttccttatcaaaaacaaagggcttgtgcgttgcgacccccgttcagcttagagtcttccgtgaatttcatctgcatctgcggttaccaatgtccgtgagacgtttcgagcagctggagttgcgtcctgtcctctacaattacctagacaaaaatctcaccgtgtcagttcacgtttcccctgtggaagggctgtgcctggccgggggtggcggtcttgcccaacaggtcctggtgccagccggatccgcccgcccggtggctttctctgtggtgcctactgccgccactgcggtctccttgaaggtggttgccaggggcagcttcgaattccccgtgggcgatgccgtgtccaaagtgttacagatcgagaaagagggtgccatccatcgtgaggaactggtctacgagctcaacccactcgaccaccgcggacggactctcgagatcccaggcaattctgatccaaacatgattccagacggcgattttaactcttatgtgcgcgtcacagcaagcgaccccttggacacgctgggatccgagggtgccctgagcccagggggagtggcgtccctacttagattgccaagaggttgcggtgagcagaccatgatttaccttgccccgacactcgcagctagtagatatctcgacaagaccgagcagtggtcaaccttgccccccgaaacgaaggatcacgccgtagacctgattcagaaaggatatatgcgcatacagcagtttagaaaagccgacggctcatatgcggcctggctgtctcgagggagtagtacctggctcacagccttcgtactgaaggttctgtcgctcgcccaggaacaggttggaggctctccagagaagttacaagagacctcaaactggctgttatcacagcagcaggccgacgggtccttccaagatctgtcacctgtgattcatcgctcaatgcaggggggccttgtgggcaacgacgaaacagtggctcttacagcgtttgtaacgatcgccctccatcatggtctggcggtgttccaggacgagggggccgagccactgaagcagagagtcgaggccagtatcagcaaggcctcgagttttctaggggagaaggcatccgcgggtctcctgggcgcacatgcagccgctattaccgcatatgcactcacactcacgaaagctcctgctgatcttaggggggtggcacacaacaatctgatggctatggcacaggagaccggggacaatctgtactggggatctgtgacaggctctcagagcaacgctgtgagtcctacccctgcgccacgaaatccatccgatccaatgccccaggctcccgccttgtggattgagactacagcttatgccctgctccacctgttattgcatgaagggaaggccgaaatggccgaccaggcagccgcctggcttacccgccagggctcctttcaaggtggctttcgctctacacaggatacagtgattgccctggatgccctgtccgcctattggatcgcctcacacacaactgaagaacgtggcttgaatgtgactctcagcagcacggggcgaaatgggtttaagagccatgccctgcagcttaataaccgacagatacgaggactcgaggaagagttacagttcagtctcggatcaaaaatcaatgtcaaggtgggaggtaactctaaggggacattaaaagtcctgcgcacttataatgtgctcgatatgaagaacactacctgccaggatctgcagatcgaagtaacagtgaagggacacgttgagtacaccatggaggcaaatgaggactatgaagactatgagtacgacgaacttccagctaaagacgacccagatgctccccttcagcctgtaacaccgctccaactttttgaggggagacgaaatcggcgaaggagggaagcccccaaggtggtggaagaacaggagtcccgcgtccactacaccgtgtgtatatggcgtaacggaaaggtgggattaagtgggatggcgatcgccgacgtgaccctcctcagtggctttcacgccctgcgagccgacctagagaagctgacctccctgagcgaccgctatgtatctcatttcgaaacagaaggaccgcacgtgcttctgtactttgattcagtgcctacctcccgggagtgtgtcggctttgaggctgtgcaggaggtgcccgtaggcttggtgcaacccgcctcagccactctgtatgactattacaatccagagcgcaggtgtagcgtcttttacggcgccccatctaaatcacgattacttgctaccctgtgctccgccgaggtgtgccagtgcgctgaggggaagtgcccacggcaaaggagagcactggaacggggtttgcaagacgaggatggatatcgcatgaagttcgcttgctactacccaagggtggaatatgggtttcaggtgaaagtgttgcgtgaggactcgcgagccgcgtttcgcctgtttgagaccaagattacccaagtgttacacttcaccaaggatgtaaaagcagctgccaaccaaatgagaaattttctggtgagagcctcttgtcggcttcgcttggaacccggaaaggaatatttgatcatgggcctcgatggtgcgacatacgatctcgaaggtcacccacagtacttgctcgattcgaactcgtggatagaggagatgccatcggagaggttatgccgatctacaagacaacgtgcagcttgtgcccagcttaacgatttcctgcaggagtacggcactcagggttgccaagtgtag

SEQ ID NO: 19390 - DNA, 5235 bp, Artificial Sequence
  derived and/or modified sequence
atgcggctgctgtggggcctgatctgggccagcagcttcttcaccctatcactgcagaaacccaggctgctgctgttctcacccagtgtggtgcacctgggagtccccctgtctgttggcgttcagctccaggacgttccccgcggccaagtcgtgaagggttcggtgttcctgagaaacccatctcgaaataacgtcccatgttcacctaaggtcgatttcacactgtcttcagagagagattttgctctgctgagcctgcaggtaccgcttaaggacgctaagtcctgtgggctgcaccagctgcttcggggaccagaggtccagctcgtggcccattctccgtggctgaaggacagccttagtcggaccacgaacattcagggtatcaatctcttattctcgagccggcggggccatttgttcctccaaaccgatcagcctatctacaaccctgggcaacgggtgcggtacagggttttcgccctcgaccagaaaatgagaccctctactgatactatcaccgttatggtcgagaactcacatggtctccgagttaggaaaaaggaagtttatatgccctcgtctatctttcaggacgatttcgtgattccggacatttcagaacctggcacttggaagatttccgccagattttctgacggcttggaaagcaacagctccacacaatttgaggtcaaaaagtatgtattacccaactttgaagtcaagattaccccagggaaaccttacattttgaccgtgccagggcatttggacgagatgcagcttgatatccaagcccgatacatttacggaaagccagtgcagggagtagcttacgttcggttcggccttctggacgaagacgggaaaaaaacattttttaggggtcttgagagtcagaccaagctagtcaacgggcagagccacatatccctcagcaaggctgagttccaggatgcattagagaagttgaacatgggtatcaccgacttacagggactgagactgtatgtggcggccgccattattgaatcccctggtggggaaatggaggaagccgagcttacttcttggtatttcgtgtcctctccgttcagcctcgacctgtcaaagaccaagcgtcatctggtcccaggcgcccccttcctgctgcaggctctggtgcgagagatgtctggtagcccagcctcaggcattcctgtaaaagtgtccgcaacagttagcagtcccggctcggtgcccgaagtccaagacattcagcagaatacagatggctccgggcaggtgtcaatacccataattatcccccagaccattagcgagttgcagctgtctgtgtctgccggcagcccacatcccgctatcgcacggttgactgtggcagccccaccatccgggggacccggcttcctgtctatcgagcgacccgacagcagaccccctcgcgtgggggatacacttaatctgaacctgagagccgtgggaagcggagctaccttcagccactattactacatgatccttagtagaggacagatagtgttcatgaatcgcgagcccaagcgcaccttaacatctgtgtccgtctttgtggatcatcacctggctccttctttttatttcgtcgccttctactaccatggcgaccacccagttgctaattcattgcgcgtcgatgtgcaggccggcgcctgcgagggaaagctggagctgtctgtggacggcgccaaacagtacaggaatggtgagtccgttaagctccacttggagaccgattctcttgctttagtggcgctgggagccctggataccgctctgtacgccgccggcagcaaatcccacaaaccccttaatatggggaaggttttcgaggcaatgaactcatacgatcttggctgcggaccaggtggaggggactcagctttgcaggtattccaggccgcaggtctggccttcagcgacggagatcagtggacgctgagccgcaagagactgagctgccctaaagaaaaaaccaccagaaagaagaggaacgtcaacttccagaaagctataaacgagaagctgggccagtatgccagcccgacggcgaagcgctgctgccaggatggcgtgacacgattgcccatgatgcggagctgcgagcagcgggcagcccgcgtgcaacagcctgactgccgtgagccgtttttgtcctgctgtcaatttgccgaaagtcttcgcaaaaagagccgcgataaaggacaggctggtttacaaagagctctggaaatcctacaggaggaggacctgattgatgaagatgacatccctgttagatcctttttccccgagaattggctgtggcgtgtcgagaccgtcgaccgattccagatcctcacactctggcttcccgacagcttaacaacttgggaaatacatgggctgtctctgagcaagaccaagggtctgtgcgttgccacacccgtccagctccgtgtttttcgcgaattccacctgcatctgaggctccccatgtcagtccggagattcgaacagctggaactgcggcctgtcctttacaactaccttgacaagaatctgaccgtgtccgtgcatgtttctccggtggaaggtctgtgtctggctggaggcggtggcctggcccagcaggtgctggttcccgccggaagtgcccgcccagttgccttttcggttgtgccaaccgccgctgccgctgtcagccttaaagtagtggcacgtggatcgtttgaatttccggtgggtgacgcggtgtccaaggtgctgcagatcgagaaggagggcgccattcaccgcgaggaattggtctatgagttgaaccctctggaccatcggggacgaactcttgaaattccggggaactcggaccccaatatgatacctgacggggatttcaactcctatgttcgcgttactgcgtccgatccacttgatacactcggatctgagggggccctatctcctggcggagtggcttccctgctgaggcttcctcgcggctgcggcgaacagaccatgatctatctggcgccaacgctcgccgcttctaggtacctggacaagactgagcagtggagcacattacctcctgaaactaaggaccatgcggtggacctgattcagaaaggctacatgagaatccaacagtttcgcaaagcagatggttcatatgctgcttggttgtcacgggggtcctccacgtggctcactgctttcgtgctgaaagtactcagtttggcacaggagcaggtgggcggaagccccgagaaattacaggagacctcaaactggttgctgtcccagcagcaagcagacggttctttccaggatctgtccccagttatccacagatcgatgcagggcggcctggttggtaacgatgagacggtcgcgttgacggctttcgtgaccatcgctctgcaccatggtttagccgtctttcaggacgagggagccgaacccctgaaacagcgcgtggaagcatctatcagcaaggcaaactcattcctgggtgagaaagcttcagccggcctacttggagctcatgctgccgctatcacagcttacgctttaaccctcactaaagctcctgccgacctgcgcggcgtcgctcacaataaccttatggctatggctcaggagacaggcgacaatctctactggggttctgtcacgggcagccaatccaatgccgtttcccccacgccagcaccacgcaatccaagcgaccctatgccccaggcacctgcgctctggatagaaacaacagcatatgccctcttacacctcttgctccatgagggcaaagcagaaatggcagatcaggcggcggcttggctgaccaggcagggctctttccagggaggcttccgatccacccaggacactgtgatcgccctggacgcactaagtgcttactggatagcctctcatacaacagaggaacgagggctcaatgtgactttgagcagtaccggtcggaatggttttaaatctcacgcgctgcagctcaataatagacagattcggggcctcgaggaagaactacaatttagcctggggtcgaaaatcaacgtaaaggtgggaggcaattccaagggcacattaaaggtcctgagaacatacaatgtgctagatatgaagaatacaacctgccaggacctccagatcgaggtgacagtgaaaggacacgtggaatacactatggaagccaatgaggactacgaggattacgagtacgatgagctaccagccaaggatgatcccgatgccccacttcagcctgtgacccccctccagttgttcgagggaagacgcaatcgtcgaagaagggaagctcccaaagtggtggaagaacaggagtcccgcgttcactataccgtgtgcatttggcggaatggtaaagtcggcctaagtgggatggcgatcgccgatgtaacactgctttccggctttcacgccttgagggccgatcttgaaaaacttaccagtctgtccgatagatatgttagccatttcgaaacagaaggcccacatgtactgctgtatttcgattctgttcccacttctagggaatgcgtggggttcgaagccgtccaggaggttcctgttgggctcgtgcagccggcaagcgccactctgtacgattattacaatccagaacggaggtgctccgtattctatggcgccccctctaagtccagactgctggctactctatgctctgcagaggtctgtcagtgtgccgagggcaagtgtccccgtcagagaagagccctggagaggggactgcaggatgaagatggataccggatgaagtttgcctgttattacccacgggtcgaatacggattccaggtgaaggtactcagagaggactcccgcgcggcttttcgactgtttgaaacgaagattacacaggtgctacacttcaccaaggacgttaaagcagcggctaaccagatgcgcaacttcctggttcgcgcgagctgcaggcttaggctcgagcctggtaaggagtatctgataatgggcctggacggagctacctacgacttagagggtcaccctcagtacctgttggattccaattcatggatagaggaaatgccatcagagagactgtgtcggagtacgcggcagcgcgcggcttgtgcccaattgaatgacttcctgcaggagtatggtacccagggttgccaggtgtag

SEQ ID NO: 19391 - DNA, 5234 bp, Artificial Sequence
  derived and/or modified sequence
atgcgcctcttgtggggcctcatctgggcttccagttttttcaccctctccctccaaaaacccagacttctcctgttttctcccagcgtggttcatctcggcgtacctctgtcagttggggtacagcttcaggacgtgccacgcggacaggtcgtcaagggcagcgtcttcctcagaaacccgtctcgtaataatgttccctgctctcccaaagtagacttcactctcagttctgaacgagatttcgccctgctgtccttacaggtgccgctgaaagatgctaagagctgtggcctgcatcagctcttacggggacccgaagtacaactcgtggcccattcaccgtggctaaaggattctctatctagaaccaccaacatccagggcataaacctgcttttctcttctaggcggggtcatctcttccttcagacagatcagcctatctataacccgggtcagcgggtcagatatcgcgtgtttgcccttgatcagaaaatgcgtcccagtaccgacaccatcactgtaatggttgagaactcacacggattgagagttcgaaaaaaagaagtgtacatgccttcatcgatctttcaggatgattttgtcattcctgacattagtgagcccggaacctggaaaatcagcgcccgattctctgatggcttagagagcaattcctccactcagtttgaggttaaaaaatacgtgctgcccaactttgaggttaagattactcccggaaaaccctacatcctgacagtccccggacacctggacgaaatgcagctggacatccaggcacgatatatctatgggaagccagtgcagggcgtcgcgtatgtgcggttcgggctgctcgacgaggatggcaaaaaaactttcttccgcggtcttgagagccagacgaaattggtcaatggtcagtcccatatctcactcagcaaggctgaattccaagacgctcttgagaaactgaatatggggataaccgacctgcagggactcagattgtatgtggccgcagctatcatagagagtcccggtggggaaatggaggaggcagaactcacatcttggtatttcgtgtcctcgccttttagcctggacttgtcgaagactaagcggcacctagtgcctggagctccttttttactacaggccctggtgagggaaatgtcaggatctcctgcttccggcatccccgttaaggtgagcgctaccgtgtccagtcctggtagcgtaccagaagtccaggacatccagcagaacaccgacggtagtggccaggttagcattccgataattatccctcagaccatcagtgaattgcagttgtctgtaagtgctggcagccctcatcccgctatcgcccgtctcactgtggcagctccaccatcaggaggccctggatttctgtctatagagaggcctgacagccgccctcctcgagtgggcgataccctgaaccttaacctgcgtgctgtggggagtggagctaccttctctcactattattatatgatactctcccgcggacaaattgtgtttatgaatagggagccaaaaagaacactgacaagcgtgagcgtttttgtggaccaccacctggcgcctagcttctactttgtggcattctactatcacggcgaccatcctgtagccaattctttgcgggtcgacgttcaggctggggcatgcgaggggaagctggaactttcagtagacggagctaagcaataccggaacggggagagcgtcaagctgcacttggaaaccgactctcttgccctggtggctctgggggctctggatacagctctgtacgcagctgggtccaaatcacacaaaccactgaacatggggaaggtgttcgaggccatgaattcatacgacctgggctgtggtccgggaggcggagactcagcactgcaggtctttcaggccgctggtctcgctttcagtgatggggaccagtggactctatccaggaaaagacttagctgccccaaggagaagaccacccggaagaagagaaatgtgaattttcagaaagccataaatgagaagttggggcaatacgccagccctactgccaaacggtgttgccaagacggcgtgacacgtctgccaatgatgcggtcctgcgagcagcgggcagctagagtgcagcagcctgactgccgggagcccttcctgtcctgctgccagttcgccgaatcgcttcggaagaagagccgcgataaaggacaagcaggtctccagcgggcacttgagatcttgcaggaagaggatctaatcgatgaagatgatattcccgtcaggtcttttttcccggaaaactggctgtggcgagtggaaaccgtcgaccgctttcagattttaaccctatggctccccgacagcttgacaacctgggaaatacacggtctctccctcagtaagacaaaaggcctgtgtgtcgcgacccctgtacagctcagagtgtttcgcgagtttcacctgcaccttcgcctgcccatgtccgtgcgtcggttcgaacagttggagttacgcccagtgctgtacaattacctggacaaaaaccttacagtgtccgtgcacgtcagccccgttgaaggcttatgtctggccggagggggaggacttgcgcagcaggtgctcgtgcccgcaggaagtgctagacctgtggccttcagcgtggtgccgaccgccgctacagcagtctcactgaaggtggtagccaggggatcctttgaattccctgtgggagatgccgtaagtaaggtgctgcagattgaaaaggagggtgctattcaccgggaggaactggtgtatgaactaaatcccttggaccacagaggccgaactctagagattccagggaactctgatcccaatatgattcccgatggggatttcaatagctacgtgcgggttaccgcctcggacccgctcgatacccttggttccgaaggggcattgagtccaggcggagtggcttcactcctgaggctgccacgcggttgtggagagcagacaatgatctacttggcgccaactttggccgcaagtcggtaccttgataaaaccgagcagtggtccaccttacctcctgagaccaaagatcatgccgtcgacctcattcagaaagggtacatgagaatccagcagttccggaaggctgacggatcatatgctgcctggctcagcagaggaagttctacctggctgacggcatttgtactcaaggtcctgagtctggcccaggaacaggttggcggttcacccgaaaagctccaagagacatccaattggcttctgtctcagcagcaggcagacgggagcttccaagacctgtcgcctgtgatccataggtctatgcaaggcggtttggtggggaacgacgagactgtcgctctgacagccttcgtgaccatcgcactacatcatggcctggctgtttttcaggatgagggcgctgagcccctcaagcagagagttgaagctagtatctccaaggcctccagcttcctaggagagaaggccagcgctgggctgctgggcgcacatgctgccgctattacagcttacgccctgacgctaactaaagcgcctgctgacttgaggggcgtcgcccataataatctgatggccatggctcaggaaaccggcgataacttgtattgggggagcgtcacaggaagccagtccaatgctgtctccccaacccctgccccacggaatccaagtgatccaatgccacaggctccagctctgtggatcgagactactgcatatgcactcctgcacctattactgcacgaggggaaagccgagatggccgaccaggccgcagcatggctcacaaggcaggggagcttccagggcggattcagatccactcaggataccgtgattgcccttgatgcattgtccgcctactggattgccagccatactacggaggaaaggggactgaatgtgaccctctcttctaccggaaggaatggattcaagtcacatgcccttcagctgaataacaggcagatcagaggtctggaggaagagctccagttctcacttggatctaaaatcaacgtaaaagtcggaggaaattcaaagggcactctcaaggtgctgcgaacctataatgtacttgacatgaaaaatacgacctgccaggatctacagatcgaagtgactgtgaaaggccatgtagagtatacaatggaagcaaatgaggattatgaggattacgaatatgacgaattaccagccaaggacgacccagatgctccactgcagccggtgacaccactgcagctgtttgagggcaggagaaacagacggcgtcgagaggcacccaaagtggtggaggaacaggagagccgcgtgcattataccgtatgtatatggcggaacggcaaggtaggtctttcaggcatggccatcgccgacgtaacgctgctctcagggtttcacgctctcagggcagacctcgagaagctgacttccctgagcgaccggtatgtgtcacattttgagaccgaaggaccccacgttctgctgtacttcgactctgttccaactagccgagagtgtgtgggcttcgaggcagtccaagaagtccctgtgggactggtgcagcccgcttcagcaaccttgtacgactattacaatccagaaagaaggtgcagcgtgttttacggcgcaccatccaaatcacgcctgcttgctaccctgtgttcagcagaggtgtgtcaatgcgctgaaggaaagtgccctcgccagcgacgagctcttgagaggggcctgcaggacgaggacgggtatagaatgaaattcgcttgctattaccctcgggtcgaatacggatttcaggtgaaggtccttcgcgaagattctcgggcagcctttcggttgttcgagacaaagatcacccaggttctgcacttcacgaaagatgtgaaagcggctgcaaatcagatgcgtaattttcttgttagggcctcttgccgcttgaggctggaacccggaaaggagtacttaataatgggacttgacggagcaacgtacgatcttgaaggccacccacagtatctcctcgactctaactcctggatagaagagatgcctagtgagcggctgtgccggtccaccagacagcgcgcagcttgcgctcagcttaacgattttcttcaagagtacggaacccagggctgtcaggtgta

SEQ ID NO: 19392 - DNA, 5234 bp, Artificial Sequence
  derived and/or modified sequence
atgagactgctgtggggactgatatgggcctcctcctttttcactttgtccctccagaagccgaggctgttgcttttttccccgtctgtggtgcacctaggcgtgccactcagcgtgggcgtccagctccaggatgtccccagaggccaggtcgtgaaaggttcggtctttcttagaaatccaagtagaaacaacgtcccgtgctcccccaaggttgacttcaccttgtcatccgaaagggacttcgctctgctgagcctgcaggttcccttgaaagatgcgaagagctgtggccttcaccagctgctccgtggccctgaagttcaactcgtggcgcattcgccatggctgaaggattcactctctcggaccacgaacattcagggcatcaacctactgttctcctcgcgcagaggacacttgtttctccagaccgaccaacccatatacaatcccggacagcgcgtacgatatcgggtgttcgcgttagaccaaaaaatgagaccgagcacagacaccataaccgtgatggtggagaatagccacgggctcagagtgcggaaaaaggaagtctacatgccttcatctatatttcaggacgatttcgtcatccccgacatatccgaaccagggacttggaagattagtgcgaggttttctgatgggctcgagtctaacagcagcactcagtttgaggtgaagaaatacgtactccccaacttcgaagtaaaaatcacaccgggaaagccatatatcctgacagtgcccggacacttagatgagatgcaactggatatccaggcaaggtacatttacggaaagccggtgcagggcgtggcttacgttaggttcggcttgttagatgaggatggcaaaaaaacgtttttccgtggcctggaatcgcagactaagctcgtcaatgggcagtctcacatttcactgtctaaagctgagttccaagacgcccttgaaaaactcaacatgggcataacagacctgcagggcctacgcctatatgtggctgcagctatcatagagagccctggcggtgagatggaggaggccgaactcacgagctggtacttcgtgagcagcccttttagtctggacctgagtaaaacaaaacgacatctggtaccaggcgcacccttccttttacaagccttagtaagggagatgagtgggtcacccgcatctggaatcccagtcaaggtctctgccactgtcagttccccagggtcggtgcccgaggttcaggacatacagcagaataccgacggctccggccaggtgtctattcccattatcatcccccagacaatttcggagttacagctgagcgtgagcgccggaagtcctcatccggcaatcgcgaggcttacagtggctgcccctccctctgggggaccgggatttcttagtatcgagcgcccagacagccgccctcccagggtgggtgacacacttaatctcaaccttcgggcagtgggttcaggtgccactttttctcattactattacatgatcttgtcccggggtcagatagtgtttatgaaccgcgagcccaaacgcactctgacctccgtttctgttttcgtggatcaccacctggccccaagcttttatttcgtggctttttactatcacggcgaccacccagtggcaaactccctacgtgtcgatgttcaggccggagcctgcgaagggaagctcgagctgtccgtggatggtgctaaacagtaccggaatggcgaaagtgtgaaactccatctcgaaaccgatagcttagccctggtcgccctgggcgcactggacaccgccctctacgccgctggttccaagtctcataaacccctgaacatgggcaaggtcttcgaagctatgaatagctatgacctcggatgcggtcctggtggcggagatagtgctttgcaggtgtttcaggcagctgggctggcattcagcgacggggaccaatggacactgtcccgaaagcgcttgtcttgcccaaaggagaaaacgacccgtaaaaaacgaaatgtcaatttccaaaaggctatcaacgaaaagctgggccaatatgcttcacctacagccaagagatgctgccaagacggcgtcactcggctccccatgatgcgctcttgtgagcaacgagctgccagggtgcagcaaccagactgtagagagccgttcctgtcatgctgccagtttgccgagagtctgaggaagaaatcaagggacaaagggcaggcgggtctacagcgcgctcttgagatcctgcaggaggaggatctgatagacgaggatgatatcccagtcagaagttttttccccgagaattggttatggagggtagagacagtggataggttccaaatcctgaccctgtggttgccagatagcctgactacctgggagatacacggtctgtcactctccaagacaaaagggctgtgtgtagccacacctgttcaacttagagtatttagagagttccatctgcacctgaggctccccatgtctgtgagaaggtttgaacaactggagctaaggcccgtcttgtacaactatctggataaaaacctgacggtctcagtccacgtgagtccagtggaaggcttgtgtttggccggaggaggcggactggcccaacaagtcctggtccccgcaggatccgccagacccgtggcgttttctgtagtcccaacggccgcaaccgctgtatcccttaaggttgtcgccagaggatccttcgaatttcctgtgggcgacgcggtgagtaaggtactgcagatcgagaaagagggggcaatccaccgtgaagaactggtgtacgagctgaatcccctcgatcatcgcggaagaaccctggagatccctggtaactccgatccaaacatgataccagatggtgactttaactcatacgtgagagttacggcttctgacccactggacaccctgggatccgagggtgcactgtcaccagggggtgtggcgtccctcctccgtctaccacgtggatgcggagagcagaccatgatctacctcgccccaaccctcgcagcctctcgctatcttgataagacagagcagtggagcactctgcctcctgagacgaaggatcatgccgtggatctgattcagaaaggttacatgagaattcagcagtttcggaaggccgatgggtcctatgcggcttggctcagtaggggtagttcaacttggctaaccgccttcgtacttaaagtcctctctttggcacaggaacaagttggcggttcgcccgaaaagctccaggagaccagtaactggctcctgagtcagcagcaggctgacggctcctttcaggatttgtcccctgtcatccacaggtccatgcagggcggactcgtgggcaatgatgaaactgtggctctaacggccttcgtgactattgccttacatcacggtctggccgtcttccaggatgagggggcagaaccacttaagcagcgcgttgaagcgtctattagcaaggcaagctccttcctgggcgaaaaagcatccgccggtcttctgggcgcacacgccgctgcgattaccgcatacgcattaactctgaccaaggcgcctgcggacctgaggggcgtcgctcataataacttgatggccatggcacaggagaccggggataatctttattgggggagtgttacaggcagccagtcaaatgccgtcagccccacgcctgcccctcgcaacccatcggatcccatgcctcaggcacctgctttgtggatcgagactaccgcctatgcgctgctccacttgcttctacatgaaggcaaggctgagatggctgatcaagccgctgcatggctcacaaggcaaggctcctttcaggggggattccgtagtacccaggacaccgttatcgccctggacgcgcttagcgcctactggattgctagtcatactactgaggaaagaggcctgaacgttacgctgagcagtacaggacgcaacggatttaaaagtcacgccctccagcttaataaccgccagatccggggactggaggaggagctacagttttctctcggcagcaaaatcaacgtgaaagtggggggaaacagcaaaggcaccctcaaggtacttaggacgtacaacgttcttgacatgaaaaacaccacatgccaggaccttcagattgaggtaaccgttaagggtcacgtggaatatacaatggaagccaatgaggattacgaagactacgagtacgacgagttgccagcgaaggacgacccagacgcaccgctgcagccagttactcctctacagctgttcgaagggaggagaaacaggcgacggagggaagcacccaaagttgtagaagaacaggagtcccgggttcactacacggtgtgtatttggcgcaacgggaaagttggactgtctggaatggccatcgccgacgtgacattgctgagcggctttcacgccctaagggctgacctggaaaaacttacgagcctgtctgatcggtacgttagccactttgaaactgaaggccctcacgtcctcttgtatttcgattctgtgcctacatcccgggaatgcgtggggttcgaagccgtccaggaggtgcctgtaggcctggtgcagccagcctcagccaccctctacgattactacaatcccgaacgccgttgtagcgtcttttacggagccccaagtaaatccaggttactggccacactgtgttctgcggaggtatgccagtgtgctgagggcaagtgcccacgccaaagaagggcgctggaacgtggattgcaagacgaagacggctaccggatgaagttcgcctgctactacccgagggtcgagtatggtttccaggtgaaggtgctccgggaagactctagagccgctttcaggctgtttgaaactaaaattacacaggtgctgcactttacaaaagacgttaaggcagcagccaaccagatgaggaattttctggtgcgggcatcttgccgcctgcgactcgagcctggtaaagagtatctcattatgggcctggatggggcaacatacgatttggaagggcacccccagtacctgctcgactctaacagctggattgaagagatgcctagtgaaaggctatgtcggagtactcgccagcgcgcagcctgcgcccagttgaacgacttcctacaggaatatggcacccagggctgtcaggttta

SEQ ID NO: 19393 - DNA, 5234 bp, Artificial Sequence
  derived and/or modified sequence
atgcggctgctgtggggcctgatatgggcgtcctcatttttcacactcagtttgcaaaaacccaggttactgctattctcaccctctgtggttcatctgggagtgcctctctccgtgggggtccagttgcaggatgtgccacgcggacaagtggtgaaagggagcgttttcctgagaaacccttcccggaataacgtgccatgcagtcccaaggtcgactttaccctctcttccgaacgcgactttgccttattatctctacaggtcccactaaaggacgctaagtcatgtgggttgcaccagctcctgcggggtccagaggtgcagctggtagcccactccccatggttgaaggactcattgtcaagaacgacgaatattcagggaattaacctgctattttcttctcgacgcggacatctgttcctccaaacggaccagcctatctacaatcccggacagagagtccgctatagggttttcgcactcgaccaaaagatgagaccgagtaccgacacaattaccgttatggttgaaaatagccatggactgcgtgtgagaaagaaggaagtgtacatgcccagtagcatatttcaggacgactttgttattccagatatctctgaacctggaacctggaagatctctgccaggttctctgacggactcgagtccaacagtagcacacagtttgaggttaaaaaatatgtactccccaactttgaggtgaagatcactcctgggaagccttacatcctaaccgtccctgggcatctggacgaaatgcaactggatatacaggctcgatacatctatggcaaaccggtgcaaggggtcgcctacgtacgattcggactgttagacgaagacgggaagaagactttcttccggggtctggaatcccagaccaaactggtaaacggacagagtcacatttcgctctccaaggcagagtttcaggatgcactcgagaagctaaatatggggattacagacttgcagggccttagactctatgttgctgcagcgattattgagtcaccaggtggtgaaatggaggaggctgagctgacgagctggtattttgtgagcagtcccttctcactggatctgtccaagaccaaacggcatctggtgccaggagcccctttcctgctgcaggccttagtccgggagatgagcggatcccccgcatcgggcatcccggtgaaggtgtcagcaacagtttcatctccgggtagcgtgccagaggttcaagacatccagcagaacaccgatggctcaggacaggtcagcatccccattatcatccctcagaccatctctgagttacagctatcagtgtcagccggtagcccgcacccggcaatcgccaggcttacggttgcggctccaccaagtggtggacccggattcctgagcatcgaacggcctgacagtagacctccaagggtaggagacactcttaatctcaacctgcgagccgtggggagcggcgctaccttctcacactactactacatgattctatcacgaggtcagatcgtcttcatgaatcgtgaaccaaaacggactctaacatccgtcagtgtctttgtggatcaccaccttgcaccgtctttttactttgtggccttttattatcacggggatcaccctgtggctaactcactgagagtggatgtgcaggctggcgcttgtgaaggaaaacttgaactgtccgttgacggcgcaaaacagtatcgcaacggcgaatccgttaaacttcatctcgaaacagatagcttagccttggtagccctgggcgctctggataccgctctctacgctgctggttcgaaaagtcataagccactcaatatgggaaaagtgttcgaagctatgaattcctacgaccttgggtgcggacctggaggtggggactcagcattacaagtttttcaggctgctggactcgccttttccgatggcgaccagtggacactatccagaaaacggttgtcttgtcctaaagaaaaaactacccgtaaaaaacgcaacgtcaattttcaaaaagcaatcaacgagaagctcggtcagtatgcatcaccgactgccaaaagatgctgtcaagacggtgtcacccgcctcccaatgatgaggagctgtgagcaaagagctgcccgtgtccagcagccagactgtagagagccatttctgagttgctgccagtttgccgagagcctacgaaaaaagtcaagggataaaggccaggcaggcctgcagcgggctcttgagattcttcaggaagaagacctcattgatgaggacgatatcccggtgcggtctttttttcccgagaactggctgtggagagtggagaccgtggatcgtttccaaattcttactttatggctgcctgacagcctaaccacatgggagatccatggactgtctttaagcaagaccaaggggctttgcgtggcgactccggtccaactccgagtgtttcgggagttccatctgcatctgcgtctgcccatgtcagtaagaagattcgaacaactagagttaaggcccgtcctgtacaactatctcgacaaaaacctcaccgtgtctgtccatgtgtccccggtggaaggactatgtctggcaggcggaggtgggctggctcaacaagtcttggtgcccgctggctcagccagacccgtggccttcagtgtggtgccgacagcggctgccgctgtgagcctcaaggttgtggcacgcggaagtttcgaatttcctgttggggatgcagtgtccaaggtcctacagattgagaaagaaggagctattcaccgggaagagctggtctatgaattgaatccactcgaccataggggaaggactctggagatccccggtaactccgaccctaatatgatcccagacggcgacttcaattcatatgtgcgggttaccgcatctgaccccctagacacgttagggtcggagggcgcactgagccctggcggagtggctagcctcctgagattgccacggggatgcggagagcaaacgatgatatatttagcccctacactggccgcaagccggtacctggacaaaaccgagcagtggtccacactgcctcccgaaaccaaagaccatgccgtcgacctgatccaaaagggctatatgcgcattcagcaattccgcaaggccgacgggagctacgcagcctggctgtcacgcggttctagtacctggctgaccgccttcgtgctaaaggtcttgtcactggcccaagagcaggttgggggatctcccgaaaagcttcaggagacttcaaattggttgctttcccagcagcaagctgacggctcattccaggaccttagtcctgtgattcaccgatctatgcagggcggtctggtggggaacgacgaaactgttgcgttaacagcatttgttacaattgcactccaccacggcttagccgtgttccaggatgaaggggctgaacccttgaagcagcgcgtcgaagcttctatttccaaggcaaacagctttcttggtgaaaaagcatcggctgggctcctaggggctcacgcagccgctattacagcctacgctttaactctgaccaaagccccagcggatctgagaggggtggcacacaataacctgatggcgatggcccaggaaaccggcgataatctgtattggggcagcgtgaccggctctcagagtaatgccgtctcccccacgcccgctcctaggaaccctagcgaccctatgccccaggctccagcactgtggatcgaaacaacagcatatgcactgctccatctactgctgcatgagggcaaagctgagatggccgaccaggctgcagcgtggctgacccgacagggctcttttcagggcggattcagatccacccaggatacagtgatagcgttggacgcattgtctgcttactggatagcatcacacaccacagaggagagggggcttaatgtgacactgagtagcactgggcgtaatggatttaagagtcacgccctccagctgaacaaccggcaaatcagggggctcgaggaggaattacagtttagtctgggaagcaaaatcaatgttaaggtggggggtaattcaaaagggaccctgaaggttctaagaacgtacaatgtcttggatatgaagaacactacttgtcaggatcttcagattgaggtaaccgtgaaaggccatgtggagtacactatggaggcgaacgaagactacgaagattacgagtatgacgagctccccgctaaggatgatccggacgcccctctgcagccggtgactcctctgcagctttttgagggaaggcggaacaggagacggagggaggcccctaaggtcgtggaagaacaggagagccgcgtgcattacacagtgtgtatctggaggaatggaaaagtggggctgtccggtatggctatcgccgatgtgacactcctgtctggattccatgctctgcgcgctgacctggagaaattgacatccctgtccgacaggtacgtgtctcatttcgagacagaaggccctcacgtcctcctgtatttcgacagtgttcccaccagcagggaatgcgtgggttttgaggctgtgcaagaggtgcctgtcggactcgttcagccagccagcgcaaccctgtatgactactacaacccggaaagaaggtgcagcgtgttttacggcgcaccatctaagagccgcctcctggcaactttgtgttccgcagaagtctgccaatgcgccgagggcaagtgtccacgccagcgcagagcactggaacgaggactgcaggacgaggacgggtaccggatgaagtttgcatgttactatccaagagttgagtatggcttccaggtcaaggttctccgcgaggattcaagggccgcattccgccttttcgaaactaagatcactcaggttctccattttactaaggacgtgaaagctgcagcgaaccaaatgaggaacttcttggtaagagctagctgtaggctcaggctagagcctggcaaggaatacttaattatgggcctggacggcgctacttacgaccttgagggccacccacagtatctcctcgactctaattcgtggattgaggagatgccatcagagcgactttgtagaagtactcgacaacgggctgcttgcgcacagctgaatgacttcctgcaggagtacgggacccagggatgccaggtgta

SEQ ID NO: 19394 - DNA, 5460 bp, Artificial Sequence
  derived and/or modified sequence
agagtcaactctgccccgaggcctagcttggccagaaggtagcagacagacagacggatctaacctctcttggatcctccagccatgaggctgctctgggggctgatctgggcatccagcttcttcaccttatctctgcagaagcccaggttgctcttgttctctccttctgtggttcatctgggggtccccctatcggtgggggtgcagctccaggatgtgccccgaggacaggtagtgaaaggatcagtgttcctgagaaacccatctcgtaataatgtcccctgctccccaaaggtggacttcacccttagctcagaaagagacttcgcactcctcagtctccaggtgcccttgaaagatgcgaagagctgtggcctccatcaactcctcagaggccctgaggtccagctggtggcccattcgccatggctaaaggactctctgtccagaacgacaaacatccagggtatcaacctgctcttctcctctcgccgggggcacctctttttgcagacggaccagcccatttacaaccctggccagcgggttcggtaccgggtctttgctctggatcagaagatgcgcccgagcactgacaccatcacagtcatggtggagaactctcacggcctccgcgtgcggaagaaggaggtgtacatgccctcgtccatcttccaggatgactttgtgatcccagacatctcagagccagggacctggaagatctcagcccgattctcagatggcctggaatccaacagcagcacccagtttgaggtgaagaaatatgtccttcccaactttgaggtgaagatcacccctggaaagccctacatcctgacggtgccaggccatcttgatgaaatgcagttagacatccaggccaggtacatctatgggaagccagtgcagggggtggcatatgtgcgctttgggctcctagatgaggatggtaagaagactttctttcgggggctggagagtcagaccaagctggtgaatggacagagccacatttccctctcaaaggcagagttccaggacgccctggagaagctgaatatgggcattactgacctccaggggctgcgcctctacgttgctgcagccatcattgagtctccaggtggggagatggaggaggcagagctcacatcctggtattttgtgtcatctcccttctccttggatcttagcaagaccaagcgacaccttgtgcctggggcccccttcctgctgcaggccttggtccgtgagatgtcaggctccccagcttctggcattcctgtcaaagtttctgccacggtgtcttctcctgggtctgttcctgaagtccaggacattcagcaaaacacagacgggagcggccaagtcagcattccaataattatccctcagaccatctcagagctgcagctctcagtatctgcaggctccccacatccagcgatagccaggctcactgtggcagccccaccttcaggaggccccgggtttctgtctattgagcggccggattctcgacctcctcgtgttggggacactctgaacctgaacttgcgagccgtgggcagtggggccaccttttctcattactactacatgatcctatcccgagggcagatcgtgttcatgaatcgagagcccaagaggaccctgacctcggtctcggtgtttgtggaccatcacctggcaccctccttctactttgtggccttctactaccatggagaccacccagtggccaactccctgcgagtggatgtccaggctggggcctgcgagggcaagctggagctcagcgtggacggtgccaagcagtaccggaacggggagtccgtgaagctccacttagaaaccgactccctagccctggtggcgctgggagccttggacacagctctgtatgctgcaggcagcaagtcccacaagcccctcaacatgggcaaggtctttgaagctatgaacagctatgacctcggctgtggtcctgggggtggggacagtgcccttcaggtgttccaggcagcgggcctggccttttctgatggagaccagtggaccttatccagaaagagactaagctgtcccaaggagaagacaacccggaaaaagagaaacgtgaacttccaaaaggcgattaatgagaaattgggtcagtatgcttccccgacagccaagcgctgctgccaggatggggtgacacgtctgcccatgatgcgttcctgcgagcagcgggcagcccgcgtgcagcagccggactgccgggagcccttcctgtcctgctgccaatttgctgagagtctgcgcaagaagagcagggacaagggccaggcgggcctccaacgagccctggagatcctgcaggaggaggacctgattgatgaggatgacattcccgtgcgcagcttcttcccagagaactggctctggagagtggaaacagtggaccgctttcaaatattgacactgtggctccccgactctctgaccacgtgggagatccatggcctgagcctgtccaaaaccaaaggcctatgtgtggccaccccagttcagctccgggtgttccgcgagttccacctgcacctccgcctgcccatgtctgtccgccgctttgagcagctggagctgcggcctgtcctctataactacctggataaaaacctgactgtgagcgtccacgtgtccccagtggaggggctgtgcctggctgggggcggagggctggcccagcaggtgctggtgcctgcgggctctgcccggcctgttgccttctctgtggtgcccacggcagccaccgctgtgtctctgaaggtggtggctcgagggtccttcgaattccctgtgggagatgcggtgtccaaggttctgcagattgagaaggaaggggccatccatagagaggagctggtctatgaactcaaccccttggaccaccgaggccggaccttggaaatacctggcaactctgatcccaatatgatccctgatggggactttaacagctacgtcagggttacagcctcagatccattggacactttaggctctgagggggccttgtcaccaggaggcgtggcctccctcttgaggcttcctcgaggctgtggggagcaaaccatgatctacttggctccgacactggctgcttcccgctacctggacaagacagagcagtggagcacactgcctcccgagaccaaggaccacgccgtggatctgatccagaaaggctacatgcggatccagcagtttcggaaggcggatggttcctatgcggcttggttgtcacggggcagcagcacctggctcacagcctttgtgttgaaggtcctgagtttggcccaggagcaggtaggaggctcgcctgagaaactgcaggagacatctaactggcttctgtcccagcagcaggctgacggctcgttccaggacctctctccagtgatacataggagcatgcaggggggtttggtgggcaatgatgagactgtggcactcacagcctttgtgaccatcgcccttcatcatgggctggccgtcttccaggatgagggtgcagagccattgaagcagagagtggaagcctccatctcaaaggcaagctcatttttgggggagaaagcaagtgctgggctcctgggtgcccacgcagctgccatcacggcctatgccctgacactgaccaaggcccctgcggacctgcggggtgttgcccacaacaacctcatggcaatggcccaggagactggagataacctgtactggggctcagtcactggttctcagagcaatgccgtgtcgcccaccccggctcctcgcaacccatccgaccccatgccccaggccccagccctgtggattgaaaccacagcctacgccctgctgcacctcctgcttcacgagggcaaagcagagatggcagaccaggctgcggcctggctcacccgtcagggcagcttccaagggggattccgcagtacccaagacacggtgattgccctggatgccctgtctgcctactggattgcctcccacaccactgaggagaggggtctcaatgtgactctcagctccacaggccggaatgggttcaagtcccacgcgctgcagctgaacaaccgccagattcgcggcctggaggaggagctgcagttttccttgggcagcaagatcaatgtgaaggtgggaggaaacagcaaaggaaccctgaaggtccttcgtacctacaatgtcctggacatgaagaacacgacctgccaggacctacagatagaagtgacagtcaaaggccacgtcgagtacacgatggaagcaaacgaggactatgaggactatgagtacgatgagcttccagccaaggatgacccagatgcccctctgcagcccgtgacacccctgcagctgtttgagggtcggaggaaccgccgcaggagggaggcgcccaaggtggtggaggagcaggagtccagggtgcactacaccgtgtgcatctggcggaacggcaaggtggggctgtctggcatggccatcgcggacgtcaccctcctgagtggattccacgccctgcgtgctgacctggagaagctgacctccctctctgaccgttacgtgagtcactttgagaccgaggggccccacgtcctgctgtattttgactcggtccccacctcccgggagtgcgtgggctttgaggctgtgcaggaagtgccggtggggctggtgcagccggccagcgcaaccctgtacgactactacaaccccgagcgcagatgttctgtgttttacggggcaccaagtaagagcagactcttggccaccttgtgttctgctgaagtctgccagtgtgctgaggggaagtgccctcgccagcgtcgcgccctggagcggggtctgcaggacgaggatggctacaggatgaagtttgcctgctactacccccgtgtggagtacggcttccaggttaaggttctccgagaagacagcagagctgctttccgcctctttgagaccaagatcacccaagtcctgcacttcaccaaggatgtcaaggccgctgctaatcagatgcgcaacttcctggttcgagcctcctgccgccttcgcttggaacctgggaaagaatatttgatcatgggtctggatggggccacctatgacctcgagggacacccccagtacctgctggactcgaatagctggatcgaggagatgccctctgaacgcctgtgccggagcacccgccagcgggcagcctgtgcccagctcaacgacttcctccaggagtatggcactcaggggtgccaggtgtgagggctgccctcccacctccgctgggaggaacctgaacctgggaaccatgaagctggaagcactgctgtgtccgctttcatgaacacagcctgggaccagggcatattaaaggcttttggcagcaaagtgtcagtgttggca

SEQ ID NO: 19395 - DNA, 5460 bp, Artificial Sequence
  derived and/or modified sequence
agagtcaactctgccccgaggcctagcttggccagaaggtagcagacagacagacggatctaacctctcttggatcctccagccatgaggctgctctgggggctgatctgggcatccagcttcttcaccttatctctgcagaagcccaggttgctcttgttctctccttctgtggttcatctgggggtccccctatcggtgggggtgcagctccaggatgtgccccgaggacaggtagtgaaaggatcagtgttcctgagaaacccatctcgtaataatgtcccctgctccccaaaggtggacttcacccttagctcagaaagagacttcgcactcctcagtctccaggtgcccttgaaagatgcgaagagctgtggcctccatcaactcctcagaggccctgaggtccagctggtggcccattcgccatggctaaaggactctctgtccagaacgacaaacatccagggtatcaacctgctcttctcctctcgccgggggcacctctttttgcagacggaccagcccatttacaaccctggccagcgggttcggtaccgggtctttgctctggatcagaagatgcgcccgagcactgacaccatcacagtcatggtggagaactctcacggcctccgcgtgcggaagaaggaggtgtacatgccctcgtccatcttccaggatgactttgtgatcccagacatctcagagccagggacctggaagatctcagcccgattctcagatggcctggaatccaacagcagcacccagtttgaggtgaagaaatatgtccttcccaactttgaggtgaagatcacccctggaaagccctacatcctgacggtgccaggccatcttgatgaaatgcagttagacatccaggccaggtacatctatgggaagccagtgcagggggtggcatatgtgcgctttgggctcctagatgaggatggtaagaagactttctttcgggggctggagagtcagaccaagctggtgaatggacagagccacatttccctctcaaaggcagagttccaggacgccctggagaagctgaatatgggcattactgacctccaggggctgcgcctctacgttgctgcagccatcattgagtctccaggtggggagatggaggaggcagagctcacatcctggtattttgtgtcatctcccttctccttggatcttagcaagaccaagcgacaccttgtgcctggggcccccttcctgctgcaggccttggtccgtgagatgtcaggctccccagcttctggcattcctgtcaaagtttctgccacggtgtcttctcctgggtctgttcctgaagtccaggacattcagcaaaacacagacgggagcggccaagtcagcattccaataattatccctcagaccatctcagagctgcagctctcagtatctgcaggctccccacatccagcgatagccaggctcactgtggcagccccaccttcaggaggccccgggtttctgtctattgagcggccggattctcgacctcctcgtgttggggacactctgaacctgaacttgcgagccgtgggcagtggggccaccttttctcattactactacatgatcctatcccgagggcagatcgtgttcatgaatcgagagcccaagaggaccctgacctcggtctcggtgtttgtggaccatcacctggcaccctccttctactttgtggccttctactaccatggagaccacccagtggccaactccctgcgagtggatgtccaggctggggcctgcgagggcaagctggagctcagcgtggacggtgccaagcagtaccggaacggggagtccgtgaagctccacttagaaaccgactccctagccctggtggcgctgggagccttggacacagctctgtatgctgcaggcagcaagtcccacaagcccctcaacatgggcaaggtctttgaagctatgaacagctatgacctcggctgtggtcctgggggtggggacagtgcccttcaggtgttccaggcagcgggcctggccttttctgatggagaccagtggaccttatccagaaagagactaagctgtcccaaggagaagacaacccggaaaaagagaaacgtgaacttccaaaaggcgattaatgagaaattgggtcagtatgcttccccgacagccaagcgctgctgccaggatggggtgacacgtctgcccatgatgcgttcctgcgagcagcgggcagcccgcgtgcagcagccggactgccgggagcccttcctgtcctgctgccaatttgctgagagtctgcgcaagaagagcagggacaagggccaggcgggcctccaacgagccctggagatcctgcaggaggaggacctgattgatgaggatgacattcccgtgcgcagcttcttcccagagaactggctctggagagtggaaacagtggaccgctttcaaatattgacactgtggctccccgactctctgaccacgtgggagatccatggcctgagcctgtccaaaaccaaaggcctatgtgtggccaccccagtccagctccgggtgttccgcgagttccacctgcacctccgcctgcccatgtctgtccgccgctttgagcagctggagctgcggcctgtcctctataactacctggataaaaacctgactgtgagcgtccacgtgtccccagtggaggggctgtgcctggctgggggcggagggctggcccagcaggtgctggtgcctgcgggctctgcccggcctgttgccttctctgtggtgcccacggcagccaccgctgtgtctctgaaggtggtggctcgagggtccttcgaattccctgtgggagatgcggtgtccaaggttctgcagattgagaaggaaggggccatccatagagaggagctggtctatgaactcaaccccttggaccaccgaggccggaccttggaaatacctggcaactctgatcccaatatgatccctgatggggactttaacagctacgtcagggttacagcctcagatccattggacactttaggctctgagggggccttgtcaccaggaggcgtggcctccctcttgaggcttcctcgaggctgtggggagcaaaccatgatctacttggctccgacactggctgcttcccgctacctggacaagacagagcagtggagcacactgcctcccgagaccaaggaccacgccgtggatctgatccagaaaggctacatgcggatccagcagtttcggaaggcggatggttcctatgcggcttggttgtcacggggcagcagcacctggctcacagcctttgtgttgaaggtcctgagtttggcccaggagcaggtaggaggctcgcctgagaaactgcaggagacatctaactggcttctgtcccagcagcaggctgacggctcgttccaggacctctctccagtgatacataggagcatgcaggggggtttggtgggcaatgatgagactgtggcactcacagcctttgtgaccatcgcccttcatcatgggctggccgtcttccaggatgagggtgcagagccattgaagcagagagtggaagcctccatctcaaaggcaagctcatttttgggggagaaagcaagtgctgggctcctgggtgcccacgcagctgccatcacggcctatgccctgacactgaccaaggcccctgcggacctgcggggtgttgcccacaacaacctcatggcaatggcccaggagactggagataacctgtactggggctcagtcactggttctcagagcaatgccgtgtcgcccaccccggctcctcgcaacccatccgaccccatgccccaggccccagccctgtggattgaaaccacagcctacgccctgctgcacctcctgcttcacgagggcaaagcagagatggcagaccaggctgcggcctggctcacccgtcagggcagcttccaagggggattccgcagtacccaagacacggtgattgccctggatgccctgtctgcctactggattgcctcccacaccactgaggagaggggtctcaatgtgactctcagctccacaggccggaatgggttcaagtcccacgcgctgcagctgaacaaccgccagattcgcggcctggaggaggagctgcagttttccttgggcagcaagatcaatgtgaaggtgggaggaaacagcaaaggaaccctgaaggtccttcgtacctacaatgtcctggacatgaagaacacgacctgccaggacctacagatagaagtgacagtcaaaggccacgtcgagtacacgatggaagcaaacgaggactatgaggactatgagtacgatgagcttccagccaaggatgacccagatgcccctctgcagcccgtgacacccctgcagctgtttgagggtcggaggaaccgccgcaggagggaggcgcccaaggtggtggaggagcaggagtccagggtgcactacaccgtgtgcatctggcggaacggcaaggtggggctgtctggcatggccatcgcggacgtcaccctcctgagtggattccacgccctgcgtgctgacctggagaagctgacctccctctctgaccgttacgtgagtcactttgagaccgaggggccccacgtcctgctgtattttgactcggtccccacctcccgggagtgcgtgggctttgaggctgtgcaggaagtgccggtggggctggtgcagccggccagcgcaaccctgtacgactactacaaccccgagcgcagatgttctgtgttttacggggcaccaagtaagagcagactcttggccaccttgtgttctgctgaagtctgccagtgtgctgaggggaagtgccctcgccagcgtcgcgccctggagcggggtctgcaggacgaggatggctacaggatgaagtttgcctgctactacccccgtgtggagtacggcttccaggttaaggttctccgagaagacagcagagctgctttccgcctctttgagaccaagatcacccaagtcctgcacttcaccaaggatgtcaaggccgctgctaatcagatgcgcaacttcctggttcgagcctcctgccgccttcgcttggaacctgggaaagaatatttgatcatgggtctggatggggccacctatgacctcgagggacacccccagtacctgctggactcgaatagctggatcgaggagatgccctctgaacgcctgtgccggagcacccgccagcgggcagcctgtgcccagctcaacgacttcctccaggagtatggcactcaggggtgccaggtgtgagggctgccctcccacctccgctgggaggaacctgaacctgggaaccatgaagctggaagcactgctgtgtccgctttcatgaacacagcctgggaccagggcatattaaaggcttttggcagcaaagtgtcagtgttggca

SEQ ID NO: 19396 - DNA, 5460 bp, Artificial Sequence
  derived and/or modified sequence
agagtcaactctgccccgaggcctagcttggccagaaggtagcagacagacagacggatctaacctctcttggatcctccagccatgaggctgctctgggggctgatctgggcatccagcttcttcaccttatctctgcagaagcccaggttgctcttgttctctccttctgtggttcatctgggggtccccctatcggtgggggtgcagctccaggatgtgccccgaggacaggtagtgaaaggatcagtgttcctgagaaacccatctcgtaataatgtcccctgctccccaaaggtggacttcacccttagctcagaaagagactttgcactcctcagtctccaggtgcccttgaaagatgcgaagagctgtggcctccatcaactcctcagaggccctgaggtccagctggtggcccattcgccatggctaaaggactctctgtccagaacgacaaacatccagggtatcaacctgctcttctcctctcgccgggggcacctctttttgcagacggaccagcccatttacaaccctggccagcgggttcggtaccgggtctttgctctggatcagaagatgcgcccgagcactgacaccatcacagtcatggtggagaactctcacggcctccgcgtgcggaagaaggaggtgtacatgccctcgtccatcttccaggatgactttgtgatcccagacatctcagagccagggacctggaagatctcagcccgattctcagatggcctggaatccaacagcagcacccagtttgaggtgaagaaatatgtccttcccaactttgaggtgaagatcacccctggaaagccctacatcctgacggtgccaggccatcttgatgaaatgcagttagacatccaggccaggtacatctatgggaagccagtgcagggggtggcatatgtgcgctttgggctcctagatgaggatggtaagaagactttctttcgggggctggagagtcagaccaagctggtgaatggacagagccacatttccctctcaaaggcagagttccaggacgccctggagaagctgaatatgggcattactgacctccaggggctgcgcctctacgttgctgcagccatcattgagtctccaggtggggagatggaggaggcagagctcacatcctggtattttgtgtcatctcccttctccttggatcttagcaagaccaagcgacaccttgtgcctggggcccccttcctgctgcaggccttggtccgtgagatgtcaggctccccagcttctggcattcctgtcaaagtttctgccacggtgtcttctcctgggtctgttcctgaagtccaggacattcagcaaaacacagacgggagcggccaagtcagcattccaataattatccctcagaccatctcagagctgcagctctcagtatctgcaggctccccacatccagcgatagccaggctcactgtggcagccccaccttcaggaggccccgggtttctgtctattgagcggccggattctcgacctcctcgtgttggggacactctgaacctgaacttgcgagccgtgggcagtggggccaccttttctcattactactacatgatcctatcccgagggcagatcgtgttcatgaatcgagagcccaagaggaccctgacctcggtctcggtgtttgtggaccatcacctggcaccctccttctactttgtggccttctactaccatggagaccacccagtggccaactccctgcgagtggatgtccaggctggggcctgcgagggcaagctggagctcagcgtggacggtgccaagcagtaccggaacggggagtccgtgaagctccacttagaaaccgactccctagccctggtggcgctgggagccttggacacagctctgtatgctgcaggcagcaagtcccacaagcccctcaacatgggcaaggtctttgaagctatgaacagctatgacctcggctgtggtcctgggggtggggacagtgcccttcaggtgttccaggcagcgggcctggccttttctgatggagaccagtggaccttatccagaaagagactaagctgtcccaaggagaagacaacccggaaaaagagaaacgtgaacttccaaaaggcgattaatgagaaattgggtcagtatgcttccccgacagccaagcgctgctgccaggatggggtgacacgtctgcccatgatgcgttcctgcgagcagcgggcagcccgcgtgcagcagccggactgccgggagcccttcctgtcctgctgccaatttgctgagagtctgcgcaagaagagcagggacaagggccaggcgggcctccaacgagccctggagatcctgcaggaggaggacctgattgatgaggatgacattcccgtgcgcagcttcttcccagagaactggctctggagagtggaaacagtggaccgctttcaaatattgacactgtggctccccgactctctgaccacgtgggagatccatggcctgagcctgtccaaaaccaaaggcctatgtgtggccaccccagtccagctccgggtgttccgcgagttccacctgcacctccgcctgcccatgtctgtccgccgctttgagcagctggagctgcggcctgtcctctataactacctggataaaaacctgactgtgagcgtccacgtgtccccagtggaggggctgtgcctggctgggggcggagggctggcccagcaggtgctggtgcctgcgggctctgcccggcctgttgccttctctgtggtgcccacggcagccgccgctgtgtctctgaaggtggtggctcgagggtccttcgaattccctgtgggagatgcggtgtccaaggttctgcagattgagaaggaaggggccatccatagagaggagctggtctatgaactcaaccccttggaccaccgaggccggaccttggaaatacctggcaactctgatcccaatatgatccctgatggggactttaacagctacgtcagggttacagcctcagatccattggacactttaggctctgagggggccttgtcaccaggaggcgtggcctccctcttgaggcttcctcgaggctgtggggagcaaaccatgatctacttggctccgacactggctgcttcccgctacctggacaagacagagcagtggagcacactgcctcccgagaccaaggaccacgccgtggatctgatccagaaaggctacatgcggatccagcagtttcggaaggcggatggttcctatgcggcttggttgtcacggggcagcagcacctggctcacagcctttgtgttgaaggtcctgagtttggcccaggagcaggtaggaggctcgcctgagaaactgcaggagacatctaactggcttctgtcccagcagcaggctgacggctcgttccaggacctctctccagtgatacataggagcatgcaggggggtttggtgggcaatgatgagactgtggcactcacagcctttgtgaccatcgcccttcatcatgggctggccgtcttccaggatgagggtgcagagccattgaagcagagagtggaagcctccatctcaaaggcaaactcatttttgggggagaaagcaagtgctgggctcctgggtgcccacgcagctgccatcacggcctatgccctgacactgaccaaggcccctgcggacctgcggggtgttgcccacaacaacctcatggcaatggcccaggagactggagataacctgtactggggctcagtcactggttctcagagcaatgccgtgtcgcccaccccggctcctcgcaacccatccgaccccatgccccaggccccagccctgtggattgaaaccacagcctacgccctgctgcacctcctgcttcacgagggcaaagcagagatggcagaccaggctgcggcctggctcacccgtcagggcagcttccaagggggattccgcagtacccaagacacggtgattgccctggatgccctgtctgcctactggattgcctcccacaccactgaggagaggggtctcaatgtgactctcagctccacaggccggaatgggttcaagtcccacgcgctgcagctgaacaaccgccagattcgcggcctggaggaggagctgcagttttccttgggcagcaagatcaatgtgaaggtgggaggaaacagcaaaggaaccctgaaggtccttcgtacctacaatgtcctggacatgaagaacacgacctgccaggacctacagatagaagtgacagtcaaaggccacgtcgagtacacgatggaagcaaacgaggactatgaggactatgagtacgatgagcttccagccaaggatgacccagatgcccctctgcagcccgtgacacccctgcagctgtttgagggtcggaggaaccgccgcaggagggaggcgcccaaggtggtggaggagcaggagtccagggtgcactacaccgtgtgcatctggcggaacggcaaggtggggctgtctggcatggccatcgcggacgtcaccctcctgagtggattccacgccctgcgtgctgacctggagaagctgacctccctctctgaccgttacgtgagtcactttgagaccgaggggccccacgtcctgctgtattttgactcggtccccacctcccgggagtgcgtgggctttgaggctgtgcaggaagtgccggtggggctggtgcagccggccagcgcaaccctgtacgactactacaaccccgagcgcagatgttctgtgttttacggggcaccaagtaagagcagactcttggccaccttgtgttctgctgaagtctgccagtgtgctgaggggaagtgccctcgccagcgtcgcgccctggagcggggtctgcaggacgaggatggctacaggatgaagtttgcctgctactacccccgtgtggagtacggcttccaggttaaggttctccgagaagacagcagagctgctttccgcctctttgagaccaagatcacccaagtcctgcacttcaccaaggatgtcaaggccgctgctaatcagatgcgcaacttcctggttcgagcctcctgccgccttcgcttggaacctgggaaagaatatttgatcatgggtctggatggggccacctatgacctcgagggacacccccagtacctgctggactcgaatagctggatcgaggagatgccctctgaacgcctgtgccggagcacccgccagcgggcagcctgtgcccagctcaacgacttcctccaggagtatggcactcaggggtgccaggtgtgagggctgccctcccacctccgctgggaggaacctgaacctgggaaccatgaagctggaagcactgctgtgtccgctttcatgaacacagcctgggaccagggcatattaaaggcttttggcagcaaagtgtcagtgttggca

SEQ ID NO: 19397 - DNA, 1276 bp, Artificial Sequence
  derived and/or modified sequence
agacggatctaacctctcttggatcctccagccatgaggctgctctgggggctgatctgggcatccagcttcttcaccttatctctgcagaagcccaggttgctcttgttctctccttctgtggttcatctgggggtccccctatcggtgggggtgcagctccaggatgtgccccgaggacagtctccaggtgcccttgaaagatgcgaagagctgtggcctccatcaactcctcagaggccctgaggtccagctggtggcccattcgccatggctaaaggactctctgtccagaacgacaaacatccagggtatcaacctgctcttctcctctcgccgggggcacctctttttgcagacggaccagcccatttacaaccctggccagcgggttcggtaccgggtctttgctctggatcagaagatgcgcccgagcactgacaccatcacagtcatggtggagaactctcacggcctccgcgtgcggaagaaggaggtgtacatgccctcgtccatcttccaggatgactttgtgatcccagacatctcagagccagggacctggaagatctcagcccgattctcagatggcctggaatccaacagcagcacccagtttgaggtgaagaaatatgtccttcccaactttgaggtgaagatcacccctggaaagccctacatcctgacggtgccaggccatcttgatgaaatgcagttagacatccaggccaggtacatctatgggaagccagtgcagggggtggcatatgtgcgctttgggctcctagatgaggatggtaagaagactttctttcgggggctggagagtcagaccaagctggtgaatggacagagccacatttccctctcaaaggcagagttccaggacgccctggagaagctgaatatgggcattactgacctccaggggctgcgcctctacgttgctgcagccatcattgagtctccaggtgggtgactttcccttattgtaaccccagacccttgcctctgacctctgagctaaccctctgtcctccggcaccaacaccaccccacttctcacatctcatctcagactcaaaaccaggaaacacccaggagacctggtttctctccaactctgtctctgtgactcggcccttttccctggctgagtttatttatttctttgctcgttctgctcattccttcactcctccagtggacatgtgttgttcaatgccctgtgctgggcctcagcatgtacagacaggaatacagcagcctgcgccct

SEQ ID NO: 19398 - DNA, 5235 bp, Artificial Sequence
  derived and/or modified sequence
atgagactgctgtggggcctgatctgggccagcagcttcttcaccctgagcctgcagaagcccagactgctgctgttcagccccagcgtggtgcacctgggcgtgcccctgagcgtgggcgtgcagctgcaggacgtgcccagaggccaggtggtgaagggcagcgtgttcctgagaaaccccagcagaaacaacgtgccctgcagccccaaggtggacttcaccctgagcagcgagagagacttcgccctgctgagcctgcaggtgcccctgaaggacgccaagagctgcggcctgcaccagctgctgagaggccccgaggtgcagctggtggcccacagcccctggctgaaggacagcctgagcagaaccaccaacatccagggcatcaacctgctgttcagcagcagaagaggccacctgttcctgcagaccgaccagcccatctacaaccccggccagagagtgagatacagagtgttcgccctggaccagaagatgagacccagcaccgacaccatcaccgtgatggtggagaacagccacggcctgagagtgagaaagaaggaggtgtacatgcccagcagcatcttccaggacgacttcgtgatccccgacatcagcgagcccggcacctggaagatcagcgccagattcagcgacggcctggagagcaacagcagcacccagttcgaggtgaagaagtacgtgctgcccaacttcgaggtgaagatcacccccggcaagccctacatcctgaccgtgcccggccacctggacgagatgcagctggacatccaggccagatacatctacggcaagcccgtgcagggcgtggcctacgtgagattcggcctgctggacgaggacggcaagaagaccttcttcagaggcctggagagccagaccaagctggtgaacggccagagccacatcagcctgagcaaggccgagttccaggacgccctggagaagctgaacatgggcatcaccgacctgcagggcctgagactgtacgtggccgccgccatcatcgagagccccggcggcgagatggaggaggccgagctgaccagctggtacttcgtgagcagccccttcagcctggacctgagcaagaccaagagacacctggtgcccggcgcccccttcctgctgcaggccctggtgagagagatgagcggcagccccgccagcggcatccccgtgaaggtgagcgccaccgtgagcagccccggcagcgtgcccgaggtgcaggacatccagcagaacaccgacggcagcggccaggtgagcatccccatcatcatcccccagaccatcagcgagctgcagctgagcgtgagcgccggcagcccccaccccgccatcgccagactgaccgtggccgccccccccagcggcggccccggcttcctgagcatcgagagacccgacagcagaccccccagagtgggcgacaccctgaacctgaacctgagagccgtgggcagcggcgccaccttcagccactactactacatgatcctgagcagaggccagatcgtgttcatgaacagagagcccaagagaaccctgaccagcgtgagcgtgttcgtggaccaccacctggcccccagcttctacttcgtggccttctactaccacggcgaccaccccgtggccaacagcctgagagtggacgtgcaggccggcgcctgcgagggcaagctggagctgagcgtggacggcgccaagcagtacagaaacggcgagagcgtgaagctgcacctggagaccgacagcctggccctggtggccctgggcgccctggacaccgccctgtacgccgccggcagcaagagccacaagcccctgaacatgggcaaggtgttcgaggccatgaacagctacgacctgggctgcggccccggcggcggcgacagcgccctgcaggtgttccaggccgccggcctggccttcagcgacggcgaccagtggaccctgagcagaaagagactgagctgccccaaggagaagaccaccagaaagaagagaaacgtgaacttccagaaggccatcaacgagaagctgggccagtacgccagccccaccgccaagagatgctgccaggacggcgtgaccagactgcccatgatgagaagctgcgagcagagagccgccagagtgcagcagcccgactgcagagagcccttcctgagctgctgccagttcgccgagagcctgagaaagaagagcagagacaagggccaggccggcctgcagagagccctggagatcctgcaggaggaggacctgatcgacgaggacgacatccccgtgagaagcttcttccccgagaactggctgtggagagtggagaccgtggacagattccagatcctgaccctgtggctgcccgacagcctgaccacctgggagatccacggcctgagcctgagcaagaccaagggcctgtgcgtggccacccccgtgcagctgagagtgttcagagagttccacctgcacctgagactgcccatgagcgtgagaagattcgagcagctggagctgagacccgtgctgtacaactacctggacaagaacctgaccgtgagcgtgcacgtgagccccgtggagggcctgtgcctggccggcggcggcggcctggcccagcaggtgctggtgcccgccggcagcgccagacccgtggccttcagcgtggtgcccaccgccgccaccgccgtgagcctgaaggtggtggccagaggcagcttcgagttccccgtgggcgacgccgtgagcaaggtgctgcagatcgagaaggagggcgccatccacagagaggagctggtgtacgagctgaaccccctggaccacagaggcagaaccctggagatccccggcaacagcgaccccaacatgatccccgacggcgacttcaacagctacgtgagagtgaccgccagcgaccccctggacaccctgggcagcgagggcgccctgagccccggcggcgtggccagcctgctgagactgcccagaggctgcggcgagcagaccatgatctacctggcccccaccctggccgccagcagatacctggacaagaccgagcagtggagcaccctgccccccgagaccaaggaccacgccgtggacctgatccagaagggctacatgagaatccagcagttcagaaaggccgacggcagctacgccgcctggctgagcagaggcagcagcacctggctgaccgccttcgtgctgaaggtgctgagcctggcccaggagcaggtgggcggcagccccgagaagctgcaggagaccagcaactggctgctgagccagcagcaggccgacggcagcttccaggacctgagccccgtgatccacagaagcatgcagggcggcctggtgggcaacgacgagaccgtggccctgaccgccttcgtgaccatcgccctgcaccacggcctggccgtgttccaggacgagggcgccgagcccctgaagcagagagtggaggccagcatcagcaaggccagcagcttcctgggcgagaaggccagcgccggcctgctgggcgcccacgccgccgccatcaccgcctacgccctgaccctgaccaaggcccccgccgacctgagaggcgtggcccacaacaacctgatggccatggcccaggagaccggcgacaacctgtactggggcagcgtgaccggcagccagagcaacgccgtgagccccacccccgcccccagaaaccccagcgaccccatgccccaggcccccgccctgtggatcgagaccaccgcctacgccctgctgcacctgctgctgcacgagggcaaggccgagatggccgaccaggccgccgcctggctgaccagacagggcagcttccagggcggcttcagaagcacccaggacaccgtgatcgccctggacgccctgagcgcctactggatcgccagccacaccaccgaggagagaggcctgaacgtgaccctgagcagcaccggcagaaacggcttcaagagccacgccctgcagctgaacaacagacagatcagaggcctggaggaggagctgcagttcagcctgggcagcaagatcaacgtgaaggtgggcggcaacagcaagggcaccctgaaggtgctgagaacctacaacgtgctggacatgaagaacaccacctgccaggacctgcagatcgaggtgaccgtgaagggccacgtggagtacaccatggaggccaacgaggactacgaggactacgagtacgacgagctgcccgccaaggacgaccccgacgcccccctgcagcccgtgacccccctgcagctgttcgagggcagaagaaacagaagaagaagagaggcccccaaggtggtggaggagcaggagagcagagtgcactacaccgtgtgcatctggagaaacggcaaggtgggcctgagcggcatggccatcgccgacgtgaccctgctgagcggcttccacgccctgagagccgacctggagaagctgaccagcctgagcgacagatacgtgagccacttcgagaccgagggcccccacgtgctgctgtacttcgacagcgtgcccaccagcagagagtgcgtgggcttcgaggccgtgcaggaggtgcccgtgggcctggtgcagcccgccagcgccaccctgtacgactactacaaccccgagagaagatgcagcgtgttctacggcgcccccagcaagagcagactgctggccaccctgtgcagcgccgaggtgtgccagtgcgccgagggcaagtgccccagacagagaagagccctggagagaggcctgcaggacgaggacggctacagaatgaagttcgcctgctactaccccagagtggagtacggcttccaggtgaaggtgctgagagaggacagcagagccgccttcagactgttcgagaccaagatcacccaggtgctgcacttcaccaaggacgtgaaggccgccgccaaccagatgagaaacttcctggtgagagccagctgcagactgagactggagcccggcaaggagtacctgatcatgggcctggacggcgccacctacgacctggagggccacccccagtacctgctggacagcaacagctggatcgaggagatgcccagcgagagactgtgcagaagcaccagacagagagccgcctgcgcccagctgaacgacttcctgcaggagtacggcacccagggctgccaggtgtag

SEQ ID NO: 19399 - DNA, 5235 bp, Artificial Sequence
  derived and/or modified sequence
atgagactgctgtggggcctgatctgggccagcagcttcttcaccctgagcctgcagaagcccagactgctgctgttcagccccagcgtggtgcacctgggcgtgcccctgagcgtgggcgtgcagctgcaggacgtgcccagaggccaggtggtgaagggcagcgtgttcctgagaaaccccagcagaaacaacgtgccctgcagccccaaggtggacttcaccctgagcagcgagagagacttcgccctgctgagcctgcaggtgcccctgaaggacgccaagagctgcggcctgcaccagctgctgagaggccccgaggtgcagctggtggcccacagcccctggctgaaggacagcctgagcagaaccaccaacatccagggcatcaacctgctgttcagcagcagaagaggccacctgttcctgcagaccgaccagcccatctacaaccccggccagagagtgagatacagagtgttcgccctggaccagaagatgagacccagcaccgacaccatcaccgtgatggtggagaacagccacggcctgagagtgagaaagaaggaggtgtacatgcccagcagcatcttccaggacgacttcgtgatccccgacatcagcgagcccggcacctggaagatcagcgccagattcagcgacggcctggagagcaacagcagcacccagttcgaggtgaagaagtacgtgctgcccaacttcgaggtgaagatcacccccggcaagccctacatcctgaccgtgcccggccacctggacgagatgcagctggacatccaggccagatacatctacggcaagcccgtgcagggcgtggcctacgtgagattcggcctgctggacgaggacggcaagaagaccttcttcagaggcctggagagccagaccaagctggtgaacggccagagccacatcagcctgagcaaggccgagttccaggacgccctggagaagctgaacatgggcatcaccgacctgcagggcctgagactgtacgtggccgccgccatcatcgagagccccggcggcgagatggaggaggccgagctgaccagctggtacttcgtgagcagccccttcagcctggacctgagcaagaccaagagacacctggtgcccggcgcccccttcctgctgcaggccctggtgagagagatgagcggcagccccgccagcggcatccccgtgaaggtgagcgccaccgtgagcagccccggcagcgtgcccgaggtgcaggacatccagcagaacaccgacggcagcggccaggtgagcatccccatcatcatcccccagaccatcagcgagctgcagctgagcgtgagcgccggcagcccccaccccgccatcgccagactgaccgtggccgccccccccagcggcggccccggcttcctgagcatcgagagacccgacagcagaccccccagagtgggcgacaccctgaacctgaacctgagagccgtgggcagcggcgccaccttcagccactactactacatgatcctgagcagaggccagatcgtgttcatgaacagagagcccaagagaaccctgaccagcgtgagcgtgttcgtggaccaccacctggcccccagcttctacttcgtggccttctactaccacggcgaccaccccgtggccaacagcctgagagtggacgtgcaggccggcgcctgcgagggcaagctggagctgagcgtggacggcgccaagcagtacagaaacggcgagagcgtgaagctgcacctggagaccgacagcctggccctggtggccctgggcgccctggacaccgccctgtacgccgccggcagcaagagccacaagcccctgaacatgggcaaggtgttcgaggccatgaacagctacgacctgggctgcggccccggcggcggcgacagcgccctgcaggtgttccaggccgccggcctggccttcagcgacggcgaccagtggaccctgagcagaaagagactgagctgccccaaggagaagaccaccagaaagaagagaaacgtgaacttccagaaggccatcaacgagaagctgggccagtacgccagccccaccgccaagagatgctgccaggacggcgtgaccagactgcccatgatgagaagctgcgagcagagagccgccagagtgcagcagcccgactgcagagagcccttcctgagctgctgccagttcgccgagagcctgagaaagaagagcagagacaagggccaggccggcctgcagagagccctggagatcctgcaggaggaggacctgatcgacgaggacgacatccccgtgagaagcttcttccccgagaactggctgtggagagtggagaccgtggacagattccagatcctgaccctgtggctgcccgacagcctgaccacctgggagatccacggcctgagcctgagcaagaccaagggcctgtgcgtggccacccccgtgcagctgagagtgttcagagagttccacctgcacctgagactgcccatgagcgtgagaagattcgagcagctggagctgagacccgtgctgtacaactacctggacaagaacctgaccgtgagcgtgcacgtgagccccgtggagggcctgtgcctggccggcggcggcggcctggcccagcaggtgctggtgcccgccggcagcgccagacccgtggccttcagcgtggtgcccaccgccgccgccgccgtgagcctgaaggtggtggccagaggcagcttcgagttccccgtgggcgacgccgtgagcaaggtgctgcagatcgagaaggagggcgccatccacagagaggagctggtgtacgagctgaaccccctggaccacagaggcagaaccctggagatccccggcaacagcgaccccaacatgatccccgacggcgacttcaacagctacgtgagagtgaccgccagcgaccccctggacaccctgggcagcgagggcgccctgagccccggcggcgtggccagcctgctgagactgcccagaggctgcggcgagcagaccatgatctacctggcccccaccctggccgccagcagatacctggacaagaccgagcagtggagcaccctgccccccgagaccaaggaccacgccgtggacctgatccagaagggctacatgagaatccagcagttcagaaaggccgacggcagctacgccgcctggctgagcagaggcagcagcacctggctgaccgccttcgtgctgaaggtgctgagcctggcccaggagcaggtgggcggcagccccgagaagctgcaggagaccagcaactggctgctgagccagcagcaggccgacggcagcttccaggacctgagccccgtgatccacagaagcatgcagggcggcctggtgggcaacgacgagaccgtggccctgaccgccttcgtgaccatcgccctgcaccacggcctggccgtgttccaggacgagggcgccgagcccctgaagcagagagtggaggccagcatcagcaaggccaacagcttcctgggcgagaaggccagcgccggcctgctgggcgcccacgccgccgccatcaccgcctacgccctgaccctgaccaaggcccccgccgacctgagaggcgtggcccacaacaacctgatggccatggcccaggagaccggcgacaacctgtactggggcagcgtgaccggcagccagagcaacgccgtgagccccacccccgcccccagaaaccccagcgaccccatgccccaggcccccgccctgtggatcgagaccaccgcctacgccctgctgcacctgctgctgcacgagggcaaggccgagatggccgaccaggccgccgcctggctgaccagacagggcagcttccagggcggcttcagaagcacccaggacaccgtgatcgccctggacgccctgagcgcctactggatcgccagccacaccaccgaggagagaggcctgaacgtgaccctgagcagcaccggcagaaacggcttcaagagccacgccctgcagctgaacaacagacagatcagaggcctggaggaggagctgcagttcagcctgggcagcaagatcaacgtgaaggtgggcggcaacagcaagggcaccctgaaggtgctgagaacctacaacgtgctggacatgaagaacaccacctgccaggacctgcagatcgaggtgaccgtgaagggccacgtggagtacaccatggaggccaacgaggactacgaggactacgagtacgacgagctgcccgccaaggacgaccccgacgcccccctgcagcccgtgacccccctgcagctgttcgagggcagaagaaacagaagaagaagagaggcccccaaggtggtggaggagcaggagagcagagtgcactacaccgtgtgcatctggagaaacggcaaggtgggcctgagcggcatggccatcgccgacgtgaccctgctgagcggcttccacgccctgagagccgacctggagaagctgaccagcctgagcgacagatacgtgagccacttcgagaccgagggcccccacgtgctgctgtacttcgacagcgtgcccaccagcagagagtgcgtgggcttcgaggccgtgcaggaggtgcccgtgggcctggtgcagcccgccagcgccaccctgtacgactactacaaccccgagagaagatgcagcgtgttctacggcgcccccagcaagagcagactgctggccaccctgtgcagcgccgaggtgtgccagtgcgccgagggcaagtgccccagacagagaagagccctggagagaggcctgcaggacgaggacggctacagaatgaagttcgcctgctactaccccagagtggagtacggcttccaggtgaaggtgctgagagaggacagcagagccgccttcagactgttcgagaccaagatcacccaggtgctgcacttcaccaaggacgtgaaggccgccgccaaccagatgagaaacttcctggtgagagccagctgcagactgagactggagcccggcaaggagtacctgatcatgggcctggacggcgccacctacgacctggagggccacccccagtacctgctggacagcaacagctggatcgaggagatgcccagcgagagactgtgcagaagcaccagacagagagccgcctgcgcccagctgaacgacttcctgcaggagtacggcacccagggctgccaggtgtag

SEQ ID NO: 19400 - protein, 157 aa, Artificial Sequence
  derived and/or modified sequence
MPELILSPATAPHPLKMFACSKFVSTPSLVKSTSQLLSRPLSAVVLKRPEILTDESLSSLAVSCPLTSLVSSRSFQTSAISRDIDTAAKFIGAGAATVGVAGSGAGIGTVFGSLIIGYARNPSLKQQLFSYAILGFALSEAMGLFCLMVAFLILFAM

SEQ ID NO: 19401 - DNA, 474 bp, Artificial Sequence
  derived and/or modified sequence
atgcccgagctcatcctgagccctgccactgcgccccatccactgaaaatgtttgcttgctcaaagttcgtgagtacgccaagcctcgtaaaatctacctcccaacttctgagcaggcctttgagtgccgtcgtgctcaagcgccccgaaattcttactgacgaatctctgagctcactggccgtgtcttgccccttaacaagcctcgtatcaagcaggagtttccagacttcggccataagtcgggatattgacacggctgcgaaatttatcggggccggagcagccacagtgggtgtcgccggtagcggcgccggaatcggtaccgttttcggatccctcattatcggctacgctcggaaccctagccttaaacagcaactgttctcttacgctatcttaggtttcgccctctctgaggctatgggcctgttttgtttaatggtggccttcctgatactctttgccatgtag

SEQ ID NO: 19402 - DNA, 426 bp, Artificial Sequence
  derived and/or modified sequence
atgtttgcctgctctaaatttgtatccaccccgagtctagtgaaatctactagccagttactgtccaggccactgtcagcggtggtcctgaagcgccccgagattctgacagatgagtccctttctagcctggcggtgtcctgtcccctcaccagcctggtgtcatctcgatcgtttcagacttctgccatctcaagagatatcgataccgctgcaaagttcataggagctggcgccgcaacagtgggagtggccgggtccggcgccggaatcggtactgtcttcggttccttaatcatagggtacgctcgtaatcctagcttgaagcagcagttgttcagctacgcaatactcggcttcgcgctgtccgaggcaatgggcttgttctgcttaatggtggcatttctgatattgtttgcaatgtag

SEQ ID NO: 19403 - DNA, 474 bp, Artificial Sequence
  derived and/or modified sequence
atgcctgagctgatcctgagccctgccacagccccccaccccctgaagatgtttgcctgcagcaagtttgtgtccacccccagcctggtgaagagcaccagccagctgctgagccggcccctgtctgctgtggtgctgaagaggcctgagatcctgacagatgagagcctgagcagcctggccgtgtcctgccccctgaccagcctggtgagcagccgctccttccagaccagcgccatcagccgggacatcgacacagctgccaagttcatcggggccggggccgccaccgtgggcgtggccggcagcggggccggcattggaacagtgtttggcagcctcatcatcggctacgccaggaaccccagcctgaagcagcagctgttctcctatgccatcctgggctttgccctgtctgaggccatgggcctcttctgcctgatggtggccttcctgatcctgtttgccatgtag

SEQ ID NO: 19404 - DNA, 426 bp, Artificial Sequence
  derived and/or modified sequence
atgtttgcctgcagcaagtttgtgtccacccccagcctggtgaagagcaccagccagctgctgagccggcccctgtctgctgtggtgctgaagaggcctgagatcctgacagatgagagcctgagcagcctggccgtgtcctgccccctgaccagcctggtgagcagccgctccttccagaccagcgccatcagccgggacatcgacacagctgccaagttcatcggggccggggccgccaccgtgggcgtggccggcagcggggccggcattggaacagtgtttggcagcctcatcatcggctacgccaggaaccccagcctgaagcagcagctgttctcctatgccatcctgggctttgccctgtctgaggccatgggcctcttctgcctgatggtggccttcctgatcctgtttgccatgtag

SEQ ID NO: 19405 - DNA, 474 bp, Artificial Sequence
  derived and/or modified sequence
atgcccgagctgatcctgagccccgccaccgccccccaccccctgaagatgttcgcctgctctaaattcgtttcaacaccctccctggtcaagtccacgagccaactcttgtctcggccacttagtgcggtcgtgctcaagcgaccggaaatcctgactgatgagtccttatcgtccctagccgtgtcttgtcctttgacatcactggtgtcgtccaggtcattccaaacaagtgcaatctcccgcgatatcgataccgcagccaaattcatcggagctggcgccgctacagtcggcgtcgctgggagcggagctgggatcggtaccgtcttcggctccctaataattgggtatgcgcggaatccttccctcaaacaacaactcttttcttacgctatattaggttttgccctgagcgaggctatgggactcttttgtctcatggtcgcattcttgatcctgtttgcgatgtag

SEQ ID NO: 19406 - DNA, 426 bp, Artificial Sequence
  derived and/or modified sequence
atgttcgcctgcagcaagttcgtgagcacccccagcctggtgaagtccacctcgcaactcctgtctcggccattgtccgcagtggtgctgaagcgcccagaaattttgactgacgagtctctcagtagcctggcagtgagttgcccacttacaagcctcgtgagctcaaggtcatttcagaccagtgctattagccgcgatatagacactgcagccaagtttattggcgcaggagctgccactgtgggcgtggctggttctggtgccggcataggtacagtgttcggctcacttattatcggctatgctcgaaatccctctctgaaacagcaactctttagttatgcgatcctcggttttgcactgtctgaagctatgggcctgttttgcttaatggtcgccttcctcatcctgttcgccatgtag

SEQ ID NO: 19407 - DNA, 474 bp, Artificial Sequence
  derived and/or modified sequence
atgcctgaactgattctgtctcctgctactgccccacaccccctgaagatgttcgcttgttctaagtttgtttccacaccttcattagtcaaatctacttcccagcttctttccaggcctctgagtgctgtcgtcctgaagcgaccggagatcctgaccgacgaatcactgagctcactcgctgtctcctgcccactgactagcctggtcagcagccgcagcttccagaccagtgcgatctcccgggacattgacactgccgctaagtttattggggctggggctgccactgttggagtggccggttcaggagcaggaattggaaccgtgtttggatccttgatcattgggtacgccaggaacccttcactcaaacagcagctcttcagttatgcaatcttaggttttgcactgtccgaagctatgggcctcttctgcttgatggtcgcctttctgatactgtttgccatgtag

SEQ ID NO: 19408 - DNA, 426 bp, Artificial Sequence
  derived and/or modified sequence
atgttcgcctgcagcaagtttgtgagcacgccgtctctcgttaagagcactagtcagctccttagtaggccactgagcgccgtcgtgctgaagagacccgagattctcacggacgaatcactgtcttctctggccgtctcctgtcccctgacgtctctggtcagttcgcgaagttttcagacttccgccatcagccgggacatcgacacagctgctaagtttattggggctggcgcagcgaccgttggggttgccggttctggcgcagggatcggtaccgtatttggaagcttgataattggctatgcacgcaatcccagtctgaaacagcagctcttttcttatgcaattcttgggttcgcccttagcgaggccatgggactgttttgcttgatggtggcctttctgatactgttcgctatgtag

SEQ ID NO: 19409 - DNA, 1792 bp, Artificial Sequence
  derived and/or modified sequence
attcctgtaatggcgtcgctcggggtcccgggaaattgctccgtgggctttcagcggcggtttttatcgccggccggggtgtgcctgtctgcggctcgcctctcctccgggaccgtaaagctgctgccgtgatttatcctccccttctcccaaatccgattaaatggaggagctcggggccggggcgccgcggggcccgggagccgggagggggcggcgggaaggacggggccaaggaggggaggacaaacggcccctcagagagtggcggatttgcctttatttacagccgcggctttctttttattttttattttttatggggtttggtgagcttttcccgtctttctcgtgctgcgttcaagcacgatgcagggacggcaggggtttggaactggataggccttgtcgccctgttccaaagggcagggcaggtcctgtctgggagacaaggaggcctaggaaagatgagggccaggaagcctcccccacctccttccatcaggggaagggcgagcgaaaggggagagaaaacccacgttcaggagagcatgggggcgggaggggagggcgctgcttatcccaactcgcgtagttgaaacctgagcagaggctcgggcaagcctggagtgacctcgcaaccttacagcgggtcgcaggtgcccgttattcctagactgtcccaggagccaggaaagagggattcggatcatatttaaccctatcttctggctcgctgatgctgcttctctcatggtttatcaccggaatggaaaggaggaaacggggagtgggggaaagggcgaagccaccagaagcagctgcggcattttgctgactattcgcccatggagccggtttgccatccagtgatgccagagtcccggcgcgacagaaagcaggactcccaagatcttcctcctgctgcattttaggcactgaaccccaatcccgaccgtatgttaacactgaattctgagtaggagttttgttttggcagtgtgacgactgcgcatgctcggaaaggggacgcaagtccgagatcccaaacgcggtacagaccaaaccgcagtccacgttacggatcggcttactccgcggagttggcctcatttctgcagtcggcgctccctgtagtttctcctctcgaacgccaggtggagcaaccggccggataccgccacagccctggcaggcggcgctgtgatgcctgagctgatcctctctcctgccacagctcctcaccccctgaaaatgttcgcctgctccaagtttgtctccactccctccttggtcaagagcacctcacagctgctgagccgtccgctatctgcagtggtgctgaaacgaccggagatactgacagatgagagcctcagcagcttggcagtctcatgtccccttacctcacttgtctctagccgcagcttccaaaccagcgccatttcaagggacatcgacacagcagccaagttcattggagctggggctgccacagttggggtggctggttctggggctgggattggaactgtgtttgggagcctcatcattggttatgccaggaacccttctctgaagcaacagctcttctcctacgccattctgggctttgccctctcggaggccatggggctcttttgtctgatggtagcctttctcatcctctttgccatgtgaaggagccgtctccacctcccatagttctcccgcgtctggttggccccgtgtgttccttttcctatacctccccaggcagcctggggaacgtggttggctcagggtttgacag

SEQ ID NO: 19410 - DNA, 474 bp, Artificial Sequence
  derived and/or modified sequence
atgcccgagctgatcctgagccccgccaccgccccccaccccctgaagatgttcgcctgcagcaagttcgtgagcacccccagcctggtgaagagcaccagccagctgctgagcagacccctgagcgccgtggtgctgaagagacccgagatcctgaccgacgagagcctgagcagcctggccgtgagctgccccctgaccagcctggtgagcagcagaagcttccagaccagcgccatcagcagagacatcgacaccgccgccaagttcatcggcgccggcgccgccaccgtgggcgtggccggcagcggcgccggcatcggcaccgtgttcggcagcctgatcatcggctacgccagaaaccccagcctgaagcagcagctgttcagctacgccatcctgggcttcgccctgagcgaggccatgggcctgttctgcctgatggtggccttcctgatcctgttcgccatgtag

SEQ ID NO: 19411 - DNA, 426 bp, Artificial Sequence
  derived and/or modified sequence
atgttcgcctgcagcaagttcgtgagcacccccagcctggtgaagagcaccagccagctgctgagcagacccctgagcgccgtggtgctgaagagacccgagatcctgaccgacgagagcctgagcagcctggccgtgagctgccccctgaccagcctggtgagcagcagaagcttccagaccagcgccatcagcagagacatcgacaccgccgccaagttcatcggcgccggcgccgccaccgtgggcgtggccggcagcggcgccggcatcggcaccgtgttcggcagcctgatcatcggctacgccagaaaccccagcctgaagcagcagctgttcagctacgccatcctgggcttcgccctgagcgaggccatgggcctgttctgcctgatggtggccttcctgatcctgttcgccatgtag

SEQ ID NO: 19412 - protein, 181 aa, Artificial Sequence
  derived and/or modified sequence
MTTTTTFKGVDPNSRNSSRVLRPPGGGSNFSLGFDEPTEQPVRKNKMASNIFGTPEENQASWAKSAGAKSSGGREDLESSGLQRRNSSEASSGDFLDLKKMWTQTCQAAWGRVKRSPCLLRLCPARWPRPQCHPEEIPLAASPASSWVSSDCPERCRSVCFLHACELHNLSLTVHLLDLFH

SEQ ID NO: 19413 - DNA, 546 bp, Artificial Sequence
  derived and/or modified sequence
atgaccaccaccaccaccttcaagggcgtggaccccaacagcagaaacagcagcagagtgctgagaccccccggcggcggcagcaacttcagcctgggcttcgacgagcccaccgagcagcccgtgagaaagaacaagatggccagcaacatcttcggcacccccgaggagaaccaggccagctgggccaagagcgccggcgccaagagcagcggcggcagagaggacctggagagcagcggcctgcagagaagaaacagcagcgaggccagcagcggcgacttcctggacctgaagaagatgtggacccagacctgccaggccgcctggggcagagtgaagagaagcccctgcctgctgagactgtgccccgccagatggcccagaccccagtgccaccccgaggagatccccctggccgccagccccgccagcagctgggtgagcagcgactgccccgagagatgcagaagcgtgtgcttcctgcacgcctgcgagctgcacaacctgagcctgaccgtgcacctgctggacctgttccactag

SEQ ID NO: 19414 - DNA, 546 bp, Artificial Sequence
  derived and/or modified sequence
atgacaactaccaccacattcaaaggggtggatcccaactcccggaactcaagccgggtgctgcgcccccccggggggggaagcaatttcagtttgggcttcgacgagccaacggaacagcccgtgagaaaaaataaaatggcctctaatatatttgggaccccagaggagaaccaggcctcttgggctaagagtgccggggccaaaagctccgggggcagagaggatctcgaatcttcaggcctgcagagacgcaacagtagcgaggctagcagcggcgactttctggacttaaagaaaatgtggacccagacatgccaagccgcatggggtagggtcaagagatctccctgcctgctcaggctgtgccccgcccgctggccccgcccccagtgtcatccagaggagattcctctggccgccagtcctgcctcttcatgggtgtcaagcgactgcccagagcgttgcaggtcagtttgcttcctccacgcctgtgaattacacaacctatccttaacagtgcatctgttagacctgttccactag

SEQ ID NO: 19415 - DNA, 546 bp, Artificial Sequence
  derived and/or modified sequence
atgaccaccaccaccaccttcaagggcgtggaccccaacagcaggaacagcagccgggtgctgcggcccccaggcggcggcagcaacttcagcctgggctttgatgagcccacagagcagcctgtgaggaagaacaagatggccagcaacatcttcggcaccccagaggagaaccaggcctcctgggccaagtctgctggggccaagagcagcggcggccgggaggacctggagagcagcggcctgcagaggaggaacagcagcgaggccagcagcggggacttcctggacctgaagaagatgtggacccagacctgccaggccgcctggggccgggtgaagaggagcccctgcctgctgcggctgtgcccagcccgctggccccggccccagtgccaccctgaggagatccccctggccgccagccctgccagctcctgggtgtccagtgactgcccagagcgctgccgctctgtgtgcttcctgcacgcctgtgagctgcacaacctgagcctgactgtgcacctgctggacctcttccactag

SEQ ID NO: 19416 - DNA, 1519 bp, Artificial Sequence
  derived and/or modified sequence
aggctgagccgtggccgccacagcccatcgtaatgccgcatggtgcttggcactccagagagccaataggaatgaaagaattcatttgaatcggccaatgccggcgggttagggggcgggggttgaaaaccctataaaggcgtcgatcggccggacaggcggcagcggcggctcctgcagcggtggtcggctgttgggtgtggagtttcccagcgcccctcgggtccgaccctttgagcgttctgctccggcgccagcctacctcgctcctcggcgccatgaccacaaccaccaccttcaagggagtcgaccccaacagcaggaatagctcccgagttttgcggcctccaggtggtggatccaatttttcattaggttttgatgaaccaacagaacaacctgtgaggaagaacaaaatggcctctaatatctttgggacacctgaagaaaatcaagcttcttgggccaagtcagcaggtgccaagtctagtggtggcagggaagacttggagtcatctggactgcagagaaggaactcctctgaagcaagctccggagacttcttagatctgaagaaaatgtggacacagacttgccaggcagcctggggcagagtgaagagaagcccgtgcctgctgcgcctgtgcccagcccggtggccccggccccagtgccatccagaagaaatccccctggcggcaagtccagcctcgtcttgggttagctctgactgtcctgaacgctgtcgttctgtctgtttcctccatgcttgtgaactgcacaacttgagcctgactgtacatctcttggatttgtttcattaaaaagaagcactttatgtactgctgtcttttttttttttcttttgaagaacaggtttctctctgtccttgactcttgggtctgtgggccatggcatgagtgttttctagtagtagattggagggaaagctttgtgacacttagtactgtgtttttaagaagaaataatttggttccagatgtgttagaggatcttttgtactgaggtttttaacactttacttgggtttaccaagcctcaactggacagaccataaacagtccacaggcaccgttcctgccaggccccaacccacagggagtctctccgcagagccttcttggtgttgccctaacttgccagtggcctttgctcagagcctcctcctgtgacatgtgaacaatgaagaggcctgcgcctcctgccttgccgcctgcaaagcaaagaaactgccttttattttttaaccttaaaaagtagccagatagtaacaagactggctggctgatgagcaaagcctttgctctcacgcagaggaaggcttggatgtacaatgaaactgcctggaactaaaagcagtgaagcaagggaggcaatcacactgaagcgggtcttcctccaggaacggggtcccacaggcgtgttgttttaaataacctgatgctgtgtgcatgatgctggtgcttgaccatgaaaggaaagtctcatccttaaaat

SEQ ID NO: 19417 - DNA, 580 bp, Artificial Sequence
  derived and/or modified sequence
agcggcggctcctgcagcggtggtcggctgttgggtgtggagtttcccagcgcccctcgggtccgaccctttgagcgttctgctccggcgccagcctacctcgctcctcggcgccatgaccacaaccaccaccttcaagggagtcgaccccaacagcaggaatagctcccgagttttgcggcctccaggtggtggatccaatttttcattaggttttgatgaaccaacagaacaacctgtgaggaagaacaaaatggcctctaatatctttgggacacctgaagaaaatcaagcttcttgggccaagtcagcaggtgccaagtctagtggtggcagggaagacttggagtcatctggactgcagagaaggaactcctctgaagcaagctccggagacttcttagatctgaagacttctggaggtaaaatagaaaatgtggacacagacttgccaggcagcctggggcagagtgaagagaagcccgtgcctgctgcgcctgtgcccagcccggtggccccggccccagtgccatccagaagaaatccccctggcggcaagtccagcctcgtcttgggttag

SEQ ID NO: 19418 - DNA, 1696 bp, Artificial Sequence
  derived and/or modified sequence
gcttaggctgagccgtggccgccacagcccatcgtaatgccgcatggtgcttggcactccagagagccaataggaatgaaagaattcatttgaatcggccaatgccggcgggttagggggcgggggttgaaaaccctataaaggcgtcgatcggccggacaggcggcagcggcggctcctgcagcggtggtcggctgttgggtgtggagtttcccagcgcccctcgggtccgaccctttgagcgttctgctccggcgccagcctacctcgctcctcggcgccatgaccacaaccaccaccttcaagggagtcgaccccaacagcaggaatagctcccgagacacggggtcttgccatgttgcccaggctggtcttgaactcctaggctcaagtgatgatcctgccttggcctcctagggtgctgggattacagagttttgcggcctccaggtggtggatccaatttttcattaggttttgatgaaccaacagaacaacctgtgaggaagaacaaaatggcctctaatatctttgggacacctgaagaaaatcaagcttcttgggccaagtcagcaggtgccaagtctagtggtggcagggaagacttggagtcatctggactgcagagaaggaactcctctgaagcaagctccggagacttcttagatctgaagggagaaggtgatattcatgaaaatgtggacacagacttgccaggcagcctggggcagagtgaagagaagcccgtgcctgctgcgcctgtgcccagcccggtggccccggccccagtgccatccagaagaaatccccctggcggcaagtccagcctcgtcttgggttagctctgactgtcctgaacgctgtcgttctgtctgtttcctccatgcttgtgaactgcacaacttgagcctgactgtacatctcttggatttgtttcattaaaaagaagcactttatgtactgctgtcttttttttttttcttttgaagaacaggtttctctctgtccttgactcttgggtctgtgggccatggcatgagtgttttctagtagtagattggagggaaagctttgtgacacttagtactgtgtttttaagaagaaataatttggttccagatgtgttagaggatcttttgtactgaggtttttaacactttacttgggtttaccaagcctcaactggacagaccataaacagtccacaggcaccgttcctgccaggccccaacccacagggagtctctccgcagagccttcttggtgttgccctaacttgccagtggcctttgctcagagcctcctcctgtgacatgtgaacaatgaagaggcctgcgcctcctgccttgccgcctgcaaagcaaagaaactgccttttattttttaaccttaaaaagtagccagatagtaacaagactggctggctgatgagcaaagcctttgctctcacgcagaggaaggcttggatgtacaatgaaactgcctggaactaaaagcagtgaagcaagggaggcaatcacactgaagcgggtcttcctccaggaacggggtcccacaggcgtgttgttttaaataacctgatgctgtgtgcatgatgctggtgcttgaccatgaaaggaaagtctcatccttaaaatgtgttgtacttcacaatcctggactgttgcttcaagtaaacaatatccacattttgaaa

SEQ ID NO: 19419 - DNA, 1605 bp, Artificial Sequence
  derived and/or modified sequence
gcgggcttaggctgagccgtggccgccacagcccatcgtaatgccgcatggtgcttggcactccagagagccaataggaatgaaagaattcatttgaatcggccaatgccggcgggttagggggcgggggttgaaaaccctataaaggcgtcgatcggccggacaggcggcagcggcggctcctgcagcggtggtcggctgttgggtgtggagtttcccagcgcccctcgggtccgaccctttgagcgttctgctccggcgccagcctacctcgctcctcggcgccatgaccacaaccaccaccttcaagggagtcgaccccaacagcaggaatagctcccgagttttgcggcctccaggtggtggatccaatttttcattaggttttgatgaaccaacagaacaacctgtgaggaagaacaaaatggcctctaatatctttgggacacctgaagaaaatcaagcttcttgggccaagtcagcaggtgccaagtctagtggtggcagggaagacttggagtcatctggactgcagagaaggaactcctctgaagcaagctccggagacttcttagatctgaagggagaaggtgatattcatgaaaatgtggacacagacttgccaggcagcctggggcagagtgaagagaagcccgtgcctgctgcgcctgtgcccagcccggtggccccggccccagtgccatccagaagaaatccccctggcggcaagtccagcctcgtcttgggttagctctgactgtcctgaacgctgtcgttctgtctgtttcctccatgcttgtgaactgcacaacttgagcctgactgtacatctcttggatttgtttcattaaaaagaagcactttatgtactgctgtcttttttttttttcttttgaagaacaggtttctctctgtccttgactcttgggtctgtgggccatggcatgagtgttttctagtagtagattggagggaaagctttgtgacacttagtactgtgtttttaagaagaaataatttggttccagatgtgttagaggatcttttgtactgaggtttttaacactttacttgggtttaccaagcctcaactggacagaccataaacagtccacaggcaccgttcctgccaggccccaacccacagggagtctctccgcagagccttcttggtgttgccctaacttgccagtggcctttgctcagagcctcctcctgtgacatgtgaacaatgaagaggcctgcgcctcctgccttgccgcctgcaaagcaaagaaactgccttttattttttaaccttaaaaagtagccagatagtaacaagactggctggctgatgagcaaagcctttgctctcacgcagaggaaggcttggatgtacaatgaaactgcctggaactaaaagcagtgaagcaagggaggcaatcacactgaagcgggtcttcctccaggaacggggtcccacaggcgtgttgttttaaataacctgatgctgtgtgcatgatgctggtgcttgaccatgaaaggaaagtctcatccttaaaatgtgttgtacttcacaatcctggactgttgcttcaagtaaacaatatccacattttgaaa

SEQ ID NO: 19420 - DNA, 546 bp, Artificial Sequence
  derived and/or modified sequence
atgaccaccaccaccaccttcaagggcgtggaccccaacagccggaacagtagtagggtgctccgtccgcctggtggcgggagcaatttctcactgggcttcgacgagcccacagagcagccggtccgcaaaaacaaaatggcctctaacatattcggaacacctgaggagaaccaggccagctgggccaagtccgccggcgccaagtcctctgggggaagagaagaccttgaatcttctggactccagagacgaaattcctccgaggcctcttcaggggatttcctggacttgaaaaagatgtggactcaaacctgccaggccgcctgggggcgggtaaaacgcagtccgtgtctgctacgactatgtcctgcacggtggccaaggccacagtgtcatccagaggagattccattagcagcttctccagcttcctcttgggtaagctctgactgcccagaaaggtgtagatctgtttgcttcctacatgcctgcgagctccataatctttccttaaccgtacacctgctggatttatttcactag

SEQ ID NO: 19421 - DNA, 546 bp, Artificial Sequence
  derived and/or modified sequence
atgaccacaaccactacctttaaaggcgttgatccaaatagtagaaacagctcacgagtgttacggcctcctggcggtggcagcaactttagcctgggattcgatgaacccacagagcagcccgtcagaaagaataaaatggcgtcaaacatctttggaacacctgaagaaaatcaggcctcctgggcgaagtcggccggtgcaaagtcgagtggtggccgagaagatctagaatcatctgggttacagaggcggaattcgtcggaagcgtctagcggagatttcctcgatttgaagaaaatgtggacccagacctgtcaggccgcatgggggagagtgaaacggtccccctgcctgctaaggttatgccctgcaagatggcctaggccgcagtgccaccctgaagagatacctctggctgctagcccagcgagctcctgggtctcatctgattgccccgagaggtgccggtccgtgtgctttctgcatgcatgcgagctgcacaacctgtcccttaccgttcatcttttagacctcttccattag

SEQ ID NO: 19422 - protein, 51 aa, Artificial Sequence
  derived and/or modified sequence
KFKEICERPNGSCRDFCLETEIHVGRCLNSRPCCLPLGHQPRIESTTPKKD

SEQ ID NO: 19423 - protein, 51 aa, Artificial Sequence
  derived and/or modified sequence
KFKEICERPDGSCRDFCLETEIHVGRCLNSRPCCLPLGHQPRIESTTPKKD

SEQ ID NO: 19424 - protein, 51 aa, Artificial Sequence
  derived and/or modified sequence
KFKEICERPNGSCRDFCLETEIHVGRCLNSQPCCLPLGHQPRIESTTPKKD

SEQ ID NO: 19425 - protein, 73 aa, Artificial Sequence
  derived and/or modified sequence
MRIAVLLFAIFFFMSQVLPARGKFKEICERPNGSCRDFCLETEIHVGRCLNSQPCCLPLGHQPRIESTTPKKD

SEQ ID NO: 19426 - DNA, 222 bp, Artificial Sequence
  derived and/or modified sequence
atgagaatagctgtcttgttgttcgcgatcttttttttcatgtcacaggttttacctgcgaggggaaaatttaaggaaatctgcgaacggcctaacggatcctgtagggatttctgcctggaaactgagattcacgtcggaaggtgccttaattctcagccctgttgcctgccgcttggacatcagccaaggattgaaagtacgaccccaaagaaggattag

SEQ ID NO: 19427 - DNA, 222 bp, Artificial Sequence
  derived and/or modified sequence
atgcgaattgccgtgctactgtttgccatcttctttttcatgtcacaagtcctgcccgctcgcggaaaattcaaggagatttgtgaacgtcctaacgggtcatgtcgcgacttctgcctcgagaccgaaattcatgtgggacgctgcctcaactcacagccttgttgcctccctctaggccatcagcccaggatagagagtaccacacctaagaaagactag

SEQ ID NO: 19428 - DNA, 222 bp, Artificial Sequence
  derived and/or modified sequence
atgagaatcgccgtgctgctgttcgccatcttcttcttcatgagccaggtgctgcccgccagaggcaagttcaaggagatctgcgagagacccaacggcagctgcagagacttctgcctggagaccgagatccacgtgggcagatgcctgaacagccagccctgctgcctgcccctgggccaccagcccagaatcgagagcaccacccccaagaaggactag

SEQ ID NO: 19429 - DNA, 222 bp, Artificial Sequence
  derived and/or modified sequence
atgaggattgctgtcctcctcttcgccattttcttctttatgagccaagttctaccagccaggggcaaattcaaggagatctgtgaacgtccaaatggctcctgtcgggacttttgccttgaaacagaaatccatgttgggagatgtttaaatagccaaccctgctgcctgcctctggggcatcaaccaagaattgagagcactacacccaaaaaggactga

SEQ ID NO: 19430 - DNA, 222 bp, Artificial Sequence
  derived and/or modified sequence
atgcgtatagcggtgctgctttttgcaatcttcttttttatgagccaggtcctgccagctagaggcaagtttaaagaaatttgtgagcgacccaatgggagctgtcgagacttttgcttggagacagaaatccatgttggtaggtgcctgaacagtcagccttgttgcttaccactcggccatcagcccagaatcgagtccactactcctaagaaggactag

SEQ ID NO: 19431 - DNA, 222 bp, Artificial Sequence
  derived and/or modified sequence
atgagaattgctgtgctgctgtttgccatcttcttcttcatgagccaggtgctgcctgcccggggcaagttcaaggagatctgtgagcggcccaacggcagctgccgggacttctgcctggagacagagatccacgtgggccgctgcctgaacagccagccctgctgcctgcccctgggccaccagcccagaattgagagcaccacccccaagaaggactag

SEQ ID NO: 19432 - DNA, 222 bp, Artificial Sequence
  derived and/or modified sequence
atgcggatcgccgtgctgctgttcgccatcttcttcttcatgagccaggtactgcctgccagaggaaagtttaaagagatctgcgagcggcccaatggctcttgcagagacttctgccttgagactgagatccacgtcgggcgatgcttaaatagtcagccttgctgtctaccactgggccaccaaccacggattgagagcactacacctaaaaaagactag

SEQ ID NO: 19433 - RNA, 222 nt, Artificial Sequence
  derived and/or modified sequence
augcgaauugccgugcuacuguuugccaucuucuuuuucaugucacaaguccugcccgcucgcggaaaauucaaggagauuugugaacguccuaacgggucaugucgcgacuucugccucgagaccgaaauucaugugggacgcugccucaacucacagccuuguugccucccucuaggccaucagcccaggauagagaguaccacaccuaagaaagacuag

SEQ ID NO: 19434 - protein, 223 aa, Artificial Sequence
  derived and/or modified sequence
MWDLVLSIALSVGCTGAVPLIQSRIVGGWECEKHSQPWQVAVYSHGWAHCGGVLVHPQWVLTAAHCLKKNSQVWLGRHNLFEPEDTGQRVPVSHSFPHPLYNMSLLKHQSLRPDEDSSHDLMLLRLSEPAKITDVVKVLGLPTQEPALGTTCYASGWGSIEPEEFLRPRSLQCVSLHLLSNDMCARAYSEKVTEFMLCAGLWTGGKDTCGVSHPYSQHLEGKG

SEQ ID NO: 19435 - DNA, 672 bp, Artificial Sequence
  derived and/or modified sequence
atgtgggacttagttctcagtattgccttgagcgttggctgcactggcgctgtccctctgatccagagtcgcatcgtgggggggtgggagtgcgagaagcactcacagccgtggcaggtggccgtgtattcgcatgggtgggctcactgtggcggagtacttgtacaccctcagtgggtgttgaccgccgcccactgtctcaagaagaattctcaagtatggctgggccgccataatctcttcgagccggaagacacaggccagcgggtgccggtctcacactcatttcctcatcctctctacaatatgagccttctgaaacaccagtctctgcgaccagatgaggatagctcgcatgaccttatgctcctgcggctgagtgagccggccaagatcaccgacgtcgtgaaagtactgggtctgcccactcaggaaccagccttggggactacctgctacgctagtggctggggatcaattgaacccgaagaatttttgcgccctcggagcttgcagtgtgtgtctttacatcttctgagtaacgatatgtgcgcgcgggcctactccgagaaggtgaccgaattcatgctgtgcgcaggactatggactggaggcaaggacacgtgcggcgtgtctcatccttacagccagcatctcgaggggaagggatag

SEQ ID NO: 19436 - DNA, 2871 bp, Artificial Sequence
  derived and/or modified sequence
agccccaaactcaccacctggccgtggacacctgtgtcagcatgtgggacctggttctctccatcgccttgtctgtggggtgcactggtgccgtgcccctcatccagtctcggattgtgggaggctgggagtgtgagaagcattcccaaccctggcaggtggctgtgtacagtcatggatgggcacactgtgggggtgtcctggtgcacccccagtgggtgctcacagctgcccattgcctaaagaagaatagccaggtctggctgggtcggcacaacctgtttgagcctgaagacacaggccagagggtccctgtcagccacagcttcccacacccgctctacaatatgagccttctgaagcatcaaagccttagaccagatgaagactccagccatgacctcatgctgctccgcctgtcagagcctgccaagatcacagatgttgtgaaggtcctgggcctgcccacccaggagccagcactggggaccacctgctacgcctcaggctggggcagcatcgaaccagaggagttcttgcgccccaggagtcttcagtgtgtgagcctccatctcctgtccaatgacatgtgtgctagagcttactctgagaaggtgacagagttcatgttgtgtgctgggctctggacaggtggtaaagacacttgtggggtgagtcatccctactcccaacatctggaggggaaagggtgattctgggggtccacttgtctgtaatggtgtgcttcaaggtatcacatcatggggccctgagccatgtgccctgcctgaaaagcctgctgtgtacaccaaggtggtgcattaccggaagtggatcaaggacaccatcgcagccaacccctgagtgcccctgtcccacccctacctctagtaaatttaagtccacctcacgttctggcatcacttggcctttctggatgctggacacctgaagcttggaactcacctggccgaagctcgagcctcctgagtcctactgacctgtgctttctggtgtggagtccagggctgctaggaaaaggaatgggcagacacaggtgtatgccaatgtttctgaaatgggtataatttcgtcctctccttcggaacactggctgtctctgaagacttctcgctcagtttcagtgaggacacacacaaagacgtgggtgaccatgttgtttgtggggtgcagagatgggaggggtggggcccaccctggaagagtggacagtgacacaaggtggacactctctacagatcactgaggataagctggagccacaatgcatgaggcacacacacagcaaggatgacgctgtaaacatagcccacgctgtcctgggggcactgggaagcctagataaggccgtgagcagaaagaaggggaggatcctcctatgttgttgaaggagggactagggggagaaactgaaagctgattaattacaggaggtttgttcaggtcccccaaaccaccgtcagatttgatgatttcctagcaggacttacagaaataaagagctatcatgctgtggtttattatggtttgttacattgataggatacatactgaaatcagcaaacaaaacagatgtatagattagagtgtggagaaaacagaggaaaacttgcagttacgaagactggcaacttggctttactaagttttcagactggcaggaagtcaaacctattaggctgaggaccttgtggagtgtagctgatccagctgatagaggaactagccaggtgggggcctttccctttggatggggggcatatctgacagttattctctccaagtggagacttacggacagcatataattctccctgcaaggatgtatgataatatgtacaaagtaattccaactgaggaagctcacctgatccttagtgtccagggtttttactgggggtctgtaggacgagtatggagtacttgaataattgacctgaagtcctcagacctgaggttccctagagttcaaacagatacagcatggtccagagtcccagatgtacaaaaacagggattcatcacaaatcccatctttagcatgaagggtctggcatggcccaaggccccaagtatatcaaggcacttgggcagaacatgccaaggaatcaaatgtcatctcccaggagttattcaagggtgagccctttacttgggatgtacaggctttgagcagtgcagggctgctgagtcaaccttttattgtacaggggatgagggaaagggagaggatgaggaagcccccctggggatttggtttggtcttgtgatcaggtggtctatggggctatccctacaaagaagaatccagaaataggggcacattgaggaatgatactgagcccaaagagcattcaatcattgttttatttgccttcttttcacaccattggtgagggagggattaccaccctggggttatgaagatggttgaacaccccacacatagcaccggagatatgagatcaacagtttcttagccatagagattcacagcccagagcaggaggacgctgcacaccatgcaggatgacatgggggatgcgctcgggattggtgtgaagaagcaaggactgttagaggcaggctttatagtaacaagacggtggggcaaactctgatttccgtgggggaatgtcatggtcttgctttactaagttttgagactggcaggtagtgaaactcattaggctgagaaccttgtggaatgcagctgacccagctgatagaggaagtagccaggtgggagcctttcccagtgggtgtgggacatatctggcaagattttgtggcactcctggttacagatactggggcagcaaataaaactgaatcttgttttcagacctt

SEQ ID NO: 19437 - DNA, 672 bp, Artificial Sequence
  derived and/or modified sequence
atgtgggacctggtgctgagcatcgccctgtctgtgggctgcacaggagctgtgcccctcatccagagcagaattgtgggcggctgggagtgtgagaagcacagccagccctggcaggtggccgtgtacagccacggctgggcccactgcggcggcgtgctggtgcacccccagtgggtgctgacagctgcccactgcctgaagaagaacagccaggtgtggctgggccgccacaacctgtttgagcctgaggacaccggccagagggtgcctgtgagccacagcttcccccaccccctgtacaacatgagcctgctgaagcaccagagcctgcggccagatgaggacagcagccatgacctgatgctgctgcggctgtctgagcccgccaagatcacagatgtggtgaaggtgctgggcctgcccacccaggagcccgccctgggcaccacctgctacgccagcggctggggcagcattgagcctgaggagttcctgcggcccaggagcctgcagtgtgtgtccctgcacctgctgagcaatgacatgtgtgcccgggcctacagcgagaaggtgacagagttcatgctgtgtgccggcctgtggacaggaggcaaggacacctgtggggtgagccacccctacagccagcacctggagggcaagggctag

SEQ ID NO: 19438 - DNA, 672 bp, Artificial Sequence
  derived and/or modified sequence
atgtgggacctggtgctgagcatcgccctgagcgtgggctgcaccggggccgtcccacttatacaaagccgcattgtcggcggatgggagtgtgaaaagcatagccaaccttggcaggtcgctgtgtattcccacggctgggcgcattgcggtggggttctggtgcacccccagtgggtgttgacggccgctcattgcctgaaaaagaactctcaagtgtggctgggcagacacaacctctttgaacctgaggatacggggcagcgtgtgccagtctcacacagcttcccgcatcccctctacaatatgagtttgctgaagcaccaaagccttcgaccagacgaagatagctctcacgacctcatgctgctccgtctgagtgagcctgctaaaattaccgatgttgtaaaggtactgggactcccgacccaggagcccgccctgggaaccacctgctacgcctcggggtggggaagcattgaacccgaagaattcctgcgcccccgttccctccagtgcgtgtctctgcatctgctgtccaacgacatgtgcgcaagggcttatagcgaaaaggtgactgaatttatgctgtgtgccggtctgtggactgggggtaaagacacctgtggcgtttcacatccatactcccagcatctggagggcaagggatag

SEQ ID NO: 19439 - DNA, 672 bp, Artificial Sequence
  derived and/or modified sequence
atgtgggacctagtgctgagcatcgcactgtcggttggatgtaccggtgcagtccccctgatccagagccggattgtgggcggatgggagtgtgagaagcactcccaaccctggcaggttgccgtctactcccacggttgggcccactgcggcggtgttctggtccaccctcagtgggtgctaaccgccgcacactgcttgaagaaaaattcccaagtttggctcggaagacacaatctttttgaacccgaagacacaggtcagcgggtccctgtcagccacagttttccccatccgctctataatatgagcctgctgaaacaccaatccctgcggccagatgaggacagctcccacgacttgatgctgctacggctgagtgaaccggctaagattacagacgtagttaaggtgctaggcctccctactcaggaacctgccctcggcactacatgctatgcatctgggtgggggagcattgaaccagaagagttccttcggcctcgctccttacaatgcgtgtccttgcatctgttatcaaacgatatgtgtgcccgtgcgtactctgagaaagttacagaattcatgctgtgcgcaggactctggaccggcggaaaagacacatgcggtgtttctcacccgtactcacagcatctcgaagggaaagggtag

SEQ ID NO: 19440 - DNA, 672 bp, Artificial Sequence
  derived and/or modified sequence
atgtgggacctggtgctgagcatcgccctgagcgtgggctgcaccggcgccgtgcccctgatccagagcagaatcgtgggcggctgggagtgcgagaagcacagccagccctggcaggtggccgtgtacagccacggctgggcccactgcggcggcgtgctggtgcacccccagtgggtgctgaccgccgcccactgcctgaagaagaacagccaggtgtggctgggcagacacaacctgttcgagcccgaggacaccggccagagagtgcccgtgagccacagcttcccccaccccctgtacaacatgagcctgctgaagcaccagagcctgagacccgacgaggacagcagccacgacctgatgctgctgagactgagcgagcccgccaagatcaccgacgtggtgaaggtgctgggcctgcccacccaggagcccgccctgggcaccacctgctacgccagcggctggggcagcatcgagcccgaggagttcctgagacccagaagcctgcagtgcgtgagcctgcacctgctgagcaacgacatgtgcgccagagcctacagcgagaaggtgaccgagttcatgctgtgcgccggcctgtggaccggcggcaaggacacctgcggcgtgagccacccctacagccagcacctggagggcaagggctag

SEQ ID NO: 19441 - protein, 196 aa, Artificial Sequence
  derived and/or modified sequence
MKVKIKCWNGVATWLWVANDENCGICRMAFNGCCPDCPLHGESISRCLGWCPQPVPVLGGRAHPQVPINTASPTPGQHTGSLMSREESSRSPDPTPPALDQETSSLLRCTSPWCLDHSCDLFGITDQVSADGPRACRQGARRRLPAGVGPVLPLLPHALHPQVAARTAGAAALPHVPPGMEVQGVRPDLALAGGAS

SEQ ID NO: 19442 - DNA, 591 bp, Artificial Sequence
  derived and/or modified sequence
atgaaggtgaagatcaagtgctggaacggcgtggccacctggctgtgggtggccaacgacgagaactgcggcatctgcagaatggccttcaacggctgctgccccgactgccccctgcacggcgagagcatcagcagatgcctgggctggtgcccccagcccgtgcccgtgctgggcggcagagcccacccccaggtgcccatcaacaccgccagccccacccccggccagcacaccggcagcctgatgagcagagaggagagcagcagaagccccgaccccaccccccccgccctggaccaggagaccagcagcctgctgagatgcaccagcccctggtgcctggaccacagctgcgacctgttcggcatcaccgaccaggtgagcgccgacggccccagagcctgcagacagggcgccagaagaagactgcccgccggcgtgggccccgtgctgcccctgctgccccacgccctgcacccccaggtggccgccagaaccgccggcgccgccgccctgccccacgtgccccccggcatggaggtgcagggcgtgagacccgacctggccctggccggcggcgccagctag

SEQ ID NO: 19443 - DNA, 1130 bp, Artificial Sequence
  derived and/or modified sequence
gtgcgcactggcgtgcgagactcggcgggcgctgttgagggagtcgggccgcgactgtggtcgtttttataccttcccgcgcggacgccggcgctgccaacggaagggcgggtagggcggtgcgtgattaggttggcgaaggctctgctgccatgaaggtgaagattaagtgctggaacggcgtggccacttggctctgggtggccaacgatgagaactgtggcatctgcaggatggcatttaacggatgctgccctgactgtcctctccatggagaaagcatttctaggtgtttgggctggtgcccgcagcctgtgcctgtcctgggaggcagggcccatccacaggtgcccatcaacacagcttccccaacgcctgggcagcacaccggatccctgatgtctagggaagagtcttctaggtccccagaccccacccctcctgcccttgatcaagagaccagttcactactcagatgcacgtctccttggtgccttgaccattcatgtgacctttttggcatcacagatcaagtgtctgcagatgggcccagggcctgtaggcaaggtgcccggcgacgactgcccgctggtgtggggccagtgctcccactgcttccacatgcattgcatcctcaagtggctgcacgcacagcaggtgcagcagcactgccccatgtgccgccaggaatggaagttcaaggagtgaggcccgacctggctctcgctggaggggcatcctgagactccttcctcatgctggcgccgatggctgctggggacagcgcccctgagctgcaacaaggtggaaacaagggctggagctgcgtttgttttgccatcactatgttgacacttttatccaataagtgaaaactcattaaactactcaaatcttgctggaggcctctgggtgcctgtgttctcggcatatagatgtggtctcggtgtgttttgatatgaaaactctcatgaataaacatctccgtgaaacgccaaggccctcgtcaaaccctgagtcatgactgggaggagaaggagcaggatcagacggtagagcctggggcatgctcttcaggcatgctcttgcctgctggattgccggcggcggccctgggaccctccctcagg

SEQ ID NO: 19444 - DNA, 591 bp, Artificial Sequence
  derived and/or modified sequence
atgaaggtgaaaattaagtgttggaacggcgtggcgacctggttgtgggtggcaaacgacgagaactgcggcatttgtagaatggcttttaatggctgttgccctgactgcccactacatggcgaatccatctcaagatgcctggggtggtgtcctcaacccgtgccagtcctcggagggcgtgctcacccgcaggtgccaattaacactgcctctcctacacccggccaacatactggctctctgatgagtcgggaagaatcctcgaggtctcctgatcccacgccgcccgccctggatcaggagacttcatccttgctgcggtgcacttccccctggtgtctcgaccactcttgtgacctcttcggcattacagatcaggtttctgcggacggacccagggcatgccgccagggagcccgaagacgcctgcccgccggtgtgggacccgttctccccctgctcccccatgccttacatccccaggtggcagcacgtacagctggcgcagcagccctgccacacgtgccgcctggcatggaggtgcaaggcgtgagacctgacctggctctggcgggtggggcatcttag

SEQ ID NO: 19445 - DNA, 591 bp, Artificial Sequence
  derived and/or modified sequence
atgaaggtgaagatcaagtgctggaatggagtggccacctggctgtgggtggccaatgatgagaactgtggcatctgcaggatggccttcaacggctgctgcccagactgccccctgcacggggagagcatcagccgctgcctgggctggtgcccccagcctgtgcctgtgctgggcggccgggcccacccccaggtgcccatcaacacagccagccccaccccaggccagcacacaggcagcctgatgagccgggaggagagcagccgcagcccagaccccaccccaccagccctggaccaggagaccagcagcctgctgcgctgcaccagcccctggtgcctggaccacagctgtgacctgtttggcatcacagaccaggtgtctgcagatggcccccgggcctgccggcagggcgcccggcggcggctgcctgctggggtgggccctgtgctgcccctgctgccccacgccctgcacccccaggtggccgccaggacagctggagctgctgccctgccccacgtgcccccaggcatggaggtgcagggcgtgcggccagacctggccctggccggcggggccagctag

SEQ ID NO: 19446 - DNA, 591 bp, Artificial Sequence
  derived and/or modified sequence
atgaaggtgaagatcaagtgctggaacggcgtggccacctggctgtgggtggccaatgatgaaaactgtggaatctgtcgaatggctttcaatgggtgttgcccagactgcccgcttcatggagaaagcatctcacgttgtctggggtggtgtccccaacccgtgcccgttctcgggggccgtgctcatccgcaggtccccataaatactgcgtcacctactcctggccagcacactggtagcctgatgtctagggaggagagctccagatcgcccgacccgactccccctgccctggatcaggaaacttcttcattgctgagatgcacatccccttggtgcctggaccattcttgtgacctttttggcattaccgaccaagtcagtgctgacggcccgcgggcttgcaggcagggtgcccggcgccgtctgcctgccggggtcgggccggttctcccgctcctaccacatgctctgcatccacaggtagccgccaggaccgcaggtgccgcggccctaccacacgtgcctcccggcatggaagtgcagggagttaggccagacttggctttggccggaggcgcaagttag

SEQ ID NO: 19447 - DNA, 591 bp, Artificial Sequence
  derived and/or modified sequence
atgaaagtgaaaatcaagtgctggaatggcgtcgcaacctggctatgggtggccaatgacgaaaactgcggcatttgcagaatggcgtttaacggctgctgccccgattgcccacttcacggcgaaagcataagcaggtgtttgggctggtgtccccaacctgtgccagttcttggaggaagggctcatccacaggttccaatcaatacagcctctcccaccccaggtcagcacacagggtctttaatgtcccgggaggaatctagtcgcagccctgaccccacccctcccgctttagaccaggaaacctctagcctattacgctgcacatcaccatggtgtctcgatcacagctgcgatctgttcggtattaccgaccaagtgagcgctgatggtccacgagcttgtaggcaaggcgctcgacggaggctcccggctggggtgggccctgtactcccattgctgccccatgccttgcacccccaggtcgctgcacgcaccgccggagccgcagctctgccacacgtgccaccaggaatggaggtgcagggcgtgcgccctgatcttgcactcgcaggaggggcatcttag

SEQ ID NO: 19448 - protein, 95 aa, Artificial Sequence
  derived and/or modified sequence
MANEKPTEEVKTENNNHINLKVAGQDGSVVQFKIKRQTPLSKLMKAYCEPRGLSVKQIRFRFGGQPISGTDKPAQLEMEDEDTIDVFQQPTGGVY

SEQ ID NO: 19449 - DNA, 288 bp, Artificial Sequence
  derived and/or modified sequence
atggctaacgaaaagcctaccgaggaggtcaagactgagaacaacaatcacattaacttgaaggtggcgggtcaagatggaagtgtggtgcagtttaagatcaagcggcaaacacccctgagtaaactgatgaaggcttactgtgaaccaagagggctgagcgtaaagcagatcagattccgtttcggtggacagccaatttccggtacagataagccagcacaactggaaatggaagatgaggacaccattgatgtgttccagcagccaactggcggagtgtactag

SEQ ID NO: 19450 - DNA, 288 bp, Artificial Sequence
  derived and/or modified sequence
atggccaatgagaagcccacagaggaggtgaagacagagaacaacaaccacatcaacctgaaggtggccggccaggacggctctgtggtgcagttcaagatcaagaggcagacccccctgagcaagctgatgaaggcctactgtgagccccggggcctgtctgtgaagcagatccgcttccgctttggaggccagcccatcagcggcacagacaagccagcccagctggagatggaggatgaggacaccattgatgtgttccagcagcccactggaggagtgtactag

SEQ ID NO: 19451 - DNA, 288 bp, Artificial Sequence
  derived and/or modified sequence
atggccaacgagaagcccaccgaggaggtgaagaccgagaacaacaatcacattaatttaaaggtcgcaggtcaagacggatcagttgttcagttcaagatcaagcgacaaacccccctctctaagctgatgaaggcatattgtgaaccccgggggctgagcgtcaagcagattcggtttcgcttcgggggtcaacctattagtggaactgacaagcctgcccagctagagatggaagatgaagacacaattgacgtatttcagcaaccaaccggcggggtgtactag

SEQ ID NO: 19452 - DNA, 288 bp, Artificial Sequence
  derived and/or modified sequence
atggccaacgagaaaccgacggaggaggtgaaaacagaaaacaacaatcacatcaacctcaaggtcgcaggccaggacggttctgtagtgcagtttaagatcaagagacagaccccactgtcgaagctgatgaaagcgtattgtgagcccaggggtctgtctgttaagcagatcagattccggttcggaggccagcccatttccggtacagacaagccagcacagctcgaaatggaagacgaagacacaatagatgtgttccagcagcctaccggaggcgtttattag

SEQ ID NO: 19453 - DNA, 683 bp, Artificial Sequence
  derived and/or modified sequence
gaagcagcagctgaggagactccggtgttcaccatggccaacgaaaagcccacagaagaagtcaagactgagaacaacaatcatattaatttgaaggtggcgggacaggatggttctgtggtgcagtttaagattaagaggcagacaccacttagtaaactaatgaaagcctattgtgaaccacggggattgtcagtgaagcagatcagattccgatttggtgggcaaccaatcagtggaacagacaaacctgcacagttggaaatggaagatgaagatacaattgatgtgtttcaacagcctacgggaggtgtctactgaaaagggaacctgcttctttactccagaacgctgttctttaaagaccaagattactgcattctcaattagaaaactgcaatttggttccaccacattctgactactacagtatagttttctctattcttttgtttcccccttccacattcttttattatacatgaagtaactggtatgtgtacacaagcatattgcttttttcttcaaaccaaacagccaatggtatgttttgattgacatcaagtggagacaggatgggaaaaaatactgattctgtgaaaataccccctttatccattagtggcatgttcattcaggtcttatctttatattctagtaagttattttgctctcactgtttt

SEQ ID NO: 19454 - DNA, 288 bp, Artificial Sequence
  derived and/or modified sequence
atggccaacgagaagcccaccgaggaggtgaagaccgagaacaacaaccacatcaacctgaaggtggccggccaggacggcagcgtggtgcagttcaagatcaagagacagacccccctgagcaagctgatgaaggcctactgcgagcccagaggcctgagcgtgaagcagatcagattcagattcggcggccagcccatcagcggcaccgacaagcccgcccagctggagatggaggacgaggacaccatcgacgtgttccagcagcccaccggcggcgtgtactag

SEQ ID NO: 19455 - protein, 142 aa, Artificial Sequence
  derived and/or modified sequence
MFACAKLACTPSLIRAGSRVAYRPISASVLSRPEASRTGEGSTVFNGAQNGVSQLIQREFQTSAISRDIDTAAKFIGAGAATVGVAGSGAGIGTVFGSLIIGYARNPSLKQQLFSYAILGFALSEAMGLFCLMVAFLILFAM

SEQ ID NO: 19456 - DNA, 429 bp, Artificial Sequence
  derived and/or modified sequence
atgttcgcttgtgccaagttggcgtgtacgccgtccttgattcgggctggttcccgagtcgcttacagacctattagcgcctctgtccttagccggccagaagcgtctcggaccggcgagggctccacggtcttcaacggcgctcagaacggcgttagccagctgatccagagagaattccagacctctgccatctcaagggacattgacacggctgcgaagtttattggcgctggcgccgccaccgtgggggtggctggatcgggtgccgggattggcactgttttcggctctctgatcattggctatgccaggaacccctcccttaagcagcaactgtttagttacgccattcttggatttgcactcagtgaggccatgggtctgttttgcctgatggtggcctttcttatcctctttgccatgtag

SEQ ID NO: 19457 - DNA, 429 bp, Artificial Sequence
  derived and/or modified sequence
atgtttgcctgcgcaaaactggcttgtactccctccctgattagagcgggctctagggtagcctaccggccgatctccgctagcgtgctgtccaggcctgaggcttctcggacgggtgaaggcagcacagtttttaacggcgcacagaatggggtctctcagctgattcagcgcgaatttcagacttcggccatcagccgggacattgatactgccgcaaagtttattggcgcaggcgccgctactgttggcgttgctggaagtggggcaggcattgggactgtgtttggcagcctcatcatcggatatgcacgcaatccctcccttaagcagcagctgttctcatacgcaatccttggattcgccctgtccgaggccatgggactgttttgtctgatggtggcatttctgatcctctttgcaatgtag

SEQ ID NO: 19458 - DNA, 429 bp, Artificial Sequence
  derived and/or modified sequence
atgtttgcctgcgctaagctcgcttgcactccatcactcattagggccgggagccgagtggcatacaggcctattagcgcttccgtcctgtctcgacccgaagcctctcggactggtgaaggctcaaccgtcttcaacggcgctcagaacggcgttagtcagcttatacaaagggagtttcagacgtcagccatctcaagggatattgatacagcagctaagttcattggagccggtgctgcaacggttggcgtcgctggttccggagctggaatcggaactgtgttcggctccctcataattgggtatgctcggaacccttctttgaagcagcaactgttctcttacgcaatcctcggcttcgcgctttcagaggcaatgggccttttctgtcttatggtagccttcctgattctattcgcgatgtag

SEQ ID NO: 19459 - DNA, 429 bp, Artificial Sequence
  derived and/or modified sequence
atgtttgcctgtgccaagctggcctgcacccccagcctcatccgggccggcagccgggtggcctaccggcccatcagcgcctctgtgctgagcaggcctgaggccagcaggactggagagggcagcacagtgttcaacggggcccagaatggagtgtcccagctgatccagcgggagttccagaccagcgccatcagccgggacatcgacacagctgccaagttcatcggggccggggccgccaccgtgggcgtggccggcagcggggccggcatcggcaccgtgtttggcagcctcatcatcggctacgccaggaaccccagcctgaagcagcagctgttctcctatgccatcctgggctttgccctgtctgaggccatgggcctcttctgcctgatggtggccttcctgatcctgtttgccatgtag

SEQ ID NO: 19460 - DNA, 429 bp, Artificial Sequence
  derived and/or modified sequence
atgttcgcctgcgccaagctggcctgcacccccagcctgatccgggccggcagcagagtggcctaccgcccaatttctgccagcgtcctgagccggcctgaggctagcagaacaggggaaggatccactgtattcaatggtgcgcagaatggggtctctcagctaatacagagggagtttcagacctcggcgatctctagagatatagacacagctgctaaattcatcggtgccggggccgctactgtaggagttgccggaagcggagcaggcattggcacagttttcggctctctcatcatcggctacgccagaaaccccagcttgaagcagcagctctttagttatgcaatactggggttcgctcttagtgaggccatgggccttttttgcctgatggttgcctttctgattctgttcgcaatgtag

SEQ ID NO: 19461 - DNA, 429 bp, Artificial Sequence
  derived and/or modified sequence
atgttcgcctgcgccaagctggcctgcacccccagcctgatccgggctgggtcccgagttgcctatcggccgatatccgcgtccgtgctaagccggcccgaggctagtaggacgggagagggttctacggtcttcaatggtgctcagaacggagtgagtcagctgatccagcgcgaattccaaaccagcgctatcagtcgcgacattgacaccgccgccaagtttataggagccggggccgccacagtcggcgtggctggaagtggtgccggcattgggaccgtgtttggaagtctgattattggttacgcccgcaacccttctcttaaacaacagttgtttagctacgccatactgggcttcgccctcagcgaagccatgggcctgttctgtctaatggttgcattcctgattttgttcgcaatgtag

SEQ ID NO: 19462 - DNA, 429 bp, Artificial Sequence
  derived and/or modified sequence
atgttcgcctgcgccaagctggcctgcacccccagcctgatccgggcaggcagccgtgtggcgtaccgacccatttcagcttcagtgctcagccgtcccgaagcttcaaggacaggcgagggttccacggtcttcaacggagcccaaaacggagtatctcaattaatacaacgcgagtttcaaactagcgccatcagccgcgacatcgacactgccgccaagttcatcggcgcgggggccgcaacagtcggagtggctggcagtggcgccggtatagggaccgtgttcggcagcctgataatcgggtacgcccggaaccccagcctgaaacagcagttgttcagctatgcaattctgggctttgccctgagcgaagccatgggtctgttctgtctgatggtggctttcttaatccttttcgccatgtag

SEQ ID NO: 19463 - DNA, 429 bp, Artificial Sequence
  derived and/or modified sequence
atgtttgcgtgtgccaagctcgcttgcacccccagcctcatacgcgctgggagtcgcgtagcctaccgcccaatttcagccagtgtcttatctcgtcctgaggcctcgaggaccggagagggctcaaccgtctttaatggagcacagaatggagtatcccagctgatccaacgggaatttcagacatctgccatcagccgagacattgatactgcggctaagttcatcggggctggcgcagcaaccgtcggtgtggccggatctggtgcgggaatcgggaccgtcttcggaagcctgatcataggctatgccagaaatccgtccctgaagcagcagctgttcagttacgcaatcctgggctttgcgctgtcagaggcaatgggcctgttttgccttatggtggctttcctcatactttttgccatgtag

SEQ ID NO: 19464 - DNA, 429 bp, Artificial Sequence
  derived and/or modified sequence
atgtttgcatgtgccaagcttgcgtgtacaccttccctgatccgtgccggaagtcgtgtcgcataccgacccatcagtgcttccgtcctctcgcgcccagaagcttcccgtaccggggagggatccactgtgtttaacggagcccagaacggggtgtcgcaactcatccaaagagagttccagaccagcgccatctcccgcgacatagatactgcagctaagtttatcggcgctggagccgcaaccgtgggggtggcaggttccggggctggaatcgggacagtgtttggaagcctcataatcggctacgcccgaaacccatcactaaagcagcaactcttctcttacgcaatcctcggctttgccttatcagaggcaatgggtctattttgccttatggtcgcctttttgatcctctttgctatgtag

SEQ ID NO: 19465 - DNA, 429 bp, Artificial Sequence
  derived and/or modified sequence
atgttcgcctgcgctaaactcgcctgcaccccctctttgatcagggccggatccagagtggcctaccggccaatttcggcctccgtgctgagccgacctgaagcctcccgcaccggagaaggctctactgttttcaacggcgcacagaatggggtcagtcagcttatccagagggagttccagacctctgccatttcacgagatattgataccgctgccaaattcatcggagccggtgctgctacggttggggttgccggaagcggagccggtatcggcacagtgtttggttcattgatcatcgggtatgctcgaaacccgagcctgaagcagcagctcttcagttatgctatcctaggctttgccctcagcgaggccatgggtctgttttgcctgatggtggcattcctgatcttgttcgccatgtag

SEQ ID NO: 19466 - DNA, 5484 bp, Artificial Sequence
  derived and/or modified sequence
ctaaaaaaagaatcccaggattttacctcctgtgtgttttcttcttgcttcttcatggtccatgataccagctgaggttgttagtacaataaaaccaaaccggccggatagaagcagattattctgccatttttccagatgtttgagttgcacatcaaatctggggctgattactcaacgcttgtttagcctacctgtgaggttcacaacaatttttcccagctctgtaatcatcagtgattcaaatttgccaatgtaaccatacttcaccattacagtgagaaaccagatgatgattttggagcacagcctaataagaacctggggtttgcctcttctttcggcattgttgatgctcttgagagcatcaggcaggacattcatgtgcaccattgtggcggcacgaaaagatggcggaaagagccaaacgacaaccctttcattgctcttgacaccgtgggtcaggaatttgggtaaagctcatttggatggctcatttttgttcctcgtggtgttgggaaggcttgacgagagctagagatccaagaaggcctcactcatgtgttggacacctcagttctctttggacttttttctatccaagtggtttctggagagggctatatttgggagtgatctgtcatacttctctttgctatcggatttctatcttcatcatgccatcatcactcaggctatcatcatcacccggtcttatcagatattgccaaattatgatgtcataacttactatgactgtccccactgtccatgaaaaaacacagaaaagattagatacttctcagggaggtccctgttcatctttatggcctcactttagtcctctcagaaggtactctttttcttcaatcttcctcagtgcaaatatccaccctcaatcaacatcaacatgggttggtgttactccaattcactcctctttttcttttctttttttttttgtttttgtttttttgagatggagtctcgctctgtcacccaggctggagtgcagtggcgtgatcttggctcacggcaacctctgactcccaggttcacgccattctcctgacttagcctcctgagtagctgggactacaggcacctgccacaacgcttggctaattttttgtatttttagtaaaaagacggggtttcaccgtgttagccaggatggtctccatctcctggccttgtgatccgcccgccttggcctcccaagtgccgggattacaggcgtgaaccaccgtgcctggccttcattctcctctttctataacgcaatcttaggatgcaaaaccaagcaaagtctgaattaatctatctagaatagcaccgtggagtcacagccatggtcaggcccctccaaagaacagactggatttcggaacccatgtctctccctgccacaagcaactagtccatatgcaacttggaagcagccactgtggatcttggcttctttcttgcttcctcctcaatagttactgccactgatttagtgctaaagagataggaacatcacttaaaaccatctctacacataaatccacttagaataattttttcccctggaggatctattattgaagtacaaggctttactgtttattctactgtagacaccacaggacaccatgttcttggttagaattgagtacttgagaaactatatgaataattgcttgttgaacagtacacgtgaattatctctattttccagctaaagattgagcctaaaatgattagtatttttgtaattttgaatcatttgatccatttgaagttggattagtgacaaagtcttattcatttttcaagtgttagttctgagggcttctcccagaactagcagcaaccagcgttgctgctagataatattgcacctttaagctaacaagtaaaaagctgatcctctgggttgatgttgtctcatgctagggctctaggcagagtgggctggagttcagtccccagccatcttcttagcagggcattctagatgtttaatcttttatgttgacgtgttgatatcacttccattagccatttgttagaattactaaattaaatttacataattcaaggatctaaaaagaccagaagttcagtcagagccatttttctgagatatttctgcatccctctgaagaagataatttgtccaaacttaacaaaaacaggtgttaaaattgagtacgttctgagaatactcagactttttttaagactttttttagtctcaaaccctacatgaaatacaatcccttaaatcttccaatcttagagctagaagaaaagtcgagcaccctcactttacccagaggcaattttgtgccccagatgacaaagctcttagatctactcatttgcttatggctccaccagtacttctaggtcaggccctctttcacctgaaggattagccatacttctggaaccattttccaggttccttgaaataaatatcttcgctttgctggggaccctagtttcctgttaagtagtgaatgacccttctttcctcccgccagccacagtcctatttcacagaggaagagaatgaccagcaagtcaacttctactacagagaagcagcaactgataaaaggccaaatcttacaaggtgccaacgtgaagaaaaaggcccactatcctgcagccaactcatatcaaaagttaatctgtttagtcctctctgccggggtgaatctacagtttttctttttgtctccctcttgccccatcaccaggtggttgtcgttgtccttcccggctagttgccaataaagttgttacaaagtgaccttgagtgtcttccttggtgcacccgaaaccccgccttcttcatccgggtgctgcggcgcgaataagagccggaccgcgcttgcgcattgagtcccactccttcgacctctgccgcagcccgtgccgccgccgcctcctgggaagagaggaagcgggagaggagcccacgtcgcctgtcacccaatatctccagccgcgcagtcccgaagagtgtaagatgttcgcctgcgccaagctcgcctgcaccccctctctgatccgagctggatccagagttgcatacagaccaatttctgcatcagtgttatctcgaccagaggctagtaggactggagagggctctacggtatttaatggggcccagaatggtgtgtctcagctaatccaaagggagtttcagaccagtgcaatcagcagagacattgatactgctgccaaatttattggtgcaggtgctgcaacagtaggagtggctggttctggtgctggtattggaacagtctttggcagccttatcattggttatgccagaaacccttcgctgaagcagcagctgttctcatatgctatcctgggatttgccttgtctgaagctatgggtctcttttgtttgatggttgctttcttgattttgtttgccatgtaacaaattactgcttgacatgttggcattcatattaattacggatgtaattctgtgtatcttactgtgactccgaaaactgtagtattggtgtcatgggaatgtacgttatttccaaagtcatttcattaaagatgaaaactttaatttcttctgtgatttgtacttacactaagtttagattatcacaaagaagaacgtgcattcaggcagatgctgtcccattcagaggaagctacagcagttgctccactgatgaaaaatattccaatgtaatttttatgggaattcttttatatagtgttctgcatattgtaattcatagggcttttgtttattcatataaaggataaatatttgggtgttttgagcttctataaaatatgattaattaaaggtagttaatactcaagatggtcttgagtttttaaggtctaacatcagttagaatacttcaaatcagaatcaccttccaagactgacttgacaggtggttctaaaaataaatcacgtcagctttttaggaaatgaagccttaagctagggggtaatgtgacttttgtttttcagtaagtctcacattaagcaattgtgtgcctctaatgaatcttccatgtcttttcagaacaggctcagtccaactagcagctagtttcttacttgaacaagactattaaaaaccaaatatcaaaaaactgaattggctagatttttacagccaaaaattgctgtaaggcagtgtgtatcactgttgctaacatgtttatagtgggagtcttggggatgatagctggttcaacagtattttgctgctaatactttatgttgcttcttggtcaaacttttcccattcaaaggaagaagatggtgctactatagacagtttttcccctagcaaatatattgtaccataatatctatcatccaagtttcagggttttttgaaagttgataattaggaaagtgacattttacttttcttagtgccctttgcctgtttgatttccattgagaaagagcagtcaccaaagttcctcaagtgtcggaagaccacctccatcagaatcagtgcttgtttaaaaaataaaaatccctaggttccagacctactgaattggactctttggacatgagactcagcaatctacatctttaaaaaggcttcccaggtggtttttgtgcatactgtttgagagtcactaagttatatatatatcctaccttctgtaaagtgaaatgaggccccaaaaagctaaagaggtagagctgctacctcgtttttagttgattcatcatctagtctatatcacccaaaagaattggaaataggtattcaaacaaaaacctgtatacaagtattcatagaagcactacttacaatagccgaaaggtagaaacaaccaaatgtctatcagctgatgaatggataagtaaaatacatccatataatggaatattcagccatgaaaaggaatgaggcactgatacataatgaatagatgtgagtgaaccctaagaaagcatgctaagtggaagaagccagccacatgattccatttatatgaaatatccaaaataggcaaatccacggtgacaaagccaattagtagttatcaggaactagggagggggtgaaaagggagtgactgcgtaatgcgtatggggattccttttaggatgatgaaaattggatgaattacagctggtctgatggtagtgggttatcagaacttattaacattagtgtcattaaagttggtatatagcccctcactgctaaatctggctcaaaaattaaaagattattaaaatttgatgaattagtggtgatggttgcacaacattgtaaatataataaatgtcactgaattgtacactttaaggtggttaaaatggcaaattttacatgtcttactgaaactactatttaatacaaagtacatagtataaaattttaaaagtgataggaaaatgcttagattaatattcacctattccaagtatattttaaataaaaacagtcttggtaaaga

SEQ ID NO: 19467 - DNA, 842 bp, Artificial Sequence
  derived and/or modified sequence
ctgggaaggtaagtggagggcacagggagcccggcctggccagggcggagcggcgcccagtagggacccattcattgtgccggcgcctcactgggcacggggcccaagctgacggcgtgcacgggagcctgcggggcctgggtgggaagaacaggcccctggagggcacttgaccttaagcctcttttcctccgcagagaggaagcgggagaggagcccacgtcgcctgtcacccaatatctccagccgcgcagtcccgaagagtgtaagatgttcgcctgcgccaagctcgcctgcaccccctctctgatccgagctggatccagagttgcatacagaccaatttctgcatcagtgttatctcgaccagaggctagtaggactggagagggctctacggtatttaatggggcccagaatggtgtgtctcagctaatccaaagggagtttcagaccagtgcaatcagcagagacattgatactgctgccaaatttattggtgcaggtgctgcaacagtaggagtggctggttctggtgctggtattggaacagtctttggcagccttatcattggttatgccagaaacccttcgctgaagcagcagctgttctcatatgctatcctgggatttgccttgtctgaagctatgggtctcttttgtttgatggttgctttcttgattttgtttgccatgtaacaaattactgcttgacatgttggcattcatattaattacggatgtaattctgtgtatcttactgtgactccgaaaactgtagtattggtgtcatgggaatgtacgttatttccaaagtcatttcattaaagatgaaaacttta

SEQ ID NO: 19468 - DNA, 795 bp, Artificial Sequence
  derived and/or modified sequence
agtcccactccttcgacctctgccgcagcccgtgccgccgccgcctcctgggaagcctcttttcctccgcagagaggaagcgggagaggagcccacgtcgcctgtcacccaatatctccagccgcgcagtcccgaagagtgtaagatgttcgcctgcgccaagctcgcctgcaccccctctctgatccgagctggatccagagttgcatacagaccaatttctgcatcagtgttatctcgaccagaggctagtaggactggagagggctctacggtatttaatggggcccagaatggtgtgtctcagctaatccaaagggagtttcagaccagtgcaatcagcagagacattgatactgctgccaaatttattggtgcaggtgctgcaacagtaggagtggctggttctggtgctggtattggaacagtctttggcagccttatcattggttatgccagaaacccttcgctgaagcagcagctgttctcatatgctatcctgggatttgccttgtctgaagctatgggtctcttttgtttgatggttgctttcttgattttgtttgccatgtaacaaattactgcttgacatgttggcattcatattaattacggatgtaattctgtgtatcttactgtgactccgaaaactgtagtattggtgtcatgggaatgtacgttatttccaaagtcatttcattaaagatgaaaactttaatttcttctgtgatttgtacttacactaagtttagattatcacaaagaagaacgtgcattcaggcagatgctgtccca

SEQ ID NO: 19469 - DNA, 429 bp, Artificial Sequence
  derived and/or modified sequence
atgttcgcctgcgccaagctggcctgcacccccagcctgatcagagccggcagcagagtggcctacagacccatcagcgccagcgtgctgagcagacccgaggccagcagaaccggcgagggcagcaccgtgttcaacggcgcccagaacggcgtgagccagctgatccagagagagttccagaccagcgccatcagcagagacatcgacaccgccgccaagttcatcggcgccggcgccgccaccgtgggcgtggccggcagcggcgccggcatcggcaccgtgttcggcagcctgatcatcggctacgccagaaaccccagcctgaagcagcagctgttcagctacgccatcctgggcttcgccctgagcgaggccatgggcctgttctgcctgatggtggccttcctgatcctgttcgccatgtag

SEQ ID NO: 19470 - protein, 1127 aa, Artificial Sequence
  derived and/or modified sequence
MEVQVSQASLGFELTSVEKSLREWSRLSREVIAWLCPSSPNFILNFPPPPSASSVSMVQLFSSPFGYQSPSGHSEEEREGNMKSAKPQVNHSQHGESQRALSPLQSTLSSAASPSQAYETYIENGLICLKHKIRNIEKKKLKLEDYKDRLKSGEHLNPDQLEAVEKYEEVLHNLEFAKELQKTFSGLSLDLLKAQKKAQRREHMLKLEAEKKKLRTILQVQYVLQNLTQEHVQKDFKGGLNGAVYLPSKELDYLIKFSKLTCPERNESLSVEDQMEQSSLYFWDLLEGSEKAVVGTTYKHLKDLLSKLLNSGYFESIPVPKNAKEKEVPLEEEMLIQSEKKTQLSKTESVKESESLMEFAQPEIQPQEFLNRRYMTEVDYSNKQGEEQPWEADYARKPNLPKRWDMLTEPDGQEKKQESFKSWEASGKHQEVSKPAVSLEQRKQDTSKLRSTLPEEQKKQEISKSKPSPSQWKQDTPKSKAGYVQEEQKKQETPKLWPVQLQKEQDPKKQTPKSWTPSMQSEQNTTKSWTTPMCEEQDSKQPETPKSWENNVESQKHSLTSQSQISPKSWGVATASLIPNDQLLPRKLNTEPKDVPKPVHQPVGSSSTLPKDPVLRKEKLQDLMTQIQGTCNFMQESVLDFDKPSSAIPTSQPPSATPGSPVASKEQNLSSQSDFLQEPLQATSSPVTCSSNACLVTTDQASSGSETEFMTSETPEAAIPPGKQPSSLASPNPPMAKGSEQGFQSPPASSSSVTINTAPFQAMQTVFNVNAPLPPRKEQEIKESPYSPGYNQSFTTASTQTPPQCQLPSIHVEQTVHSQETAANYHPDGTIQVSNGSLAFYPAQTNVFPRPTQPFVNSRGSVRGCTRGGRLITNSYRSPGGYKGFDTYRGLPSISNGNYSQLQFQAREYSGAPYSQRDNFQQCYKRGGTSGGPRANSRAGWSDSSQVSSPERDNETFNSGDSGQGDSRSMTPVDVPVTNPAATILPVHVYPLPQQMRVAFSAARTSNLAPGTLDQPIVFDLLLNNLGETFDLQLGRFNCPVNGTYVFIFHMLKLAVNVPLYVNLMKNEEVLVSAYANDGAPDHETASNHAILQLFQGDQIWLRLHRGAIYGSSWKYSTFSGYLLYQD

SEQ ID NO: 19471 - DNA, 3384 bp, Artificial Sequence
  derived and/or modified sequence
atggaggtacaggtgtcacaggcctcgctaggcttcgaactgacatcggttgagaaatcgctccgggaatggagccggctttcgcgggaggtcatagcgtggctgtgtccttctagcccgaacttcatcttgaattttcctccaccacctagcgcatcctccgtcagtatggttcagcttttctcatcccccttcggatatcagtctcccagtggacattccgaggaggagagggagggtaatatgaagtctgcaaaaccacaagtgaatcacagccagcacggtgagtctcagcgcgctttatctcccctgcaatctaccctaagctcagcagcaagtccttcccaagcgtacgaaacttacattgaaaacgggctgatttgcctgaagcacaagattcgcaacattgagaagaagaagttgaaacttgaagactataaggatcgattgaagtccggcgagcacctgaatcccgatcaactggaggctgtcgagaagtatgaagaggtgctgcacaacctggagttcgcaaaggagcttcagaagactttcagtgggttgtccttggacttactcaaggctcagaaaaaagcccagcggcgcgagcacatgttgaagctggaagcggagaagaaaaagttgaggactatcctccaggtgcagtacgtgcttcagaacctgacccaggagcatgtccagaaagacttcaagggcggactgaatggagctgtttacctgcccagcaaggaactcgattacttaattaagttcagcaagctcacatgccctgagcgcaacgagtctttgtccgtggaggatcagatggaacagtctagtctttatttctgggatttgctcgaggggagtgagaaggccgtagtcggcacaacgtacaagcatctgaaagatttactgagcaaactgctcaacagcggttattttgagagcatacccgtacccaagaacgcaaaggaaaaagaggtacccttggaagaggagatgctgattcagagcgagaaaaagacccagctatcgaagacggaatctgtaaaagaatccgaatctttgatggagttcgcccagcctgaaatccagcctcaggagttcctcaatagacggtacatgacagaagttgattacagcaacaaacagggcgaggaacagccatgggaggcagactacgcccgaaagccaaaccttccgaaacgctgggacatgctcaccgagcccgatggccaggagaaaaaacaagagtccttcaagtcatgggaagcctccggcaaacatcaggaggtgagcaagcctgctgtgagtctggagcagcggaagcaggacacaagtaaactgagatccacacttccggaggagcagaagaaacaagagatttcgaaatccaaaccatcccctagccagtggaagcaggatacccctaagagcaaggccgggtatgtccaggaggagcagaaaaaacaggaaacccccaagctctggccggtgcaactgcagaaggagcaggatccgaaaaaacaaactccgaagtcatggacaccgtccatgcagtctgagcagaacaccacaaaatcctggacgactccgatgtgtgaagaacaagattccaaacagcctgagactcccaaatcgtgggagaacaacgtggaatctcagaaacatagcctgacatctcagtcacagatttcacctaaaagttggggggtggctaccgcttctctcatccccaacgaccagctcctacctagaaagctcaataccgagcccaaagatgtccctaaaccggttcaccagccagtgggatccagctccaccctgcccaaggaccccgtgttacgtaaggagaaactgcaggatctaatgacgcaaatccagggcacttgcaatttcatgcaggagagtgtgctggactttgacaagccttcctcagcaatccccacatcacagccaccttcagcaacccctgggagtccagttgccagcaaagaacagaacctcagcagtcagagcgactttctgcaggaacccctacaggcaacatcgtccccagttacttgcagttccaatgcctgtctggtgacgaccgatcaggcatccagtggatccgagacggagttcatgacaagcgagactccggaagctgccatacctcccggcaaacagcccagcagtctggcctcaccaaacccccctatggccaagggctccgagcaagggtttcagtctcccccagcgtctagctccagcgtcaccattaatactgcgccattccaggccatgcaaaccgtatttaacgtcaatgctcctctacctccacggaaggagcaggagatcaaggagagtccttactcacccggatataatcaatcttttacaacagcctccacccagacaccgcctcagtgccagctgccatcaatccatgttgagcagacagttcacagccaggagaccgcagcaaattaccatcctgatgggaccatccaggtgtccaacggtagcttggccttctaccctgcgcaaactaacgtttttccccgaccaacacagccgttcgttaatagccgtggttctgtgcgcggctgcactcgcggagggagactgatcacaaacagctaccgtagccccggaggttataagggtttcgatacgtaccgaggactgccttcgatttcaaacggcaactactctcagttgcagttccaggcccgggagtacagtggagcaccttacagccaacgagataactttcagcagtgctataagcgcgggggtacctccggcggcccaagggccaattcccgcgccggttggtctgactcctctcaggtatcatcccccgaacgggataatgagacattcaatagtggcgacagcggacagggcgactctagatccatgacgcctgtcgatgtgcctgtcactaatccagctgcgacaatcttgccagttcacgtctaccccttacctcaacaaatgcgcgtggcattctcagctgccaggacttctaacttagcccccgggaccttggatcagccaatcgtgttcgacctgttactgaataacctgggcgagacttttgacctgcagctgggccgattcaattgtccggtgaacggcacctatgtgtttatcttccatatgcttaagctggccgtgaacgttcccctgtatgtgaatttgatgaaaaacgaggaggtgcttgtgagcgcctacgccaacgatggagcccccgaccacgagacagcttcaaatcacgcaatcctccagctctttcaaggagatcagatttggttgcgcctgcacaggggcgccatttatggctcatcatggaagtattcgacgttctcaggctatctgctctaccaagactag

SEQ ID NO: 19472 - DNA, 3384 bp, Artificial Sequence
  derived and/or modified sequence
atggaggtgcaggtgtcccaggccagcctgggctttgagctgacctctgtggagaagagcctgcgggagtggagccggctgagccgggaggtgattgcctggctgtgccccagcagccccaacttcatcctgaacttccccccacctccttctgccagctctgtgtccatggtgcagctgttcagcagccccttcggctaccagagccccagcggccacagcgaggaggagcgggagggcaacatgaagagcgccaagccccaggtgaaccacagccagcacggggagagccagagggccctgagccccctgcagagcaccctgagcagcgctgccagccccagccaggcctatgagacctacattgaaaatggcctcatctgcctgaagcacaagatccggaacatcgagaagaagaagctgaagctggaggactacaaggaccggctgaagagcggggagcacctgaacccagaccagctggaggccgtggagaagtatgaggaggtgctgcacaacctggagtttgccaaggagctgcagaagaccttcagcggcctgagcctggacctgctgaaggcccagaagaaggcccagaggcgggagcacatgctgaagctggaggccgagaagaagaagctgcggaccatcctgcaggtgcagtatgtgctgcagaacctgacccaggagcacgtgcagaaggacttcaagggcggcctgaatggagctgtgtacctgcccagcaaggagctggactacctgatcaagttcagcaagctgacctgcccagagagaaatgaaagcctgtctgtggaggaccagatggagcagagcagcctgtacttctgggacctgctggagggcagcgagaaggctgtggtgggcaccacctacaagcacctgaaggacctgctgagcaagctgctgaacagcggctactttgagagcatccctgtgcccaagaatgccaaggagaaggaggtgcccctggaggaggagatgctgatccagagcgagaagaagacccagctgagcaagacagaatctgtgaaggagagcgagagcctgatggagtttgcccagcctgagatccagccccaggagttcctgaacagacgctacatgacagaggtggactacagcaacaagcagggcgaggagcagccctgggaggccgactatgccaggaagcccaacctgcccaagcgctgggacatgctgacagagccagatggccaggagaagaagcaggagagcttcaagtcctgggaggccagcggcaagcaccaggaggtgtccaagccagctgtgtccctggagcagaggaagcaggacaccagcaagctgcggagcaccctgcctgaggagcagaagaagcaggagatcagcaagagcaagcccagccccagccagtggaagcaggacacccccaagagcaaggccggctacgtgcaggaggagcagaagaagcaggagacccccaagctgtggcctgtgcagctgcagaaggagcaggaccccaagaagcagacccccaagtcctggacccccagcatgcagagcgagcagaacaccaccaagtcctggaccacccccatgtgtgaggagcaggacagcaagcagcctgagacccccaagtcctgggagaacaacgtggagagccagaagcacagcctgaccagccagagccagatcagccccaagtcctggggcgtggccacagccagcctcatccccaatgaccagctgctgcccaggaagctgaacacagagcccaaggatgtgcccaagcctgtgcaccagcctgtgggcagcagcagcaccctgcccaaggaccctgtgctgaggaaggagaagctgcaggacctgatgacccagatccagggcacctgcaacttcatgcaggagagcgtgctggactttgacaagcccagcagcgccatccccaccagccagcccccatctgccaccccaggcagccctgtggccagcaaggagcagaacctgagcagccagagcgacttcctgcaggagcccctgcaggccaccagcagccctgtgacctgcagcagcaatgcctgcctggtgaccacagaccaggccagcagcggcagcgagacagagttcatgaccagcgagaccccagaggccgccatccccccaggcaagcagcccagcagcctggccagccccaacccccccatggccaagggcagcgagcagggcttccagagccccccagccagcagcagctctgtgaccatcaacacagcccccttccaggccatgcagacagtgttcaacgtgaatgcccccctgccccccaggaaggagcaggagatcaaggagagcccctacagccctggctacaaccagagcttcaccacagccagcacccagaccccaccccagtgccagctgcccagcatccacgtggagcagacagtgcacagccaggagacagctgccaactaccacccagatggcaccatccaggtgtccaatggcagcctggccttctacccagcccagaccaacgtgttcccccggcccacccagccctttgtgaacagccggggctctgtgcggggctgcacccggggcggccgcctcatcaccaacagctaccgcagccctgggggctacaagggctttgacacctaccggggcctgcccagcatcagcaatggaaactacagccagctgcagttccaggcccgggagtacagcggggccccctacagccagagggacaacttccagcagtgctacaagagaggaggcaccagcggcggcccccgggccaacagcagagctggctggagcgacagcagccaggtgagcagccctgagcgggacaatgagaccttcaacagcggggacagcggccagggcgacagccgctccatgacccctgtggatgtgcctgtgaccaacccagctgccaccatcctgcctgtgcacgtgtaccccctgccccagcagatgagggtggccttctctgctgcccggaccagcaacctggcccctggcaccctggaccagcccatcgtgtttgacctgctgctgaacaacctgggggagacctttgacctgcagctgggccgcttcaactgccctgtgaatggcacctacgtgttcatcttccacatgctgaagctggccgtgaatgtgcccctgtatgtgaacctgatgaagaatgaggaggtgctggtgtctgcctatgccaatgatggagccccagaccatgaaacagccagcaaccacgccatcctgcagctgttccagggcgaccagatctggctgcggctgcacagaggagccatctacggcagctcctggaagtacagcaccttcagcggctacctgctgtaccaggactag

SEQ ID NO: 19473 - DNA, 3384 bp, Artificial Sequence
  derived and/or modified sequence
atggaggtgcaggtgagccaggccagcctgggcttcgagctgaccagtgtagaaaagtccctgcgggagtggtcacgtctcagccgggaggtgatcgcttggctgtgcccttcaagccccaatttcatcctgaactttccgcccccacccagtgcttcttcggtgagcatggtacagcttttctcttccccgttcggctaccagagcccatccggacacagcgaagaagaacgtgagggcaatatgaagagcgccaaaccccaggtaaatcactcacagcatggagaatcacagcgagccttgtccccacttcaatccacactatcatccgcagcaagcccatcacaagcctacgagacctacattgaaaatggcctgatatgtctgaaacacaaaatcagaaacattgagaaaaagaaactcaagctggaagactataaggacaggttgaagagcggggagcatttgaatcctgatcagctggaggccgttgagaagtatgaagaggtgctgcataatctggagttcgctaaagagttgcagaagaccttctccggactgtccttagatcttttaaaggcacagaagaaggctcagagaagagagcatatgttgaaactcgaagccgaaaaaaaaaagttgaggactatcctccaggtacagtacgtccttcagaacttgactcaagaacatgtacaaaaggatttcaagggtgggctaaacggggccgtatatctaccatccaaagaactggattacctgattaaattttcaaagcttacttgtcctgaacgaaatgaaagtctttcagtggaggatcaaatggagcagtcttcactgtacttttgggacctgctggaaggcagcgagaaggctgtggtcggcacaacttataaacatctgaaagatctcctatctaaactgctgaatagcggatactttgaatccatccccgtccccaagaatgcaaaggagaaagaagttccacttgaggaagaaatgcttattcagtccgagaaaaagacgcagctgtctaaaaccgagtcagtgaaggaaagtgaaagcttaatggaattcgcccaacccgagatacaaccccaggagttcttgaataggagatacatgacggaagttgattattccaacaagcagggtgaggaacagccatgggaagctgactatgccagaaaacctaacctgcccaaacgctgggatatgctgactgagccagatgggcaggaaaaaaaacaagaaagttttaagagctgggaagccagtggcaaacaccaggaggtaagtaaacctgcagtgtcactggagcaaagaaaacaggatacaagtaagctaaggagcaccttgcccgaagaacagaaaaaacaagaaattagtaagtcaaagcctagtcctagtcagtggaagcaggatactcccaagtccaaggcgggctatgttcaggaagagcagaagaaacaggaaacaccaaagctctggcctgtccagttgcagaaggagcaggaccccaagaagcaaaccccaaagagttggacaccatcaatgcagagcgaacagaataccactaagtcctggaccactccgatgtgtgaagaacaagattccaagcagccggagaccccaaagtcatgggagaacaatgtggaatcccagaaacacagcctgactagtcagtcccagattagtcccaagtcctggggcgtggctacagcatctctgatccccaacgatcagctgttgccccggaaactgaatacagagcctaaagacgtgccgaagcctgtacatcagcccgtgggatcttcctctacactacctaaggatcctgtgctgcgaaaggaaaaactgcaggaccttatgacccagattcaagggacttgtaatttcatgcaggagagcgtgttggattttgacaagccaagttcggctattccaacaagccagcctccctccgccacccctggctcacctgtggcctctaaggagcagaatctttctagtcaatccgatttcttgcaggagccacttcaggccacatcctctcctgtgacttgttcctctaatgcatgcttggttactaccgaccaggccagtagcggcagtgagaccgaatttatgacctcagaaactcccgaagccgcaattccccccggcaaacaaccatcctccttggcctcaccaaatccacccatggcgaagggttctgaacaggggttccagtctccgccagcgagttcatctagtgtgacaatcaatactgcgccgtttcaggccatgcagacagttttcaatgtcaacgcccctctgccccccagaaaggagcaggagattaaggagagcccttacagccctggttataaccagagtttcactacggcctctacacagacccccccacaatgtcagctgccatcaattcacgtggagcagactgtccactcccaagaaaccgccgccaattatcaccccgatgggaccatccaagtctcaaatggatcactggccttctatcctgcccagacgaacgtgttcccccgacccacccaaccattcgtcaattctagaggcagcgtgagaggatgcacacgaggaggtcggttaatcaccaactcctatcgaagccccggaggctacaaaggatttgatacttaccggggcctgcccagcatttccaatgggaactactcccagctgcagttccaggctcgtgagtatagcggtgctccctactcgcaacgcgacaatttccagcagtgctacaagaggggaggtacctctggtggaccgcgagcgaattcccgggctggttggtcggatagttcgcaggtgagttcaccagagcgcgacaacgagacatttaattccggtgatagtggacaaggtgactcacgtagcatgaccccagttgatgtgccagtaacaaacccggccgctacgattctccctgtacacgtctatcctctgcctcagcagatgagagtggccttcagtgctgcaagaacgtccaatcttgctcctggaactctggatcagccgatcgtgttcgatctccttcttaataacctaggagagactttcgatctccaactgggaaggttcaattgtcccgttaacggtacgtacgttttcatttttcacatgctcaagctagcggtcaacgtgccactatacgttaacctgatgaaaaacgaagaggtactcgtgagtgcttacgccaacgatggagcccccgatcacgagactgcctcaaaccacgctatcctccagttattccagggcgatcaaatctggttgagacttcacaggggagccatctacggttcttcttggaagtactctaccttctccggctacctgttgtaccaggattag

SEQ ID NO: 19474 - DNA, 3384 bp, Artificial Sequence
  derived and/or modified sequence
atggaagtgcaggtttcccaagcgtccttgggtttcgaactcacatcagtggagaagtcacttagggaatggagtcgccttagccgtgaagtgatcgcctggctttgcccaagctccccgaactttatactgaactttcccccacccccttccgcatctagtgtgtcaatggtgcagctcttttcgagcccctttggttaccagagcccttctgggcacagcgaggaagaaagagaaggcaatatgaaaagcgctaaacctcaggtgaaccacagccagcatggcgaatcgcagcgtgctctctcacccctgcaatcgacgctaagtagcgctgcaagcccatcccaggcttacgagacgtatatcgagaatggccttatttgcctgaaacataaaattcgaaacatagagaagaaaaaactgaaactggaggactacaaagatcggttgaagtccggcgagcacctaaaccccgatcaattagaagccgtcgaaaagtacgaggaggtgctgcataacttggaattcgccaaggagctacagaaaacattctcgggcctcagcttagatctgctcaaagcccagaagaaggcacagcggagagagcacatgttaaaactggaagcggagaagaagaagctaaggaccattctgcaggtccagtatgtcctgcagaacctaacgcaggagcacgtgcagaaagatttcaaggggggtcttaatggggctgtttacttgccctcaaaagagctggactacctcatcaaattcagtaagcttacctgtccagagcgaaacgagtcgctcagtgtggaggatcagatggagcagtcatcattatacttttgggacctcctcgagggcagcgaaaaggccgtggtgggcacaacttataagcacctgaaagaccttcttagcaagctgctaaatagtggatattttgaatcaatccccgtcccaaagaacgctaaggaaaaagaggttccgcttgaggaggaaatgctgatccagtccgaaaaaaagacccagctgtccaagacagagtccgtgaaagagtcagaatctttaatggaattcgctcagccagaaatccagccacaggaatttctgaacaggcggtacatgacagaggtggactacagcaacaagcagggcgaggaacagccatgggaagccgattacgccaggaagcctaatctccctaagcgctgggacatgcttaccgaacccgatggacaggaaaaaaagcaggagtctttcaagtcctgggaagcctcaggtaagcaccaagaagtctccaaaccagcagtgagcctcgaacagcgaaagcaggacacaagtaaactccgaagcaccctcccagaggagcaaaagaagcaggagataagtaagagtaagccaagcccgtcacagtggaaacaagataccccaaagtccaaagctggctacgttcaggaagagcagaagaagcaggaaacacccaaactatggcccgttcagttgcagaaagaacaagatccaaagaagcagactccaaagtcatggaccccatccatgcagtcagagcagaataccacaaagtcgtggaccacccccatgtgcgaggagcaggacagtaaacagcctgaaaccccaaagtcatgggagaacaacgtggaaagccagaagcacagcctaacgagccaatcacagatttctcccaagtcttggggggtggccaccgcctcacttatccctaatgaccagctgctgcccagaaaactaaacaccgaacctaaggacgtcccaaaaccggtacaccagcctgtgggatcatcttctacactgcctaaggatcccgttctgagaaaagagaaactgcaggaccttatgacacagatccagggcacctgcaactttatgcaggagagtgtgttagattttgataaaccatccagcgctatcccaaccagccagcctcccagtgccaccccaggtagtcctgttgcttccaaagagcagaatctgtctagccagagcgactttctgcaggagccactccaggccacctcatcacctgttacttgctcaagcaatgcgtgccttgtcactaccgatcaagcctcaagtggcagtgaaaccgagtttatgactagcgaaacacccgaggctgccatcccccctggcaagcagccctcttctctggcttcccctaaccctcccatggcaaaggggtctgagcagggattccagtccccacccgcttcttcttcgtctgttacaattaatacagctccattccaagccatgcagacagtctttaatgtcaacgcacccttgccaccaaggaaagagcaggagattaaagagtcaccctactccccgggttacaatcagtctttcacaaccgcttccacacaaaccccgccacagtgccagcttccgagcattcacgtagagcagacagtgcactctcaggagaccgctgcaaattatcatcccgatggcactattcaggtcagcaatgggtcgttagccttttatcccgcacagactaacgtgttcccacgacctactcagcccttcgtgaattcgcggggatccgtgagaggttgcactcgaggaggcagactgattacaaatagctaccggagcccaggaggttataagggcttcgatacatacaggggcctcccctctatttccaacggaaattattctcagctccagttccaggctcgcgagtatagtggcgcaccctactcccagagggacaacttccagcagtgttataagcggggtggcacctcaggtggccctagggctaattcaagagccggatggtcagacagttcccaggtctcatctccagagcgcgataacgagacctttaactccggagattcgggtcaaggtgatagcaggagcatgacccccgtggacgtgcctgttaccaacccagctgcgaccattctgcctgtgcatgtgtacccactcccccagcaaatgcgggtcgccttctcagcagccaggacatcgaatctggccccagggactttagatcagcccatcgtgttcgatctgctcctgaataacctgggggagaccttcgatcttcagctcggtaggttcaactgccccgttaacgggacttacgtgttcattttccatatgctgaaactggctgtcaatgtccccctgtatgtaaatctaatgaaaaatgaagaggtccttgtcagcgcttacgccaacgatggggcacctgatcacgaaacagcttcaaaccacgccatcctccagctttttcagggcgaccagatctggctgcgtcttcacagaggagccatctacggctcatcctggaagtactctaccttctccggctacctactttaccaagattag

SEQ ID NO: 19475 - DNA, 4483 bp, Artificial Sequence
  derived and/or modified sequence
gtcggtgcctgcagggctctccgtggccgctcgggagaggtgctcttcgctcaggctcccccggagacttgagggggtgcgcgctggcgtgcatggggcctgttctgtccttggtttggggatgctcctaaggggggagaaagggatacctcgggtgcttggaggtcgagagacggatacgtaagtgcgcaagggccactgattagggcacgggaagggctcgctagaatgagctcttaaactggttgggtgtaagcggttttgggctagtctaaaccaaacaactgagaataaacgcggggttcctgcaggttgagagagtacctgtctgcaaatgtccagtagtgatggattgccttgtaggccccagagcaatcggggaagttagcattcttgttcaagaagctgctggttcacttagagctataaaagaatgttgtgagtttggattttcttccaaacgttcaggattgaggttagggctggtggtgagggatcatgtaaagaggtttgagtggctcagccttaggtcccggtgtggaaagcttattcttttggtgtcatcacgtggccgtgggaattatttagaatgtgatctgccctcatgagaagaaaggagctctgaagccgttgcagttcttcctccctatgtggaaaatcgaatttctggaaacatcctccgtattgggagattttgcctatgtaaaggctatccttattggctagcggcactaattactttaaaagtaggatggaagtacaagtatctcaagcatcattgggtttcgagctcacttctgtggaaaagagtttaagggagtggtctagactttccagggaagttattgcctggctgtgtccctctagtcctaattttatacttaactttcccccacctccttcagcctcatctgtttcaatggtgcaactcttttcatccccttttggttaccagtcaccttcaggccattcagaggaggaaagagaggggaatatgaagtcagccaagccccaagtgaaccacagtcagcatggggaaagccagcgggccttgagccccctgcagtctactctgagttctgctgcatctccttcccaagcgtatgagacctatattgaaaatggactcatatgccttaaacacaaaattagaaacatcgagaaaaagaagctcaaactggaggattataaggatcgcctgaaaagtggagagcatcttaatccagaccagttggaagctgtagagaaatatgaagaagtgctacataatttggaatttgccaaggagcttcaaaaaaccttttctgggttgagcctagatctactaaaagcgcaaaagaaggcccagagaagggagcacatgctaaaacttgaggctgagaagaaaaagcttcgaactatacttcaagttcagtatgtattgcagaacttgacacaggagcacgtacaaaaagacttcaaagggggtttgaatggtgcagtgtatttgccttcaaaagaacttgactacctcattaagttttcaaaactgacctgccctgaaagaaatgaaagtctgagtgttgaagaccagatggagcagtcatccttgtacttttgggaccttttggaaggtagtgagaaagcagtggtaggaacgacatacaaacacttgaaggatctactgtctaaattgctgaactcaggctattttgaaagtatcccagttcccaaaaatgccaaggaaaaggaagtaccactggaggaagaaatgctaatacaatcagagaaaaaaacacaattatcgaagactgaatctgtcaaagagtcagagtctctaatggaatttgcccagccagagatacaaccacaagagtttcttaacagacgctatatgacagaagtagattattcaaacaaacaaggcgaagagcaaccttgggaagcagattatgctagaaaaccaaatctcccaaaacgttgggatatgcttactgaaccagatggtcaagagaagaaacaggagtcctttaagtcctgggaggcttctggtaagcaccaggaggtatccaagcctgcagtttccttagaacagaggaaacaagacacctcaaaactcaggtctactctgccggaagagcagaagaagcaggagatctccaaatccaagccatctcctagccagtggaagcaagatacacctaaatccaaagcagggtatgttcaagaggaacaaaagaaacaggagacaccaaagctgtggccagttcagctgcagaaagaacaagatccaaagaagcaaactccaaagtcttggacaccttccatgcagagcgaacagaacaccaccaagtcatggaccactcccatgtgtgaagaacaggattcaaaacagccagagactccaaaatcctgggaaaacaatgttgagagtcaaaaacactctttaacatcacagtcacagatttctccaaagtcctggggagtagctacagcaagcctcataccaaatgaccagctgctgcccaggaagttgaacacagaacccaaagatgtgcctaagcctgtgcatcagcctgtaggttcttcctctacccttccgaaggatccagtattgaggaaagaaaaactgcaggatctgatgactcagattcaaggaacttgtaactttatgcaagagtctgttcttgactttgacaaaccttcaagtgcaattccaacgtcacaaccgccttcagctactccaggtagccccgtagcatctaaagaacaaaatctgtccagtcaaagtgattttcttcaagagccgttacaggctacttcttctccagttacttgtagctcaaatgcttgcttggttactaccgatcaggcttcttctggatctgaaacagagtttatgacctcagagactcctgaggcagcaattcccccaggcaagcaaccgtcttcactagcttctccaaatcctcccatggcaaagggctctgaacagggcttccagtcacctccagcaagtagtagttcagtaaccattaacacagcaccctttcaagccatgcagacagtatttaacgttaatgcacctctgcctccacgaaaagaacaagaaataaaagaatccccttattcacctggctacaatcaaagttttaccacagcaagtacacaaacaccaccccagtgccaactgccatctatacatgtagaacaaactgtccattctcaagagactgcagcaaattatcatcctgatggaactattcaagtaagcaatggtagccttgccttttacccagcacagacgaatgtgtttcccagacctactcagccatttgtcaatagccggggatctgttagaggatgtactcgtggtgggagattaataaccaattcctatcggtcccctggtggttataaaggttttgatacttatagaggactcccttcaatttccaatggaaattatagccagctgcagttccaagctagagagtattctggagcaccttattcccaaagggataatttccagcagtgttataagcgaggagggacatctggtggtccacgagcaaattcgagagcagggtggagtgattcttctcaggtgagcagcccagaaagagacaacgaaacctttaacagtggtgactctggacaaggagactcccgtagcatgacccctgtggatgtgccagtgacaaatccagcagccaccatactgccagtacacgtctaccctctgcctcagcagatgcgagttgccttctcagcagccagaacctctaatctggcccctggaactttagaccaacctattgtgtttgatcttcttctgaacaacttaggagaaacttttgatcttcagcttggtagatttaattgcccagtgaatggcacttacgttttcatttttcacatgctaaagctggcagtgaatgtgccactgtatgtcaacctcatgaagaatgaagaggtcttggtatcagcctatgccaatgatggtgctccagaccatgaaactgctagcaatcatgcaattcttcagctcttccagggagaccagatatggttacgtctgcacaggggagcaatttatggaagtagctggaaatattctacgttttcaggctatcttctttatcaagattgaaagtcagtacagtattgacaataaaaggatggtgttctaattagtgggattgaaggaaaagtagtctttgccctcatgactgattggtttaggaaaatgtttttgttcctagagggaggaggtccttacttttttgttttccttcctgaggtgaaaaatcaagctgaatgacaattagcactaatctggcactttataaattgtgatgtagcctcgctagtcaagctgtgaatgtatattgtttgcacttaatccttaactgtattaacgttcagcttactaaactgactgcctcaagtccaggcaagttacaatgccttgttgtgcctcaataaaaaagttacatgc

SEQ ID NO: 19476 - DNA, 3384 bp, Artificial Sequence
  derived and/or modified sequence
atggaggtgcaggtgagccaggccagcctgggcttcgagctgaccagcgtggagaagagcctgagagagtggagcagactgagcagagaggtgatcgcctggctgtgccccagcagccccaacttcatcctgaacttcccccccccccccagcgccagcagcgtgagcatggtgcagctgttcagcagccccttcggctaccagagccccagcggccacagcgaggaggagagagagggcaacatgaagagcgccaagccccaggtgaaccacagccagcacggcgagagccagagagccctgagccccctgcagagcaccctgagcagcgccgccagccccagccaggcctacgagacctacatcgagaacggcctgatctgcctgaagcacaagatcagaaacatcgagaagaagaagctgaagctggaggactacaaggacagactgaagagcggcgagcacctgaaccccgaccagctggaggccgtggagaagtacgaggaggtgctgcacaacctggagttcgccaaggagctgcagaagaccttcagcggcctgagcctggacctgctgaaggcccagaagaaggcccagagaagagagcacatgctgaagctggaggccgagaagaagaagctgagaaccatcctgcaggtgcagtacgtgctgcagaacctgacccaggagcacgtgcagaaggacttcaagggcggcctgaacggcgccgtgtacctgcccagcaaggagctggactacctgatcaagttcagcaagctgacctgccccgagagaaacgagagcctgagcgtggaggaccagatggagcagagcagcctgtacttctgggacctgctggagggcagcgagaaggccgtggtgggcaccacctacaagcacctgaaggacctgctgagcaagctgctgaacagcggctacttcgagagcatccccgtgcccaagaacgccaaggagaaggaggtgcccctggaggaggagatgctgatccagagcgagaagaagacccagctgagcaagaccgagagcgtgaaggagagcgagagcctgatggagttcgcccagcccgagatccagccccaggagttcctgaacagaagatacatgaccgaggtggactacagcaacaagcagggcgaggagcagccctgggaggccgactacgccagaaagcccaacctgcccaagagatgggacatgctgaccgagcccgacggccaggagaagaagcaggagagcttcaagagctgggaggccagcggcaagcaccaggaggtgagcaagcccgccgtgagcctggagcagagaaagcaggacaccagcaagctgagaagcaccctgcccgaggagcagaagaagcaggagatcagcaagagcaagcccagccccagccagtggaagcaggacacccccaagagcaaggccggctacgtgcaggaggagcagaagaagcaggagacccccaagctgtggcccgtgcagctgcagaaggagcaggaccccaagaagcagacccccaagagctggacccccagcatgcagagcgagcagaacaccaccaagagctggaccacccccatgtgcgaggagcaggacagcaagcagcccgagacccccaagagctgggagaacaacgtggagagccagaagcacagcctgaccagccagagccagatcagccccaagagctggggcgtggccaccgccagcctgatccccaacgaccagctgctgcccagaaagctgaacaccgagcccaaggacgtgcccaagcccgtgcaccagcccgtgggcagcagcagcaccctgcccaaggaccccgtgctgagaaaggagaagctgcaggacctgatgacccagatccagggcacctgcaacttcatgcaggagagcgtgctggacttcgacaagcccagcagcgccatccccaccagccagccccccagcgccacccccggcagccccgtggccagcaaggagcagaacctgagcagccagagcgacttcctgcaggagcccctgcaggccaccagcagccccgtgacctgcagcagcaacgcctgcctggtgaccaccgaccaggccagcagcggcagcgagaccgagttcatgaccagcgagacccccgaggccgccatcccccccggcaagcagcccagcagcctggccagccccaacccccccatggccaagggcagcgagcagggcttccagagcccccccgccagcagcagcagcgtgaccatcaacaccgcccccttccaggccatgcagaccgtgttcaacgtgaacgcccccctgccccccagaaaggagcaggagatcaaggagagcccctacagccccggctacaaccagagcttcaccaccgccagcacccagacccccccccagtgccagctgcccagcatccacgtggagcagaccgtgcacagccaggagaccgccgccaactaccaccccgacggcaccatccaggtgagcaacggcagcctggccttctaccccgcccagaccaacgtgttccccagacccacccagcccttcgtgaacagcagaggcagcgtgagaggctgcaccagaggcggcagactgatcaccaacagctacagaagccccggcggctacaagggcttcgacacctacagaggcctgcccagcatcagcaacggcaactacagccagctgcagttccaggccagagagtacagcggcgccccctacagccagagagacaacttccagcagtgctacaagagaggcggcaccagcggcggccccagagccaacagcagagccggctggagcgacagcagccaggtgagcagccccgagagagacaacgagaccttcaacagcggcgacagcggccagggcgacagcagaagcatgacccccgtggacgtgcccgtgaccaaccccgccgccaccatcctgcccgtgcacgtgtaccccctgccccagcagatgagagtggccttcagcgccgccagaaccagcaacctggcccccggcaccctggaccagcccatcgtgttcgacctgctgctgaacaacctgggcgagaccttcgacctgcagctgggcagattcaactgccccgtgaacggcacctacgtgttcatcttccacatgctgaagctggccgtgaacgtgcccctgtacgtgaacctgatgaagaacgaggaggtgctggtgagcgcctacgccaacgacggcgcccccgaccacgagaccgccagcaaccacgccatcctgcagctgttccagggcgaccagatctggctgagactgcacagaggcgccatctacggcagcagctggaagtacagcaccttcagcggctacctgctgtaccaggactag

SEQ ID NO: 19477 - protein, 416 aa, Artificial Sequence
  derived and/or modified sequence
MQTSEREGSGPELSPSVMPEAPLESPPFPTKSPAFDLFNLVLSYKRLEIYLEPLKDAGDGVRYLLRWQMPLCSLLTCLGLNVLFLTLNEGAWYSVGALMISVPALLGYLQEVCRARLPDSELMRRKYHSVRQEDLQRGRLSRPEAVAEVKSFLIQLEAFLSRLCCTCEAAYRVLHWENPVVSSQFYGALLGTVCMLYLLPLCWVLTLLNSTLFLGNVEFFRVVSEYRASLQQRMNPKQEEHAFESPPPPDVGGKDGLMDSTPALTPTESLSSQDLTPGSVEEAEEAEPDEEFKDAIEETHLVVLEDDEGAPCPAEDELALQDNGFLSKNEVLRSKVSRLTERLRKRYPTNNFGNCTGCSATFSVLKKRRSCSNCGNSFCSRCCSFKVPKSSMGATAPEAQRETVFVCASCNQTLSK

SEQ ID NO: 19478 - protein, 394 aa, Artificial Sequence
  derived and/or modified sequence
LESPPFPTKSPAFDLFNLVLSYKRLEIYLEPLKDAGDGVRYLLRWQMPLCSLLTCLGLNVLFLTLNEGAWYSVGALMISVPALLGYLQEVCRARLPDSELMRRKYHSVRQEDLQRGRLSRPEAVAEVKSFLIQLEAFLSRLCCTCEAAYRVLHWENPVVSSQFYGALLGTVCMLYLLPLCWVLTLLNSTLFLGNVEFFRVVSEYRASLQQRMNPKQEEHAFESPPPPDVGGKDGLMDSTPALTPTESLSSQDLTPGSVEEAEEAEPDEEFKDAIEETHLVVLEDDEGAPCPAEDELALQDNGFLSKNEVLRSKVSRLTERLRKRYPTNNFGNCTGCSATFSVLKKRRSCSNCGNSFCSRCCSFKVPKSSMGATAPEAQRETVFVCASCNQTLSK

SEQ ID NO: 19479 - DNA, 1251 bp, Artificial Sequence
  derived and/or modified sequence
atgcagaccagcgagagagagggcagcggccccgagctgagccccagcgtgatgcccgaggcccccctggagagcccccccttccccaccaagagccccgccttcgacctgttcaacctggtgctgagctacaagagactggagatctacctggagcccctgaaggacgccggcgacggcgtgagatacctgctgagatggcagatgcccctgtgcagcctgctgacctgcctgggcctgaacgtgctgttcctgaccctgaacgagggcgcctggtacagcgtgggcgccctgatgatcagcgtgcccgccctgctgggctacctgcaggaggtgtgcagagccagactgcccgacagcgagctgatgagaagaaagtaccacagcgtgagacaggaggacctgcagagaggcagactgagcagacccgaggccgtggccgaggtgaagagcttcctgatccagctggaggccttcctgagcagactgtgctgcacctgcgaggccgcctacagagtgctgcactgggagaaccccgtggtgagcagccagttctacggcgccctgctgggcaccgtgtgcatgctgtacctgctgcccctgtgctgggtgctgaccctgctgaacagcaccctgttcctgggcaacgtggagttcttcagagtggtgagcgagtacagagccagcctgcagcagagaatgaaccccaagcaggaggagcacgccttcgagagcccccccccccccgacgtgggcggcaaggacggcctgatggacagcacccccgccctgacccccaccgagagcctgagcagccaggacctgacccccggcagcgtggaggaggccgaggaggccgagcccgacgaggagttcaaggacgccatcgaggagacccacctggtggtgctggaggacgacgagggcgccccctgccccgccgaggacgagctggccctgcaggacaacggcttcctgagcaagaacgaggtgctgagaagcaaggtgagcagactgaccgagagactgagaaagagataccccaccaacaacttcggcaactgcaccggctgcagcgccaccttcagcgtgctgaagaagagaagaagctgcagcaactgcggcaacagcttctgcagcagatgctgcagcttcaaggtgcccaagagcagcatgggcgccaccgcccccgaggcccagagagagaccgtgttcgtgtgcgccagctgcaaccagaccctgagcaagtag

SEQ ID NO: 19480 - DNA, 1185 bp, Artificial Sequence
  derived and/or modified sequence
ctggagagcccccccttccccaccaagagccccgccttcgacctgttcaacctggtgctgagctacaagagactggagatctacctggagcccctgaaggacgccggcgacggcgtgagatacctgctgagatggcagatgcccctgtgcagcctgctgacctgcctgggcctgaacgtgctgttcctgaccctgaacgagggcgcctggtacagcgtgggcgccctgatgatcagcgtgcccgccctgctgggctacctgcaggaggtgtgcagagccagactgcccgacagcgagctgatgagaagaaagtaccacagcgtgagacaggaggacctgcagagaggcagactgagcagacccgaggccgtggccgaggtgaagagcttcctgatccagctggaggccttcctgagcagactgtgctgcacctgcgaggccgcctacagagtgctgcactgggagaaccccgtggtgagcagccagttctacggcgccctgctgggcaccgtgtgcatgctgtacctgctgcccctgtgctgggtgctgaccctgctgaacagcaccctgttcctgggcaacgtggagttcttcagagtggtgagcgagtacagagccagcctgcagcagagaatgaaccccaagcaggaggagcacgccttcgagagcccccccccccccgacgtgggcggcaaggacggcctgatggacagcacccccgccctgacccccaccgagagcctgagcagccaggacctgacccccggcagcgtggaggaggccgaggaggccgagcccgacgaggagttcaaggacgccatcgaggagacccacctggtggtgctggaggacgacgagggcgccccctgccccgccgaggacgagctggccctgcaggacaacggcttcctgagcaagaacgaggtgctgagaagcaaggtgagcagactgaccgagagactgagaaagagataccccaccaacaacttcggcaactgcaccggctgcagcgccaccttcagcgtgctgaagaagagaagaagctgcagcaactgcggcaacagcttctgcagcagatgctgcagcttcaaggtgcccaagagcagcatgggcgccaccgcccccgaggcccagagagagaccgtgttcgtgtgcgccagctgcaaccagaccctgagcaagtag

SEQ ID NO: 19481 - DNA, 1251 bp, Artificial Sequence
  derived and/or modified sequence
atgcagacctctgagcgggagggtagtggccctgaattatccccaagtgtgatgcctgaagcacctctggagtcacctccttttcccaccaaatctccagcttttgatcttttcaacctggtgctatcctacaagcggctggaaatctatctggaaccccttaaggatgcaggagatggagttaggtatttactccggtggcagatgcccttgtgctccctgctgacgtgcctcggactaaacgttctgttcttgacgctcaatgagggagcatggtatagcgtgggcgccctcatgatatccgttccagccttacttggatatctgcaggaggtctgtcgagcacgactccccgacagcgaactgatgaggcggaaataccatagcgttaggcaggaagacctgcagaggggtcggttgtccagacccgaggctgttgccgaagtcaagtcattcctgatccagcttgaagccttcctctcccggctttgttgcacatgtgaagccgcttaccgcgttttgcattgggagaatccagtggtctctagccagttctatggggcattgctggggacggtgtgcatgctgtatttgcttcccttgtgctgggtcttgactttgcttaatagcaccctgtttctcggcaacgttgagttcttccgagtcgtgagcgagtaccgtgcctcattgcagcagaggatgaatccaaagcaagaagaacacgcctttgagtccccaccacccccggacgttggcggaaaagacgggctgatggactcaacaccagctttgacccctaccgagtccctttccagtcaggatctgaccccaggatcagtggaggaagctgaggaagcagagccagatgaggagttcaaagacgccatagaggagactcacctggtggtgctagaggatgacgagggcgcaccttgcccggccgaggatgagctcgccctgcaggataacggcttcctgtcaaaaaacgaagtcctccgctcaaaggtttccagactcactgagagacttagaaaacggtatccaaccaataactttgggaattgcactggatgtagcgccaccttcagcgtactgaaaaaaaggcgtagctgcagcaactgcggtaacagcttttgtagcaggtgctgcagctttaaagtgccaaagtcctcaatgggtgctactgcaccggaagcgcagcgagaaacagtgttcgtttgtgcttcctgtaatcagacactgtcaaagtag

SEQ ID NO: 19482 - DNA, 1185 bp, Artificial Sequence
  derived and/or modified sequence
cttgaaagcccaccattccccacaaagtctcccgcatttgatcttttcaatttagtgctctcttacaaaagactggagatatacctggagcctttgaaggacgccggggacggggttagatacctgctgcgctggcagatgccactctgcagcttacttacatgcttgggactgaatgtactttttcttaccctgaatgagggggcctggtatagtgtcggcgccctgatgataagcgtccctgcactgctgggatacctccaggaagtttgccgcgccaggctgcctgattcagaactgatgcgccggaagtaccattcagttcgacaagaagatctgcaaagaggccgcttatcgagacccgaggcggtcgctgaggtaaagagctttctgatccagttggaagccttcctgagcagactgtgttgcacgtgtgaagcagcctacagagtgctgcattgggaaaaccccgtggttagcagccagttctatggcgcgctgcttggcacggtttgcatgctgtatctgcttccgctgtgctgggtcctgactttacttaattcaactctattcctcggcaacgtggagtttttcagggtggtgtcagagtacagggcaagccttcagcagcggatgaatccaaagcaggaagagcacgcctttgaatcgcctcctccccccgatgtcggaggtaaggacggtctcatggacagtacgccggctctgacacccacagagagcttgtctagtcaggatttaacccctggcagcgtggaagaggcggaagaggcggaaccggacgaagaattcaaggatgccattgaggagacccacctggtcgtgctggaagatgacgagggtgcaccatgtcccgctgaggacgagcttgctctgcaagataacgggtttcttagtaagaatgaggttctgaggtcaaaggtctcccggctgaccgagaggctgaggaaacgttatccaaccaacaactttggtaactgtactggctgttcagccacattctccgtgttgaaaaagagaaggagctgctctaactgcggcaactctttttgcagtcgatgctgcagtttcaaggtgccgaagtcatctatgggcgctactgcacctgaggcacagagggaaactgtgttcgtctgtgccagttgcaatcagaccttatccaaatag

SEQ ID NO: 19483 - DNA, 1251 bp, Artificial Sequence
  derived and/or modified sequence
atgcagaccagcgagcgggagggcagcggccctgagctgagccccagcgtgatgcctgaggcccccctggagagcccccccttccccaccaagagccctgcctttgacctcttcaacctggtgctgagctacaagaggctggagatctacctggagcccctgaaggatgctggagatggagtgcgctacctgctgcgctggcagatgcccctgtgcagcctgctgacctgcctgggcctgaatgtgctcttcctgaccctgaatgaaggagcctggtacagcgtgggcgccctgatgatctctgtgcctgccctgctgggctacctgcaggaggtgtgccgggcccggctgcctgacagcgagctgatgaggaggaagtaccacagcgtgcggcaggaggacctgcagaggggccgcctgagcaggcctgaggccgtggccgaggtgaagagcttcctgatccagctggaggccttcctgagccggctgtgctgcacctgtgaggccgcctacagagtgctgcactgggagaaccctgtggtgagcagccagttctacggggccctgctgggcaccgtgtgcatgctgtacctgctgcccctgtgctgggtgctgaccctgctgaacagcaccctcttcctgggcaatgtggagttcttccgggtggtgtctgagtaccgggccagcctgcagcagaggatgaaccccaagcaggaggagcacgcctttgagagccccccacctccagatgtgggcggcaaggatggcctgatggacagcaccccagccctgacccccacagagagcctgagcagccaggacctgaccccaggctctgtggaggaggccgaggaggccgagccagatgaggagttcaaggatgccatcgaggagacccacctggtggtgctggaggatgatgaaggagccccctgcccagcagaagatgagctggccctgcaggacaatggcttcctgagcaagaatgaggtgctgcggagcaaggtgtcccggctgacagagcggctgaggaagcgctaccccaccaacaactttggaaactgcaccggctgcagcgccaccttctctgtgctgaagaagaggaggagctgcagcaactgtggcaacagcttctgcagccgctgctgcagcttcaaggtgcccaagagctccatgggcgccacagcccctgaggcccagcgggagaccgtgtttgtgtgtgccagctgcaaccagaccctgagcaagtag

SEQ ID NO: 19484 - DNA, 1185 bp, Artificial Sequence
  derived and/or modified sequence
ctggagagcccccccttccccaccaagagccctgcctttgacctcttcaacctggtgctgagctacaagaggctggagatctacctggagcccctgaaggatgctggagatggagtgcgctacctgctgcgctggcagatgcccctgtgcagcctgctgacctgcctgggcctgaatgtgctcttcctgaccctgaatgaaggagcctggtacagcgtgggcgccctgatgatctctgtgcctgccctgctgggctacctgcaggaggtgtgccgggcccggctgcctgacagcgagctgatgaggaggaagtaccacagcgtgcggcaggaggacctgcagaggggccgcctgagcaggcctgaggccgtggccgaggtgaagagcttcctgatccagctggaggccttcctgagccggctgtgctgcacctgtgaggccgcctacagagtgctgcactgggagaaccctgtggtgagcagccagttctacggggccctgctgggcaccgtgtgcatgctgtacctgctgcccctgtgctgggtgctgaccctgctgaacagcaccctcttcctgggcaatgtggagttcttccgggtggtgtctgagtaccgggccagcctgcagcagaggatgaaccccaagcaggaggagcacgcctttgagagccccccacctccagatgtgggcggcaaggatggcctgatggacagcaccccagccctgacccccacagagagcctgagcagccaggacctgaccccaggctctgtggaggaggccgaggaggccgagccagatgaggagttcaaggatgccatcgaggagacccacctggtggtgctggaggatgatgaaggagccccctgcccagcagaagatgagctggccctgcaggacaatggcttcctgagcaagaatgaggtgctgcggagcaaggtgtcccggctgacagagcggctgaggaagcgctaccccaccaacaactttggaaactgcaccggctgcagcgccaccttctctgtgctgaagaagaggaggagctgcagcaactgtggcaacagcttctgcagccgctgctgcagcttcaaggtgcccaagagctccatgggcgccacagcccctgaggcccagcgggagaccgtgtttgtgtgtgccagctgcaaccagaccctgagcaagtag

SEQ ID NO: 19485 - DNA, 1251 bp, Artificial Sequence
  derived and/or modified sequence
atgcagaccagcgagcgggagggcagcggccccgagctgagcccctcagtcatgcccgaagctccccttgagagcccccctttccctacaaagagtccggctttcgacctgttcaatttggtccttagctataagagactggagatctacctggagcccctgaaagacgcaggcgatggggtgagatacctgctccgctggcagatgccactttgttctctactgacttgcttggggctgaacgttctcttcctgaccctgaacgaaggagcgtggtatagcgtcggcgcactgatgatctccgtcccagctcttctcggctacttacaggaggtgtgccgcgcaagactgccagatagcgaattaatgcggaggaaataccattctgtgaggcaagaggacctgcaaaggggccgtttgtcccggcccgaggccgtcgccgaggtgaaatctttcctgatccaacttgaggcattcttaagccggttgtgttgtacatgcgaggccgcctacagagtcctccattgggaaaatccggttgtcagtagccagttttacggagccctcctgggtactgtttgcatgttatacctgctcccgctctgttgggtcctaacattgctgaacagcactctcttcctcggaaatgttgagtttttcagggttgtgtctgaatatagggccagtctgcagcagagaatgaacccaaagcaggaggagcacgcctttgagagtccccctcccccagatgtgggcgggaaggatggtctcatggacagcactcctgctctgacccccaccgaaagcctgtccagtcaagacttgactcccgggtccgtggaggaagcagaagaggcagagcctgacgaggagttcaaagacgcaatcgaggagactcatctcgtcgtgctcgaggacgacgaaggcgctccttgcccagcagaggacgaattagcgttgcaggataacggcttcctgtctaaaaacgaggtcctgcggtctaaagtctccagactgacggagcggctcagaaaacgctacccaacaaacaacttcgggaactgcacagggtgttctgccactttctccgtgttgaaaaaacgaaggtcgtgttcaaactgtggaaactcgttctgctcccgatgctgcagctttaaggttcctaaatcctctatgggcgctacagcacccgaggcgcagagggagacagtgtttgtgtgcgcatcctgcaaccaaactctgtcaaaatag

SEQ ID NO: 19486 - DNA, 1185 bp, Artificial Sequence
  derived and/or modified sequence
ctggagagcccccccttccccaccaagagccccgccttcgacctgttcaatcttgttctgagctataaaagactcgaaatttatctggagcctctgaaggacgcaggagatggagttcgctatctattgaggtggcaaatgccgctttgctcattactgacgtgcctcggcctgaatgtgttgttcttgaccctgaatgagggggcttggtactccgtgggcgccttgatgattagcgttccagcactgctcggctatctgcaagaagtgtgccgtgccaggttgcccgattccgaactcatgcgcagaaagtatcactccgtccggcaagaagatcttcagagaggtcgactttctagaccagaggcggtggcagaggtaaaatctttcttaatccaactggaagctttcttaagtagactgtgctgtacctgcgaagcagcttaccgagtcctgcactgggagaatcccgttgtaagcagtcagttctacggggccctactgggtaccgtgtgtatgctctacctcctgcctctttgctgggttttaaccctactgaattcgactcttttcctaggcaatgtggagttctttagagttgtctccgagtatagggcttctttacaacagcgaatgaaccctaaacaggaagaacacgcttttgagagcccacctcccccggacgtcggcggaaaggacggtctgatggattccacgcccgcactgacacctaccgagtcactctctagtcaagacctcactcccggctcggtggaagaagctgaggaagccgagccagatgaagagttcaaggacgccattgaggaaacccacctggttgtgctggaggatgacgagggcgctccctgccccgccgaagacgagctggcgctgcaggacaatgggttcctttccaagaacgaggtgttgcgctcaaaagtcagtcggctgactgaaaggttacgtaagcggtaccctacaaacaatttcggtaattgtacaggttgttctgctaccttctcagtgctgaagaaaaggagaagttgctccaactgcggtaatagtttctgtagccgatgctgttcatttaaagtacctaagtcctcaatgggcgccacggcccccgaagcccagcgtgagacggtatttgtgtgtgcgtcttgcaaccaaaccctctccaagtag

SEQ ID NO: 19487 - DNA, 1251 bp, Artificial Sequence
  derived and/or modified sequence
atgcaaacctctgagagggagggatcaggaccagaactgtctcctagcgtgatgccagaggccccactcgaatcccctcctttccccactaagagcccagctttcgacctgttcaacctggtgttgtcctacaaaagactcgagatctatctcgagcccctgaaggacgccggagacggggtgagatatttgctgaggtggcagatgccattatgctctctgttgacgtgcctcggactgaatgttctgttcctgaccctaaatgaaggtgcgtggtattcagtcggcgcacttatgatatcagtacccgcactgctgggatatcttcaagaagtttgccgggctagactgcccgactccgaattgatgcgcaggaagtaccattccgtgcgccaagaggacctgcagagaggtcggttgtcccgccctgaggctgtggccgaagtgaagtccttcctgattcagttggaagcattcctgagcaggctgtgttgtacttgtgaggccgcttatcgggtgttgcactgggaaaaccctgtggtgagctctcagttctacggggcactgcttgggaccgtgtgcatgctctatctcctcccactgtgctgggtgctgacccttctcaatagtacactgttcttgggcaacgtggaattctttcgggtggtgagcgagtatcgggcaagcttgcagcaacgaatgaaccccaaacaagaagagcacgcttttgagtctccgccaccccctgatgtgggcggtaaggatggcttgatggactctacccccgcattgacccccacagagtcgttgtcgagccaggacttgacacctggaagcgtggaggaggcagaggaagcagagcccgacgaggagttcaaagatgctattgaagagacccatctagttgttctggaggatgacgaaggtgcaccttgccccgctgaagatgagctggccctgcaggacaatggattcctgtctaaaaatgaggtactacgcagcaaagtgtctcgactgacggagcggcttcggaaaagatatccaactaacaatttcgggaattgcaccgggtgcagcgcaacatttagcgttttgaaaaagcggagaagctgcagcaactgcggaaattcattttgctccaggtgttgctcgttcaaagtgcctaagagctccatgggggcaactgctcctgaggcgcagcgggagaccgtgttcgtctgcgccagttgtaatcagacactgtctaagtag

SEQ ID NO: 19488 - DNA, 1185 bp, Artificial Sequence
  derived and/or modified sequence
ttagagagcccacctttcccgaccaagtcccccgctttcgacctgtttaatctcgtgctatcatacaagcgcctggaaatctacctggagcccctgaaagatgccggagacggggtaaggtatcttctacggtggcagatgccgctgtgctccttattaacctgtcttggtctcaacgtgctgtttttaaccctgaacgagggcgcttggtatagtgtaggcgcattaatgataagcgtaccggcattgctcggataccttcaagaggtatgccgggcacggcttccggactcagagttaatgcgcaggaagtaccattctgtaagacaggaagatttgcagcggggaagattgtcccgaccagaggcagtggcagaagtgaaaagcttcctgatccagctcgaggcattcttatctcggctgtgttgtacttgtgaggctgcttaccgagtcctccactgggaaaacccggttgtgtctagccagttctacggggcattgcttggaaccgtttgtatgctgtaccttctgccactttgctgggtcttaacactacttaattcaacactattcctcgggaacgtagaatttttccgagttgtttctgaatatcgtgcatctctgcagcagcgcatgaaccctaagcaggaggagcatgcctttgagagccctccccctcccgatgttggaggcaaggatgggctgatggactcaactcctgccttaacccctacagaatccctgtcaagccaagacctgactccagggagcgtggaagaggccgaagaggccgaacccgatgaagagttcaaggatgcaatcgaagagactcacctggtggttctggaggacgacgaaggggcaccttgccccgctgaggacgaacttgccctccaggataacggctttctgagtaaaaatgaggtgctgaggagcaaagtgtctaggctgacggaaaggctgagaaagcgttatcctactaataactttggcaactgcaccggctgttcggccacattctccgtgctcaaaaagagaagatcttgctctaattgtggcaattcattttgcagtaggtgttgctctttcaaagtgcctaagagttccatgggagctacagcccctgaagctcagcgagagactgtgttcgtctgcgctagctgcaaccaaactctgtctaagtag

SEQ ID NO: 19489 - DNA, 2858 bp, Artificial Sequence
  derived and/or modified sequence
gatgcagacatcagaacgtgaggggagtgggccggagctgagccccagcgtgatgcccgaggctcccctggagtctccaccttttcctaccaagtccccagcgtttgaccttttcaacttggttctctcctacaagaggctggagatctacctggaacccttgaaggatgcaggtgatggtgttcgatacttgctcaggtggcagatgcctttgtgttccttgctgacctgcctgggcctcaacgtcttgttcctcactttgaatgagggtgcatggtactcagtaggtgccctgatgatttcagtgcccgccctgctgggctaccttcaggaggtttgccgggcacggctgcctgattccgagctgatgcggaggaagtatcatagcgtgaggcaggaggacctgcagagaggtcgcctgtctcgtcccgaggccgtggctgaggtgaagagcttcttgatccagctggaggccttcctgagccgcctgtgctgcacatgtgaagccgcctaccgcgtgctgcactgggagaaccccgtcgtgtcctcacagttctatggggctcttctgggcacagtctgcatgctgtatttgctgccactctgctgggttctcacccttttaaacagcacgctctttctggggaatgtggagttcttccgagttgtgtctgagtacagggcatctctgcagcagaggatgaacccaaagcaggaagagcatgcctttgagagtcctccaccaccagatgttggggggaaggatggtctgatggacagcacgcctgccctcacacccacggagagtctctcttcccaggacctcacaccgggcagcgtggaggaggctgaggaggctgagccagatgaagagtttaaagatgcgattgaggagacccacttggtggtgctggaggatgatgagggcgccccgtgcccagcagaggatgagctggccctgcaggacaacgggttcctgagcaagaatgaggtgctgcgcagcaaggtgtctcggctcacggagcggctccgcaagcgctaccccaccaacaacttcgggaactgcacgggctgctcggccaccttctcagtgctgaagaagaggcggagctgcagtaattgtggaaacagcttctgctctcgatgctgctccttcaaggtgcccaagtcctccatgggggccacagcccctgaagcccagagggagactgtgtttgtgtgtgcctcgtgtaaccagaccttgagcaagtgagaagagaggccagggtccaaccaggcacccgtccttgggaccagcagtagaccccccactctccccacccctggcccactgtggtgtgtgctgggcaaatgtggcctgaatgctaggtaggcttccccttccttcctcactctctccagctggattctggagctgttctccatccatgagagtggctggcaatggctgctctcaatcccttgagggagaagagcccctggagggcctggcatgtttgtcctgctctgcctgggactgagcgagtggacttagggctgggcaggcagtagccaccagagggcagcagcgaactaggccaggcctgactggggtctgaagatcagggtcagtgtggctgtgcctgggaattccagacctgaggttgggaaaagaggtttttctcctgcagggtactgggccaggccctcagcctcagagagcctgcagaagggcttgggagtgccacaccccatctctgctgattgaatgtccctccaggcaccaggatctcatcatttccccatcagagggtgtggccaggcctaacaagaccatgggtgcttctagaaacagggttgaagttcccagattccctgagaggagaatgtgtataggagggtttggctgagtccttcagcgttaagtggaggaaagcttggggaagccccaatagctggacagacctcggcctcccctcgaagacacctcaattcacagactctcagcccacacaatgccccagtgtccccagctccgctggagcagctgcagggcacttggatcacaacttctgcaccctctgtccagagtctagggcagtcctccactggcccagcactccagtttcctttccctgcctcttgtccaatggagtgggaggccaggtgagtggagcagaggtcctgaagcccttgacccctgggggcctgggtagtgtaggatctcgctgggctgggtcctggattccagggctattccctggaggacagtctcagttatgggataaggccccctgggggtctccatttctttccaacagtttcatgttcactactggactcttacgggctcagtatctctcccttagccatgagctggctcaggcatcccttcccttccctggagctgccctgcctttctcaagtatttatttatttattgcatggttcctgggaacatgtggcacaagtaatgggatgaggaggaattgggggtgggggtcttctacctaggactcttccctggagtcatgggctgcctgggacccaggacccatgagggggctgagaggtttctacactcgaggagcaggggtccagagaggcaggctggggaggcaagggacccatcctaggcccgctttcttgccgagccaagcagcttagctggggctgtgcagccaggggcttacccaggccagtggaggtgccacagccctggggagccagacaggctttggtatcgtatcgcctctgtgtccttttaagagaggagagttcagtaccccgtgctttctttacactggagaggaactaaaaggatctctgtgtctatggagaattgtcaataaaaaggcctcaagcttcttgtttttgtc

SEQ ID NO: 19490 - DNA, 2780 bp, Artificial Sequence
  derived and/or modified sequence
ctggagtctccaccttttcctaccaagtccccagcgtttgaccttttcaacttggttctctcctacaagaggctggagatctacctggaacccttgaaggatgcaggtgatggtgttcgatacttgctcaggtggcagatgcctttgtgttccttgctgacctgcctgggcctcaacgtcttgttcctcactttgaatgagggtgcatggtactcagtaggtgccctgatgatttcagtgcccgccctgctgggctaccttcaggaggtttgccgggcacggctgcctgattccgagctgatgcggaggaagtatcatagcgtgaggcaggaggacctgcagagaggtcgcctgtctcgtcccgaggccgtggctgaggtgaagagcttcttgatccagctggaggccttcctgagccgcctgtgctgcacatgtgaagccgcctaccgcgtgctgcactgggagaaccccgtcgtgtcctcacagttctatggggctcttctgggcacagtctgcatgctgtatttgctgccactctgctgggttctcacccttttaaacagcacgctctttctggggaatgtggagttcttccgagttgtgtctgagtacagggcatctctgcagcagaggatgaacccaaagcaggaagagcatgcctttgagagtcctccaccaccagatgttggggggaaggatggtctgatggacagcacgcctgccctcacacccacggagagtctctcttcccaggacctcacaccgggcagcgtggaggaggctgaggaggctgagccagatgaagagtttaaagatgcgattgaggagacccacttggtggtgctggaggatgatgagggcgccccgtgcccagcagaggatgagctggccctgcaggacaacgggttcctgagcaagaatgaggtgctgcgcagcaaggtgtctcggctcacggagcggctccgcaagcgctaccccaccaacaacttcgggaactgcacgggctgctcggccaccttctcagtgctgaagaagaggcggagctgcagtaattgtggaaacagcttctgctctcgatgctgctccttcaaggtgcccaagtcctccatgggggccacagcccctgaagcccagagggagactgtgtttgtgtgtgcctcgtgtaaccagaccttgagcaagtgagaagagaggccagggtccaaccaggcacccgtccttgggaccagcagtagaccccccactctccccacccctggcccactgtggtgtgtgctgggcaaatgtggcctgaatgctaggtaggcttccccttccttcctcactctctccagctggattctggagctgttctccatccatgagagtggctggcaatggctgctctcaatcccttgagggagaagagcccctggagggcctggcatgtttgtcctgctctgcctgggactgagcgagtggacttagggctgggcaggcagtagccaccagagggcagcagcgaactaggccaggcctgactggggtctgaagatcagggtcagtgtggctgtgcctgggaattccagacctgaggttgggaaaagaggtttttctcctgcagggtactgggccaggccctcagcctcagagagcctgcagaagggcttgggagtgccacaccccatctctgctgattgaatgtccctccaggcaccaggatctcatcatttccccatcagagggtgtggccaggcctaacaagaccatgggtgcttctagaaacagggttgaagttcccagattccctgagaggagaatgtgtataggagggtttggctgagtccttcagcgttaagtggaggaaagcttggggaagccccaatagctggacagacctcggcctcccctcgaagacacctcaattcacagactctcagcccacacaatgccccagtgtccccagctccgctggagcagctgcagggcacttggatcacaacttctgcaccctctgtccagagtctagggcagtcctccactggcccagcactccagtttcctttccctgcctcttgtccaatggagtgggaggccaggtgagtggagcagaggtcctgaagcccttgacccctgggggcctgggtagtgtaggatctcgctgggctgggtcctggattccagggctattccctggaggacagtctcagttatgggataaggccccctgggggtctccatttctttccaacagtttcatgttcactactggactcttacgggctcagtatctctcccttagccatgagctggctcaggcatcccttcccttccctggagctgccctgcctttctcaagtatttatttatttattgcatggttcctgggaacatgtggcacaagtaatgggatgaggaggaattgggggtgggggtcttctacctaggactcttccctggagtcatgggctgcctgggacccaggacccatgagggggctgagaggtttctacactcgaggagcaggggtccagagaggcaggctggggaggcaagggacccatcctaggcccgctttcttgccgagccaagcagcttagctggggctgtgcagccaggggcttacccaggccagtggaggtgccacagccctggggagccagacaggctttggtatcgtatcgcctctgtgtccttttaagagaggagagttcagtaccccgtgctttctttacactggagaggaactaaaaggatctctgtgtctatggagaattgtcaataaaaaggcctcaagcttc

SEQ ID NO: 19491 - protein, 404 aa, Artificial Sequence
  derived and/or modified sequence
MQTSEREGSGPELSPSVMPEAPLESPPFPTKSPAFDLFNLVLSYKRLEIYLEPLKDAGDGVRYLLRWQMPLCSLLTCLGLNVLFLTLNEGAWYSVGALMISVPALLGYLQEVCRARLPDSELMRRKYHSVRQEDLQRGRLSRPEAVAEVKSFLIQLEAFLSRLCCTCEAAYRVLHWENPVVSSQFYGALLGTVCMLYLLPLCWVLTLLNSTLFLGNVEFFRVVSEYRASLQQRMNPKQEEHAFESPPPPDVGGKDGLMDSTPALTPTEDLTPGSVEEAEEAEPDEEFKDAIEEDDEGAPCPAEDELALQDNGFLSKNEVLRSKVSRLTERLRKRYPTNNFGNCTGCSATFSVLKKRRSCSNCGNSFCSRCCSFKVPKSSMGATAPEAQRETVFVCASCNQTLSK

SEQ ID NO: 19492 - protein, 348 aa, Artificial Sequence
  derived and/or modified sequence
MQTSEREGSGPELSPSVMPEAPLESPPFPTKSPAFDLFNLVLSYKRLEIYLEPLKDAGDGVRYLLRWQMPLCSLLTCLGLNVLFLTLNEGAWYSVGALMISVPALLGYLQEVCRARLPDSELMRRKYHSVRQEDLQRGRLSRPEAVAEVKSFLIQLEAFLSRLCCTCEAAYRVLHWENPVVSSQFYGALLGTVCMLYLLPLCWVLTLLNSTLFLGNVEFFRVVSEYRASLQQRMNPKQEEHAFESPPPPDVGGKDGLMDSTPALTPTEDLTPGSVEEAEEAEPDEEFKDAIEEDDEGAPCPAEDELALQDNGFLSKNEVLRSKVSRLTERLRKRYPTNNFGVTGAGSS

SEQ ID NO: 19493 - DNA, 1215 bp, Artificial Sequence
  derived and/or modified sequence
atgcagaccagcgagagagagggcagcggccccgagctgagccccagcgtgatgcccgaggcccccctggagagcccccccttccccaccaagagccccgccttcgacctgttcaacctggtgctgagctacaagagactggagatctacctggagcccctgaaggacgccggcgacggcgtgagatacctgctgagatggcagatgcccctgtgcagcctgctgacctgcctgggcctgaacgtgctgttcctgaccctgaacgagggcgcctggtacagcgtgggcgccctgatgatcagcgtgcccgccctgctgggctacctgcaggaggtgtgcagagccagactgcccgacagcgagctgatgagaagaaagtaccacagcgtgagacaggaggacctgcagagaggcagactgagcagacccgaggccgtggccgaggtgaagagcttcctgatccagctggaggccttcctgagcagactgtgctgcacctgcgaggccgcctacagagtgctgcactgggagaaccccgtggtgagcagccagttctacggcgccctgctgggcaccgtgtgcatgctgtacctgctgcccctgtgctgggtgctgaccctgctgaacagcaccctgttcctgggcaacgtggagttcttcagagtggtgagcgagtacagagccagcctgcagcagagaatgaaccccaagcaggaggagcacgccttcgagagcccccccccccccgacgtgggcggcaaggacggcctgatggacagcacccccgccctgacccccaccgaggacctgacccccggcagcgtggaggaggccgaggaggccgagcccgacgaggagttcaaggacgccatcgaggaggacgacgagggcgccccctgccccgccgaggacgagctggccctgcaggacaacggcttcctgagcaagaacgaggtgctgagaagcaaggtgagcagactgaccgagagactgagaaagagataccccaccaacaacttcggcaactgcaccggctgcagcgccaccttcagcgtgctgaagaagagaagaagctgcagcaactgcggcaacagcttctgcagcagatgctgcagcttcaaggtgcccaagagcagcatgggcgccaccgcccccgaggcccagagagagaccgtgttcgtgtgcgccagctgcaaccagaccctgagcaagtag

SEQ ID NO: 19494 - DNA, 1047 bp, Artificial Sequence
  derived and/or modified sequence
atgcagaccagcgagagagagggcagcggccccgagctgagccccagcgtgatgcccgaggcccccctggagagcccccccttccccaccaagagccccgccttcgacctgttcaacctggtgctgagctacaagagactggagatctacctggagcccctgaaggacgccggcgacggcgtgagatacctgctgagatggcagatgcccctgtgcagcctgctgacctgcctgggcctgaacgtgctgttcctgaccctgaacgagggcgcctggtacagcgtgggcgccctgatgatcagcgtgcccgccctgctgggctacctgcaggaggtgtgcagagccagactgcccgacagcgagctgatgagaagaaagtaccacagcgtgagacaggaggacctgcagagaggcagactgagcagacccgaggccgtggccgaggtgaagagcttcctgatccagctggaggccttcctgagcagactgtgctgcacctgcgaggccgcctacagagtgctgcactgggagaaccccgtggtgagcagccagttctacggcgccctgctgggcaccgtgtgcatgctgtacctgctgcccctgtgctgggtgctgaccctgctgaacagcaccctgttcctgggcaacgtggagttcttcagagtggtgagcgagtacagagccagcctgcagcagagaatgaaccccaagcaggaggagcacgccttcgagagcccccccccccccgacgtgggcggcaaggacggcctgatggacagcacccccgccctgacccccaccgaggacctgacccccggcagcgtggaggaggccgaggaggccgagcccgacgaggagttcaaggacgccatcgaggaggacgacgagggcgccccctgccccgccgaggacgagctggccctgcaggacaacggcttcctgagcaagaacgaggtgctgagaagcaaggtgagcagactgaccgagagactgagaaagagataccccaccaacaacttcggcgtgaccggcgccggcagcagctag

SEQ ID NO: 19495 - DNA, 1215 bp, Artificial Sequence
  derived and/or modified sequence
atgcaaaccagtgagcgcgaaggatctgggcccgaactctctccctcggttatgcctgaggccccactcgaatcccctcccttcccaaccaaatctccggccttcgacctattcaatctggtgcttagttataagaggctcgaaatttacctcgaaccgctcaaggacgccggagatggtgtgcgatacctactaaggtggcagatgccactttgctccctcctcacatgcttaggtctcaacgtgctgttcctgactttgaacgagggagcctggtattcagtgggcgccctgatgatctctgtccccgcactgctgggatacctgcaggaagtgtgccgggcgcggctgccagatagcgaactgatgagaagaaaataccattcagtgagacaggaagacctgcaaagaggacgcctctccagacctgaagctgtcgccgaagtcaagtcttttctcattcagctcgaagcctttcttagtcggctgtgctgcacctgcgaggcggcttaccgggtactccactgggaaaacccagtcgtttcttctcagttctatggtgccctactgggaaccgtgtgtatgctctatctcctgccactctgttgggtgctcaccctcctaaattccaccctctttcttgggaatgtggagtttttccgggtagtgagcgagtacagagcatccctgcaacagaggatgaacccaaaacaggaggagcatgccttcgagtcccccccacctccggacgttggggggaaagatggtctgatggactccactccagctctaaccccgaccgaggacttgacccctgggagtgttgaagaggccgaggaagctgagcccgacgaagaattcaaagatgccatcgaagaggacgacgagggtgccccgtgccccgcagaagatgaattggctctgcaagacaacgggtttctcagcaaaaatgaagtgctgcgcagtaaagtgtctcgtctgacagagagactgcgcaagaggtacccgacaaataatttcgggaattgcacagggtgcagtgctacattcagcgtactgaagaagaggcgcagttgttcgaattgtgggaacagtttctgttcccgctgttgctcctttaaggtgcccaaaagtagtatgggcgctaccgcccctgaagcgcagagagagacggtgtttgtttgcgccagctgtaaccagacgctctctaagtag

SEQ ID NO: 19496 - DNA, 1047 bp, Artificial Sequence
  derived and/or modified sequence
atgcagaccagcgaacgagagggctccggccccgagctctctccaagcgttatgcctgaggccccccttgaaagtcctccctttcccactaaaagccctgccttcgatctgtttaatcttgtgctaagttacaaaagactcgagatatacctggagcccttaaaagatgcaggggatggggtgagatacctgcttcgctggcaaatgcccctgtgttctttgcttacttgcctgggcttgaacgtcctgttcttgactttgaatgagggagcatggtattcagtgggtgccctcatgattagcgtgcccgcgctcttgggctatttgcaggaggtatgtagggctaggctgcctgatagtgagctgatgcgccgcaaataccatagcgtacgccaggaagatctgcagcgcggtaggcttagtcggcccgaagctgtggccgaggttaagagtttccttattcagttagaggcgtttttgtctcgcctgtgctgcacctgcgaggcggcttacagagtgctgcattgggagaacccggtggtttcctcacagttttatggggcccttctgggaaccgtttgcatgctgtatctactgcccctctgctgggtactgacattactgaacagtaccctgttccttggaaacgtggagttttttcgagtcgttagcgagtacagggccagcctccaacagcgcatgaacccaaagcaggaagaacacgcctttgaaagcccacctccacccgatgtcgggggtaaagacggactgatggatagtaccccagcactgactcctactgaggacctcactccgggctcagtagaagaggcagaggaggccgaacccgatgaggagtttaaagacgctatcgaggaagacgatgagggagctccatgtcctgccgaggatgagctggcactccaggataatggcttcttaagtaagaatgaggtcctccgaagcaaggtgtctcggctgacggaaaggctcagaaagcggtatccgacaaataatttcggtgtgactggagccggaagctcctag

SEQ ID NO: 19497 - DNA, 1215 bp, Artificial Sequence
  derived and/or modified sequence
atgcagaccagcgagcgggagggcagcggccctgagctgagccccagcgtgatgcctgaggcccccctggagagcccccccttccccaccaagagccctgcctttgacctcttcaacctggtgctgagctacaagaggctggagatctacctggagcccctgaaggatgctggagatggagtgcgctacctgctgcgctggcagatgcccctgtgcagcctgctgacctgcctgggcctgaatgtgctcttcctgaccctgaatgaaggagcctggtacagcgtgggcgccctgatgatctctgtgcctgccctgctgggctacctgcaggaggtgtgccgggcccggctgcctgacagcgagctgatgaggaggaagtaccacagcgtgcggcaggaggacctgcagaggggccgcctgagcaggcctgaggccgtggccgaggtgaagagcttcctgatccagctggaggccttcctgagccggctgtgctgcacctgtgaggccgcctacagagtgctgcactgggagaaccctgtggtgagcagccagttctacggggccctgctgggcaccgtgtgcatgctgtacctgctgcccctgtgctgggtgctgaccctgctgaacagcaccctcttcctgggcaatgtggagttcttccgggtggtgtctgagtaccgggccagcctgcagcagaggatgaaccccaagcaggaggagcacgcctttgagagccccccacctccagatgtgggcggcaaggatggcctgatggacagcaccccagccctgacccccacagaggacctgaccccaggctctgtggaggaggccgaggaggccgagccagatgaggagttcaaggatgccattgaagaagatgatgaaggagccccctgcccagcagaagatgagctggccctgcaggacaatggcttcctgagcaagaatgaggtgctgcggagcaaggtgtcccggctgacagagcggctgaggaagcgctaccccaccaacaactttggaaactgcaccggctgcagcgccaccttctctgtgctgaagaagaggaggagctgcagcaactgtggcaacagcttctgcagccgctgctgcagcttcaaggtgcccaagagctccatgggcgccacagcccctgaggcccagcgggagaccgtgtttgtgtgtgccagctgcaaccagaccctgagcaagtag

SEQ ID NO: 19498 - DNA, 1047 bp, Artificial Sequence
  derived and/or modified sequence
atgcagaccagcgagcgggagggcagcggccctgagctgagccccagcgtgatgcctgaggcccccctggagagcccccccttccccaccaagagccctgcctttgacctcttcaacctggtgctgagctacaagaggctggagatctacctggagcccctgaaggatgctggagatggagtgcgctacctgctgcgctggcagatgcccctgtgcagcctgctgacctgcctgggcctgaatgtgctcttcctgaccctgaatgaaggagcctggtacagcgtgggcgccctgatgatctctgtgcctgccctgctgggctacctgcaggaggtgtgccgggcccggctgcctgacagcgagctgatgaggaggaagtaccacagcgtgcggcaggaggacctgcagaggggccgcctgagcaggcctgaggccgtggccgaggtgaagagcttcctgatccagctggaggccttcctgagccggctgtgctgcacctgtgaggccgcctacagagtgctgcactgggagaaccctgtggtgagcagccagttctacggggccctgctgggcaccgtgtgcatgctgtacctgctgcccctgtgctgggtgctgaccctgctgaacagcaccctcttcctgggcaatgtggagttcttccgggtggtgtctgagtaccgggccagcctgcagcagaggatgaaccccaagcaggaggagcacgcctttgagagccccccacctccagatgtgggcggcaaggatggcctgatggacagcaccccagccctgacccccacagaggacctgaccccaggctctgtggaggaggccgaggaggccgagccagatgaggagttcaaggatgccattgaagaagatgatgaaggagccccctgcccagcagaagatgagctggccctgcaggacaatggcttcctgagcaagaatgaggtgctgcggagcaaggtgtcccggctgacagagcggctgaggaagcgctaccccaccaacaactttggagtgactggagctggcagcagctag

SEQ ID NO: 19499 - DNA, 1215 bp, Artificial Sequence
  derived and/or modified sequence
atgcagaccagcgagcgggagggcagcggccccgagctgagccccagtgtgatgcccgaagcccccctcgagagtcccccttttcctacaaagtccccagcatttgacctgttcaacctggttttgtcatacaaacgcctggaaatataccttgagccgctgaaagatgctggagacggtgtgcgttatttgctgagatggcagatgcctctttgcagccttctaacttgcctgggactcaatgtcctgtttctcacactgaacgaaggcgcatggtactccgtcggagctctgatgatctccgttcccgccctgctgggctatctgcaggaagtgtgccgggccaggttgcccgactcggagctcatgagacgaaagtaccattcagttcggcaggaagacctgcagaggggccgactgtcacgccctgaggccgtcgccgaggtgaagtcatttctcatccagctggaagcctttctctccagactgtgctgtacatgtgaagccgcctacagggttctgcactgggagaatcccgttgtgagctctcagttttacggagcgttactgggcactgtgtgtatgctgtacctactccctctgtgttgggttctcacactgctcaactctacattgtttctgggcaatgtggagttttttcgtgtggtgtcagagtacagggcttccctgcagcagaggatgaatcccaaacaggaggagcatgctttcgagtcaccgcctcctccagacgtcggcgggaaggatgggctcatggattccacgccagcccttactccaaccgaagacctcactcctggcagcgtggaggaagccgaggaggccgagcctgatgaggagtttaaagatgctatcgaggaagatgacgaaggagccccgtgcccagcagaggatgagcttgccttacaggacaatggattcttaagcaaaaatgaagtgcttagatcaaaggtgagcagactcacagaacgcttgcggaaacggtaccccaccaacaacttcggaaattgtactggatgttcagcaactttcagcgtgcttaaaaaacgaagatcctgttccaactgtggcaactctttctgttccaggtgctgctctttcaaggtaccaaagagttcgatgggggctaccgcacctgaagcccaacgggagactgttttcgtttgcgcttcatgtaaccagacactttctaagtag

SEQ ID NO: 19500 - DNA, 1047 bp, Artificial Sequence
  derived and/or modified sequence
atgcagaccagcgagcgggagggcagcggccccgagctgagcccctcagtgatgcctgaggctccactcgaaagtcccccctttcctactaagtcccccgcatttgacttgtttaatctggtcctgtcctacaagagactggagatctacctggagccccttaaagatgccggcgatggagtgaggtacctgttgcgatggcagatgcccctttgctcgcttctcacctgcctgggcctgaacgtgcttttccttacattgaacgagggcgcatggtattccgtcggcgcgctcatgatctccgttcccgccctgcttgggtacctgcaagaggtatgtagagcccgcttaccagactccgaactgatgaggagaaagtatcatagcgtgcgtcaggaagatctgcagagaggtcggctgtcaagacctgaggccgtcgcagaagtgaaatcctttcttatccagttggaggctttcctcagcaggttatgctgcacctgcgaggcagcctacagagtgctacactgggagaaccccgtggtgtcaagccagttctatggtgcactgttaggtactgtgtgcatgctatatctgctaccgctttgttgggtcctcactctgctgaatagtacgctctttcttggcaacgtggagttctttagagttgtcagcgaataccgcgcaagcctgcagcagagaatgaatcccaagcaggaggagcatgcattcgagagcccccctccgccggacgtgggcggcaaggatggcttgatggactccaccccagcactgacacctaccgaagatcttacccctggcagcgtagaggaagcggaggaggcagagccagacgaggagttcaaagatgccattgaggaggacgacgagggggctccctgtcccgcggaagacgaattggctctacaggataacggatttctgtctaagaacgaagtgctgcggtccaaggtctctcggctaacagagcgcctgagaaagcgttatccgacaaataattttggtgttactggggcgggctcgtcgtag

SEQ ID NO: 19501 - DNA, 1215 bp, Artificial Sequence
  derived and/or modified sequence
atgcaaacctcagagagagagggcagtggccctgaactctccccatccgtaatgcctgaagcacccctagaatcccccccatttcccaccaagagtccagctttcgacttgttcaatcttgtcctgagttataaaagactggaaatatacctggaaccgctcaaggatgccggtgacggggtccgttacctgttgcgctggcagatgcctctctgcagtctcctgacgtgtctagggctgaatgtcttgttcctgacactgaacgagggcgcatggtactccgtcggtgctcttatgatctccgtgccagcactgctgggatatctgcaggaagtttgtagggcccgtctcccagattcggagctcatgcgcaggaagtaccactcggtcagacaggaagatctccagagaggcagactgtcacgccctgaggccgtggctgaggtgaagagctttctgatccagctagaggcattcctgagtcgactctgttgtacatgtgaggctgcgtaccgggtactgcactgggagaaccccgttgtaagttcgcaattttacggtgctctgcttggaacagtttgtatgctgtacctgctgcccctgtgctgggttctgacccttctgaatagcaccctgtttctcggaaatgtggagttttttagggtcgtatctgagtacagggcctcattacaacaacgaatgaatcccaaacaagaggagcatgcatttgaatctcctcccccacccgacgtcggagggaaggatggcctcatggacagcacccctgccctgactcccacggaagacttgacccctgggagtgtggaagaggctgaagaggctgaacccgatgaagagtttaaggacgcgatcgaagaagatgacgaaggggcaccttgcccagccgaggatgagctggcgctgcaggataacgggtttctgtctaagaacgaggtgctgaggagcaaagtttctcggcttactgaaagattgcggaagaggtaccccaccaacaattttgggaactgtacaggctgttcagccacattttccgttctgaagaagagaaggtcatgttctaattgcggcaactccttctgtagccgatgctgcagctttaaggtgcccaaaagcagtatgggggcaacagcgccagaagcccagcgagaaactgtgtttgtttgcgcttcttgcaaccaaaccctgagtaagtag

SEQ ID NO: 19502 - DNA, 1047 bp, Artificial Sequence
  derived and/or modified sequence
atgcagacaagtgaaagagagggaagcggcccagagctgtctcccagtgtgatgccagaagctcccctcgaatccccgccatttcccactaaatctccggcatttgacctgtttaacttggtcttaagttacaagcggctggaaatctacctcgagcccctgaaggacgccggtgacggcgtccgctacctccttcggtggcaaatgcctctttgtagcctactcacatgcctgggcttgaatgtgctgttcctgactctaaacgagggagcctggtactccgtcggagcacttatgatctctgtaccagctctgcttgggtatctgcaggaggtgtgccgagcccgacttccagactcggaattgatgcgcaggaagtaccatagcgtccggcaggaggacctccagaggggaagactctctcggcctgaagccgtggcagaggtcaagtcgtttttgatccagttagaagccttcctctcccgcctgtgttgtacatgcgaagcagcttacagagtcctgcactgggaaaaccctgtcgtgtcgtcccagttctacggggctttgctgggaacagtttgcatgttgtatttgctcccactgtgctgggttcttaccttactaaactccacattattcctgggtaacgtggaattcttcagagtggttagtgagtatcgggcttccctgcaacagagaatgaacccgaagcaggaagaacacgcttttgagagccctcctccccctgatgtgggaggtaaggacggcctgatggactctactcccgctctcacccctaccgaggatctgacgccaggctctgtcgaggaagcagaggaagctgaaccagatgaggagttcaaagacgccattgaggaagatgacgagggagctccctgccccgcagaagacgagctggccctgcaagacaacggattcctttcgaaaaacgaggtgctgcggtccaaggtgtcacgtttaaccgagcggttgcgaaaacgctatcctactaacaatttcggggtcaccggtgccggtagttcatag

SEQ ID NO: 19503 - DNA, 2997 bp, Artificial Sequence
  derived and/or modified sequence
ggaagcggcggtggcggccgcggcgtaggcggaggagattttcggacctgcgacttccgaacaaccctggcaggaggagcggcgttcagccgggggaggcctgaagaaacgctccggggcccagtggctctacccctgctcctgcccgaccctgccgcctccctcacggagccagcggccgggtaggatgcagacatcagaacgtgaggggagtgggccggagctgagccccagcgtgatgcccgaggctcccctggagtctccaccttttcctaccaagtccccagcgtttgaccttttcaacttggttctctcctacaagaggctggagatctacctggaacccttgaaggatgcaggtgatggtgttcgatacttgctcaggtggcagatgcctttgtgttccttgctgacctgcctgggcctcaacgtcttgttcctcactttgaatgagggtgcatggtactcagtaggtgccctgatgatttcagtgcccgccctgctgggctaccttcaggaggtttgccgggcacggctgcctgattccgagctgatgcggaggaagtatcatagcgtgaggcaggaggacctgcagagaggtcgcctgtctcgtcccgaggccgtggctgaggtgaagagcttcttgatccagctggaggccttcctgagccgcctgtgctgcacatgtgaagccgcctaccgcgtgctgcactgggagaaccccgtcgtgtcctcacagttctatggggctcttctgggcacagtctgcatgctgtatttgctgccactctgctgggttctcacccttttaaacagcacgctctttctggggaatgtggagttcttccgagttgtgtctgagtacagggcatctctgcagcagaggatgaacccaaagcaggaagagcatgcctttgagagtcctccaccaccagatgttggggggaaggatggtctgatggacagcacgcctgccctcacacccacggaggacctcacaccgggcagcgtggaggaggctgaggaggctgagccagatgaagagtttaaagatgcgattgaggaggatgatgagggcgccccgtgcccagcagaggatgagctggccctgcaggacaacgggttcctgagcaagaatgaggtgctgcgcagcaaggtgtctcggctcacggagcggctccgcaagcgctaccccaccaacaacttcgggaactgcacgggctgctcggccaccttctcagtgctgaagaagaggcggagctgcagtaattgtggaaacagcttctgctctcgatgctgctccttcaaggtgcccaagtcctccatgggggccacagcccctgaagcccagagggagactgtgtttgtgtgtgcctcgtgtaaccagaccttgagcaagtgagaagagaggccagggtccaaccaggcacccgtccttgggaccagcagtagaccccccactctccccacccctggcccactgtggtgtgtgctgggcaaatgtggcctgaatgctaggtaggcttccccttccttcctcactctctccagctggattctggagctgttctccatccatgagagtggctggcaatggctgctctcaatcccttgagggagaagagcccctggagggcctggcatgtttgtcctgctctgcctgggactgagcgagtggacttagggctgggcaggcagtagccaccagagggcagcagcgaactaggccaggcctgactggggtctgaagatcagggtcagtgtggctgtgcctgggaattccagacctgaggttgggaaaagaggtttttctcctgcagggtactgggccaggccctcagcctcagagagcctgcagaagggcttgggagtgccacaccccatctctgctgattgaatgtccctccaggcaccaggatctcatcatttccccatcagagggtgtggccaggcctaacaagaccatgggtgcttctagaaacagggttgaagttcccagattccctgagaggagaatgtgtataggagggtttggctgagtccttcagcgttaagtggaggaaagcttggggaagccccaatagctggacagacctcggcctcccctcgaagacacctcaattcacagactctcagcccacacaatgccccagtgtccccagctccgctggagcagctgcagggcacttggatcacaacttctgcaccctctgtccagagtctagggcagtcctccactggcccagcactccagtttcctttccctgcctcttgtccaatggagtgggaggccaggtgagtggagcagaggtcctgaagcccttgacccctgggggcctgggtagtgtaggatctcgctgggctgggtcctggattccagggctattccctggaggacagtctcagttatgggataaggccccctgggggtctccatttctttccaacagtttcatgttcactactggactcttacgggctcagtatctctcccttagccatgagctggctcaggcatcccttcccttccctggagctgccctgcctttctcaagtatttatttatttattgcatggttcctgggaacatgtggcacaagtaatgggatgaggaggaattgggggtgggggtcttctacctaggactcttccctggagtcatgggctgcctgggacccaggacccatgagggggctgagaggtttctacactcgaggagcaggggtccagagaggcaggctggggaggcaagggacccatcctaggcccgctttcttgccgagccaagcagcttagctggggctgtgcagccaggggcttacccaggccagtggaggtgccacagccctggggagccagacaggctttggtatcgtatcgcctctgtgtccttttaagagaggagagttcagtaccccgtgctttctttacactggagaggaactaaaaggatctctgtgtctatggagaattgtcaataaaaaggcctcaagcttc

SEQ ID NO: 19504 - DNA, 1504 bp, Artificial Sequence
  derived and/or modified sequence
gcgattcgcgtcccggaagcggcggtggcggccgcggcgtaggcggaggagattttcggacctgcgacttccgaacaaccctggcaggaggagcggcgttcagccgggggaggcctgaagaaacgctccggggcccagtggctctacccctgctcctgcccgaccctgccgcctccctcacggagccagcggccgggatgcagacatcagaacgtgaggggagtgggccggagctgagccccagcgtgatgcccgaggctcccctggagtctccaccttttcctaccaagtccccagcgtttgaccttttcaacttggttctctcctacaagaggctggagatctacctggaacccttgaaggatgcaggtgatggtgttcgatacttgctcaggtggcagatgcctttgtgttccttgctgacctgcctgggcctcaacgtcttgttcctcactttgaatgagggtgcatggtactcagtaggtgccctgatgatttcagtgcccgccctgctgggctaccttcaggaggtttgccgggcacggctgcctgattccgagctgatgcggaggaagtatcatagcgtgaggcaggaggacctgcagagaggtcgcctgtctcgtcccgaggccgtggctgaggtgaagagcttcttgatccagctggaggccttcctgagccgcctgtgctgcacatgtgaagccgcctaccgcgtgctgcactgggagaaccccgtcgtgtcctcacagttctatggggctcttctgggcacagtctgcatgctgtatttgctgccactctgctgggttctcacccttttaaacagcacgctctttctggggaatgtggagttcttccgagttgtgtctgagtacagggcatctctgcagcagaggatgaacccaaagcaggaagagcatgcctttgagagtcctccaccaccagatgttggggggaaggatggtctgatggacagcacgcctgccctcacacccacggaggacctcacaccgggcagcgtggaggaggctgaggaggctgagccagatgaagagtttaaagatgcgattgaggaggatgatgagggcgccccgtgcccagcagaggatgagctggccctgcaggacaacgggttcctgagcaagaatgaggtgctgcgcagcaaggtgtctcggctcacggagcggctccgcaagcgctaccccaccaacaacttcggtgtgacaggagcaggcagttcttaagggttcagagcagccagattccagcagtgcccggtaacactacacacaagaagtattactctggtccagcaaataatttgtctatttctacaacttctaagtaaagcggagctgcagtaattgtggaaacagcttctgctctcgatgctgctccttcaaggtgcccaagtcctccatgggggccacagcccctgaagcccagagggagactgtgtttgtgtgtgcctcgtgtaaccagaccttgagcaagtgagaagaga

SEQ ID NO: 19505 - protein, 410 aa, Artificial Sequence
  derived and/or modified sequence
MNTRNRVVNSGLGASPASRPTRDPQDPSGRQGELSPVEDQREGLEAAPKGPSRESVVHAGQRRTSAYTLIAPNINRRNEIQRIAEQELANLEKWKEQNRAKPVHLVPRRLGGSQSETEVRQKQQLQLMQSKYKQKLKREESVRIKKEAEEAELQKMKAIQREKSNKLEEKKRLQENLRREAFREHQQYKTAEFLSKLNTESPDRSACQSAVCGPQSSTWKLPILPRDHSWARSWAYRDSLKAEENRKLQKMKDEQHQKSELLELKRQQQEQERAKIHQTEHRRVNNAFLDRLQGKSQPGGLEQSGGCWNMNSGNSWGSLLVFSRHLRVYEKILTPIWPSSTDLEKPHEMLFLNVILFSLTVFTLISTAHTLDRAVRSDWLLLVLIYACLEELIPELIFNLYCQGNATLFF

SEQ ID NO: 19506 - DNA, 1233 bp, Artificial Sequence
  derived and/or modified sequence
atgaatacaagaaatagagtggttaatagtgggcttggtgcctccccggcctcacggccgacgagagatccccaggatccgagcggccgccagggcgaattatcaccagtggaagaccagcgggagggcctcgaagccgcaccaaagggcccctcacgggagtctgtagtgcatgccggtcaaagaaggacaagcgcatacacacttattgctccaaacatcaacagacgcaacgagatccagagaatcgcagagcaggagttggctaacctcgagaaatggaaggaacaaaatcgagcgaaacctgtccacctcgtccctcggagacttggtggctcccagtctgaaacggaggtgcgccaaaagcagcaactgcagctgatgcagtcaaagtacaaacagaagctaaaaagagaagaatcggtccgcatcaaaaaagaggctgaagaggccgagcttcagaagatgaaggcaattcaacgcgaaaaatccaacaaacttgaggagaagaagcgcctgcaggaaaatctgagacgggaagccttccgagagcaccagcagtataagacagccgagtttctgtcaaaattgaatacagagtccccggacagatcagcatgtcagagcgccgtgtgcggtccgcagtcttctacttggaaattgccgatacttcctcgggatcattcctgggcccggtcatgggcctaccgagactccctcaaggccgaagagaatcggaagctccagaagatgaaggacgagcagcatcagaaaagtgaactactcgagctgaagagacagcagcaagaacaggagagggcaaaaatccatcagacagaacaccgacgtgtcaataacgctttcttagatcgactccagggaaagagccagcccggggggctcgaacagagtggcgggtgctggaatatgaactctggaaactcctggggctcactgctggtcttttcccggcatctgcgggtatatgaaaagatcctcaccccaatttggccttctagcactgacctggaaaaaccacacgaaatgctgtttctaaacgtgatcctattctccttgaccgtctttactcttatttcaactgctcatacgctggatcgggcggtacgtagcgactggctactactggtgctgatctacgcttgtctcgaagagttaatcccagaactgattttcaatctatactgccagggaaacgcaactttgttcttttag

SEQ ID NO: 19507 - DNA, 1233 bp, Artificial Sequence
  derived and/or modified sequence
atgaacaccaggaacagagtggtgaacagcggcctgggcgccagccctgccagccggcccacccgggacccccaggaccccagcggccggcagggcgagctgagccctgtggaggaccagcgggagggcctggaggccgcccccaagggccccagccgggagagcgtggtgcatgctggccagaggaggaccagcgcctacaccctcatcgcccccaacatcaacagaagaaatgagatccagagaattgctgagcaggagctggccaacctggagaagtggaaggagcagaacagagccaagcctgtgcacctggtgccccggcggctgggcggcagccagagcgagacagaggtgcggcagaagcagcagctgcagctgatgcagagcaagtacaagcagaagctgaagcgggaggagagcgtgcgcatcaagaaggaggccgaggaggccgagctgcagaagatgaaggccatccagcgggagaagagcaacaagctggaggagaagaagaggctgcaggagaacctgcggcgggaggccttccgggagcaccagcagtacaagacagctgagttcctgagcaagctgaacacagagagcccagacagaagtgcctgccagagcgctgtgtgtggcccccagagcagcacctggaagctgcccatcctgccccgggaccacagctgggcccgctcctgggcctacagagacagcctgaaggccgaggagaacaggaagctgcagaagatgaaggatgagcagcaccagaagtctgagctgctggagctgaagaggcagcagcaggagcaggagcgggccaagatccaccagacagagcaccggcgggtgaacaatgccttcctggaccggctgcagggcaagagccagcccggcggcctggagcagagcggcggctgctggaacatgaacagcggcaacagctggggcagcctgctggtgttcagccgccacctgcgggtgtatgagaagatcctgacccccatctggcccagcagcacagacctggagaagccccatgagatgctgttcctgaatgtcatcctcttcagcctgaccgtcttcaccctcatcagcacagcccacaccctggacagagctgtgcggagtgactggctgctgctggtgctgatctatgcctgcctggaggagctgatccctgagctgatcttcaacctgtactgccagggcaatgccaccctcttcttctag

SEQ ID NO: 19508 - DNA, 1233 bp, Artificial Sequence
  derived and/or modified sequence
atgaacacccggaaccgggtggtgaacagcggcctgggcgccagccccgcgtcaaggcctactagggacccacaggacccctctgggcggcagggcgaactgagcccggtggaagatcagagagaggggttagaggctgcacccaaagggccatcccgggaatcagtggtccacgctgggcagagacggacttcagcctataccctgatcgctccaaacattaacaggcgcaatgagatacagaggatcgccgaacaggagctggcaaatcttgaaaaatggaaagaacagaaccgcgccaagcctgtgcacctcgttcctcgtagactcggaggttcacagtcagaaacagaagttaggcagaagcagcagcttcagctgatgcaatctaagtacaagcaaaagctgaaaagggaagagagcgtccgcatcaaaaaggaggccgaagaggctgaactgcaaaagatgaaggcgatccaaagggaaaaatctaacaaactggaggagaagaaaaggctccaagaaaatttgcgacgagaagcatttcgcgaacatcagcaatataagacagccgaattcctttcaaaattaaacactgagagccctgaccggagtgcatgtcaaagtgcagtttgcgggccccaatcctcgacttggaagctgcccatcctgccaagggaccatagttgggcacgaagctgggcttaccgggactcattaaaagccgaggaaaatcgaaaactgcagaaaatgaaagatgagcagcaccagaagagcgaattgctggaactaaagcggcaacagcaggagcaggagagagccaagatccaccagaccgagcacagaagggttaacaatgctttccttgatcgtctgcaaggcaagagtcagcccggcggccttgagcagtctgggggatgctggaatatgaacagtggcaattcttggggctccctcctggtatttagccgacacctgcgtgtgtacgagaagattcttacaccaatatggccctcttccaccgatcttgaaaaaccccacgagatgctgttcctgaatgtgattctcttctcgcttacagtgtttaccttaatctctaccgcacacacattggatcgtgccgtaagaagcgattggctcctcctggtgctgatttacgcatgccttgaagaactcatcccagagttaatattcaatctgtactgccagggcaatgccaccctgttcttctag

SEQ ID NO: 19509 - DNA, 1233 bp, Artificial Sequence
  derived and/or modified sequence
atgaatacccgtaaccgagtggtcaacagtggtctgggggcatccccggcatctcgccctacccgcgatccacaggacccctcgggtcgccagggtgagcttagcccagtggaggatcaaagggaagggctcgaagcagcccctaagggcccaagccgagagtccgtcgtgcacgctgggcagcggagaacctctgcttatacccttatcgcacccaacattaacagacgcaatgagatacagagaatcgctgagcaggagctggccaatctagagaagtggaaagaacagaatcgagcaaagccagtgcacctggtgccgagacgcctgggaggcagccagagcgagactgaagttagacagaagcaacagctccagctaatgcagtctaagtacaaacagaagctgaagagggaggagtctgtcagaattaagaaggaagccgaagaggccgagctgcaaaagatgaaggccatccagagagagaaaagtaataagttggaggaaaaaaaacggttgcaggaaaaccttaggcgggaagcctttagagaacaccagcaatataagaccgccgagttcctcagcaaactcaataccgaaagtcccgatagatctgcctgccagagcgccgtgtgcggcccacagtcttctacatggaagcttccaatactgcctcgggatcatagctgggctagatcttgggcctatcgtgactctcttaaagccgaagagaacaggaagctgcagaaaatgaaggacgaacagcaccagaaaagcgaattgctggagctcaagcgccagcagcaggaacaagagcgcgctaagattcaccaaactgagcacagacgcgtgaataatgcatttttagaccgcctgcagggtaagagccagcctgggggtttggaacagtctggagggtgttggaacatgaacagtggcaattcgtggggatcgctcctggtgttctccagacacctgcgggtgtatgagaagatactgacccccatatggcctagctcgaccgacctagaaaaaccacacgagatgctctttctgaatgtcattctgttttctctgactgttttcacgctcatcagcacagcccatactcttgatagagccgttcgctcagactggttgctgttagtgctaatatacgcatgcttagaggagctaattcctgaacttatttttaatctgtactgccaaggtaacgccacgttattcttctag

SEQ ID NO: 19510 - DNA, 1233 bp, Artificial Sequence
  derived and/or modified sequence
atgaacaccagaaacagagtggtgaacagcggcctgggcgccagccccgccagcagacccaccagagacccccaggaccccagcggcagacagggcgagctgagccccgtggaggaccagagagagggcctggaggccgcccccaagggccccagcagagagagcgtggtgcacgccggccagagaagaaccagcgcctacaccctgatcgcccccaacatcaacagaagaaacgagatccagagaatcgccgagcaggagctggccaacctggagaagtggaaggagcagaacagagccaagcccgtgcacctggtgcccagaagactgggcggcagccagagcgagaccgaggtgagacagaagcagcagctgcagctgatgcagagcaagtacaagcagaagctgaagagagaggagagcgtgagaatcaagaaggaggccgaggaggccgagctgcagaagatgaaggccatccagagagagaagagcaacaagctggaggagaagaagagactgcaggagaacctgagaagagaggccttcagagagcaccagcagtacaagaccgccgagttcctgagcaagctgaacaccgagagccccgacagaagcgcctgccagagcgccgtgtgcggcccccagagcagcacctggaagctgcccatcctgcccagagaccacagctgggccagaagctgggcctacagagacagcctgaaggccgaggagaacagaaagctgcagaagatgaaggacgagcagcaccagaagagcgagctgctggagctgaagagacagcagcaggagcaggagagagccaagatccaccagaccgagcacagaagagtgaacaacgccttcctggacagactgcagggcaagagccagcccggcggcctggagcagagcggcggctgctggaacatgaacagcggcaacagctggggcagcctgctggtgttcagcagacacctgagagtgtacgagaagatcctgacccccatctggcccagcagcaccgacctggagaagccccacgagatgctgttcctgaacgtgatcctgttcagcctgaccgtgttcaccctgatcagcaccgcccacaccctggacagagccgtgagaagcgactggctgctgctggtgctgatctacgcctgcctggaggagctgatccccgagctgatcttcaacctgtactgccagggcaacgccaccctgttcttctag

SEQ ID NO: 19511 - DNA, 3160 bp, Artificial Sequence
  derived and/or modified sequence
cgctaagcgtcccagccgcatccctcccgcagcgacggcggcccgggacccgcgggctgtgaaccatgaacacccgcaatagagtggtgaactccgggctcggcgcctcccctgcctcccgcccgacccgggatccccaggacccttctgggcggcaaggggagctgagccccgtggaagaccagagagagggtttggaggcagcccctaagggcccttcgcgggagagcgtcgtgcacgcgggccagaggcgcacaagtgcatacaccttgatagcaccaaatataaaccggagaaatgagatacaaagaattgcggagcaggagctggccaacctggagaagtggaaggagcagaacagagctaaaccggttcacctggtgcccagacggctaggtggaagccagtcagaaactgaagtcagacagaaacaacaactccagctgatgcaatctaaatacaagcaaaagctaaaaagagaagaatctgtaagaatcaagaaggaagctgaagaagctgaactccaaaaaatgaaggcaattcagagagagaagagcaataaactggaggagaaaaaaagacttcaagaaaaccttagaagagaagcatttagagagcatcagcaatacaaaaccgctgagttcttgagcaaactgaacacagaatcgccagacagaagtgcctgtcaaagtgctgtttgtggcccacaatcctcaacatggaaacttcctatcctgcctagggatcacagctgggccagaagctgggcttacagagattctctaaaggcagaagaaaacagaaaattgcaaaagatgaaggatgaacaacatcaaaagagtgaattactggaactgaaacggcagcagcaagagcaagaaagagccaaaatccaccagactgaacacaggagggtaaataatgcttttctggaccgactccaaggcaaaagtcaaccaggtggcctcgagcaatctggaggctgttggaatatgaatagcggtaacagctggggttctctattagttttttcgaggcacctaagggtatatgagaaaatattgactcctatctggccttcatcaactgacctcgaaaagcctcatgagatgctttttcttaatgtgattttgttcagcctcactgtttttaccttaatttcaactgcccacacacttgaccgtgcagtcaggagtgactggcttctccttgtcctcatttatgcatgtttggaggagctgattcctgaactcatatttaatctctactgccagggaaatgctacattatttttctaattggaagtataattagagtgatgttggtagggtagaaaaagagggagtcacttgatgctttcaggttaatcagagctatgggtgctacaggcttgtctttctaagtgacatattcttatctaattctcagatcaggttttgaaagctttgggggtctttttagattttaatccctactttctttatggtacaaatatgtacaaaagaaaaaggtcttatattcttttacacaaatttataaataaattttgaactccttctgtataaatgggtcatttttatttttaatgaaaagttattggggttttctctcttgaagggtctcattttaattcccttttccaggccgtatagatcaaatatagtactgtcattactgttggctcttgttttggtcttgacttactaatagtgttaccctgattttcagagggggacagtttatctccagaaaggccaatgtttgtatacacatcagctagacacaaatatagacatcatatgtagtttgtacatgtttcagaaacttgttttttctttgctctgtgtaacctatttcctattgctagttcagttggctttcttattcacttctgtgaccctgaaccagttctcagaccctagagtgtaagagcattgattttctacgctgtgtaatctagctcaatccctctgtcccctccgcctcaccgtcccccagccaccacattgtatagcaaaagcattacattcaatcctagaataaaggtaaatacaacaaatcatctttgcagctggacaactaataatactttgcagcattaagagatcttctgtgttaccagtcactctgttgaaatgaactttccgaatctctttattcaggaaaacatggggttttgaaattcttgggccaagagacataactgaggggttcgcagagctaggcaagggtgcactaggaaagggccacattggtgggtggggggtaacagagaacagatggtgtcaggaagtttctctggagtaaataatgtggatattcttggtttccctctcctccgccagctgaagctgtgttagtgctgttgacactaatataaaatgtttggtccatttgaaatccttgtcattgccttatatgggggaaactcaatcccccagcctgtgttggaaatatcaccaaactgattgtaaatgtgcggctgtagcagacattttagtgtggtggtgtgcagccatttcggccctacacctgccagcctggctaccttacagttgtgttccgatttttgcgtctatgcttggtgtgcctcacttgctgcattttccagcatgcaaccaggagttgacgtaggaaaaagggatgctttcttactttggaagctctcagggaagttggtgtcaatttctcctccactgcctggcctaccctgcactcccaaagattttgtgcagatgggtagttccattttttaaaaattgtgcagatatggaaaattgtgacttacttcatgaccagaactatctagaatatgtgtgggggtataaacatcttgcttaaccaaatatctatgtaggcagaggtaaccaggagagaagcaagacttgctgcctaaaggagcccaccattttacttttcacatttaatctgccacgttgaatcaattggaataaaacctgactcgcaggtgactggacaggaaatcccaaagttccaccatttctatgcttaattttaatgtccccccgcttttttttttgtagaaaataaaaacaagaaaatcgttccaatgtaagatgtttgttatagaaactttaggcaatacaggtgtgtaataaaatgtttaataaacttctaaacacttttgtatttggattta

SEQ ID NO: 19512 - protein, 291 aa, Artificial Sequence
  derived and/or modified sequence
MSMPLHQISAIPSQDAISARVYRSKTKEKEREEQNEKTLGHFMSHSSNISKAGSPPSASAPAPVSSFSRTSITPSSQDICRICHCEGDDESPLITPCHCTGSLHFVHQACLQQWIKSSDTRCCELCKYEFIMETKLKPLRKWEKLQMTSSERRKIMCSVTFHVIAITCVVWSLYVLIDRTAEEIKQGQATGILEWPFWTKLVVVAIGFTGGLLFMYVQCKVYVQLWKRLKAYNRVIYVQNCPETSKKNIFEKSPLTEPNFENKHGYGICHSDTNSSCCTEPEDTGAEIIHV

SEQ ID NO: 19513 - protein, 89 aa, Artificial Sequence
  derived and/or modified sequence
MSMPLHQISAIPSQDAISARVYRSKTKEKEREEQNEKTLGHFMSHSSNISKAGSPPSASAPAPVSSFSRTSITPSSQDICRICHCEGDD

SEQ ID NO: 19514 - DNA, 876 bp, Artificial Sequence
  derived and/or modified sequence
atgagcatgcccctgcaccagatcagcgccatccccagccaggacgccatcagcgccagagtgtacagaagcaagaccaaggagaaggagagagaggagcagaacgagaagaccctgggccacttcatgagccacagcagcaacatcagcaaggccggcagcccccccagcgccagcgcccccgcccccgtgagcagcttcagcagaaccagcatcacccccagcagccaggacatctgcagaatctgccactgcgagggcgacgacgagagccccctgatcaccccctgccactgcaccggcagcctgcacttcgtgcaccaggcctgcctgcagcagtggatcaagagcagcgacaccagatgctgcgagctgtgcaagtacgagttcatcatggagaccaagctgaagcccctgagaaagtgggagaagctgcagatgaccagcagcgagagaagaaagatcatgtgcagcgtgaccttccacgtgatcgccatcacctgcgtggtgtggagcctgtacgtgctgatcgacagaaccgccgaggagatcaagcagggccaggccaccggcatcctggagtggcccttctggaccaagctggtggtggtggccatcggcttcaccggcggcctgctgttcatgtacgtgcagtgcaaggtgtacgtgcagctgtggaagagactgaaggcctacaacagagtgatctacgtgcagaactgccccgagaccagcaagaagaacatcttcgagaagagccccctgaccgagcccaacttcgagaacaagcacggctacggcatctgccacagcgacaccaacagcagctgctgcaccgagcccgaggacaccggcgccgagatcatccacgtgtag

SEQ ID NO: 19515 - DNA, 876 bp, Artificial Sequence
  derived and/or modified sequence
atgtcaatgcccctacaccaaatctcggccatcccatcacaggacgccatcagcgcaagggtctacagaagcaagacaaaagaaaaagagagggaagaacagaatgagaaaacccttgggcactttatgagtcactcttctaacatcagcaaagccggcagtcccccttccgcctctgccccggcacccgttagcagcttttctcggaccagcatcaccccgtcatcgcaggacatatgccgaatttgccattgtgaaggggacgatgaatctcctttaatcactccttgccactgtactggtagtctccattttgtacaccaggcctgtttgcagcaatggattaagtcttctgacactcgctgttgcgagctctgcaaatacgagtttattatggagactaaattgaaaccactccgaaaatgggaaaagctccagatgacttcttctgagcggcgaaaaattatgtgtagcgtgacatttcacgttatagcgataacatgtgtggtgtggagtctttatgtcttgatagaccggaccgctgaagagatcaaacaagggcaggctaccggaatcctggagtggcctttctggacgaagcttgtggtcgttgctatcggattcaccggaggcctgctgtttatgtatgtgcagtgcaaggtgtacgtgcagctatggaaacggctgaaagcgtataacagggtcatttatgtacagaattgtccggagacttccaagaagaatatttttgagaagtcacccctgaccgagcctaattttgagaacaaacatggttatggcatctgccactccgacaccaattctagttgttgcacagaacctgaagatacaggggccgagatcatccacgtgtag

SEQ ID NO: 19516 - DNA, 876 bp, Artificial Sequence
  derived and/or modified sequence
atgtccatgcccctgcaccagatcagcgccatccccagccaggatgccatcagcgcccgggtgtaccgcagcaagaccaaggagaaggagcgggaggagcagaatgagaagaccctgggccacttcatgagccacagcagcaacatcagcaaggccggcagccccccatctgccagcgccccagcccctgtgagcagcttcagcaggaccagcatcacccccagcagccaggacatctgccgcatctgccactgtgaaggagatgatgagagccccctcatcaccccctgccactgcaccggcagcctgcactttgtgcaccaggcctgcctgcagcagtggatcaagagcagtgacacccgctgctgtgagctgtgcaagtatgagttcatcatggagaccaagctgaagcccctgaggaagtgggagaagctgcagatgaccagcagcgagaggaggaagatcatgtgcagcgtgaccttccacgtgattgccatcacctgtgtggtgtggagcctgtatgtgctgattgacagaacagctgaggagatcaagcagggccaggccaccggcatcctggagtggcccttctggaccaagctggtggtggtggccatcggcttcaccggcggcctgctcttcatgtatgtgcagtgcaaggtgtatgtgcagctgtggaagaggctgaaggcctacaacagagtcatctacgtgcagaactgcccagagaccagcaagaagaacatctttgagaagagccccctgacagagcccaactttgagaacaagcacggctacggcatctgccacagcgacaccaacagcagctgctgcacagagcctgaggacaccggggctgagatcatccacgtgtag

SEQ ID NO: 19517 - DNA, 876 bp, Artificial Sequence
  derived and/or modified sequence
atgagcatgcccctgcaccagatcagcgccatccccagccaggacgctatatcagctcgcgtctaccggtcgaagaccaaagagaaggaacgagaggagcagaacgaaaaaacattagggcacttcatgtcccatagtagcaatatttctaaagcaggcagcccgccatctgccagtgccccagccccggtcagctcctttagccgcacaagtatcacgccaagcagccaggatatttgtcgcatctgtcattgtgaaggggacgacgagtcacccctgataaccccatgtcactgcactggctcattgcatttcgtgcatcaagcctgtctgcaacagtggatcaaaagctcggacacacggtgttgcgagctctgcaaatacgaattcataatggaaaccaagctcaaacccctacgcaaatgggaaaaactacaaatgacgtcaagcgaacggcggaaaataatgtgctccgttacattccatgttatcgctatcacatgtgtagtctggagcttgtacgtcctcatagaccggacagcggaagagatcaagcagggccaggcaactggcattttggagtggcccttttggacgaagctggtggtcgttgctatcggcttcacgggcggccttctgtttatgtatgtgcaatgtaaggtgtatgtgcagctctggaagaggcttaaggcttacaaccgtgtaatctatgtgcagaactgtccagagacaagcaagaagaacatcttcgagaaatctcccttgaccgagcccaatttcgagaataagcacggatatggcatttgtcatagcgataccaacagctcttgctgtacagagcctgaggacacaggggccgaaatcattcatgtgtag

SEQ ID NO: 19518 - DNA, 1848 bp, Artificial Sequence
  derived and/or modified sequence
atggtaggtatagggctgtggatatcgtcagtttgaccaagtattccaagaggccccatggagtttgtcatctgtaatagaggacgttagtgcattagtgatgaaaaaactgcttaccactgactattgtgatctcccagggagtataaggcagctccgcacttgaaatccatggcccaaaatgactctaccagtggagactctcttctgtgaagaagacgaccagataagaggttgggatgagcatgccactgcatcagatctctgccattccatcccaggatgccatctctgctagagtctacagaagtaagaccaaagaaaaggagagggaagaacagaatgagaagactttgggacatttcatgagtcattcaagcaacatttctaaggctgggagtcctccgtcagcatcagctccggctccggtgtcctccttctctcgcacttctatcacgccatccagccaggacatctgcaggatctgccactgtgaaggagatgatgagagccccctgatcaccccctgccactgcacaggaagcctccacttcgtgcaccaggcctgcctgcagcagtggatcaagagctccgacacgcgctgctgcgagctctgcaagtatgagttcatcatggagaccaagctgaagccactgagaaaatgggagaagttgcagatgacgtccagcgagcgcaggaagatcatgtgctcagtgacattccacgtcattgccatcacatgtgtggtctggtccttgtatgtgctcattgaccgtactgctgaggagatcaagcaggggcaggcaacaggaatcctagaatggcccttttggactaaattggtggttgtggccatcggcttcaccggaggacttctttttatgtatgttcagtgtaaagtgtatgtgcaattgtggaagagactcaaggcctataatagagtgatctatgttcaaaactgtccagaaacaagcaaaaagaatatttttgaaaaatctccactaacagagcccaactttgaaaataaacatggatatggaatctgtcattccgacacaaactcttcttgttgcacagagcctgaagacactggagcagaaatcattcacgtctgattgtgtgcgggttgtcattttcctggacatccatgaagagctgaaggaaattgtttactgccaattgtatacctttcttatgtcctttaatagcatagactggacaggtgactatttatagtggcttctctttttctaaaccctccttagtctcctagaaaaccttcctgtgggccaggcatgcctgggtcctgcctctgcctggcagctctgtgggaaagtggaagaccccatgatgacatcatggggagccagcagagttcctgcccatggtcttgagctgaatgagagaataaaatgccaatcccaagggaagaggaggagcaggggtgcccaggccctgatacccagccgcctccagcttgcagtggtccccagcctggagcagagcattggggagtgtctagccatgacgagaagattccctctgcatcacggcgaaccccaggagatggtattgaaacagacccccaaacacagactcctgcctgccctctgccgatgctgcctcctccatgctcttgagcaggtggagccatggtgctctgtggtggcgcatgattcactgagcaaacagcactttacagaagaaaatctttattttgtaatatgtgtgtccagcgggattgacactcaaaaaaagtctcacttagaaatcttcccttccttacctttgtatctcctttacatcatgagagatcaaaaatccattttgccttacatatgctaagaa

SEQ ID NO: 19519 - DNA, 876 bp, Artificial Sequence
  derived and/or modified sequence
atgtcaatgcctttgcaccagatttcagccatcccttcccaagacgcgatttcagccagggtgtaccgtagtaaaactaaggagaaagaacgcgaagagcagaacgaaaagacgctgggccatttcatgtcccacagctccaatatctccaaggcgggatctcccccttcggccagcgccccagccccagtgtcctcattctctcgaacttctattactccatcatcccaagatatctgcagaatctgtcattgtgaaggcgatgacgagtccccactgatcacgccgtgccactgcacaggatcattgcattttgtccaccaggcttgcctccaacagtggattaaaagcagcgacacgcgctgctgcgaactgtgcaagtatgaatttatcatggagaccaaattgaaaccactccggaaatgggaaaagctgcaaatgacgagctctgagcgtcgtaaaatcatgtgttccgtgacattccacgtgattgctatcacctgcgtggtatggtcactgtatgtccttattgatcggactgccgaggagatcaaacagggacaggccaccgggatcttggagtggcctttttggacgaaactcgtcgtcgttgccatcggttttaccgggggtctgctctttatgtatgtgcagtgcaaggtctatgttcagttgtggaagcggctgaaagcctacaacagggttatttatgtgcaaaattgtccagaaacctccaaaaaaaatattttcgaaaagtcccctctgaccgaaccaaattttgaaaataagcatggatatggaatctgccactctgataccaactcttcctgttgtactgagccggaagatactggtgccgaaatcattcatgtctag

SEQ ID NO: 19520 - DNA, 876 bp, Artificial Sequence
  derived and/or modified sequence
atgtccatgcccttgcaccagatttccgcaattcccagccaggacgccatcagcgcccgcgtgtaccgttctaagacaaaagagaaagagcgggaggaacagaatgagaaaactttagggcatttcatgtcccacagcagcaatatttcaaaagcagggagccccccaagcgctagcgctcccgcccccgtgagctcattctctcggacgtctattacaccaagctcacaggacatctgcagaatctgccactgcgagggggacgatgagtctcccctgattacgccttgtcattgcactggaagcctgcacttcgtacaccaagcttgcctgcaacagtggattaagtcttccgatacaaggtgctgcgaactttgtaaatacgagtttatcatggaaacaaagctgaagcccctgcgtaagtgggagaagctacagatgacatcttctgagaggaggaagataatgtgttccgttaccttccacgtgattgccatcacttgtgtggtgtggagtctgtatgtccttatcgaccgaactgctgaagagattaagcagggccaggctaccggaatcctggagtggccattctggacaaaacttgtggttgtcgccattgggtttactggcggactgctttttatgtatgtgcagtgtaaagtgtatgtgcagctgtggaagcggctgaaagcttataacagggtaatctatgtacaaaactgtcccgagacgtcaaagaagaatatctttgagaaatcccccttgactgaaccaaactttgaaaacaaacacggatatggaatatgccactctgacacaaacagcagctgctgcacagaaccagaggatacaggcgccgagatcatccacgtgtag

SEQ ID NO: 19521 - DNA, 876 bp, Artificial Sequence
  derived and/or modified sequence
atgtctatgcccctgcaccagatttccgccatcccatcccaggacgccatctcagctagagtttacaggtccaaaactaaggaaaaagagcgcgaggagcagaatgagaaaacactgggtcactttatgagtcactctagcaatatttctaaagccggcagtccgccctcagctagtgccccagctccggtttctagttttagtcggaccagcataaccccctcctcccaggatatctgcagaatttgtcactgcgaaggcgatgacgagtctccactcatcacaccttgtcattgtacgggttcacttcactttgtccaccaagcttgcctccagcagtggattaaatccagcgacactaggtgttgcgaactctgtaaatacgagtttatcatggaaactaagctgaaacctctgagaaaatgggagaagctccagatgacaagttctgagagacgcaaaattatgtgttccgtgacttttcatgtgatcgcaattacctgcgttgtctggtcgctgtacgtgctgattgacagaactgctgaagagattaagcaaggccaggccacgggtatactagagtggcccttttggactaaattagtcgtggtggccatcgggtttaccggtggcctgctctttatgtatgtgcagtgtaaggtctatgtccaattgtggaaaaggttaaaagcctacaatcgggtgatctacgtccagaactgcccagaaacttccaagaagaacatttttgaaaaatctccccttaccgagccaaactttgaaaacaagcacgggtatggcatttgccatagtgataccaatagctcttgttgcaccgagcccgaagacaccggtgcagaaattatccatgtatag

SEQ ID NO: 19522 - DNA, 876 bp, Artificial Sequence
  derived and/or modified sequence
atgagcatgcctctccatcagatttctgctattccatctcaggacgccatcagcgcccgcgtctataggtcaaaaacaaaggaaaaggagagagaagagcagaacgagaagaccttaggccattttatgtcccactcctcgaatattagcaaggctgggagcccgccctccgctagcgcacctgccccagtgagtagcttcagtaggactagcataacccctagctctcaagacatttgccgcatttgtcattgtgagggagacgatgagagcccccttatcactccatgccattgtacaggatctttgcacttcgtgcatcaggcctgcctgcaacagtggattaagtcttccgacacacgttgttgcgagctctgcaaatacgagtttattatggaaactaagctcaaaccactgaggaaatgggaaaagttgcagatgacctcaagcgagcggcgaaaaatcatgtgcagtgtgactttccacgtgatcgccattacttgcgtggtctggtccctatatgtgctgattgacaggacagccgaggaaatcaagcagggtcaggcgactggtattctagagtggccattctggaccaaactggtcgtcgttgcaattggcttcacaggtggattactttttatgtacgttcagtgcaaggtttatgttcagctctggaaacggctaaaggcatataacagagttatctacgttcagaattgtcccgaaacctcaaagaaaaacatattcgagaagtctccacttacagagcccaatttcgagaacaaacatgggtacgggatctgtcatagtgataccaacagctcctgttgcaccgagcccgaagacacaggtgcagagataatccacgtatag

SEQ ID NO: 19523 - DNA, 270 bp, Artificial Sequence
  derived and/or modified sequence
atgagtatgccactacatcagatctctgccatcccttcccaggatgctatcagtgcccgtgtatatagatccaagactaaggagaaggaacgggaggagcagaacgagaagaccctcggccatttcatgagccacagcagtaatatttccaaggcagggtcaccaccctccgccagcgccccggccccagtgtcttctttttcacggacctctatcaccccaagcagccaggatatctgcaggatttgccattgtgaaggtgatgattag

SEQ ID NO: 19524 - DNA, 270 bp, Artificial Sequence
  derived and/or modified sequence
atgtccatgcccctgcaccagatcagcgccatccccagccaggatgccatcagcgcccgggtgtaccgcagcaagaccaaggagaaggagcgggaggagcagaatgagaagaccctgggccacttcatgagccacagcagcaacatcagcaaggccggcagccccccatctgccagcgccccagcccctgtgagcagcttcagcaggaccagcatcacccccagcagccaggacatctgccgcatctgccactgtgaaggagatgactag

SEQ ID NO: 19525 - DNA, 2496 bp, Artificial Sequence
  derived and/or modified sequence
ctcggtgtcctcccgcggaggggcgtagggtgtaaacaggcgacgcgctgggggaggtgcggccttgctgcgtccacgtctcgggcatgctcgaggcgggccagggcggtagcgccgccagctcagagcccacctgaggtaactcctgcggcctctaggatcggagtcccccacgccgcgcgcagccgccgccgctggccgccaataagggcggccgagcccccggcccgggcagggggtgtggctgccggcagcgcgtcggctacaggtgggctgggctgggctgggctgggctgggctgggtgggggcggccgccaaggacccatccctgcgctgcgggcccggcgtggagcccgcggagaggcagcgcgactccaggcagtgggtctctctgccccggtgctcgcgtctgcccctggggccgggccgagcggaaccaggaatcgcagaaacggtcagcgcccagggctctaggccggccgccccgggtgccaggtgaattcctttccctgaccggctgtgagacgttggcccgtcagccgtcgtctttggcctgagtgtgcacatctgtaaaatggaagctcggactagtgatccgtgaggaccttccacgtctgacgtgtgatctcgagagacctgcgtacattcggggtgccagaaggaaagcatagcttgaaatccatggcccaaaatgactctaccagtggagactctcttctgtgaagaagacgaccagataagaggttgggatgagcatgccactgcatcagatctctgccattccatcccaggatgccatctctgctagagtctacagaagtaagaccaaagaaaaggagagggaagaacagaatgagaagactttgggacatttcatgagtcattcaagcaacatttctaaggctgggagtcctccgtcagcatcagctccggctccggtgtcctccttctctcgcacttctatcacgccatccagccaggacatctgcaggatctgccactgtgaaggagatgatgagagccccctgatcaccccctgccactgcacaggaagcctccacttcgtgcaccaggcctgcctgcagcagtggatcaagagctccgacacgcgctgctgcgagctctgcaagtatgagttcatcatggagaccaagctgaagccactgagaaaatgggagaagttgcagatgacgtccagcgagcgcaggaagatcatgtgctcagtgacattccacgtcattgccatcacatgtgtggtctggtccttgtatgtgctcattgaccgtactgctgaggagatcaagcaggggcaggcaacaggaatcctagaatggcccttttggactaaattggtggttgtggccatcggcttcaccggaggacttctttttatgtatgttcagtgtaaagtgtatgtgcaattgtggaagagactcaaggcctataatagagtgatctatgttcaaaactgtccagaaacaagcaaaaagaatatttttgaaaaatctccactaacagagcccaactttgaaaataaacatggatatggaatctgtcattccgacacaaactcttcttgttgcacagagcctgaagacactggagcagaaatcattcacgtctgattgtgtgcgggttgtcattttcctggacatccatgaagagctgaaggaaattgtttactgccaattgtatacctttcttatgtcctttaatagcatagactggacaggtgactatttatagtggcttctctttttctaaaccctccttagtctcctagaaaaccttcctgtgggccaggcatgcctgggtcctgcctctgcctggcagctctgtgggaaagtggaagaccccatgatgacatcatggggagccagcagagttcctgcccatggtcttgagctgaatgagagaataaaatgccaatcccaagggaagaggaggagcaggggtgcccaggccctgatacccagccgcctccagcttgcagtggtccccagcctggagcagagcattggggagtgtctagccatgacgagaagattccctctgcatcacggcgaaccccaggagatggtattgaaacagacccccaaacacagactcctgcctgccctctgccgatgctgcctcctccatgctcttgagcaggtggagccatggtgctctgtggtggcgcatgattcactgagcaaacagcactttacagaagaaaatctttattttgtaatatgtgtgtccagcgggattgacactcaaaaaaagtctcacttagaaatcttcccttccttacctttgtatctcctttacatcatgagagatcaaaaatccattttgccttacatatgctaagaagcgtggcattctttctgttcataaaacagactcatgacttttaagacaggacaagcaggccagaggctttttttttaatcacagatctcatgggaattagtggatgctaaatggcaattaaagcatgattcctatgc

SEQ ID NO: 19526 - DNA, 2589 bp, Artificial Sequence
  derived and/or modified sequence
ctcggtgtcctcccgcggaggggcgtagggtgtaaacaggcgacgcgctgggggaggtgcggccttgctgcgtccacgtctcgggcatgctcgaggcgggccagggcggtagcgccgccagctcagagcccacctgaggtaactcctgcggcctctaggatcggagtcccccacgccgcgcgcagccgccgccgctggccgccaataagggcggccgagcccccggcccgggcagggggtgtggctgccggcagcgcgtcggctacaggtgggctgggctgggctgggctgggctgggctgggtgggggcggccgccaaggacccatccctgcgctgcgggcccggcgtggagcccgcggagaggcagcgcgactccaggcagtgggtctctctgccccggtgctcgcgtctgcccctggggccgggccgagcggaaccaggaatcgcagaaacggtcagcgcccagggctctaggccggccgccccgggtgccaggtgaattcctttccctgaccggctgtgagacgttggcccgtcagccgtcgtctttggcctgagtgtgcacatctgtaaaatggaagctcggactagtgatccgtgaggaccttccacgtctgacgtgtgatctcgagagacctgcgtacattcggggtgccagaaggaaagcatagagatggggtcttgctgtgttgcccagactggtctcaaactcctggcctcaagtgatccttctgcctcagcttcccaaagtactgggattacagcttgaaatccatggcccaaaatgactctaccagtggagactctcttctgtgaagaagacgaccagataagaggttgggatgagcatgccactgcatcagatctctgccattccatcccaggatgccatctctgctagagtctacagaagtaagaccaaagaaaaggagagggaagaacagaatgagaagactttgggacatttcatgagtcattcaagcaacatttctaaggctgggagtcctccgtcagcatcagctccggctccggtgtcctccttctctcgcacttctatcacgccatccagccaggacatctgcaggatctgccactgtgaaggagatgatgagagccccctgatcaccccctgccactgcacaggaagcctccacttcgtgcaccaggcctgcctgcagcagtggatcaagagctccgacacgcgctgctgcgagctctgcaagtatgagttcatcatggagaccaagctgaagccactgagaaaatgggagaagttgcagatgacgtccagcgagcgcaggaagatcatgtgctcagtgacattccacgtcattgccatcacatgtgtggtctggtccttgtatgtgctcattgaccgtactgctgaggagatcaagcaggggcaggcaacaggaatcctagaatggcccttttggactaaattggtggttgtggccatcggcttcaccggaggacttctttttatgtatgttcagtgtaaagtgtatgtgcaattgtggaagagactcaaggcctataatagagtgatctatgttcaaaactgtccagaaacaagcaaaaagaatatttttgaaaaatctccactaacagagcccaactttgaaaataaacatggatatggaatctgtcattccgacacaaactcttcttgttgcacagagcctgaagacactggagcagaaatcattcacgtctgattgtgtgcgggttgtcattttcctggacatccatgaagagctgaaggaaattgtttactgccaattgtatacctttcttatgtcctttaatagcatagactggacaggtgactatttatagtggcttctctttttctaaaccctccttagtctcctagaaaaccttcctgtgggccaggcatgcctgggtcctgcctctgcctggcagctctgtgggaaagtggaagaccccatgatgacatcatggggagccagcagagttcctgcccatggtcttgagctgaatgagagaataaaatgccaatcccaagggaagaggaggagcaggggtgcccaggccctgatacccagccgcctccagcttgcagtggtccccagcctggagcagagcattggggagtgtctagccatgacgagaagattccctctgcatcacggcgaaccccaggagatggtattgaaacagacccccaaacacagactcctgcctgccctctgccgatgctgcctcctccatgctcttgagcaggtggagccatggtgctctgtggtggcgcatgattcactgagcaaacagcactttacagaagaaaatctttattttgtaatatgtgtgtccagcgggattgacactcaaaaaaagtctcacttagaaatcttcccttccttacctttgtatctcctttacatcatgagagatcaaaaatccattttgccttacatatgctaagaagcgtggcattctttctgttcataaaacagactcatgacttttaagacaggacaagcaggccagaggctttttttttaatcacagatctcatgggaattagtggatgctaaatggcaattaaagcatgattcctatgc

SEQ ID NO: 19527 - DNA, 441 bp, Artificial Sequence
  derived and/or modified sequence
agtagagacagggtttcaccgtgttagccagggtggtctcgatctcctgacctcgtgatttgcccgccttggcctcccaaagtgctgggattacagcttgaaatccatggcccaaaatgactctaccagtggagactctcttctgtgaagaagacgaccagataagaggttgggatgagcatgccactgcatcagatctctgccattccatcccaggatgccatctctgctagagtctacagaagtaagaccaaagaaaaggagagggaagaacagaatgagaagactttgggacatttcatgagtcattcaagcaacatttctaaggctgggagtcctccgtcagcatcagctccggctccggtgtcctccttctctcgcacttctatcacgccatccagccaggacatctgcaggatctgccactgtgaaggagatgat

SEQ ID NO: 19528 - DNA, 876 bp, Artificial Sequence
  derived and/or modified sequence
atgagcatgcccctgcaccagatcagcgccatccccagccaggacgcaatatctgctcgggtctaccgctccaaaactaaggagaaggagagggaggagcagaatgaaaagactctgggccacttcatgagccacagtagcaacatcagcaaagctgggtccccgcccagtgcatccgccccagctcctgtgtcctcatttagtcggacaagcatcacaccctccagccaggatatttgcagaatctgccattgtgaaggggacgacgagagccctctgattaccccctgtcattgtacaggatcactccatttcgtccatcaggcttgtttacagcagtggatcaaaagctccgatacacggtgttgcgagctctgcaaatatgaattcattatggagaccaaactgaagccactgcgcaaatgggagaaacttcaaatgacatcctccgagaggagaaaaatcatgtgttccgttactttccatgttattgccattacttgcgtagtttggagtttgtacgtgctcattgataggactgccgaggagatcaaacaaggccaggcaacggggattttggaatggccattctggactaaactggtggtcgtggcaatcggcttcacagggggcctgctcttcatgtacgtacagtgcaaggtttatgtgcaattgtggaagcgcctgaaggcctacaacagggtaatctatgtgcagaattgcccggaaacctccaagaagaatatatttgaaaaatctcctttgactgaacccaattttgagaacaagcacggctatggcatttgtcactccgacacgaattctagctgctgtactgagccggaggacaccggcgcagagattatccatgtttag

SEQ ID NO: 19529 - DNA, 876 bp, Artificial Sequence
  derived and/or modified sequence
atgagcatgcccctgcaccagatcagcgccatccccagccaggacgcaatttctgccagagtctatcgtagcaaaactaaggaaaaggagagagaagagcaaaatgaaaaaacccttgggcacttcatgtctcattcctccaacatctccaaggcaggcagcccaccttcagcatcggcccctgccccggtgtcctcctttagtagaacttctatcacaccttcctctcaggatatctgccgaatctgccattgtgaaggagacgatgaaagtccacttattacaccgtgtcattgcacaggatccctgcatttcgtgcaccaggcttgcttgcaacagtggatcaaaagctctgacactagatgctgtgagctgtgtaaatacgagttcatcatggagaccaagcttaagcccctcagaaagtgggagaagctccagatgacatcatctgagagaagaaaaattatgtgtagcgtgacgtttcacgtcatagccattacttgtgtcgtctggagcttatacgtactgattgataggaccgcagaggagatcaagcagggtcaggcaaccggcatactggaatggcctttctggacaaaactggtggttgttgccattggctttactggaggcctgctcttcatgtatgtacaatgcaaagtgtacgtgcagttatggaaacgactgaaagcatataaccgcgtaatctacgtccaaaactgtcctgaaacctcgaagaagaacatttttgaaaaatctcctttaacagaacccaactttgaaaataagcacggatacgggatttgccacagcgataccaacagttcgtgctgtacagaacctgaagatacgggagccgaaataattcatgtgtag

SEQ ID NO: 19530 - DNA, 876 bp, Artificial Sequence
  derived and/or modified sequence
atgagcatgcccctgcaccagatcagcgccatccccagccaggacgctatatccgcacgcgtctaccgcagcaaaacaaaagagaaagaaagagaagagcaaaacgagaaaactttgggccatttcatgagtcacagtagtaatatcagcaaggctggttctccgcccagcgcatctgcgcctgccccagtctcctccttcagtcgaacctctatcactccttcctcacaggacatctgtaggatttgccactgtgagggcgatgatgaatccccactgattacaccctgtcactgcacagggtccttgcattttgtacatcaggcttgcctacaacaatggatcaagtcctccgatacacggtgttgtgagttatgcaagtatgagttcataatggaaactaagttaaagcccctgcggaaatgggagaaacttcagatgacttcttctgagcggcggaaaatcatgtgctccgtgaccttccacgtaatagcgattacgtgtgtagtatggtccctttacgtcctcatagacagaaccgcggaggagatcaaacagggccaggcaacaggaatcctcgaatggccattttggacgaaattggtggtcgtagccataggctttacaggcggcttgctgttcatgtacgttcaatgcaaggtgtatgtccaactttggaagcgtctgaaagcatacaatagagtgatctatgtacagaactgcccagagacaagtaagaagaatatctttgaaaagtctccgctaacagaacctaatttcgagaataaacacgggtacggcatttgccatagtgacacaaacagctcctgctgcaccgaacccgaagatactggagctgagattattcacgtctag

SEQ ID NO: 19531 - DNA, 270 bp, Artificial Sequence
  derived and/or modified sequence
atgagcatgcccctgcaccagatcagcgccatccccagccaggacgctatttccgcaagggtctaccgtagtaagacaaaggaaaaagaacgagaggaacagaatgaaaaaaccctgggccatttcatgagccactcaagtaacatctctaaagctggatctccaccatccgcttctgccccagcccccgtgtcatcattcagcaggacctcgattactccatctagtcaggatatttgcagaatatgtcactgtgagggtgatgactag

SEQ ID NO: 19532 - DNA, 876 bp, Artificial Sequence
  derived and/or modified sequence
atgtccatgcccttgcatcaaatctctgccatcccaagtcaggacgcaatttctgccagagtttaccgtagtaagactaaagagaaggaaagagaggaacagaatgagaagactctcggacactttatgagccatagctccaacatatcaaaggccggaagtcctccctccgcgtcagctccagcgcctgtgtcttctttcagcaggacttcgattacccctagttcacaggacatttgccgtatttgtcactgcgagggagacgatgagtccccacttataacaccatgtcactgcaccggctctctgcatttcgttcatcaagcatgtttacagcaatggataaagagctccgacaccaggtgttgcgagctctgtaagtacgagtttattatggagacgaagctaaagccactgcggaagtgggagaagctgcagatgacttcttccgaacgcaggaaaataatgtgttccgtcaccttccacgtgattgctattacatgcgtggtctggagcttgtacgtcttaatcgaccgaacggccgaggagatcaaacagggacaagcgacgggaatcttggaatggcccttctggacaaaactggttgtagtggcaatcggtttcaccggtggtctgctgttcatgtatgtgcagtgtaaggtgtacgtccagctgtggaagcgactgaaagcttacaatagagtgatttatgtgcagaattgtccagagacctcaaaaaaaaacatattcgagaaaagcccgttaactgaaccaaatttcgaaaataagcacggctacggcatctgtcacagcgatacaaactcaagctgctgtaccgaaccggaggacaccggggctgaaatcattcacgtgtag

SEQ ID NO: 19533 - DNA, 876 bp, Artificial Sequence
  derived and/or modified sequence
atgagcatgcccctacatcagatcagcgcaattcctagccaggacgccatcagcgccagagtctaccgaagtaagactaaagagaaggagagggaagagcagaacgagaagactcttggccacttcatgagtcattcttctaacatctccaaagctggaagccctccctccgcttccgctccagcacctgtttcttcttttagtaggacgagtataaccccatcttcccaggatatctgcaggatatgtcactgcgagggtgacgatgagtctccgcttataaccccttgccactgcaccggatcactgcatttcgtacaccaggcatgcctgcaacagtggataaaatcatctgacacccgatgctgcgagctttgtaaatatgaattcattatggagacgaaacttaagcccctgcgtaagtgggagaagctgcaaatgacaagttcggaacgcagaaagataatgtgtagcgtgacgttccacgtgatcgccattacctgcgtggtctggtcattgtatgtgctgatcgaccgaactgccgaagagattaagcaaggccaggcgactggaattcttgaatggcccttttggaccaaactggtggtcgttgcaataggtttcaccgggggactgctgttcatgtacgtacagtgcaaggtatacgtgcagctttggaagagacttaaagcatacaatagggtgatttacgtgcagaactgccccgagacatccaaaaagaatatctttgagaagagtccactgacagaaccaaattttgagaacaagcacggctacgggatctgtcactctgatacaaatagtagttgctgtactgagcctgaagataccggggcagagattattcatgtatag

SEQ ID NO: 19534 - DNA, 876 bp, Artificial Sequence
  derived and/or modified sequence
atgtctatgccactccaccaaatatcggccattccatcacaggacgctataagcgcgcgtgtctatcgatccaagacaaaagagaaggaacgtgaggaacaaaatgagaagacactgggtcactttatgtcccactcaagtaacatctcaaaagctgggtcgcccccttccgcatctgctccggctcctgtctctagcttctcaaggactagtataaccccatcgtcccaggacatatgtagaatctgccactgtgaaggagatgatgagtccccacttatcaccccctgtcactgtaccggatccctacactttgtccaccaggcgtgcctacagcagtggatcaagagcagcgacaccaggtgttgcgaactgtgtaaatacgagttcatcatggagacaaaattgaagcccctgaggaagtgggagaagcttcagatgaccagttccgaacggcgtaaaattatgtgtagtgtgacatttcatgtcatcgcaatcacatgtgtggtgtggtccttgtacgtgctcatcgatcggacggcagaagaaattaagcagggtcaggcaaccggtatcctggaatggcctttctggacaaagctcgtcgtggtggccatcggtttcaccgggggactcttgttcatgtacgtgcagtgtaaggtgtacgtgcagttgtggaagcgattgaaagcctacaaccgggtgatatacgtacaaaactgcccggagacgtccaaaaaaaatatcttcgaaaaatctccacttacggagccgaatttcgaaaacaagcacggatatggaatctgtcactccgacacaaatagtagctgctgtacagaaccggaggacaccggcgctgaaattatacacgtgtag

SEQ ID NO: 19535 - DNA, 270 bp, Artificial Sequence
  derived and/or modified sequence
atgtctatgcccctgcaccaaatttccgcgatcccatctcaagatgccatcagcgcccgagtgtacaggtctaaaactaaggagaaggaacgggaggagcagaacgaaaagacgctgggacacttcatgtcacactctagtaacatttcaaaagccggatctcctccctcagctagtgcgcctgctcctgtgtcgagttttagccggacctctatcactccgtcttcacaggacatctgtcgtatttgtcattgcgaaggggacgattag

SEQ ID NO: 19536 - DNA, 270 bp, Artificial Sequence
  derived and/or modified sequence
atgagcatgcccctgcaccagatcagcgccatccccagccaggacgccatcagcgccagagtgtacagaagcaagaccaaggagaaggagagagaggagcagaacgagaagaccctgggccacttcatgagccacagcagcaacatcagcaaggccggcagcccccccagcgccagcgcccccgcccccgtgagcagcttcagcagaaccagcatcacccccagcagccaggacatctgcagaatctgccactgcgagggcgacgactag

SEQ ID NO: 19537 - protein, 164 aa, Artificial Sequence
  derived and/or modified sequence
MAEPASVAAESLAGSRARAARTVLGQVVLPGEELLLPEQEDAEGPGGAVERPLSLNARACSRVRVVCGPGLRRCGDRLLVTKCGRLRHKEPGSGSGGGVYWVDSQQKRYVPVKGDHVIGIVTAKSGDIFKVDVGGSEPASLSYLSFEGATKRNRPNVQAISSRL

SEQ ID NO: 19538 - DNA, 495 bp, Artificial Sequence
  derived and/or modified sequence
atggccgagcccgccagcgtggccgccgagagcctggccggcagcagagccagagccgccagaaccgtgctgggccaggtggtgctgcccggcgaggagctgctgctgcccgagcaggaggacgccgagggccccggcggcgccgtggagagacccctgagcctgaacgccagagcctgcagcagagtgagagtggtgtgcggccccggcctgagaagatgcggcgacagactgctggtgaccaagtgcggcagactgagacacaaggagcccggcagcggcagcggcggcggcgtgtactgggtggacagccagcagaagagatacgtgcccgtgaagggcgaccacgtgatcggcatcgtgaccgccaagagcggcgacatcttcaaggtggacgtgggcggcagcgagcccgccagcctgagctacctgagcttcgagggcgccaccaagagaaacagacccaacgtgcaggccatcagcagcagactgtag

SEQ ID NO: 19539 - DNA, 495 bp, Artificial Sequence
  derived and/or modified sequence
atggcagagccagcgtccgtcgctgctgaatccctagccggtagtcgagcaagagctgctaggactgttctgggtcaggtcgtgctacctggcgaggagcttcttctccccgaacaagaagatgctgagggtcctggcggcgcggtcgagagacctctgtctttgaatgctcgagcctgcagccgggtccgcgtagtttgtggccccggcttgaggcgttgcggggataggctgctcgtgaccaaatgtggccgccttcgccacaaggagccgggctccgggtcgggtgggggagtctattgggtggacagccagcagaagagatacgtacctgtgaagggagaccatgtcatcgggattgtcactgccaaaagcggggatatatttaaagtggacgtgggcggtagtgaacccgccagcttgagctacctctcttttgagggggctacaaaaaggaacagacctaacgtgcaggccattagctcccggctgtag

SEQ ID NO: 19540 - DNA, 495 bp, Artificial Sequence
  derived and/or modified sequence
atggccgagcccgcctctgtggccgctgagagcctggccggcagccgggcccgggccgccaggacagtgctgggccaggtggtgctgcccggggaggagctgctgctgcctgagcaggaggatgctgagggccctggaggagctgtggagcggcccctgagcctgaatgcccgggcctgcagccgggtgcgggtggtgtgtggccctggcctgcggcgctgtggggaccggctgctggtgaccaagtgtggccgcctgcggcacaaggagcccggcagcggcagcggcggcggcgtgtactgggtggacagccagcagaagagatatgtgcctgtgaagggggaccacgtgattggcatcgtgacagccaagagcggggacatcttcaaggtggatgtgggcggcagcgagcccgccagcctgagctacctgagctttgagggcgccaccaagaggaaccggcccaacgtgcaggccatcagcagccggctgtag

SEQ ID NO: 19541 - DNA, 768 bp, Artificial Sequence
  derived and/or modified sequence
ggtgtttggtggagcccgcgatggccgaacctgcgtctgtcgcggctgaatctctcgcgggcagcagggcgcgcgctgcacgcacagtactaggtcaggtggtgctcccgggtgaggagctgctcctgccggaacaggaggacgcggaaggccctgggggtgcagtggagcgaccgttgagcctgaatgctagagcgtgctcgcgggtgcgcgttgtatgcggtccgggccttcggcgctgtggggaccgcctgctggtcaccaagtgcggccgcctccgtcacaaggagcccggcagtggcagcggcggcggtgtttactgggtggactctcagcagaagcggtatgttccagtaaaaggagaccatgtgattggcatagtgacagctaaatctggagatatattcaaagttgatgttggagggagtgagccagcttctttgtcttacttgtcatttgaaggtgcaactaaaagaaacagaccaaatgtgcaggctattagctccagattgtgaaatcatacaggaagtgggaaaactctatccactggagatagtatttggaatgaatggaagaatatgggttaaggcaaaaaccatccagcagactttaattttggcaaacattttagaagcttgtgaacacatgacgtcagatcaaagaaaacagatcttctccagattggcagaaagttgatataggtggacttttttacaggtcagttgaggcaaaaaactatgggttttttcaggtgaacctcccccattt

SEQ ID NO: 19542 - DNA, 495 bp, Artificial Sequence
  derived and/or modified sequence
atggccgagcccgccagcgtggccgccgagagcctggccggcagcagagcccgcgccgctagaacagtgttgggtcaggtggttctgccaggagaagagttattactgccagagcaggaggacgctgaaggtccaggtggcgccgtggaaaggcctctcagccttaatgctagagcgtgctctagagtgcgggttgtgtgtggacctgggctgcgccggtgtggagatagactgctggtgacaaaatgcggcagactgcggcacaaagagcctggtagcgggagtgggggcggtgtttactgggtcgactcccaacaaaagagatatgtgcctgtaaaaggcgatcatgtgattgggatcgtgacagctaaatccggagatattttcaaggtagatgtgggcgggagtgagccagcctctctttcctatctgtctttcgagggagcaacgaagcgaaatcggcccaatgtccaggcgatatcttcacgactttag

SEQ ID NO: 19543 - DNA, 495 bp, Artificial Sequence
  derived and/or modified sequence
atggccgaacccgcttcagttgctgcggagagtctggctggtagcagagcccgagcagctcggacagtgctggggcaggtggtgctgcctggagaagaactgcttctgccagaacaagaggacgctgagggccctggcggagcagtagagagacccctctcactcaatgctcgcgcttgttccagggtgcgggtggtgtgtggccctggtttacggagatgtggagaccggctgcttgtgaccaagtgcggccgtttacgccataaggaacccggtagcggaagcggcggaggtgtgtactgggtcgacagccaacagaagcgatatgtgcctgtgaagggagaccacgtcatcgggatcgtcaccgccaaatcaggggatattttcaaggttgatgtaggcggatctgaacccgcttctcttagctacctgtccttcgaaggtgcaacaaagcgaaaccgtcccaacgtccaagccattagctcgcgtttgtag

SEQ ID NO: 19544 - DNA, 768 bp, Artificial Sequence
  derived and/or modified sequence
atgggaatcctgtcattcttacctgtccttgccactgagagtgactgggctgactgcaagtccccccagccttggggtcatatgcttctgtggacagctgtgctattcctgggtgagtcagggcccccagcagctcccccaaaggctgtgctgaaactcgagccccagtggatcaacgtgctccaggaggactctgtgactctgacatgccgggggactcacagccctgagagcgactccattcagtggttccacaatgggaatctcattcccacccacacgcagcccagctacaggttcaaggccaacaacaatgacagcggggagtacacgtgccagactggccagaccagcctcagcgaccctgtgcatctgactgtgctttctgagtggctggtgctccagacccctcacctggagttccaggagggagaaaccatcgtgctgaggtgccacagctggaaggacaagcctctggtcaaggtcacattcttccagaatggaaaatccaagaaattttcccgttcggatcccaacttctccatcccacaagcaaaccacagtcacagtggtgattaccactgcacaggaaacataggctacacgctgtactcatccaagcctgtgaccatcactgtccaagctcccagctcttcaccgatggggatcattgtggctgtggtcactgggattgctgtagcggccattgttgctgctgtagtggccttgatctactgcaggaaaaagcggatttcagtttccacttgg

SEQ ID NO: 19545 - DNA, 771 bp, Artificial Sequence
  derived and/or modified sequence
atgggtattttgtcattcctgcctgtcctggcaacagagtctgactgggcagactgtaagagccctcagccatggggccacatgttattgtggaccgcagtgctgttcctgggagagagcggtcccccagctgcacccccgaaagctgtccttaaactggagccccagtggattaacgtgttgcaggaggacagcgtcacccttacttgccggggcacgcactctccagaatctgactcaatccagtggttccacaatgggaaccttattcccacccacacacaaccctcatataggttcaaagcaaataataatgactctggtgaatatacctgtcagacaggccaaacctcccttagtgacccagtccacttgaccgtgctgtccgagtggctagttctgcagacgcctcacctggaatttcaggaaggcgagacaatcgtattaagatgccactcttggaaagacaaaccacttgtgaaggttaccttttttcagaatggaaagagtaaaaaattttcgcggtcggacccgaatttctccatccctcaggctaatcattcccattctggtgactatcactgtaccgggaacattggttacactctgtactccagcaagcctgtcaccatcaccgtgcaagctccgagttcatcccccatgggcatcatcgttgctgtggtaacgggaattgcagtagccgctattgtggccgctgtggttgcgctaatctattgcagaaagaagagaatctccgttagcacctggtag

SEQ ID NO: 19546 - DNA, 771 bp, Artificial Sequence
  derived and/or modified sequence
atgggcatcctgtccttcctgcctgtgctggccacagaaagtgactgggccgactgcaagagcccccagccctggggccacatgctgctgtggacagctgtgctcttcctgggggagagcggccccccagctgccccacccaaggctgtgctgaagctggagccccagtggatcaacgtgctgcaggaggacagcgtgaccctgacctgccggggcacccacagccctgagagtgacagcatccagtggttccacaacggcaacctgatccccacccacacccagcccagctaccgcttcaaggccaacaacaatgattctggagagtacacctgccagacaggccagaccagcctgagtgaccctgtgcacctgactgtgctgtctgagtggctggtgctgcagaccccccacctggagttccaggagggggagaccatcgtgctgcgctgccacagctggaaggacaagcccctggtgaaggtgaccttcttccagaatggcaagagcaagaagttcagcagaagtgaccccaacttcagcatcccccaggccaaccacagccacagcggggactaccactgcaccggcaacatcggctacaccctgtacagcagcaagcctgtgaccatcaccgtgcaggcccccagcagcagccccatgggcatcatcgtggccgtggtgactggaattgctgtggccgccatcgtggccgctgtggtggccctgatctactgcaggaagaagaggatctctgtgtccacctggtag

SEQ ID NO: 19547 - DNA, 771 bp, Artificial Sequence
  derived and/or modified sequence
atgggcatcctgagcttcctgcccgtgctggccaccgagagcgactgggccgattgcaaaagccctcagccgtgggggcatatgttgctgtggacagccgttctgttcctgggagagtctgggccccctgccgcccctcccaaagccgtgctgaagctggagcctcagtggatcaatgtactgcaggaagacagtgtgaccctgacctgtcggggcacccacagcccggaatccgactctattcagtggtttcacaatggtaatctcatcccgacccatacacagccgtcttatcgtttcaaagccaataacaatgattcgggggaatacacctgccaaactgggcagacctcactctcagatcccgttcacttgacagtgctgagcgagtggctggtgctgcagaccccgcaccttgagttccaggaaggcgagaccatcgtactgaggtgccactcctggaaggacaagcccttggtgaaggttactttttttcagaacgggaagtccaaaaaattctcccggagtgacccaaacttttccattccccaggccaatcattcacatagtggtgattaccattgcaccgggaatattggatacaccctgtattctagtaaaccagtaaccatcaccgttcaggctccttcctcttccccgatggggattatcgtggcagtagtgaccggcatcgccgttgctgccattgtcgctgcggtcgttgctctgatttactgcaggaaaaagcgcatcagcgtttcaacttggtag

SEQ ID NO: 19548 - DNA, 771 bp, Artificial Sequence
  derived and/or modified sequence
atgggaatcctgtcgtttctcccagtactggcaactgaatccgattgggctgattgtaagagtccccagccctggggccacatgcttctgtggacagccgtactttttctgggggaaagtgggcctcctgccgcaccacccaaagcagtgttgaagctcgaaccacagtggattaacgtcctccaggaggactccgtcactctcacttgtcggggaactcatagcccggaaagcgattcaatacaatggttccacaacgggaacctgatacccactcacacgcagccaagttatcggttcaaggccaataacaatgattctggcgaatacacctgccagaccggccaaactagtctcagcgaccccgtgcacctgaccgtgctttctgaatggctagtgctccagaccccacatctggagttccaggaaggagaaactatcgtacttcggtgccactcttggaaagataaacctctcgtaaaggtgactttcttccagaacggcaaatccaagaagtttagccggagtgacccaaacttttccattccacaggcaaatcatagccacagcggagactatcattgcactggcaacattgggtacaccctgtactccagcaaacctgtgacaattactgtacaggctccatcgtccagcccaatgggaatcatcgtcgccgtcgtcaccgggattgctgtggcagcaatagtggcagcagttgttgcactcatctactgccgcaagaagcgtattagtgtgtctacctggtag

SEQ ID NO: 19549 - DNA, 771 bp, Artificial Sequence
  derived and/or modified sequence
atgggcatcctgagcttcctgcccgtgctggccaccgagagcgactgggccgactgcaagagcccccagccctggggccacatgctgctgtggaccgccgtgctgttcctgggcgagagcggcccccccgccgccccccccaaggccgtgctgaagctggagccccagtggatcaacgtgctgcaggaggacagcgtgaccctgacctgcagaggcacccacagccccgagagcgacagcatccagtggttccacaacggcaacctgatccccacccacacccagcccagctacagattcaaggccaacaacaacgacagcggcgagtacacctgccagaccggccagaccagcctgagcgaccccgtgcacctgaccgtgctgagcgagtggctggtgctgcagaccccccacctggagttccaggagggcgagaccatcgtgctgagatgccacagctggaaggacaagcccctggtgaaggtgaccttcttccagaacggcaagagcaagaagttcagcagaagcgaccccaacttcagcatcccccaggccaaccacagccacagcggcgactaccactgcaccggcaacatcggctacaccctgtacagcagcaagcccgtgaccatcaccgtgcaggcccccagcagcagccccatgggcatcatcgtggccgtggtgaccggcatcgccgtggccgccatcgtggccgccgtggtggccctgatctactgcagaaagaagagaatcagcgtgagcacctggtag

SEQ ID NO: 19550 - protein, 291 aa, Artificial Sequence
  derived and/or modified sequence
MGILSFLPVLATESDWADCKSPQPWGHMLLWTAVLFLAPVAGTPAAPPKAVLKLEPQWINVLQEDSVTLTCRGTHSPESDSIQWFHNGNLIPTHTQPSYRFKANNNDSGEYTCQTGQTSLSDPVHLTVLSEWLVLQTPHLEFQEGETIVLRCHSWKDKPLVKVTFFQNGKSKKFSRSDPNFSIPQANHSHSGDYHCTGNIGYTLYSSKPVTITVQAPSSSPMGIIVAVVTGIAVAAIVAAVVALIYCRKKRISANPTNPDEADKVGAENTITYSLLMHPDALEEPDDQNRI

SEQ ID NO: 19551 - protein, 256 aa, Artificial Sequence
  derived and/or modified sequence
MGILSFLPVLATESDWADCKSPQPWGHMLLWTAVLFLGESGPPAAPPKAVLKLEPQWINVLQEDSVTLTCRGTHSPESDSIQWFHNGNLIPTHTQPSYRFKANNNDSGEYTCQTGQTSLSDPVHLTVLSEWLVLQTPHLEFQEGETIVLRCHSWKDKPLVKVTFFQNGKSKKFSRSDPNFSIPQANHSHSGDYHCTGNIGYTLYSSKPVTITVQAPSSSPMGIIVAVVTGIAVAAIVAAVVALIYCRKKRISVSTW

SEQ ID NO: 19552 - DNA, 1440 bp, Artificial Sequence
  derived and/or modified sequence
tccagaatttgtttgccctctagggtagaatccgccaagctttgagagaaggctgtgactgctgtgctctgggcgccagctcgctccagggagtgatgggaatcctgtcattcttacctgtccttgccactgagagtgactgggctgactgcaagtccccccagccttggggtcatatgcttctgtggacagctgtgctattcctggctcctgttgctgggacacctgcagctcccccaaaggctgtgctgaaactcgagccccagtggatcaacgtgctccaggaggactctgtgactctgacatgccgggggactcacagccctgagagcgactccattcagtggttccacaatgggaatctcattcccacccacacgcagcccagctacaggttcaaggccaacaacaatgacagcggggagtacacgtgccagactggccagaccagcctcagcgaccctgtgcatctgactgtgctttctgagtggctggtgctccagacccctcacctggagttccaggagggagaaaccatcgtgctgaggtgccacagctggaaggacaagcctctggtcaaggtcacattcttccagaatggaaaatccaagaaattttcccgttcggatcccaacttctccatcccacaagcaaaccacagtcacagtggtgattaccactgcacaggaaacataggctacacgctgtactcatccaagcctgtgaccatcactgtccaagctcccagctcttcaccgatggggatcattgtggctgtggtcactgggattgctgtagcggccattgttgctgctgtagtggccttgatctactgcaggaaaaagcggatttcagccaatcccactaatcctgatgaggctgacaaagttggggctgagaacacaatcacctattcacttctcatgcacccggatgctctggaagagcctgatgaccagaaccgtatttagtctccattgtcttgcattgggatttgagaagaaaatcagagagggaagatctggtatttcctggcctaaattccccttggggaggacagggagatgctgcagttccaaaagagaaggtttcttccagagtcatctacctgagtcctgaagctccctgtcctgaaagccacagacaatatggtcccaaataaccgactgcaccttctgtgcttcagctcttcttgacatcaaggctcttccgttccacatccacacagccaatccaattaatcaaaccactgttattaacagataatagcaacttgggaaatgcttatgttacaggttacgtgagaacaatcatgtaaatctatatgatttcagaaatgttaaaatagactaacctctaccagcacattaaaagtgattgtttctgggtgataaaattattgatgatttttattttctttatttttctataaagatcata

SEQ ID NO: 19553 - DNA, 2100 bp, Artificial Sequence
  derived and/or modified sequence
agaacatttctttttcacttcccctttcagactccagaatttgtttgccctctagggtagaatccgccaagctttgagagaaggctgtgactgctgtgctctgggcgccagctcgctccagggagtgatgggaatcctgtcattcttacctgtccttgccactgagagtgactgggctgactgcaagtccccccagccttggggtcatatgcttctgtggacagctgtgctattcctggctcctgttgctgggacacctgcagctcccccaaaggctgtgctgaaactcgagccccagtggatcaacgtgctccaggaggactctgtgactctgacatgccgggggactcacagccctgagagcgactccattcagtggttccacaatgggaatctcattcccacccacacgcagcccagctacaggttcaaggccaacaacaatgacagcggggagtacacgtgccagactggccagaccagcctcagcgaccctgtgcatctgactgtgctttctgagtggctggtgctccagacccctcacctggagttccaggagggagaaaccatcgtgctgaggtgccacagctggaaggacaagcctctggtcaaggtcacattcttccagaatggaaaatccaagaaattttcccgttcggatcccaacttctccatcccacaagcaaaccacagtcacagtggtgattaccactgcacaggaaacataggctacacgctgtactcatccaagcctgtgaccatcactgtccaagctcccagctcttcaccgatggggatcattgtggctgtggtcactgggattgctgtagcggccattgttgctgctgtagtggccttgatctactgcaggaaaaagcggatttcagccaatcccactaatcctgatgaggctgacaaagttggggctgagaacacaatcacctattcacttctcatgcacccggatgctctggaagagcctgatgaccagaaccgtatttagtctccattgtcttgcattgggatttgagaagaaaatcagagagggaagatctggtatttcctggcctaaattccccttggggaggacagggagatgctgcagttccaaaagagaaggtttcttccagagtcatctacctgagtcctgaagctccctgtcctgaaagccacagacaatatggtcccaaataaccgactgcaccttctgtgcttcagctcttcttgacatcaaggctcttccgttccacatccacacagccaatccaattaatcaaaccactgttattaacagataatagcaacttgggaaatgcttatgttacaggttacgtgagaacaatcatgtaaatctatatgatttcagaaatgttaaaatagactaacctctaccagcacattaaaagtgattgtttctgggtgataaaattattgatgatttttattttctttatttttctataaagatcatatattacttttataataaaacattataaaaacaacattctgtttaccttttcaaggctgtattggttggagtgtagactgaactgcctggggtctgtttctcttcagtgatgagactcttaggaaggcaggaatggataggatagggggaggagaggagagatggggatttagaatgtagagtgagtgccccttttcttaaaactgaatacagtcacgcaccacataatgatgtttagttcaacaacagactgcatatatgatggtgatcccataaaattataataccatatttctattgtaccttttctattcctatgtttagatatatgagtacttaccattgtgttacaattgcctaaagtattcagtacagtagcatgctgtacaggtttgtagcctaggggcaataggctatacgctacagcctaggtgtgtagtaggccacaccatttaggtttgtataagtacctgctatgatgttcacacaacaaaattgcctgcatttctcaaaatgtatccccatatttcaacaatgcatgactgtactcttctgccaatgaccttgtattcttgtttccatgtcttcttctctttcctcctatggcaaataaaacactgttttgcaac

SEQ ID NO: 19554 - DNA, 876 bp, Artificial Sequence
  derived and/or modified sequence
atgggcattctgagttttctccctgtgctggcgactgagtccgattgggcggactgtaagagcccccaaccatggggacatatgctgctctggaccgctgtcctgttcctggcccccgttgcgggcactcctgcggcccctccaaaggctgtcctcaagctggagccacagtggattaacgttttgcaggaggatagcgtgaccctcacctgtcgaggaacacacagccctgagtccgattctatccaatggttccataacggcaacctcattccaacccacacccaacctagctaccggttcaaggccaacaataatgacagcggcgaatacacatgtcagactggtcaaacttccctctctgacccagtccacctgaccgtgctgtcagagtggctcgtcctgcaaaccccacacctcgaattccaagagggagagactatagtcttaagatgccacagctggaaggacaagcctctggtcaaagtgactttttttcagaatggaaagtctaaaaaattctcccggagcgaccctaattttagcatccctcaggccaatcatagtcatagcggggactatcactgtactggaaatatcggctacaccctgtattcctcaaaacccgtcacaattacagtccaggctcctagttcctcccctatggggattattgtcgcagttgtgactggaattgccgtcgcagctatcgtcgctgcggtcgtggcccttatttactgcagaaaaaaacggatttccgctaaccctacaaatccagatgaagcagacaaagtgggtgccgagaacacgatcacatacagtctcctgatgcaccctgacgctctggaggaacctgatgaccagaacagaatttag

SEQ ID NO: 19555 - DNA, 876 bp, Artificial Sequence
  derived and/or modified sequence
atggggattctgtcgttcctgcctgtgttggctaccgaatcagactgggcagattgcaaaagcccccaaccttggggtcacatgctcctctggaccgcagtgttattcctggctcctgtggcgggtactcctgccgcccccccaaaggctgtgctgaaactggagccacagtggatcaatgtcttgcaggaggattctgtaaccctgacctgtcgagggactcattctccggagtccgatagtattcaatggttccacaatggcaatttaatcccaacccacactcagccatcttacaggttcaaagcaaataataatgattctggtgagtacacctgtcaaacaggccagactagtttgtccgatccagtgcacctcaccgtcctctcagagtggctcgttcttcagacgcctcatcttgaatttcaggagggagagaccattgtccttcggtgccactcctggaaagacaagccactggtcaaagtgaccttctttcagaatgggaagtcaaaaaagttcagccgcagcgaccctaacttctcaattccacaggcgaaccattctcactccggcgactatcattgcactggcaacatcgggtatacactgtactcaagcaagccagtgactatcacagttcaagcccccagttcctcccccatgggaattatcgtggcggttgttacaggaatcgccgtggctgcaatcgtcgctgctgtggtggccctcatttactgccgcaagaaacgcatttctgccaacccgactaaccccgacgaggctgacaaagtcggtgccgaaaacaccatcacgtactctctcttgatgcatcctgatgcactggaagaacccgacgaccaaaaccgcatctag

SEQ ID NO: 19556 - DNA, 876 bp, Artificial Sequence
  derived and/or modified sequence
atgggcatcctgtccttcctgcctgtgctggccacagaaagtgactgggccgactgcaagagcccccagccctggggccacatgctgctgtggacagctgtgctcttcctggcccctgtggccggcaccccagctgccccacccaaggctgtgctgaagctggagccccagtggatcaacgtgctgcaggaggacagcgtgaccctgacctgccggggcacccacagccctgagagtgacagcatccagtggttccacaatggaaacctgatccccacccacacccagcccagctaccgcttcaaggccaacaacaatgacagcggggagtacacctgccagacaggccagaccagcctgagtgaccctgtgcacctgactgtgctgtctgagtggctggtgctgcagaccccccacctggagttccaggagggggagaccatcgtgctgcgctgccacagctggaaggacaagcccctggtgaaggtgaccttcttccagaatggcaagagcaagaagttcagcagaagtgaccccaacttcagcatcccccaggccaaccacagccacagcggggactaccactgcaccggcaacatcggctacaccctgtacagcagcaagcctgtgaccatcaccgtgcaggcccccagcagcagccccatgggcatcatcgtggccgtggtgactggaattgctgtggccgccatcgtggccgctgtggtggccctgatctactgcaggaagaagaggatcagcgccaaccccaccaacccagatgaggccgacaaggtgggcgctgagaacaccatcacctacagcctgctgatgcacccagatgccctggaggagccagatgaccagaaccgcatctag

SEQ ID NO: 19557 - DNA, 876 bp, Artificial Sequence
  derived and/or modified sequence
atgggcatcctgagcttcctgcccgtgctggccaccgagagcgactgggccgactgtaagtcaccccagccctggggccatatgcttctgtggaccgcagtgctcttcctggcgcccgtagcaggaacacccgctgcacccccaaaggccgtgctcaaactggagccgcagtggatcaatgtcctgcaagaagactccgtgactctgacctgtagagggactcactcaccagagagtgattctattcagtggtttcacaacggcaacctgattccaactcacacacagccatcttatcgcttcaaggcaaacaacaacgatagcggcgagtatacgtgccaaaccggacagacgagtctcagcgacccggtgcacttgaccgtgctgtccgagtggttggtgctgcaaaccccacacttggagtttcaggagggagagaccatcgtgttgcggtgccacagctggaaggacaaaccgctagtcaaggtgactttcttccagaacgggaaaagcaagaagttttcccggtctgatccaaacttcagcattccccaagctaatcactcccattcgggcgattatcactgtacaggcaatatcgggtacacgctgtacagtagcaaaccagtcactatcacagtgcaagccccgtccagctcaccgatgggcatcattgtagctgtcgtgactggcattgccgtggctgcaatcgtggccgccgtcgtggctttgatctactgcaggaaaaagcgcatctctgcaaaccccacaaacccagatgaagcagataaagtgggtgcagagaacacaattacatattctcttctgatgcatcccgacgcgctggaggaaccagacgaccagaaccggatctag

SEQ ID NO: 19558 - DNA, 876 bp, Artificial Sequence
  derived and/or modified sequence
atgggcatcctgagcttcctgcccgtgctggccaccgagagcgactgggcagactgcaagagcccccagccgtggggccacatgctgctctggacggcggtgctctttctggctcctgttgccggaacacccgcggcgcctccgaaagccgtgctcaaattggaaccccaatggattaacgtgctgcaggaggactccgtgacgctcacttgtcgcggtacgcactcccccgaatctgatagtatacagtggtttcataacggaaatctgatcccaacccatacccaaccatcttatcgatttaaggctaacaacaacgattctggggagtacacttgccaaactggccagacatccctgagcgatcccgtgcacctcaccgtgttatccgagtggctcgtgctgcaaaccccccacctcgagttccaggagggtgaaacgatagttctgcgctgtcactcctggaaagataaaccactggtgaaagtcaccttcttccagaacggcaagtcgaaaaagttcagcagaagtgacccaaacttttccattcctcaggcaaaccactcacactcaggggactaccactgtaccggaaatataggttatacgctgtatagttcgaaacccgtcaccataactgtccaggctccctcgagtagccccatgggaattattgtggccgttgtgacagggatagctgtagccgccatcgtagcagccgtggttgcgcttatttactgtcgcaagaagcgcatcagcgccaatccaacaaaccccgacgaggccgacaaagttggcgctgaaaacacaatcacatacagtctcctcatgcacccagatgcattagaggagccagacgaccagaatcggatatag

SEQ ID NO: 19559 - DNA, 876 bp, Artificial Sequence
  derived and/or modified sequence
atgggcatcctgtcctttctgcctgtcctcgcgacggaatcggattgggcagactgtaaaagccctcaaccctgggggcacatgctcctatggacagcagttcttttcttagcgccagtggccggtactccggctgctcctcccaaagcagtgctgaagctcgaaccccagtggatcaatgtgttgcaagaggattcagtgacacttacatgcagggggacacactccccggaaagcgactcgatccagtggtttcataatgggaacctcattccaacacatacccagccatcttacaggtttaaagcgaacaacaatgactccggagagtacacctgccagacagggcagaccagcctctccgatcctgtgcacctgaccgtgctgtccgaatggctcgtcctgcaaacccctcatctggagttccaagaaggcgaaaccattgtgctccgctgccacagttggaaagacaagcctcttgtgaaagttacattcttccagaacgggaagtccaagaaattctcgaggtcagaccctaacttttccatcccccaggcaaatcacagtcactcaggtgactaccactgcaccggaaacatcggctataccctgtatagcagcaagccagttactataactgtgcaagcgcctagttcgtccccaatggggatcattgtcgcggtggttactggcatcgccgtagcagctatcgtggccgctgttgtggcattaatctactgccgtaagaagcggatcagcgctaatcccaccaatcctgatgaagccgataaggtgggggcagaaaacacaattacgtactctctgctgatgcaccccgacgcgcttgaagaaccagatgatcagaaccgaatttag

SEQ ID NO: 19560 - DNA, 876 bp, Artificial Sequence
  derived and/or modified sequence
atggggatactgtcctttcttcccgtgcttgcaactgagtccgactgggcggactgcaaaagcccccaaccgtgggggcatatgctgctgtggacggccgtgctgttcctggcccctgtcgccggtacacccgcagcccctcccaaagcggtgctgaaactcgagccacagtggatcaatgtgctccaagaggatagcgtcaccttgacgtgtcggggtactcactcccctgaatctgattccattcaatggttccacaacgggaacctgatccccacccatacccagccatcatatagatttaaggccaataacaacgactccggagaatacacatgccagaccggacagacctccctgagcgatccagtgcacctaacggtgttgtcagaatggttggtgctgcagaccccgcacttggaattccaggagggagagactattgtgctccggtgccattcatggaaagataagccgcttgtgaaagtgacattttttcagaatggcaaatcaaaaaagttctcgagaagtgatcccaatttcagcatccctcaagcgaaccacagccactcaggcgattaccattgcaccgggaacataggctacaccctgtattcttcaaagcccgtgacaattacggttcaggcaccatccagcagcccaatgggaatcatcgttgccgtggtcactgggatagctgtagcagccatcgttgctgcagtcgtggccctcatctactgccgaaaaaaacggatctcggcaaatcccacaaacccagacgaggcagataaagtgggcgcagaaaatactataacttactccttgctgatgcatcctgatgcactggaggaaccagacgatcaaaataggatatag

SEQ ID NO: 19561 - DNA, 876 bp, Artificial Sequence
  derived and/or modified sequence
atgggcatcctgagcttcctgcccgtgctggccaccgagagcgactgggccgactgcaagagcccccagccctggggccacatgctgctgtggaccgccgtgctgttcctggcccccgtggccggcacccccgccgccccccccaaggccgtgctgaagctggagccccagtggatcaacgtgctgcaggaggacagcgtgaccctgacctgcagaggcacccacagccccgagagcgacagcatccagtggttccacaacggcaacctgatccccacccacacccagcccagctacagattcaaggccaacaacaacgacagcggcgagtacacctgccagaccggccagaccagcctgagcgaccccgtgcacctgaccgtgctgagcgagtggctggtgctgcagaccccccacctggagttccaggagggcgagaccatcgtgctgagatgccacagctggaaggacaagcccctggtgaaggtgaccttcttccagaacggcaagagcaagaagttcagcagaagcgaccccaacttcagcatcccccaggccaaccacagccacagcggcgactaccactgcaccggcaacatcggctacaccctgtacagcagcaagcccgtgaccatcaccgtgcaggcccccagcagcagccccatgggcatcatcgtggccgtggtgaccggcatcgccgtggccgccatcgtggccgccgtggtggccctgatctactgcagaaagaagagaatcagcgccaaccccaccaaccccgacgaggccgacaaggtgggcgccgagaacaccatcacctacagcctgctgatgcaccccgacgccctggaggagcccgacgaccagaacagaatctag

SEQ ID NO: 19562 - protein, 230 aa, Artificial Sequence
  derived and/or modified sequence
MLKNPYTIKKQPLHQFVQRPLFPLPAAFYHPVRYMFIQTQDTPNPNSLKFIPGKPVLETRTMDFPTPAAAFRSPLARQLFRIEGVKSVFFGPDFITVTKENEELDWNLLKPDIYATIMDFFASGLPLVTEETPSGEAGSEEDDEVVAMIKELLDTRIRPTVQEDGGDVIYKGFEDGIVQLKLQGSCTSCPSSIITLKNGIQNMLQFYIPEVEGVEQVMDDESDEKEANSP

SEQ ID NO: 19563 - protein, 113 aa, Artificial Sequence
  derived and/or modified sequence
MDFFASGLPLVTEETPSGEAGSEEDDEVVAMIKELLDTRIRPTVQEDGGDVIYKGFEDGIVQLKLQGSCTSCPSSIITLKNGIQNMLQFYIPEVEGVEQVMDDESDEKEANSP

SEQ ID NO: 19564 - protein, 254 aa, Artificial Sequence
  derived and/or modified sequence
MAATARRGWGAAAVAAGLRRRFCHMLKNPYTIKKQPLHQFVQRPLFPLPAAFYHPVRYMFIQTQDTPNPNSLKFIPGKPVLETRTMDFPTPAAAFRSPLARQLFRIEGVKSVFFGPDFITVTKENEELDWNLLKPDIYATIMDFFASGLPLVTEETPSGEAGSEEDDEVVAMIKELLDTRIRPTVQEDGGDVIYKGFEDGIVQLKLQGSCTSCPSSIITLKNGIQNMLQFYIPEVEGVEQVMDDESDEKEANSP

SEQ ID NO: 19565 - protein, 99 aa, Artificial Sequence
  derived and/or modified sequence
MDFFASGLPLVTEETPSGEAGSEEDDEVVAMIKELLDTRIRPTVQEDGGDVIYKGFEDGIVQLKLQGSCTSCPSSIITLKNGIQNMLQFYIPEVEGVEQ

SEQ ID NO: 19566 - protein, 96 aa, Artificial Sequence
  derived and/or modified sequence
MDFFASGLPLVTEETPSGEAGSEEDDEVVAMIKELLDTRIRPTVQEDGGDVIYKGFEDGIVQLKLQGSCTSCPSSIITLKNGIQNMLQFYIPEVEG

SEQ ID NO: 19567 - DNA, 765 bp, Artificial Sequence
  derived and/or modified sequence
atggcagccaccgccagacggggatggggcgccgccgcagtggcggccgggctgaggcggagattttgtcatatgctgaagaacccttacacaatcaaaaagcagccattacaccagttcgttcagcgccccctattcccactgccggcagccttctaccaccctgtgagatacatgttcatacagactcaggacaccccaaatcctaattctttgaagttcatcccgggcaaacctgtgctggaaactcgtacaatggactttccaaccccggccgccgcctttcgatctcctttggctagacagctttttaggattgagggagtgaaatcagtgttcttcggtcccgacttcatcacagttactaaagaaaatgaggagctcgattggaatctgctgaagccagacatttacgctacgattatggattttttcgccagtggactgccacttgtgactgaagagaccccgtcaggagaggccgggtccgaggaagacgatgaagtggtggccatgattaaagagctgctggatacaagaattcgccccacagttcaggaggacggcggcgatgtgatctataaaggatttgaagacggcattgtgcagttgaaactgcagggttcctgcaccagctgtccatcctcaattatcacgctgaagaacggaatccagaatatgctgcagttctatattcctgaagtggagggagtggagcaggtgatggacgatgagtccgacgagaaggaagcgaattccccttag

SEQ ID NO: 19568 - DNA, 765 bp, Artificial Sequence
  derived and/or modified sequence
atggccgccacagcccggcggggctggggcgctgctgctgtggccgccggcctgcggcggcgcttctgccacatgctgaagaacccctacaccatcaagaagcagcccctgcaccagtttgtgcagaggcccctcttccccctgcctgctgccttctaccaccctgtgcgctacatgttcatccagacccaggacacccccaaccccaacagcctgaagttcatccctgggaagcctgtgctggagaccaggaccatggacttccccaccccagctgctgccttccgcagccccctggcccggcagctgttccgcatcgagggcgtgaagtctgtgttcttcggccctgacttcatcaccgtgaccaaggaaaatgaggagctggactggaacctgctgaagccagacatctatgccaccatcatggacttctttgccagcggcctgcccctggtgacagaggagacccccagcggggaggccggctctgaagaagatgatgaggtggtggccatgatcaaggagctgctggacacccgcatccggcccaccgtgcaggaggatggaggagatgtgatctacaagggctttgaagatggcatcgtgcagctgaagctgcagggcagctgcaccagctgccccagcagcatcatcaccctgaagaatggcatccagaacatgctgcagttctacatccctgaggtggagggcgtggagcaggtgatggatgatgaaagtgatgagaaggaggccaacagcccctag

SEQ ID NO: 19569 - DNA, 765 bp, Artificial Sequence
  derived and/or modified sequence
atggccgccaccgcccggcggggctggggcgccgccgccgtggccgcagggctgaggagacggttctgccacatgctgaaaaacccctatactattaaaaagcagcctctgcaccagtttgtgcagcgtcccctgtttcctctcccagccgccttttaccaccccgtgcggtacatgtttatccaaacacaagacactccgaaccctaatagtctgaagttcatcccagggaagccggtactagaaacaaggacaatggattttcccacccccgcggctgcgttcaggtctccactggcacggcaactcttcagaattgaaggtgtcaagtcagttttctttggccctgacttcatcactgttaccaaggagaacgaagaattggattggaatctgttgaaacctgacatctacgctacaattatggactttttcgccagtggcctgccactcgtcaccgaggaaaccccatcaggcgaagccggtagtgaagaagatgatgaggtggttgctatgatcaaggagctgctagacacacggatacgtcctactgttcaagaagacggaggtgatgttatctacaagggctttgaggatgggatcgtgcaactgaaacttcagggatcctgcacgtcctgccccagtagcatcattactctgaaaaacggaattcagaacatgttgcagttctatatacccgaggtggagggagtggaacaggtgatggacgacgaatccgacgaaaaggaagccaatagcccatag

SEQ ID NO: 19570 - DNA, 1034 bp, Artificial Sequence
  derived and/or modified sequence
gcgcagatctttcgtggttctgtcagggagacccttaggcactccggactaagatggcggcgacggccaggcggggctggggagctgcggctgttgccgccgggctgcgcaggcggtaggtgacgagcctggagctccgaataggtgtgccgctgggcttagccagcggagcggtcgccgccttgcagaccctctctcgaggcgggttctgtcatatgttgaagaatccatacaccattaagaaacagcctctgcatcagtttgtacaaagaccacttttcccactacctgcagccttttatcacccagtgagatacatgtttattcaaacacaagataccccaaatccaaacagcttaaagtttataccaggaaaaccagttcttgagacaaggaccatggattttcccaccccagctgcagcatttcgctcccctctggctaggcagttatttaggattgaaggagtaaaaagtgtcttctttggaccagatttcatcactgtcacaaaggaaaatgaagaattagactggaatttactgaaaccagatatttatgcaacaatcatggacttctttgcatctggcttacccctggttactgaggaaacaccttcaggagaagcaggatctgaagaagatgatgaagttgtggcaatgattaaggaattgttagatactagaatacggccaactgtgcaggaagatggaggggatgtaatctacaaaggctttgaagatggcattgtacagctgaaactccagggttcttgtaccagctgccctagttcaatcattactctgaaaaatggaattcagaacatgctgcagttttatattccggaggtagaaggcgtagaacaggttatggatgatgaatcagatgaaaaagaagcaaactcaccttaaaataatctggattttctttgggcataacagtcagacttgttgataatatatatcaagtttttattattaatatgctgaggaacttgaagattaataaaatatgctcttcagagaatgatatataaa

SEQ ID NO: 19571 - DNA, 1467 bp, Artificial Sequence
  derived and/or modified sequence
gggaaaggttccccggcctctcttggtcagggtgacgcagtagcctgcaaacctcggcgcgtaggccaccgcacttatccgcagcaggaccgcccgcagccggtagggtgggctcttcccagtgcccgcccagctaccggccagcctgcggctgcgcagatctttcgtggttctgtcagggagacccttaggcactccggactaagatggcggcgacggccaggcggggctggggagctgcggctgttgccgccgggctgcgcaggcggttctgtcatatgttgaagaatccatacaccattaagaaacagcctctgcatcagtttgtacaaagaccacttttcccactacctgcagccttttatcacccagtgagatacatgtttattcaaacacaagataccccaaatccaaacagcttaaagtttataccaggaaaaccagttcttgagacaaggaccatggattttcccaccccagctgcagcatttcgctcccctctggctaggcagttatttaggattgaaggagtaaaaagtgtcttctttggaccagatttcatcactgtcacaaaggaaaatgaagaattagactggaatttactgaaaccagatatttatgcaacaatcatggacttctttgcatctggcttacccctggttactgaggaaacaccttcaggagaagcaggatctgaagaagatgatgaagttgtggcaatgattaaggaattgttagatactagaatacggccaactgtgcaggaagatggaggggatgtaatctacaaaggctttgaagatggcattgtacagctgaaactccagggttcttgtaccagctgccctagttcaatcattactctgaaaaatggaattcagaacatgctgcagttttatattccggaggtagaaggcgtagaacaggttatggatgatgaatcagatgaaaaagaagcaaactcaccttaaaataatctggattttctttgggcataacagtcagacttgttgataatatatatcaagtttttattattaatatgctgaggaacttgaagattaataaaatatgctcttcagagaatgatatataaatattgcatgtttgctttacctcatatgagttatttataacctcttgaatcatcttctgtacacgtggattttatccaaggatatttttatttttgtccctcatttcccatggctctttctttgcatatgtgtgaaggagtttaaaatacatttccccccatctaatttatttacttttttccatacaggaagaaacagaatgctttttagaatattctaaaatagctttttgtgaaatatctaaaactatttttactgaagtttttagcttaagaaacagctaaacaagtctgttttaaaaatggtatctggctactagcccccaattaagtagcaaagaactgcttaagaccaaaaaaaagaaatcaaa

SEQ ID NO: 19572 - DNA, 765 bp, Artificial Sequence
  derived and/or modified sequence
atggccgctaccgcacgacgagggtggggcgcagccgctgtcgccgcaggattaagacgccgtttctgccacatgctgaagaacccctacaccatcaagaagcagccactgcaccagttcgtgcagcgccctctgttcccgctgccagccgctttttaccaccccgtaaggtacatgttcattcaaactcaggacacgcccaaccccaattctctcaaatttattcccggaaaacctgtgcttgaaactagaacaatggacttcccaacccccgcagccgcattccgcagtccactggcccgtcagctcttcaggatcgaaggggttaagagcgtttttttcggtcccgacttcataaccgtaaccaaagaaaatgaggagttagactggaacctgcttaagcccgatatttacgcgacgattatggacttcttcgccagtggtctcccgctcgtcaccgaggagacccctagtggagaggccggatccgaggaggacgacgaggtcgtcgccatgataaaggaactcctggacacacgcattcggcctaccgttcaagaagacgggggagacgtgatctataagggctttgaggatggtatcgtgcagctcaaactgcaaggttcatgtacaagctgcccttcctctatcattacactcaagaacggaattcagaacatgctgcagttttacattccagaggttgagggcgtggaacaggtcatggatgacgagagtgatgagaaggaagctaacagcccatag

SEQ ID NO: 19573 - DNA, 765 bp, Artificial Sequence
  derived and/or modified sequence
atggccgccaccgccagaagaggctggggcgccgccgccgtggccgccggcctgagaagaagattctgccacatgctgaagaacccctacaccatcaagaagcagcccctgcaccagttcgtgcagagacccctgttccccctgcccgccgccttctaccaccccgtgagatacatgttcatccagacccaggacacccccaaccccaacagcctgaagttcatccccggcaagcccgtgctggagaccagaaccatggacttccccacccccgccgccgccttcagaagccccctggccagacagctgttcagaatcgagggcgtgaagagcgtgttcttcggccccgacttcatcaccgtgaccaaggagaacgaggagctggactggaacctgctgaagcccgacatctacgccaccatcatggacttcttcgccagcggcctgcccctggtgaccgaggagacccccagcggcgaggccggcagcgaggaggacgacgaggtggtggccatgatcaaggagctgctggacaccagaatcagacccaccgtgcaggaggacggcggcgacgtgatctacaagggcttcgaggacggcatcgtgcagctgaagctgcagggcagctgcaccagctgccccagcagcatcatcaccctgaagaacggcatccagaacatgctgcagttctacatccccgaggtggagggcgtggagcaggtgatggacgacgagagcgacgagaaggaggccaacagcccctag

SEQ ID NO: 19574 - DNA, 342 bp, Artificial Sequence
  derived and/or modified sequence
atggattttttcgcctccggacttcccttagtgacagaggagacccccagcggcgaagctggctctgaagaggacgacgaggttgtagccatgatcaaggagctgctcgatacgcgcatacgacctaccgttcaggaggatggcggagatgtaatatataagggatttgaggatggtattgtccagctgaagctccaagggagctgcacctcatgtccgtcaagcataatcacgctgaagaatggcatccaaaacatgctgcagttttacattccagaggtcgagggagtcgaacaggttatggacgatgaaagtgatgaaaaggaggcgaattccccatag

SEQ ID NO: 19575 - DNA, 300 bp, Artificial Sequence
  derived and/or modified sequence
atggacttttttgcatcaggtctgccactggtgaccgaagagactccaagtggcgaggcaggctccgaggaggacgacgaagtcgtggctatgattaaggaactgttggacactagaataaggcctaccgtccaggaggatggaggcgacgtgatatataagggttttgaggatggaattgtgcagctgaaacttcaaggttcctgtacgtcctgtccttcttctattattactctgaaaaatggtatccagaacatgcttcagttttatattcctgaagtggagggtgtggagcaatag

SEQ ID NO: 19576 - DNA, 342 bp, Artificial Sequence
  derived and/or modified sequence
atggatttcttcgcctcgggtcttccactggtgactgaggaaacaccatcaggagaggcgggctcagaggaagacgatgaggtggttgctatgattaaagaactcctggacaccagaattagaccaactgtgcaggaagatggcggggatgtcatttataaagggtttgaggacggaatcgtgcaactgaaactacagggatcttgcactagttgtccttcaagtatcatcaccctgaagaatggcatccagaacatgttgcagttttatattcccgaggtagagggtgtggaacaggtgatggacgatgagtccgatgagaaggaggctaactccccatag

SEQ ID NO: 19577 - DNA, 291 bp, Artificial Sequence
  derived and/or modified sequence
atggactttttcgcctctgggttgcctctcgtgactgaagagaccccctcaggagaggccgggtcagaagaggacgatgaggttgtggccatgattaaagagttattggatacgagaatcaggcctacagtgcaggaagacgggggcgatgtgatctataagggcttcgaggacgggatagtgcagcttaagctacagggctcatgcactagctgtcccagttctatcataacactgaagaacgggatccaaaatatgttacagttttatattcctgaggtggagggctag

SEQ ID NO: 19578 - DNA, 342 bp, Artificial Sequence
  derived and/or modified sequence
atggacttctttgccagcggcctgcccctggtgacagaggagaccccatctggagaggccggcagcgaggaggatgatgaggtggtggccatgatcaaggagctgctggacacccgcatccggcccaccgtgcaggaggatggaggagatgtgatctacaagggctttgaagatggcatcgtgcagctgaagctgcagggcagctgcaccagctgccccagcagcatcatcaccctgaagaatggcatccagaacatgctgcagttctacatccctgaggtggagggcgtggagcaggtgatggatgatgaaagtgatgagaaggaggccaacagcccctag

SEQ ID NO: 19579 - DNA, 300 bp, Artificial Sequence
  derived and/or modified sequence
atggacttctttgccagcggcctgcccctggtgacagaggagaccccatctggagaggccggcagcgaggaggatgatgaggtggtggccatgatcaaggagctgctggacacccgcatccggcccaccgtgcaggaggatggaggagatgtgatctacaagggctttgaagatggcatcgtgcagctgaagctgcagggcagctgcaccagctgccccagcagcatcatcaccctgaagaatggcatccagaacatgctgcagttctacatccctgaggtggagggcgtggagcagtag

SEQ ID NO: 19580 - DNA, 291 bp, Artificial Sequence
  derived and/or modified sequence
atggacttctttgccagcggcctgcccctggtgacagaggagaccccatctggagaggccggcagcgaggaggatgatgaggtggtggccatgatcaaggagctgctggacacccgcatccggcccaccgtgcaggaggatggaggagatgtgatctacaagggctttgaagatggcatcgtgcagctgaagctgcagggcagctgcaccagctgccccagcagcatcatcaccctgaagaatggcatccagaacatgctgcagttctacatccctgaggtggagggctag

SEQ ID NO: 19581 - DNA, 342 bp, Artificial Sequence
  derived and/or modified sequence
atggacttcttcgccagcggcctgcccctggtgaccgaggagacccccagtggcgaggctggctccgaagaagatgacgaagtggtcgcaatgatcaaagagttactcgacacacgtattcgccctaccgtccaggaagacggcggggacgttatttataaagggtttgaggatggcatcgtacagctgaaactccagggctcttgtacttcgtgcccatcaagtattatcaccctcaaaaatgggatacaaaacatgctccagttttacatcccagaagtagagggggtggagcaggtcatggatgacgagagcgatgaaaaagaagcgaattcgccttag

SEQ ID NO: 19582 - DNA, 300 bp, Artificial Sequence
  derived and/or modified sequence
atggacttcttcgccagcggcctgcccctggtgaccgaggagaccccaagtggcgaggcagggtccgaagaagatgatgaagtggtcgccatgatcaaggaactgctcgatacaaggattaggcccactgtgcaggaggatggcggggatgtaatttataaagggtttgaagatggcattgtccagctcaagcttcaagggtcctgtaccagttgcccatcgtctattatcacacttaaaaacgggatccagaacatgctccagttctacattcctgaggtggaaggagtggagcagtag

SEQ ID NO: 19583 - DNA, 342 bp, Artificial Sequence
  derived and/or modified sequence
atggacttcttcgccagcggcctgcccctggtgaccgaggagaccccaagtggagaagctggatccgaggaagatgatgaagttgtggcaatgatcaaagaattgctggacacaaggatcagaccaaccgtgcaggaggatggtggggacgtcatctacaaagggttcgaggacggcatcgtacagttaaagttacaaggcagctgtaccagttgtcccagctcgattattacgctgaaaaatggcatccagaatatgcttcaattttacattcccgaggttgagggagtcgaacaagtcatggatgacgagtcggatgagaaggaagccaacagcccctag

SEQ ID NO: 19584 - DNA, 291 bp, Artificial Sequence
  derived and/or modified sequence
atggacttcttcgccagcggcctgcccctggtgaccgaggagaccccctccggtgaggcgggttctgaagaagatgacgaagtagtggctatgatcaaggagctgttggacacacggattagacccacagtacaggaggatggcggtgacgttatatacaagggcttcgaggacggcattgtccagctgaaactccagggctcatgcacctcttgcccatcgtccattataacattgaagaacggaattcagaacatgctccaattctatatccctgaagtggaggggtag

SEQ ID NO: 19585 - DNA, 342 bp, Artificial Sequence
  derived and/or modified sequence
atggactttttcgcaagcgggctgccattagttaccgaagagaccccctcaggcgaggccggttcggaagaagatgatgaagttgtggcaatgattaaggagttgctggatacccggatccggcctacggtgcaggaagatgggggtgacgtgatctacaaaggctttgaggacggaattgttcaacttaagctgcagggatcgtgcactagctgtccatcatccatcatcacacttaagaatggcatacagaatatgctccaattttatattcccgaggtggagggcgtcgagcaagtgatggatgacgagtcagacgagaaggaggcaaactccccctag

SEQ ID NO: 19586 - DNA, 300 bp, Artificial Sequence
  derived and/or modified sequence
atggacttctttgcttcagggctgcccctggtaacagaggagacccctagtggcgaagctggcagcgaggaagatgatgaagtggtagccatgattaaggagctgctggatacgcgtatcagaccaactgtccaagaggacggcggtgacgtgatttacaagggttttgaagacgggatcgttcagctcaaactgcagggctcctgcacttcctgtccatcatcaattattaccctcaagaacggcatccaaaacatgttacagttctacattcccgaggtcgaaggggtagaacagtag

SEQ ID NO: 19587 - DNA, 342 bp, Artificial Sequence
  derived and/or modified sequence
atggatttctttgcctccggcctcccactggtcaccgaggagaccccctccggcgaggccggtagcgaggaggacgatgaggttgtcgccatgatcaaggaactcctggacacgagaattaggcctactgtccaagaggatggaggagatgtgatctataaaggattcgaggatggaatagtgcaactgaaacttcagggcagctgcacttcgtgtcccagctccatcatcacgcttaagaatgggattcagaatatgctgcagttttacattcccgaagtcgagggcgtggaacaggtcatggacgacgaaagtgacgaaaaggaggctaattccccctag

SEQ ID NO: 19588 - DNA, 291 bp, Artificial Sequence
  derived and/or modified sequence
atggatttcttcgccagcggcttgcccttagtgactgaggagactccttctggggaggcaggcagtgaggaggacgatgaggtggtggcaatgatcaaagaactcctggatacaagaattagacctaccgtccaagaagacggtggagatgtaatctacaaaggcttcgaagacggcatcgtgcagcttaagctgcagggaagctgcacttcgtgtccctctagtattattaccctgaaaaacgggattcaaaacatgttgcagttttacatccctgaagtagaggggtag

SEQ ID NO: 19589 - DNA, 342 bp, Artificial Sequence
  derived and/or modified sequence
atggacttcttcgccagcggcctgcccctggtgaccgaggagacccccagcggcgaggccggcagcgaggaggacgacgaggtggtggccatgatcaaggagctgctggacaccagaatcagacccaccgtgcaggaggacggcggcgacgtgatctacaagggcttcgaggacggcatcgtgcagctgaagctgcagggcagctgcaccagctgccccagcagcatcatcaccctgaagaacggcatccagaacatgctgcagttctacatccccgaggtggagggcgtggagcaggtgatggacgacgagagcgacgagaaggaggccaacagcccctag

SEQ ID NO: 19590 - DNA, 300 bp, Artificial Sequence
  derived and/or modified sequence
atggacttcttcgccagcggcctgcccctggtgaccgaggagacccccagcggcgaggccggcagcgaggaggacgacgaggtggtggccatgatcaaggagctgctggacaccagaatcagacccaccgtgcaggaggacggcggcgacgtgatctacaagggcttcgaggacggcatcgtgcagctgaagctgcagggcagctgcaccagctgccccagcagcatcatcaccctgaagaacggcatccagaacatgctgcagttctacatccccgaggtggagggcgtggagcagtag

SEQ ID NO: 19591 - DNA, 291 bp, Artificial Sequence
  derived and/or modified sequence
atggacttcttcgccagcggcctgcccctggtgaccgaggagacccccagcggcgaggccggcagcgaggaggacgacgaggtggtggccatgatcaaggagctgctggacaccagaatcagacccaccgtgcaggaggacggcggcgacgtgatctacaagggcttcgaggacggcatcgtgcagctgaagctgcagggcagctgcaccagctgccccagcagcatcatcaccctgaagaacggcatccagaacatgctgcagttctacatccccgaggtggagggctag

SEQ ID NO: 19592 - protein, 245 aa, Artificial Sequence
  derived and/or modified sequence
MAEGEKNQDFTFKMESPSDSAVVLPSTPQASANPSSPYTNSSRKQPMSATLRERLRKTRFSFNSSYNVVKRLKVESEENDQTFSEKPASSTEENCLEFQESFKHIDSEFEENTNLKNTLKNLNVCESQSLDSGSCSALQNEFVSEKLPKQRLNAEKAKLVKQVQEKEDLLRRLKLVKMYRSKNDLSQLQLLIKKWRSCSQLLLYELQSAVSEENKKLSLTQLIDHYGLDDKLLHYNRSEEEFIDV

SEQ ID NO: 19593 - protein, 232 aa, Artificial Sequence
  derived and/or modified sequence
MESPSDSAVVLPSTPQASANPSSPYTNSSRKQPMSATLRERLRKTRFSFNSSYNVVKRLKVESEENDQTFSEKPASSTEENCLEFQESFKHIDSEFEENTNLKNTLKNLNVCESQSLDSGSCSALQNEFVSEKLPKQRLNAEKAKLVKQVQEKEDLLRRLKLVKMYRSKNDLSQLQLLIKKWRSCSQLLLYELQSAVSEENKKLSLTQLIDHYGLDDKLLHYNRSEEEFIDV

SEQ ID NO: 19594 - DNA, 738 bp, Artificial Sequence
  derived and/or modified sequence
atggccgagggggagaagaatcaggactttacatttaagatggagagcccaagcgacagtgccgtggtactcccttctaccccgcaggctagtgccaacccatcatccccctacacaaattcaagtaggaagcaacctatgagcgcgactctccgggaacgactgcggaaaacaagattctcatttaactcaagctacaatgtggtaaagaggctcaaggtcgagagtgaagagaacgatcagaccttcagcgagaaacccgccagtagcactgaggagaattgtctggagttccaggagtcatttaaacacatcgactccgaattcgaagagaatactaatctgaaaaatactctgaagaacctgaacgtgtgtgagagccagtcactcgattcaggctcgtgttctgcgctacagaatgaatttgtctccgagaagcttccgaaacagcggttgaacgccgagaaagctaagcttgtcaagcaagtgcaggagaaagaggatctcttgagacgtctgaagttggtgaaaatgtatcggtccaagaatgatctgtcccagctgcaactgctgataaagaaatggcgttcctgtagccagcttctgttgtatgaactgcaatcggcagtcagcgaggaaaataaaaagctatcccttacccagctgatagaccactacggcctggatgacaaactgctgcattacaaccgttctgaagaggaattcatagatgtgtag

SEQ ID NO: 19595 - DNA, 738 bp, Artificial Sequence
  derived and/or modified sequence
atggccgagggggagaagaaccaggacttcaccttcaagatggagagccccagcgacagcgctgtggtgctgcccagcaccccccaggccagcgccaaccccagcagcccctacaccaacagcagcaggaagcagcccatgtctgccaccctgcgggagcggctgaggaagacccgcttctccttcaacagcagctacaacgtggtgaagaggctgaaggtggagagcgaggagaatgaccagaccttcagcgagaagccagccagcagcacagaggagaactgcctggagttccaggagagcttcaagcacattgattctgaatttgaggagaacaccaacctgaagaacaccctgaagaacctgaatgtgtgtgagagccagagcctggacagcggcagctgcagcgccctgcagaatgaatttgtgtctgagaagctgcccaagcagaggctgaatgctgagaaggccaagctggtgaagcaggtgcaggagaaggaggacctgctgcggcggctgaagctggtgaagatgtaccgcagcaagaatgacctgagccagctgcagctgctgatcaagaagtggaggagctgcagccagctgctgctgtatgagctgcagagcgctgtgtctgaggagaacaagaagctgagcctgacccagctgattgaccactacggcctggatgacaagctgctgcactacaacagaagtgaggaggagttcattgatgtgtag

SEQ ID NO: 19596 - DNA, 738 bp, Artificial Sequence
  derived and/or modified sequence
atggccgagggcgagaagaaccaggacttcaccttcaagatggagagcccaagcgatagcgccgtcgtccttcccagtacaccccaggcctctgctaatccctcttccccctacactaattcttcgcggaaacagcctatgagcgccacacttagggaacgactcaggaagactagattttccttcaatagctcttataacgtggtcaaaagattaaaagtcgagtcagaggagaatgaccagaccttcagcgagaagcccgcctcatcaaccgaggagaattgcctcgagttccaggagagctttaaacacatcgattccgagttcgaagaaaacacgaacctgaagaacacgttaaaaaacctcaacgtgtgcgagagccaatccctcgactctgggtcttgctccgctttgcagaatgagtttgtgtccgaaaaactaccaaaacagcggctgaacgcagagaaggctaagctggtgaaacaggtccaagagaaagaggatcttctgaggcgcctcaagttagtgaagatgtaccgtagcaaaaacgatttgtcgcagctacagctacttatcaagaaatggagatcgtgcagtcaactgctgctgtatgagttgcaatcggcagtgtcagaggagaacaaaaagttgtcactaactcagctaatcgatcattatggcctcgacgataagctactgcactacaacagatcggaggaagagttcatcgatgtttag

SEQ ID NO: 19597 - DNA, 1438 bp, Artificial Sequence
  derived and/or modified sequence
ttttttgctctcgctgggaatggcggagggagagaaaaaccaagatttcactttcaagatggaaagtccgtcagactcagctgtggttttacctagcactcctcaggcctctgcgaatccatcatctccctatacaaatagttcccgaaaacaacctatgagtgcaacacttagagaaagattaaggaaaacaagattttcatttaattcctcttacaatgtggtgaaacgtcttaaagtagagagtgaagaaaatgatcagaccttttcagagaaaccagcatcttccacagaggaaaactgtttggaatttcaagaaagttttaaacatatagacagtgaatttgaagaaaatacaaatttgaaaaatactttgaagaatctcaatgtctgtgaatctcagtcacttgattctggatcatgcagtgctctccaaaatgagtttgtgagtgagaagcttcctaaacaaagattaaacgctgaaaaagccaaattggtgaagcaggttcaggagaaagaagaccttcttcggaggctaaaactagtcaaaatgtatagatcaaagaatgatctgtctcagttacagttgttaataaagaagtggagaagctgtagccagctcttgctttatgagttgcagtcagctgtgtctgaagagaacaagaaactaagccttactcaattgatagaccactatgggttagatgataaattactacactataacagaagtgaagaagaatttatagatgtttaattcctgatttttgctccagaatatctttgagaatgacaacttaattaaaagatacttaggcactttttttttttttttgagactgagtttcgctcttgtcatcctggctggagtgtgatggtgcgatcttgactcactgcaacctctgcctctcgggttccagcaattctcctgcctcagcctcccgagtagctgagattacaggcgcccgccaccatgcccggctaatttttgcatttttagtagagactgggtttcaccacgttggccaggctggtctcgaactcctgacctcaggtgatccaccgcctaggcctcccaaaaccattagggctcagaggaaggtatcccaatgaatatcaattaagggcactttaatatataaattataaactaagttctaaaaggaaaattagtattttggatagatttgtcaaaacgacatttaagtcatgtttaaaaagtcatttgggcagttctggaaactagttttaatacatttgttttttatgacaaaaagttttattttaaatgttaaaaattgtccaatctggtgaatgtctaaccctaaagtttaaaaatttctgcctcctaagtttatgtaccttgtttccatccatttaccacatatttccatctgatagtctagcaggtaattaaacttatatgtccaaaaccata

SEQ ID NO: 19598 - DNA, 1503 bp, Artificial Sequence
  derived and/or modified sequence
agcggcgcctcgcgcgtcaggcaatctggccaattgcgcatcttttccgcctaccgcacggccccgcccctgccacaggatcgatttacggccgcagagaaaaaccaagatttcactttcaagatggaaagtccgtcagactcagctgtggttttacctagcactcctcaggcctctgcgaatccatcatctccctatacaaatagttcccgaaaacaacctatgagtgcaacacttagagaaagattaaggaaaacaagattttcatttaattcctcttacaatgtggtgaaacgtcttaaagtagagagtgaagaaaatgatcagaccttttcagagaaaccagcatcttccacagaggaaaactgtttggaatttcaagaaagttttaaacatatagacagtgaatttgaagaaaatacaaatttgaaaaatactttgaagaatctcaatgtctgtgaatctcagtcacttgattctggatcatgcagtgctctccaaaatgagtttgtgagtgagaagcttcctaaacaaagattaaacgctgaaaaagccaaattggtgaagcaggttcaggagaaagaagaccttcttcggaggctaaaactagtcaaaatgtatagatcaaagaatgatctgtctcagttacagttgttaataaagaagtggagaagctgtagccagctcttgctttatgagttgcagtcagctgtgtctgaagagaacaagaaactaagccttactcaattgatagaccactatgggttagatgataaattactacactataacagaagtgaagaagaatttatagatgtttaattcctgatttttgctccagaatatctttgagaatgacaacttaattaaaagatacttaggcactttttttttttttttgagactgagtttcgctcttgtcatcctggctggagtgtgatggtgcgatcttgactcactgcaacctctgcctctcgggttccagcaattctcctgcctcagcctcccgagtagctgagattacaggcgcccgccaccatgcccggctaatttttgcatttttagtagagactgggtttcaccacgttggccaggctggtctcgaactcctgacctcaggtgatccaccgcctaggcctcccaaaaccattagggctcagaggaaggtatcccaatgaatatcaattaagggcactttaatatataaattataaactaagttctaaaaggaaaattagtattttggatagatttgtcaaaacgacatttaagtcatgtttaaaaagtcatttgggcagttctggaaactagttttaatacatttgttttttatgacaaaaagttttattttaaatgttaaaaattgtccaatctggtgaatgtctaaccctaaagtttaaaaatttctgcctcctaagtttatgtaccttgtttccatccatttaccacatatttccatctgatagtctagcaggtaattaaacttatatgtccaaaaccata

SEQ ID NO: 19599 - DNA, 738 bp, Artificial Sequence
  derived and/or modified sequence
atggctgaaggagagaagaaccaggatttcactttcaagatggagtctccgtccgactctgccgtggtactgccatccactccacaggcctccgccaatccttcatctccatatacaaattcctctagaaagcagcctatgtcggctactctgcgcgaacgactccgaaagacaaggttttcattcaactcttcctataacgtagtgaaacggctgaaagtggaatcagaggaaaacgaccaaacttttagcgagaaacccgcatctagtacagaggagaattgtctcgagtttcaagaatctttcaaacacatcgattctgaattcgaggagaacactaatcttaagaatactctcaagaatttaaatgtctgcgaaagccaatcacttgattcgggaagttgttccgcacttcaaaatgaattcgtgagcgaaaaattgccgaaacagcggcttaatgcagagaaggcaaagttggtgaaacaggtacaggaaaaggaggatctgcttaggagactgaagctcgtgaaaatgtatcgtagcaagaatgatctctcccaactgcagctcctaatcaagaaatggagatcatgttctcagctactgctgtacgaattgcagtcagcagttagcgaggaaaacaagaagctgtctttaacccaactcatcgaccattacggcctcgacgataagttactgcattacaatcggagcgaggaggaatttatcgacgtgtag

SEQ ID NO: 19600 - DNA, 738 bp, Artificial Sequence
  derived and/or modified sequence
atggccgagggcgagaagaaccaggacttcaccttcaagatggagagccccagcgacagcgccgtggtgctgcccagcaccccccaggccagcgccaaccccagcagcccctacaccaacagcagcagaaagcagcccatgagcgccaccctgagagagagactgagaaagaccagattcagcttcaacagcagctacaacgtggtgaagagactgaaggtggagagcgaggagaacgaccagaccttcagcgagaagcccgccagcagcaccgaggagaactgcctggagttccaggagagcttcaagcacatcgacagcgagttcgaggagaacaccaacctgaagaacaccctgaagaacctgaacgtgtgcgagagccagagcctggacagcggcagctgcagcgccctgcagaacgagttcgtgagcgagaagctgcccaagcagagactgaacgccgagaaggccaagctggtgaagcaggtgcaggagaaggaggacctgctgagaagactgaagctggtgaagatgtacagaagcaagaacgacctgagccagctgcagctgctgatcaagaagtggagaagctgcagccagctgctgctgtacgagctgcagagcgccgtgagcgaggagaacaagaagctgagcctgacccagctgatcgaccactacggcctggacgacaagctgctgcactacaacagaagcgaggaggagttcatcgacgtgtag

SEQ ID NO: 19601 - protein, 778 aa, Artificial Sequence
  derived and/or modified sequence
MLDSCKLKSACNLPFICNKKIINTAGTSNAEVPLADPGMYQLDITLRRGQSLAARDRGGTSDPYVKFKIGGKEVFRSKIIHKNLNPVWEEKACILVDHLREPLYIKVFDYDFGLQDDFMGSAFLDLTQLELNRPTDVTLTLKDPHYPDHDLGIILLSVILTPKEGESRDVTMLMRKSWKRSSKELSENEVVGSYFSVKSLFWRTCGRPALPVLGFCRAELQNPYCKNVQFQTQSLRLSDLHRKSHLWRGIVSITLIEGRDLKAMDSNGLSDPYVKFRLGHQKYKSKIMPKTLNPQWREQFDFHLYEERGGVIDITAWDKDAGKRDDFIGRCQVDLSALSREQTHKLELQLEEGEGHLVLLVTLTASATVSISDLSVNSLEDQKEREEILKRYSPLRIFHNLKDVGFLQVKVIRAEGLMAADVTGKSDPFCVVELNNDRLLTHTVYKNLNPEWNKVFTFNIKDIHSVLEVTVYDEDRDRSADFLGKVAIPLLSIQNGEQKAYVLKNKQLTGPTKGVIYLEIDVIFNAVKASLRTLIPKEQKYIEEENRLSKQLLLRNFIRMKRCVMVLVNAAYYVNSCFDWDSPPRSLAAFVLFLFVVWNFELYMIPLVLLLLLTWNYFLIISGKDNRQRDTVVEDMLEDEEEEDDKDDKDSEKKGFINKIYAIQEVCVSVQNILDEVASFGERIKNTFNWTVPFLSWLAIVALCVFTAILYCIPLRYIVLVWGINKFTKKLRSPYAIDNNELLDFLSRVPSDVQVVQYQELKPDPSHSPYKRKKNNLG

SEQ ID NO: 19602 - protein, 600 aa, Artificial Sequence
  derived and/or modified sequence
MLDSCKLKSACNLPFICNKKIINTAGTSNAEVPLADPGMYQLDITLRRGQSLAARDRGGTSDPYVKFKIGGKEVFRSKIIHKNLNPVWEEKACILVDHLREPLYIKVFDYDFGLQDDFMGSAFLDLTQLELNRPTDVTLTLKDPHYPDHDLGIILLSVILTPKEGESRDVTMLMRKSWKRSSKELSENEVVGSYFSVKSLFWRTCGRPALPVLGFCRAELQNPYCKNVQFQTQSLRLSDLHRKSHLWRGIVSITLIEGRDLKAMDSNGLSDPYVKFRLGHQKYKSKIMPKTLNPQWREQFDFHLYEERGGVIDITAWDKDAGKRDDFIGRCQVDLSALSREQTHKLELQLEEGEGHLVLLVTLTASATVSISDLSVNSLEDQKEREEILKRYSPLRIFHNLKDVGFLQVKVIRAEGLMAADVTGKSDPFCVVELNNDRLLTHTVYKNLNPEWNKVFTFNIKDIHSVLEVTVYDEDRDRSADFLGKVAIPLLSIQNGEQKAYVLKNKQLTGPTKGVIYLEIDVIFNAVKASLRTLIPKEQKYIEEENRLSKQLLLRNFIRMKRCVMVLVNAAYYVNSCFDWDSPPRSLAAFVALYGTFINV

SEQ ID NO: 19603 - DNA, 2337 bp, Artificial Sequence
  derived and/or modified sequence
atgctggacagctgcaagctgaagagcgcctgcaacctgcccttcatctgcaacaagaagatcatcaacaccgccggcaccagcaacgccgaggtgcccctggccgaccccggcatgtaccagctggacatcaccctgagaagaggccagagcctggccgccagagacagaggcggcaccagcgacccctacgtgaagttcaagatcggcggcaaggaggtgttcagaagcaagatcatccacaagaacctgaaccccgtgtgggaggagaaggcctgcatcctggtggaccacctgagagagcccctgtacatcaaggtgttcgactacgacttcggcctgcaggacgacttcatgggcagcgccttcctggacctgacccagctggagctgaacagacccaccgacgtgaccctgaccctgaaggacccccactaccccgaccacgacctgggcatcatcctgctgagcgtgatcctgacccccaaggagggcgagagcagagacgtgaccatgctgatgagaaagagctggaagagaagcagcaaggagctgagcgagaacgaggtggtgggcagctacttcagcgtgaagagcctgttctggagaacctgcggcagacccgccctgcccgtgctgggcttctgcagagccgagctgcagaacccctactgcaagaacgtgcagttccagacccagagcctgagactgagcgacctgcacagaaagagccacctgtggagaggcatcgtgagcatcaccctgatcgagggcagagacctgaaggccatggacagcaacggcctgagcgacccctacgtgaagttcagactgggccaccagaagtacaagagcaagatcatgcccaagaccctgaacccccagtggagagagcagttcgacttccacctgtacgaggagagaggcggcgtgatcgacatcaccgcctgggacaaggacgccggcaagagagacgacttcatcggcagatgccaggtggacctgagcgccctgagcagagagcagacccacaagctggagctgcagctggaggagggcgagggccacctggtgctgctggtgaccctgaccgccagcgccaccgtgagcatcagcgacctgagcgtgaacagcctggaggaccagaaggagagagaggagatcctgaagagatacagccccctgagaatcttccacaacctgaaggacgtgggcttcctgcaggtgaaggtgatcagagccgagggcctgatggccgccgacgtgaccggcaagagcgaccccttctgcgtggtggagctgaacaacgacagactgctgacccacaccgtgtacaagaacctgaaccccgagtggaacaaggtgttcaccttcaacatcaaggacatccacagcgtgctggaggtgaccgtgtacgacgaggacagagacagaagcgccgacttcctgggcaaggtggccatccccctgctgagcatccagaacggcgagcagaaggcctacgtgctgaagaacaagcagctgaccggccccaccaagggcgtgatctacctggagatcgacgtgatcttcaacgccgtgaaggccagcctgagaaccctgatccccaaggagcagaagtacatcgaggaggagaacagactgagcaagcagctgctgctgagaaacttcatcagaatgaagagatgcgtgatggtgctggtgaacgccgcctactacgtgaacagctgcttcgactgggacagcccccccagaagcctggccgccttcgtgctgttcctgttcgtggtgtggaacttcgagctgtacatgatccccctggtgctgctgctgctgctgacctggaactacttcctgatcatcagcggcaaggacaacagacagagagacaccgtggtggaggacatgctggaggacgaggaggaggaggacgacaaggacgacaaggacagcgagaagaagggcttcatcaacaagatctacgccatccaggaggtgtgcgtgagcgtgcagaacatcctggacgaggtggccagcttcggcgagagaatcaagaacaccttcaactggaccgtgcccttcctgagctggctggccatcgtggccctgtgcgtgttcaccgccatcctgtactgcatccccctgagatacatcgtgctggtgtggggcatcaacaagttcaccaagaagctgagaagcccctacgccatcgacaacaacgagctgctggacttcctgagcagagtgcccagcgacgtgcaggtggtgcagtaccaggagctgaagcccgaccccagccacagcccctacaagagaaagaagaacaacctgggctag

SEQ ID NO: 19604 - DNA, 1803 bp, Artificial Sequence
  derived and/or modified sequence
atgctggacagctgcaagctgaagagcgcctgcaacctgcccttcatctgcaacaagaagatcatcaacaccgccggcaccagcaacgccgaggtgcccctggccgaccccggcatgtaccagctggacatcaccctgagaagaggccagagcctggccgccagagacagaggcggcaccagcgacccctacgtgaagttcaagatcggcggcaaggaggtgttcagaagcaagatcatccacaagaacctgaaccccgtgtgggaggagaaggcctgcatcctggtggaccacctgagagagcccctgtacatcaaggtgttcgactacgacttcggcctgcaggacgacttcatgggcagcgccttcctggacctgacccagctggagctgaacagacccaccgacgtgaccctgaccctgaaggacccccactaccccgaccacgacctgggcatcatcctgctgagcgtgatcctgacccccaaggagggcgagagcagagacgtgaccatgctgatgagaaagagctggaagagaagcagcaaggagctgagcgagaacgaggtggtgggcagctacttcagcgtgaagagcctgttctggagaacctgcggcagacccgccctgcccgtgctgggcttctgcagagccgagctgcagaacccctactgcaagaacgtgcagttccagacccagagcctgagactgagcgacctgcacagaaagagccacctgtggagaggcatcgtgagcatcaccctgatcgagggcagagacctgaaggccatggacagcaacggcctgagcgacccctacgtgaagttcagactgggccaccagaagtacaagagcaagatcatgcccaagaccctgaacccccagtggagagagcagttcgacttccacctgtacgaggagagaggcggcgtgatcgacatcaccgcctgggacaaggacgccggcaagagagacgacttcatcggcagatgccaggtggacctgagcgccctgagcagagagcagacccacaagctggagctgcagctggaggagggcgagggccacctggtgctgctggtgaccctgaccgccagcgccaccgtgagcatcagcgacctgagcgtgaacagcctggaggaccagaaggagagagaggagatcctgaagagatacagccccctgagaatcttccacaacctgaaggacgtgggcttcctgcaggtgaaggtgatcagagccgagggcctgatggccgccgacgtgaccggcaagagcgaccccttctgcgtggtggagctgaacaacgacagactgctgacccacaccgtgtacaagaacctgaaccccgagtggaacaaggtgttcaccttcaacatcaaggacatccacagcgtgctggaggtgaccgtgtacgacgaggacagagacagaagcgccgacttcctgggcaaggtggccatccccctgctgagcatccagaacggcgagcagaaggcctacgtgctgaagaacaagcagctgaccggccccaccaagggcgtgatctacctggagatcgacgtgatcttcaacgccgtgaaggccagcctgagaaccctgatccccaaggagcagaagtacatcgaggaggagaacagactgagcaagcagctgctgctgagaaacttcatcagaatgaagagatgcgtgatggtgctggtgaacgccgcctactacgtgaacagctgcttcgactgggacagcccccccagaagcctggccgccttcgtggccctgtacggcaccttcatcaacgtgtag

SEQ ID NO: 19605 - DNA, 2337 bp, Artificial Sequence
  derived and/or modified sequence
atgctggattcctgtaaactgaagtccgcatgcaacctgccctttatctgtaacaagaaaatcatcaatacagcgggcacttcaaatgcagaggtgcctctcgcggatccaggtatgtatcagcttgatattacgcttcgtaggggacagtctcttgctgcacgagaccgtggcggaactagcgatccctacgtgaaattcaagattggtggaaaggaagtgtttaggagtaagatcatccacaaaaatctcaaccctgtgtgggaagagaaggcatgcatactggttgatcacctccgagaacctctgtacatcaaagtgtttgattacgatttcggactgcaagatgattttatggggtccgcgttccttgaccttacccagttagagcttaaccgccctactgacgtgacgcttacactgaaagaccctcattatccagaccacgatcttggcatcattctgctatccgtgattttgacgccaaaggagggcgagtccagggatgtgaccatgctcatgcggaagagttggaaaaggtcttctaaagaactttcagaaaacgaggtggtcggatcctatttcagtgtgaaatcccttttttggcggacctgcgggcggcccgcgcttcctgtgctcggcttttgcagggccgagttacaaaatccctattgtaaaaatgtccagtttcagacgcagtcactccggctctccgacctgcaccgcaaaagtcatctgtggcgaggaattgtgagcatcacactcatcgaagggcgggatctgaaggccatggacagcaatggtctctccgatccatacgtaaagtttagacttggacatcagaagtataagtccaagatcatgcccaagacactcaacccacagtggagagaacagttcgatttccatctctatgaagaacgaggaggggtgatcgacataactgcttgggataaggacgctggcaaacgcgacgatttcataggacgttgccaggtggacctaagtgcacttagtcgggagcagacacataagctcgagttacaacttgaggagggagagggacatttggtgctcctcgtgactctgacggcctccgcgacagtgagtatctctgacctgtccgtgaatagcttagaggatcagaaggagcgagaggagatcctcaagcggtactcacctctcaggatattccacaatttaaaagatgtcggcttcctgcaagttaaagtgatcagagccgaggggctcatggctgctgatgttacaggaaaatctgatcccttctgcgtcgttgagttaaacaatgacagactattgactcacaccgtgtacaagaatctgaatccggagtggaataaagtttttacttttaacattaaagacattcactccgtgctcgaggtcacagtatacgatgaggaccgcgacagatccgccgatttccttggcaaggtcgcaatccccctactttctattcagaacggtgagcagaaggcttacgtcctgaagaataagcaactaaccggacccaccaaaggggtgatctaccttgagattgatgtgatctttaacgctgtgaaagcttctctgaggaccctgataccaaaggaacagaaatacatagaggaggaaaacagactgtccaaacagctcctgctcagaaattttattagaatgaagcgatgcgtcatggtcctggtcaatgctgcttactatgtgaactcgtgctttgactgggattcccccccgcggagcctcgctgcctttgtgctgtttctgttcgttgtttggaattttgaactctacatgatccctctcgtgttactgcttctgctgacgtggaattattttttgattatctccggcaaagataacagacagagagacaccgtggtggaggacatgctcgaggacgaggaagaagaggacgataaagacgacaaggatagtgagaaaaaaggctttatcaacaaaatctacgcaatccaggaggtgtgcgtgtcagtccaaaacatcttagacgaagtcgcctctttcggcgagcgcatcaagaatacttttaactggacagtacctttcctcagttggctggctatcgtggctctgtgcgttttcacagctatactctattgtatacccctgcgctatatagtattggtttggggcatcaacaaattcaccaaaaaactgagatctccctatgccattgataataatgaacttttggacttcctgtcaagggtgccaagtgatgtgcaggtggtccagtaccaggagttgaaaccagacccaagccactctccatataagagaaaaaagaacaatctgggctag

SEQ ID NO: 19606 - DNA, 1803 bp, Artificial Sequence
  derived and/or modified sequence
atgctcgactcttgcaagttgaaaagtgcctgcaaccttccttttatctgtaataagaaaatcatcaacactgcaggcactagcaatgccgaagtgcctttggccgaccctggtatgtaccagctggacattactctgcgtcgtgggcagtcccttgccgcccgcgaccgtggaggcactagtgatccttacgtaaaatttaagatcggagggaaggaggtattccggagcaaaataatccacaaaaacctcaatcccgtgtgggaagagaaagcatgtatccttgtcgaccacctccgcgagcctctctatatcaaggtgttcgattacgactttgggttgcaggacgatttcatgggaagcgcatttctagatctcactcaactggaacttaataggcccacagatgtgactctaactctcaaggatccacattaccctgatcacgatctcggtataattctgctgagcgtgatcttaaccccgaaagaaggcgaaagcagagacgtgactatgctcatgaggaagagctggaaacgatcatcaaaagaactgagtgagaatgaggtcgtagggagctatttctccgtgaaatctctgttctggcgtacatgtggccgccccgccttgccagtccttggcttctgtcgcgccgagcttcagaacccatactgtaagaacgtgcagttccaaacacaaagtttgaggctttccgaccttcaccggaaatcacatttgtggcgcggcattgtgagcataactttgatagagggaagagaccttaaagcaatggattccaatggtttaagcgatccttacgtgaaatttcgcctcggtcaccagaaatataagtctaaaatcatgccaaagactctgaatccacagtggcgggagcagtttgattttcacctgtatgaagaaagaggtggagtgatcgatattactgcctgggataaggacgctgggaagcgggacgactttatcggtcgctgccaagtggacctgtccgccctttcccgggaacaaacccacaagctggagctgcagctcgaagagggcgaagggcacttggtcctcctcgttacactcactgcttccgctacggtaagtatttccgatttgtcggtgaatagcctggaggaccaaaaagaacgtgaggaaattcttaaacgttattcccctctcaggattttccacaatctcaaggacgtcgggttcctccaggttaaggttatccgggcagagggcctcatggctgctgacgttactggcaagagcgatcctttctgtgtagtggagctcaataatgaccgcctgctgacacacaccgtgtataagaacctgaaccccgaatggaacaaagtgtttaccttcaacatcaaggatattcatagcgtgctcgaggtaacggtatacgatgaagacagggatagatccgcggacttcctggggaaagtggccatacccctgttatctatacagaatggtgaacagaaggcttatgtccttaaaaataagcaactcacaggccccactaaaggagtcatatatcttgagatcgacgtgatcttcaacgccgtgaaggcaagcctgagaacacttattccgaaggaacagaaatacatagaagaagaaaacagactcagtaaacaattgcttctgcgaaatttcattcgcatgaagaggtgcgtgatggtgttggtcaacgcagcttactacgtgaactcatgctttgactgggactcccctcctaggagtctggccgcatttgtcgctttgtatggcaccttcattaacgtgtag

SEQ ID NO: 19607 - DNA, 2337 bp, Artificial Sequence
  derived and/or modified sequence
atgctggacagctgcaagctgaagagcgcctgcaacctgcccttcatctgcaacaagaagatcatcaacacagctggcaccagcaatgctgaggtgcccctggccgaccccggcatgtaccagctggacatcaccctgcggcggggccagagcctggccgcccgggaccggggcggcaccagtgacccctacgtgaagttcaagattggaggcaaggaggtgttccgcagcaagatcatccacaagaacctgaaccctgtgtgggaggagaaggcctgcatcctggtggaccacctgcgggagcccctgtacatcaaggtgtttgattatgactttggcctgcaggatgacttcatgggcagcgccttcctggacctgacccagctggagctgaaccggcccacagatgtgaccctgaccctgaaggacccccactacccagaccatgacctgggcatcatcctgctgagcgtcatcctgacccccaaggagggggagagcagagatgtgaccatgctgatgaggaagtcctggaagaggagcagcaaggagctgtctgaaaatgaggtggtgggcagctacttctctgtgaagagcctcttctggaggacctgtggccggcctgccctgcctgtgctgggcttctgcagagctgagctgcagaacccctactgcaagaatgtgcagttccagacccagagcctgcggctgagtgacctgcacaggaagagccacctgtggaggggcatcgtgtccatcaccctcatcgagggccgggacctgaaggccatggacagcaatggcctgagtgacccctacgtgaagttccggctgggccaccagaagtacaagagcaagatcatgcccaagaccctgaacccccagtggagggagcagtttgacttccacctgtatgaggagcggggcggcgtcatcgacatcacagcctgggacaaggatgctgggaagagagatgacttcatcggccgctgccaggtggacctgagcgccctgagccgggagcagacccacaagctggagctgcagctggaggagggggagggccacctggtgctgctggtgaccctgacagccagcgccaccgtgtccatcagtgacctgtctgtgaacagcctggaggaccagaaggagcgggaggagatcctgaagcgctacagccccctgcgcatcttccacaacctgaaggatgtgggcttcctgcaggtgaaggtgatccgggcagagggcctgatggccgcagatgtgacaggcaagagtgaccccttctgtgtggtggagctgaacaatgaccggctgctgacccacacagtgtacaagaacctgaaccctgagtggaacaaggtgttcaccttcaacatcaaggacatccacagcgtgctggaggtgacagtgtatgatgaggaccgggacagatctgctgacttcctgggcaaggtggccatccccctgctgagcatccagaatggagagcagaaggcctacgtgctgaagaacaagcagctgaccggccccaccaagggcgtcatctacctggagattgatgtgatcttcaatgctgtgaaggccagcctgcggaccctcatccccaaggagcagaagtacatcgaggaggagaaccggctgagcaagcagctgctgctgaggaacttcatccgcatgaagagatgtgtgatggtgctggtgaatgctgcctactacgtgaacagctgctttgactgggacagccccccaagaagcctggccgcctttgtgctcttcctgtttgtggtgtggaactttgagctgtacatgatccccctggtgctgctgctgctgctgacctggaactacttcctgatcatcagcggcaaggacaaccggcagagggacacagtggtggaggacatgctggaggatgaggaggaggaggatgacaaggatgacaaggacagcgagaagaagggcttcatcaacaagatctatgccatccaggaggtgtgtgtgtctgtgcagaacatcctggatgaggtggccagctttggagagcgcatcaagaacaccttcaactggacagtgcccttcctgtcctggctggccatcgtggccctgtgtgtgttcaccgccatcctgtactgcatccccctgcgctacatcgtgctggtgtggggcatcaacaagttcaccaagaagctgcggagcccctatgccatcgacaacaatgagctgctggacttcctgagccgggtgcccagtgatgtgcaggtggtgcagtaccaggagctgaagccagaccccagccacagcccctacaagaggaagaagaacaacctgggctag

SEQ ID NO: 19608 - DNA, 1803 bp, Artificial Sequence
  derived and/or modified sequence
atgctggacagctgcaagctgaagagcgcctgcaacctgcccttcatctgcaacaagaagatcatcaacacagctggcaccagcaatgctgaggtgcccctggccgaccccggcatgtaccagctggacatcaccctgcggcggggccagagcctggccgcccgggaccggggcggcaccagtgacccctacgtgaagttcaagattggaggcaaggaggtgttccgcagcaagatcatccacaagaacctgaaccctgtgtgggaggagaaggcctgcatcctggtggaccacctgcgggagcccctgtacatcaaggtgtttgattatgactttggcctgcaggatgacttcatgggcagcgccttcctggacctgacccagctggagctgaaccggcccacagatgtgaccctgaccctgaaggacccccactacccagaccatgacctgggcatcatcctgctgagcgtcatcctgacccccaaggagggggagagcagagatgtgaccatgctgatgaggaagtcctggaagaggagcagcaaggagctgtctgaaaatgaggtggtgggcagctacttctctgtgaagagcctcttctggaggacctgtggccggcctgccctgcctgtgctgggcttctgcagagctgagctgcagaacccctactgcaagaatgtgcagttccagacccagagcctgcggctgagtgacctgcacaggaagagccacctgtggaggggcatcgtgtccatcaccctcatcgagggccgggacctgaaggccatggacagcaatggcctgagtgacccctacgtgaagttccggctgggccaccagaagtacaagagcaagatcatgcccaagaccctgaacccccagtggagggagcagtttgacttccacctgtatgaggagcggggcggcgtcatcgacatcacagcctgggacaaggatgctgggaagagagatgacttcatcggccgctgccaggtggacctgagcgccctgagccgggagcagacccacaagctggagctgcagctggaggagggggagggccacctggtgctgctggtgaccctgacagccagcgccaccgtgtccatcagtgacctgtctgtgaacagcctggaggaccagaaggagcgggaggagatcctgaagcgctacagccccctgcgcatcttccacaacctgaaggatgtgggcttcctgcaggtgaaggtgatccgggcagagggcctgatggccgcagatgtgacaggcaagagtgaccccttctgtgtggtggagctgaacaatgaccggctgctgacccacacagtgtacaagaacctgaaccctgagtggaacaaggtgttcaccttcaacatcaaggacatccacagcgtgctggaggtgacagtgtatgatgaggaccgggacagatctgctgacttcctgggcaaggtggccatccccctgctgagcatccagaatggagagcagaaggcctacgtgctgaagaacaagcagctgaccggccccaccaagggcgtcatctacctggagattgatgtgatcttcaatgctgtgaaggccagcctgcggaccctcatccccaaggagcagaagtacatcgaggaggagaaccggctgagcaagcagctgctgctgaggaacttcatccgcatgaagagatgtgtgatggtgctggtgaatgctgcctactacgtgaacagctgctttgactgggacagccccccaagaagcctggccgcctttgtggccctgtatggcaccttcatcaacgtgtag

SEQ ID NO: 19609 - DNA, 2337 bp, Artificial Sequence
  derived and/or modified sequence
atgctagacagctgcaagctgaaaagtgcctgcaatttgccatttatttgtaataagaaaataataaacactgctggaaccagtaatgcagaagtccccttggctgatcccggaatgtaccagctggacattacattaagaaggggtcaaagtttagctgctcgagatcgaggagggacgagtgatccatatgtgaagtttaaaatcggaggaaaagaagtttttagaagtaagataatacacaagaacctcaaccctgtgtgggaagaaaaagcttgtattctggttgatcatcttagggagccattgtatataaaggtatttgactatgattttggactacaggatgactttatgggctcagcctttctggatctgacacaattggagttaaacaggcccacagatgtgacccttactctgaaagatcctcattatcctgaccatgatcttggaatcattttgctctcagtcatccttacccctaaagaaggagagtccagggatgtgacaatgctaatgaggaagagttggaaaagatcaagtaaggaactttcagaaaatgaagtggttggatcttatttctctgtgaagtctctcttttggaggacgtgcggcaggccagctcttcctgtcctgggcttctgcagagcagagcttcagaatccttattgcaaaaatgtacaatttcagacccaaagtttacgcctatcagacctacacagaaaatcgcatctttggagaggaatagtcagcatcaccttgattgaagggagagacctcaaggccatggattccaacgggttgagcgatccctacgtgaagttccggcttgggcatcagaagtacaagagcaagattatgccaaaaacgttgaatcctcagtggagggaacaatttgattttcacctttatgaagaaagaggaggagtcattgatatcactgcatgggacaaagatgctgggaaaagggatgatttcattggcaggtgccaggtcgacctgtcagccctcagtagggaacagacgcacaagctggagttgcagctggaagagggtgagggacacctggtgctgctggtcactctgacagcatcagccacagtcagcatctctgacctgtctgtcaactccctggaggaccagaaggaacgagaggagatattaaagagatatagcccattgaggatatttcacaacctgaaagatgtgggatttctccaggtgaaagtcatcagagcggaagggttaatggctgccgacgtcactggaaaaagtgacccattttgtgtggtagaactgaacaacgatagactgctaacacatactgtctacaaaaatctcaatcctgagtggaataaagtcttcacgttcaacattaaagatatccattcagttcttgaagtgacagtttatgatgaagatcgggatcgaagtgctgactttctgggcaaagttgctataccattgctgtctattcaaaatggtgaacagaaagcctacgtcttgaaaaacaagcagctgacagggccaacaaagggggtcatctatcttgaaatagatgtgatttttaatgctgtgaaagccagcttacgaacattaatacccaaagaacagaagtacattgaagaggaaaacagactctctaaacagctgctactaagaaactttatcagaatgaaacgttgtgtcatggtgctggtaaatgctgcatactacgttaatagttgctttgattgggattcacccccaaggagtctcgctgcttttgtgctctttctctttgttgtctggaactttgagctctacatgataccactggttttgttgttactattgacatggaactacttcttgataatatcagggaaagataacaggcaacgtgatacagtagtggaggacatgctagaggacgaggaagaagaagatgacaaagatgacaaggacagtgaaaaaaagggatttataaataaaatctatgccatccaggaggtatgtgtcagtgtccagaacatcctagatgaagtggcttcctttggcgaaaggataaagaatactttcaactggactgtcccattcttaagctggctggccattgtagccctctgtgtgttcacagccatcctgtactgcattccgctgagatacattgtccttgtctggggcatcaataaatttacaaaaaagcttcggagtccatatgcaattgataacaatgaactacttgacttcctttccagagtcccttcagatgtacaagtggtgcaataccaagaactgaaaccagatccttctcatagcccatataaaagaaagaaaaacaatcttggctag

SEQ ID NO: 19610 - DNA, 2158 bp, Artificial Sequence
  derived and/or modified sequence
gcagagcagcaagtgctccgtgcagggctgttgctatcacttggaggtgaacagcctcttttgccggtattcagtgaagaaagcaagtctaaatatgcagttctctcactggagtgaaagatgttttgttcatttctaatcaactatgctagacagctgcaagctgaaaagtgcctgcaatttgccatttatttgtaataagaaaataataaacactgctggaaccagtaatgcagaagtccccttggctgatcccggaatgtaccagctggacattacattaagaaggggtcaaagtttagctgctcgagatcgaggagggacgagtgatccatatgtgaagtttaaaatcggaggaaaagaagtttttagaagtaagataatacacaagaacctcaaccctgtgtgggaagaaaaagcttgtattctggttgatcatcttagggagccattgtatataaaggtatttgactatgattttggactacaggatgactttatgggctcagcctttctggatctgacacaattggagttaaacaggcccacagatgtgacccttactctgaaagatcctcattatcctgaccatgatcttggaatcattttgctctcagtcatccttacccctaaagaaggagagtccagggatgtgacaatgctaatgaggaagagttggaaaagatcaagtaaggaactttcagaaaatgaagtggttggatcttatttctctgtgaagtctctcttttggaggacgtgcggcaggccagctcttcctgtcctgggcttctgcagagcagagcttcagaatccttattgcaaaaatgtacaatttcagacccaaagtttacgcctatcagacctacacagaaaatcgcatctttggagaggaatagtcagcatcaccttgattgaagggagagacctcaaggccatggattccaacgggttgagcgatccctacgtgaagttccggcttgggcatcagaagtacaagagcaagattatgccaaaaacgttgaatcctcagtggagggaacaatttgattttcacctttatgaagaaagaggaggagtcattgatatcactgcatgggacaaagatgctgggaaaagggatgatttcattggcaggtgccaggtcgacctgtcagccctcagtagggaacagacgcacaagctggagttgcagctggaagagggtgagggacacctggtgctgctggtcactctgacagcatcagccacagtcagcatctctgacctgtctgtcaactccctggaggaccagaaggaacgagaggagatattaaagagatatagcccattgaggatatttcacaacctgaaagatgtgggatttctccaggtgaaagtcatcagagcggaagggttaatggctgccgacgtcactggaaaaagtgacccattttgtgtggtagaactgaacaacgatagactgctaacacatactgtctacaaaaatctcaatcctgagtggaataaagtcttcacgttcaacattaaagatatccattcagttcttgaagtgacagtttatgatgaagatcgggatcgaagtgctgactttctgggcaaagttgctataccattgctgtctattcaaaatggtgaacagaaagcctacgtcttgaaaaacaagcagctgacagggccaacaaagggggtcatctatcttgaaatagatgtgatttttaatgctgtgaaagccagcttacgaacattaatacccaaagaacagaagtacattgaagaggaaaacagactctctaaacagctgctactaagaaactttatcagaatgaaacgttgtgtcatggtgctggtaaatgctgcatactacgttaatagttgctttgattgggattcacccccaaggagtctcgctgcttttgtggccttgtatgggactttcattaatgtctgagcacatggaacaaagagtgtctacgtccctttgtgttgtaagttaccagaaagttaggcagcctgcttcccatagacgtgttgttgtctccctaaagaaagcaattgtcattatcgttaagttttagaaaaaaaatctctctctctctgtctctctcagtattctttttgtagctctttcttataataaatatatggtggtactattaag

SEQ ID NO: 19611 - DNA, 2337 bp, Artificial Sequence
  derived and/or modified sequence
atgctggacagctgcaagctgaagagcgcctgcaacctgcccttcatttgcaataagaaaatcattaacaccgccggtacatccaacgccgaggtgccacttgctgatcccgggatgtatcagctcgacattacactccggcgagggcagtctctggctgcacgggatcgaggtggtactagcgacccttacgtgaaattcaagattgggggcaaagaagtgttccgcagtaaaataatccacaagaacttgaatcccgtctgggaggagaaagcatgtatcttggtggatcaccttagagagcctttatacattaaggtctttgactatgacttcgggctgcaagacgacttcatgggctctgcgtttctggacctgactcagttggaactcaacagaccaaccgatgtgactctaaccctcaaagacccacactaccctgaccacgacctagggatcatccttctaagcgtaatcctgacacccaaagagggggagtctcgggacgtgaccatgctgatgcgtaaatcgtggaagaggagcagcaaagagctttccgaaaacgaggtcgtgggttcctatttctctgtgaagtcgctcttttggcgcacatgtgggcggcccgctctccccgtccttggtttttgccgagccgagttgcaaaacccctattgcaaaaatgttcagtttcagacccaaagcctgagattaagcgacctgcaccggaagagccacctgtggagggggatcgtctctatcaccctgattgaagggcgcgatctcaaggccatggactcaaatgggttaagcgatccctacgtgaaatttagactgggtcatcaaaagtataaatcgaagatcatgccaaaaacactgaatccccagtggagagagcaattcgatttccacctctatgaagaacgcggcggtgtcatcgacatcaccgcctgggacaaagatgccgggaagagggatgactttatcggcaggtgccaggtcgatctctcagcactgtcacgagaacagacacacaaacttgagctccagctcgaagagggcgagggtcatctggttttactggtgaccctgacagcgagtgccaccgtcagtatcagcgatctgtcagtgaattctctggaggaccagaaggaacgggaagagattttgaagcgttacagtcccttgagaatttttcataatctgaaagatgtagggttcctgcaagtgaaagtaatccgggccgagggcctcatggccgctgatgtaacgggaaagagcgaccccttttgcgtggttgaactcaataatgaccgactgctcacacataccgtttacaagaatcttaaccccgagtggaataaggtcttcacgttcaatattaaagatatccactctgtgctggaggtaaccgtttatgatgaggatcgtgaccgatccgccgacttccttggcaaagtggctattcctctgttgagtattcaaaacggcgaacaaaaagcatatgtgcttaaaaacaagcagctgactggcccaaccaaaggggtaatatacttggaaattgacgtgatattcaacgccgtgaaagcaagtcttaggactctgattcccaaggagcagaaatacattgaagaggagaatcgtctgtccaagcagttactgctgaggaactttatcaggatgaagcgatgtgtgatggttctcgtgaacgccgcttactacgtgaacagttgtttcgactgggactccccaccccggagtctggccgccttcgtgttgttcctctttgtggtctggaacttcgagttgtatatgattcccctggtgcttcttttgctcctgacatggaactattttctcatcatatcagggaaagataacagacaacgggataccgtcgtggaggacatgctcgaagatgaagaggaggaggatgacaaggatgataaggactcggagaaaaaaggcttcattaataagatatatgccattcaggaggtttgcgtctctgtgcagaacattctggatgaagtggcttcgttcggagaacgtattaaaaacacctttaactggaccgtaccattccttagctggctggcaatcgtggcactctgcgtgttcacagcaatcctgtactgtatcccactacgatatatcgttctcgtctggggcatcaataagttcactaagaaactccggagcccctacgccatagataacaacgaactgctcgactttctctctcgtgtgcctagtgacgtccaggtggtgcagtatcaagaactgaaaccggatcccagccatagcccatacaagcgcaagaagaacaacttgggttag

SEQ ID NO: 19612 - DNA, 1803 bp, Artificial Sequence
  derived and/or modified sequence
atgctggacagctgcaagctgaagagcgcctgcaacctgcccttcatctgcaataagaagatcattaacacggctggcacaagcaatgcggaagtccccctcgcagatcctggcatgtatcagcttgacattaccctgagacgcggccaatccctggccgcacgagaccgggggggcacttccgacccgtatgtcaaatttaagatcggaggaaaggaagtgttcaggtcgaagataatccataaaaacctcaatcctgtttgggaggagaaagcctgcattctcgtggaccacttacgtgaaccgctgtacatcaaagtgtttgactatgactttggcctgcaggatgacttcatggggagcgctttcctggatctgactcagctagagctgaatcgacctaccgacgtgacactgactcttaaggacccacactatcccgaccatgacctcgggattatcctcctctccgttatcctgacgcctaaagagggcgaatcccgggacgttaccatgctgatgcgtaagagctggaaacggagcagtaaggagctgtccgagaacgaggtggtggggtcttatttttcggtcaagtcactgttctggcgtacttgcggtcggcccgccctgcccgtcctggggttttgtagggctgagctacagaatccttactgtaaaaacgtgcagtttcagacacagagcctgagactgtcagacttgcatcgtaaaagtcatctctggcgtgggatcgtgagcatcactctgatcgagggccgcgatttgaaagcaatggacagtaatggcctcagcgatccctatgttaagtttaggcttggccatcaaaaatataagagcaagatcatgcccaaaacacttaatcctcagtggcgggagcagtttgactttcatctgtacgaagagcggggtggcgtcattgacatcaccgcctgggataaggatgcaggcaaacgggatgatttcatcgggaggtgtcaggtggatctatccgcactcagccgggagcagactcataaattagagcttcagcttgaggagggcgagggtcacctggtgctcttagtgaccctgacggccagcgccacagtgtccatcagcgacctgtcggtgaacagcctggaggatcaaaaagaacgcgaggaaatccttaagcgttactctcctctccggatctttcataatcttaaggacgttggcttccttcaggtaaaggtgattcgggccgaaggactgatggcagcggacgtgactggcaagtccgaccctttttgcgtcgtggagttgaacaatgacagactgctgactcacactgtgtacaagaacctcaatcccgaatggaataaggtctttacatttaatatcaaagacatccatagcgtcctggaggtcacggtctacgacgaggaccgggatagatctgccgattttctgggaaaggtagccattcctctgcttagcatccagaacggcgagcagaaagcatacgtcctgaagaataagcagctgaccggccccactaagggcgtaatctacctggagatcgacgtcatattcaacgctgtcaaagcgtcgctgcgaactcttatccccaaagaacagaagtacattgaggaggaaaataggctctctaaacaactgctgctgcgcaacttcataaggatgaaaagatgtgtgatggtgctagttaacgcagcgtattacgtgaatagttgctttgattgggatagtcctcctagatcattggcagccttcgtggcgctatatggtacatttataaacgtgtag

SEQ ID NO: 19613 - DNA, 2337 bp, Artificial Sequence
  derived and/or modified sequence
atgctcgatagttgtaagctgaaaagtgcctgcaacttaccttttatctgtaataaaaagattattaataccgctgggaccagtaacgccgaagtgccgctggccgacccaggtatgtaccagctagacatcactctgaggaggggtcagagcctggccgcacgggacaggggtggcacttccgacccatacgtgaagttcaaaatcgggggaaaggaagtgttccggagcaagattattcacaaaaacttgaacccagtgtgggaggagaaggcctgcatcctcgttgatcacctgcgcgagcccctctatatcaaagtttttgactatgatttcggattacaggacgacttcatgggctcagccttcctggacctcacacagctggagctgaatagaccaaccgatgtgacccttactctaaaagatccacactatcctgatcatgacctaggtatcattttgctgagtgtgattctcactcctaaggaaggagagtctcgagatgtgacgatgctcatgcgcaagagctggaagcggagttctaaagagctgtctgagaacgaagtggtgggaagctacttctctgtcaagagtctgttttggcggacttgtggtcgacccgctctgcctgttctgggtttctgtcgcgctgagctgcaaaacccttattgcaagaacgtgcagttccagacacagtctttacgcctgtctgacttgcaccggaaaagtcacctctggcgaggaatagtttctatcacgcttatcgaaggtcgggatctcaaggctatggattctaacggactgagcgatccttatgtgaaattcaggctcggccatcaaaaatacaaatccaaaataatgcccaagactctgaacccgcagtggcgtgagcagtttgattttcatttgtatgaggagcggggaggcgtcatagatattactgcatgggataaggatgccggaaaacgtgatgactttatcggtagatgccaagtggatctgagcgccctgtcccgcgagcagacccataagctggaattgcagctggaggaaggcgagggccacctggtgctcctggtgactcttactgctagtgctactgtgagtataagcgatctctccgtgaacagcctggaggatcaaaaagagcgggaggaaatcttgaagcggtattccccccttagaatcttccataatctaaaggatgtggggttcctgcaggtcaaagttatcagagcagaaggattgatggctgccgacgttacgggcaaaagcgaccctttttgtgttgtggaactcaataacgatcgtcttcttacacacacggtttacaagaatcttaatccggagtggaacaaagtatttacttttaacataaaagacatccactctgtgttggaggttaccgtgtatgacgaggacagggaccgctccgccgatttcctagggaaggtcgcaatcccattactctcgatccaaaacggagagcagaaggcctatgtgctgaagaacaagcaattaacagggccaaccaaaggtgtgatttatctggaaattgacgtaatttttaatgctgttaaagctagtcttaggaccctgattccaaaggaacagaaatatattgaggaggaaaaccggctctccaaacagctcctcctgaggaactttattcgtatgaagcgatgcgtaatggttttagttaatgccgcttactacgtgaattcttgtttcgattgggactccccaccgagaagtctggcagccttcgtgctattcctgttcgtggtgtggaacttcgaattgtatatgatcccgcttgtcctgctgctgctactgacgtggaattatttcctgatcatttccgggaaagataatagacaacgcgatacagtggtagaagatatgctcgaggatgaggaagaagaagacgataaagatgataaggattcagaaaagaaaggctttataaacaagatctatgctattcaggaggtgtgcgtaagtgttcagaatatccttgatgaggtggcttcattcggggaacgcattaagaacacctttaactggactgtgccctttttgagctggctggcaatcgtagcactttgcgtgtttacagccatcctgtactgtatccccctgagatatattgtattagtttggggtatcaataaattcaccaaaaaattgaggagcccttacgccattgacaacaatgaattgctcgatttcctctctagagtccctagcgacgtccaagtggtgcagtatcaggagctgaaacccgaccccagtcactccccatataagcgaaaaaaaaataaccttggatag

SEQ ID NO: 19614 - DNA, 1803 bp, Artificial Sequence
  derived and/or modified sequence
atgcttgattcctgcaaactgaagagtgcatgtaacctgccgttcatttgtaataaaaaaatcatcaacactgcgggtaccagcaatgcggaagtgcctctagccgacccaggcatgtatcagctggatatcacgcttaggcggggtcagagcttggccgcaagggatcgtggagggacttctgatccatacgtgaagtttaagatcggcggaaaggaagtttttcgtagcaagatcattcataaaaacctaaatccggtgtgggaagagaaagcttgcattttggttgatcatctgcgggaaccactctacattaaagtatttgattacgatttcggacttcaggatgattttatggggtcggccttcctcgatcttacacagcttgagctcaaccgacccaccgatgtaaccctcactctgaaagacccccactaccctgaccacgacctcggtattatccttctcagcgttattctcactcccaaagagggtgaatctcgggatgtgactatgctcatgcgcaaatcctggaagcgttcttcaaaagagctttcggagaacgaagtcgtaggcagctacttcagcgtgaagagcttattctggcggacttgcggcagacccgcactgcctgtcctgggtttttgccgagctgagttacaaaatccgtattgcaaaaacgttcagtttcagacgcagtctctccggctgtcggaccttcaccgtaagagtcacctctggagagggatcgtttcgatcacacttatcgaaggtcgagatcttaaagccatggacagcaatggactctcagatccatacgtgaagtttaggctgggccatcagaagtacaaaagcaaaatcatgcctaagacactgaatccccagtggcgagagcagttcgactttcatctctacgaagaacggggaggggtgatcgatattaccgcatgggataaggatgccggaaaaagggacgattttattggcagatgtcaggttgatctttcggccctcagtagagaacagacccataaactggagttgcagttagaagagggagaaggtcatttagttttgttggtcaccctcactgcttcagcaacggtcagcataagtgatctgtccgtgaatagtctagaagatcagaaagagcgcgaagaaatcctgaagcggtacagcccactgcgcatcttccacaatctgaaagatgtcggctttctgcaagtcaaagttataagagccgagggactaatggcagcagacgttactggcaaaagtgaccccttttgtgtcgtcgagctgaataatgaccgccttctcacccacaccgtgtacaagaacctgaacccagagtggaacaaggtgttcaccttcaatatcaaggatatccattccgtgcttgaagtcactgtttacgatgaagatcgtgatcgaagcgcagatttcctaggaaaggtagcaatccccctgttatcaatccagaacggcgaacagaaagcgtacgtgctgaagaacaagcaactgaccgggcctacaaagggggtgatttatctggaaatcgacgtcatattcaacgccgttaaggctagtctgcggacactgatccctaaggaacagaagtatatcgaggaagagaatcgattgtcaaaacagctgttacttcgaaatttcatccgaatgaagcgatgtgtgatggtacttgtgaacgcggcttactatgtcaactcttgtttcgactgggactccccccctagaagcttagccgcattcgtggccctctatgggacttttataaatgtttag

SEQ ID NO: 19615 - protein, 1283 aa, Artificial Sequence [sequence omitted]

SEQ ID NO: 19616 - protein, 142 aa, Artificial Sequence
  derived and/or modified sequence
MSLMVSAGRGLGAVWSPTHVQVTVLQARGLRAKGPGGTSDAYAVIQVGKEKYATSVSERSLGAPVWREEATFELPSLLSSGPAAAATLQLTVLHRALLGLDKFLGRAEVDLRDLHRDLGKSFFKTLKKRAWAIFLRLCLKKN

SEQ ID NO: 19617 - DNA, 1894 bp, Artificial Sequence
  derived and/or modified sequence
ttcctccttcacaggttctctttcctgctgagttgtgaagaaggtgcctgcttcctcttgcaccgtgattgttaagtttcctgaggcctccccagccatgcagaactgtgacaggactcagagactacctagacacatgcaaacaacaaaccagaggggatcgactaaatagttttcacttgagaaggcaatgggctactccactataagaaaaccatctgtatgaaagaatcttgatgtgctatgtggttcccgggtgcttcatctacatttgtggctgcactagaattaaatcaactcacttcaatggaaaaagtcaaatggtagatttgaagagtcagagttgggatttagagagattggaaaacaagccccctcctgctgtatatgatctagccgctaccacctcccagctgggggaatgggccaagagcagaatctggtgacaaagtagccttgggtggcttggttggccacacacgccactgaaagcacctctcccaggaatccagtcgcctccagtgcctgctgaagcaagaaaaccctccaaaggatgactccagctgtgtctgcatcataattaaggctgcaaaaacccaaaatgaatgaagtctccccagctaatgtgccacttctaatttaatctaattggcctctgaaagagagccttggcctgcctcagaggcaaaatcttccaaatgaagtgaatttaaactaatttaagctaactaattacaaactggggggtattgtcacaagacaattgttattgttctttgattgcttgctcaactggattatttgctcattaccttcagagctgttgggactttcatggggtgccccttgccgcacatcaataaggcattctacaaggcagcctggagtggagggtccccacaccagattggcatgggagcgctgaggattagcttggctttctgcgtgtttggagaatcttaaagcaaatgcacagcatgtgctgctcattcaaataacctgcagctaactacacctctttttggagacgtaagtttttctttagcttcgggatgtaggttatgagttttgaggtcatctgttgaaccaacctctttattgttcagtcgttctgaccttgagatgcagctcgttatacctgggtagagatctgaagcaaaagtggggagaaaaaaaagacctgtatccaagcctgtttctcagcagctgtgtgaggtagctgtgctgccacacctctctgagccacaggcagagatctggtggaaaacgcatgaaatttgcagacccatctatctgctgcttctggtttgagcttcagttccctcctcccaggcatgttaaatttagcctacagctgcctccttacttattttaagtgtaacaaatgttatgttacatttgggacctgtgtggctaaaggcttctctgcacaaagggaactgtcacttaactggatgtgaaaggggctgtaacctactcttgtgacaagcaaccatacttcaaccactcacaggtggccaagtcttccaactgtgttcgagtaaggccaacgctgagctgtagccaatcaggctgtttctctgcctcacttctgttttctgtgcttcactttccgttctctgcccgtaaagactctcaccacacggcagcaccagagacgctctgaacctcttctggtcagggggctgcctgattcccatatcattctttgctcaattaaactctgttaaatgtagtttgcctcagttttccttttaacaggcagaaactaccacctcacagaattgctatgaagactgaacatggtcactctgtgaaaacatttcataaactgtgtgtcgcttgcgaatgctgttatttttctcatctgtaaaataaaggaattcaaccaggg

SEQ ID NO: 19618 - DNA, 3852 bp, Artificial Sequence
  derived and/or modified sequence
atgtctctgatggtgagcgctggtcggggactgggggcagtatggtcaccaacacacgtacaagttaccgtgctccaggcacggggtcttagagctaaggggccaggaggaaccagtgatgcatacgcagtaatccaggtgggtaaagagaagtacgccactagtgtgtccgaaaggtccctgggagcccccgtgtggcgtgaagaggcaactttcgagctaccgtccttgctcagttctggaccggcagctgccgccacgcttcagctaacagtcctgcaccgagccctgctgggcctcgataagttcttaggacgggccgaggtggacctgagggaccttcacagagaccagggccgtcgaaaaacgcagtggtataagctcaaaagcaagccgggcaagaaggataaggagagaggggagattgaggtcgatatacagtttatgcgaaataacatgaccgcctcaatgtttgacttaagtatgaaggataagtcccggaacccattcggtaagcttaaggataagatcaagggaaaaaataaggattctggcagcgacaccgccagcgctataattccatctaccaccccatctgtggactccgacgatgaatcggttgtaaaggataaaaagaaaaaaagtaagattaagacgctgttaagcaaaagcaatctgcaaaaaactccactgtcgcaatcaatgagcgtgctgccgactagtaagcccgaaaaggtgctgctgagacccggggactttcagagtcagtgggacgaggatgataacgaggacgagagttccagcgcatccgacgtgatgtcgcacaagcggactgcatccactgacttgaaacagctgaatcaggtcaattttactctgccaaaaaaggagggactttcattcctgggtggactgaggagcaagaacgatgttctgtcacgaagcaacgtgtgtattaatggaaaccacgtatacctggagcaacctgaggccaagggggagataaaggatagcagcccttcctctagccccagccccaagggtttcaggaagaagcacctgttcagttcaacagaaaatctagctgccgggtcgtggaaggaaccagccgaaggggggggactgtccagtgaccgccaactcagtgagtcctctacaaaagattctctcaaatccatgacactcccatcttaccggccagcccctttggtatctggagatctgagggagaatatggcccctgctaacagcgaggccacaaaagaagccaaggaatcaaagaagccagaatcgcgccgtagctcccttctctcactgatgacagggaaaaaggatgtcgcgaagggatctgagggagaaaatccgctaacagtgcctgggcgtgaaaaggagggaatgctgatgggcgtgaaaccaggggaagatgcctccggacctgccgaggacctcgtcaggagatctgagaaagacacagccgccgttgtctcacgtcagggatcttcacttaatctgtttgaagacgttcagattacggagccggaagccgaaccggaatctaagtcagagccgcgaccgcccatttcttcccccagagcaccacagacccgcgccgttaagccaagactggaggtgtcccctgaagcacagcccactgctagacttccaagtccgaccgatagtccaagtagcctgccaccccttcctagcagtagtggtcaggcaagcgtgccatcggagctggggcatggggcagacactcagtcttcagaatcccctagtgtattcagcagtctctctagtccaatagccgctccaatctcaactagtacccccatcgaatcctggcctcttgtagatcgtgggcaggccaaatcggagggccccccactgttgcccaaagccgagctgcaaaccgagtccctcacacctgttcccaactccggaagctcagccttgggctcactgttcaagcagccatcattcccagccaacaagggaacggaagattccctaatgggtaggactagggagaccggaaccgaaaagaatacttcctccctggaacttgaggagtctctcccggagcagccggagactgggaggcaggaagaggaactgccccgcttcccatgtaagaaacaggactactcaccaagctctggggaggctcaggaggtgccctttgcactgagtttgtccagcgacggagccgtgtcccccgtcggggaactggctgcgggcggtgaccgggatcttgaaagtcaagctggctctcttgtggagtcgaaggctcgcgatgcagccgaggaagtcgccccaccattgccaatgggcgcatccgtgcccagtatagattcaatgatgcggaaactagaggagatgggcttgaacctgcggaaggatcagaagaagacaaagaagcgcgtttcattctctgagcagctgtttactgaagaagcggttgctggggccgctctactggtggaaggccatagctcttgtcctcaggaactgaaccccgcatggtcagtggctggtaatgcctccgatggagagccgcccgagtcccctcacgctgaggactccgaaagagagagcgttaccacccccgggcccgctacctgcggggccccggcttcacccgcagaccacctgctgctcccgagccaggaagagtccttcagcgaagtaccaatgagcgaagctagctctgccaaagatactcccctgttcaggatggagggggaggatgcccttgtgactcagtaccaaagcaaagcttccgatcacgaaggccttctgagcgatcccttatcagatttgcagctggtcagtgactttaagtcccccattatggcagacctgaatttgtcactgcccagcataccagaggttgccagtgatgacgaaagaatagaccaagtggaggacgatggtgatcaggtggaggatgacggcgagaccgccaagtcaagtactctagatataggagccctgtctcttggcttggtggtgccctgcccggagcgcggcaaaggcccctccggagaagcggacaggctcgtgttgggcgagggactgtgcgactttcgactgcaagccccccaggcatccgtcacggctccatccgagcagacaactgaatttggaattcataaaccgcacctcggcaagagctctagtctcgataagcaactgcccggaccaagcggcggggaggaggagaagcctatggggaacgggtcaccatctccacccccaggcacatctctggacaatcccgtaccatcgccctcaccaagtgagatatttccagtcactcatagcttccctagctccgcccattctgatactcaccatacatccaccgcagaaagccagaaaaaagcaactgccgagggaagcgccgggcgcgtcgaaaactttggcaagcggaagccccttttgcaagcttgggtgagtccctcagagacccatccagtgtctgcccagcccggggctgggaccgggtccgcgaaacaccgccttcacccagttaagccaatgaatgccatggcgactaaggtggctaattgcagtctgggaacagctactatcatcagcgagaatctgaacaacgaggtgatgatgaagaaatacagcccttccgatcctgccttcgcatacgctcagctaacccatgatgagctcatccagctggtactaaagcaaaaggagaccatctctaaaaaggagttccaggtgcgtgagttagaagattacatcgataacctgttggtgcgggtcatggaggagacaccaaatattttacgcatccctacccaagttggcaagaaagcggggaaaatgtag

SEQ ID NO: 19619 - DNA, 3852 bp, Artificial Sequence
  derived and/or modified sequence
atgagcctgatggtgtctgctggccggggcctgggcgctgtgtggagccccacccacgtgcaggtgacagtgctgcaggcccggggcctgcgggccaagggccctgggggcaccagtgatgcctatgctgtgatccaggtgggcaaggagaagtatgccacctctgtgtctgagaggagcctgggcgcccctgtgtggagggaggaggccacctttgagctgcccagcctgctgagcagcggccctgctgctgctgccaccctgcagctgactgtgctgcaccgggccctgctgggcctggacaagttcctgggccgggcagaggtggacctgcgggacctgcaccgggaccagggccgcaggaagacccagtggtacaagctgaagagcaagccaggcaagaaggacaaggagcggggggagattgaggtggacatccagttcatgaggaacaacatgacagcctccatgtttgacctgtccatgaaggacaagagcaggaacccctttgggaagctgaaggacaagatcaagggcaagaacaaggacagcggcagtgacacagccagcgccatcatccccagcaccaccccatctgtggacagtgatgatgagagcgtggtgaaggacaagaagaagaagagcaagatcaagaccctgctgagcaagagcaacctgcagaagacccccctgagccagagcatgtctgtgctgcccaccagcaagccagagaaggtgctgctgcggcctggggacttccagagccagtgggatgaagatgacaatgaagatgagagcagcagcgccagtgatgtgatgagccacaagaggacagccagcacagacctgaagcagctgaaccaggtgaacttcaccctgcccaagaaggagggcctgtccttcctgggcggcctgcggagcaagaatgatgtgctgagccgcagcaatgtgtgcatcaatggaaatcatgtgtacctggagcagcctgaggccaagggggagatcaaggacagcagccccagcagcagccccagccccaagggcttcaggaagaagcacctgttcagcagcacagagaacctggccgccggctcctggaaggagcctgctgagggcggcggcctgagcagtgaccggcagctgtctgagagcagcaccaaggacagcctgaagtccatgaccctgcccagctacagacctgcccccctggtgtctggggacctgcgggagaacatggccccagccaacagcgaggccaccaaggaggccaaggagagcaagaagccagagagccgccgcagcagcctgctgagcctgatgaccgggaagaaggatgtggccaagggctctgaaggagagaaccccctgactgtgcccggccgggagaaggagggcatgctgatgggcgtgaagccaggagaagatgccagcggccctgctgaggacctggtgagaagaagtgagaaggacacagctgctgtggtgtcccggcagggcagcagcctgaacctgtttgaagatgtgcagatcacagagcctgaggccgagcctgagagcaagtctgagcccaggcctcccatcagcagcccccgggccccccagaccagggctgtgaagccccggctggaggtgtccccagaggcccagcccacagcccggctgcccagccccacagacagccccagcagcctgccccccctgcccagcagcagcggccaggcctctgtgcccagcgagctgggccacggggctgacacccagagcagcgagagccccagcgtcttcagcagcctgagcagccccatcgccgcccccatcagcaccagcacccccatcgagagctggcccctggtggaccggggccaggccaagtctgagggcccccccctgctgcccaaggccgagctgcagacagagagcctgacccctgtgcccaacagcggcagcagcgccctgggcagcctcttcaagcagcccagcttccctgccaacaagggcacagaggacagcctgatgggccgcacccgggagaccggcacagagaagaacaccagcagcctggagctggaggagagcctgcctgagcagcctgagaccggccggcaggaggaggagctgccccgcttcccctgcaagaagcaggactacagccccagcagcggggaggcccaggaggtgccctttgccctgagcctgagcagtgatggagctgtgtcccctgtgggggagctggccgccggcggggaccgggacctggagagccaggccggcagcctggtggagagcaaggccagagatgctgctgaggaggtggccccacccctgcccatgggcgcctctgtgcccagcattgacagcatgatgaggaagctggaggagatgggcctgaacctgaggaaggaccagaagaagaccaagaagagggtgtccttcagcgagcagctgttcacagaggaggccgtggccggggccgccctgctggtggagggccacagcagctgcccccaggagctgaacccagcctggagcgtggccggaaatgccagtgatggagagcccccagagagcccccatgctgaggacagcgagcgggagagcgtgaccaccccaggccctgccacctgtggggccccagccagccctgctgaccacctgctgctgcccagccaggaggagagcttcagcgaggtgcccatgtctgaggccagcagcgccaaggacacccccctcttcaggatggagggggaggatgccctggtgacccagtaccagagcaaggccagtgaccacgagggcctgctgagtgaccccctgagtgacctgcagctggtgtctgacttcaagagccccatcatggctgacctgaacctgagcctgcccagcatccctgaggtggccagtgatgatgaaagaattgaccaggtggaggatgatggagaccaggtggaggatgatggagaaacagccaagagcagcaccctggacatcggggccctgagcctgggcctggtggtgccctgcccagagcggggcaagggccccagcggggaggccgaccggctggtgctgggggagggcctgtgtgacttccggctgcaggccccccaggcctctgtgacagcccccagcgagcagaccacagaatttggcatccacaagccccacctgggcaagagcagcagcctggacaagcagctgcccggccccagcggcggggaggaggagaagcccatgggaaatggcagccccagccccccacctggcaccagcctggacaaccctgtgcccagccccagccccagcgagatcttccctgtgacccacagcttccccagcagcgcccacagcgacacccaccacaccagcacagctgagagccagaagaaggccacagctgagggcagcgctggccgggtggagaactttgggaagaggaagcccctgctgcaggcctgggtgagccccagcgagacccaccctgtgtctgcccagcctggagctggcactggaagtgccaagcaccggctgcaccctgtgaagcccatgaatgccatggccaccaaggtggccaactgcagcctgggcacagccaccatcatcagcgagaacctgaacaatgaggtgatgatgaagaagtacagccccagcgaccctgcctttgcctatgcccagctgacccatgatgagctgatccagctggtgctgaagcagaaggagaccatcagcaagaaggagttccaggtgcgggagctggaggactacatcgacaacctgctggtgcgggtgatggaggagacccccaacatcctgcgcatccccacccaggtgggcaagaaggccggcaagatgtag

SEQ ID NO: 19620 - DNA, 3852 bp, Artificial Sequence
  derived and/or modified sequence
atgagcctgatggtgagcgccggccggggcctgggcgccgtgtggagcccgacccacgtgcaggtcacagtcctgcaggcgagggggctgcgagcaaagggccctggcgggacgtctgatgcctacgctgtgattcaagtaggtaaggaaaagtacgccactagcgtgtctgaacggagtcttggtgcaccggtctggagggaggaagctacatttgaacttccaagcctcctgagctccggccctgcggctgccgctactctgcagctaaccgtgctccacagggcactccttgggcttgataagttcctgggacgagcggaggttgacctgagggatcttcaccgcgatcagggaaggcgcaaaacccagtggtataaactaaagtccaagcctgggaagaaggataaggagaggggtgaaattgaagtcgatatccagtttatgcgcaacaacatgacagcgtcaatgttcgatctgtctatgaaagataagagcaggaatccctttggcaagttgaaggataagattaagggaaagaacaaggacagcggatcagacacagcgtctgccattatccccagcaccacgccctctgtcgattctgacgacgagtccgttgtcaaagacaagaaaaagaaatccaagatcaaaaccttgctgtccaaaagcaacttacagaagacgccactcagtcagtccatgagtgttctgcccaccagcaaaccggaaaaggttctgctcagacctggggactttcagagccagtgggatgaagacgataacgaagatgaatcatcgtccgcatctgacgtaatgtctcacaagcgcacagcatccactgaccttaagcaactcaaccaggtgaactttacattacctaagaaagagggtctttcattcctcgggggtctaagaagcaagaatgacgtgctgtcacgttccaacgtctgcataaatggtaatcacgtctatctggaacaaccagaggctaaaggcgagattaaggacagcagtccatcctcttccccaagtcctaaaggtttccgcaagaaacatctgtttagcagcaccgagaatctggcagctgggagctggaaggagccggccgagggagggggactctccagcgatcgacagctgtctgagtcctccacgaaggactccctgaaatccatgacactaccctcctaccgccccgctcccctcgtatctggcgatttgagggagaatatggccccggccaatagtgaggccaccaaggaggcgaaggaaagcaagaaacctgagtcacggaggtccagcttgctgtctctgatgactggtaaaaaggatgtggctaaaggatccgagggcgaaaatccacttactgtgccaggcagagaaaaagaggggatgctaatgggagtgaaacctggcgaagatgctagcggccctgccgaggacttggtaagaagatcagagaaagataccgcggccgtcgtcagccggcagggatccagtctcaacctgtttgaagatgtgcaaatcacagaaccggaagcagaacctgaatctaagagtgaacctcgaccaccgatttcttctcctagggcgccccagactagggccgtaaagcccaggttagaagtgtctcccgaggctcagcccaccgcacggctgccctctccaaccgattccccctcaagccttcccccactgccctcctcatctggccaggcttccgttcctagtgagctggggcatggagcggacacacagtcatcagagtctccttctgtgttttctagtttatcttcacctatagcagccccaatctctacgtccacaccaattgagagctggcctctcgtggaccgcggccaggctaaatcagagggaccacccctgttgcctaaagctgagttgcagacagagtctttgacgcccgtgccaaactccgggagctccgctttgggtagcctgttcaaacaaccatcattccctgccaacaaaggcacggaagacagtctgatggggcgtacccgggagaccggaacagagaagaatacaagtagtcttgaacttgaagaaagccttccggaacaacctgaaaccggccgtcaggaagaggagcttccaagattcccatgcaagaaacaggactattcaccctcctccggtgaggctcaagaagtgccattcgccctctctcttagctctgacggagcagtgtcccctgtgggcgaactcgccgcaggaggcgaccgggacctagagagtcaggcaggatctctggtggaaagcaaagcgcgggatgcggcagaggaggtggctccacccctcccaatgggggcatcagtgccgagtatcgacagtatgatgagaaagctggaagaaatgggattaaacctgcgcaaggaccaaaagaagactaaaaagcgggtatctttttctgagcagctgttcacagaagaggccgttgcgggagcagccttattggtcgagggccattcttcgtgccctcaggagctgaacccagcttggagcgtggccggcaacgcatcagacggtgagccacccgagagcccacacgctgaggattccgaacgggaatccgtcaccactccagggcccgcaacctgcggagcccccgcctcccccgcagaccatctgttgcttccctcccaagaggagagtttctcggaggtgcctatgagtgaagcaagcagcgcaaaggacaccccgctgtttcgaatggaaggggaggacgctctggttacccaataccagagcaaggcaagcgaccacgagggcctcctgagtgacccactctccgaccttcagctcgtttctgacttcaagagccctatcatggccgatctgaatctgtctctgccaagtataccagaggttgctagcgacgacgagaggattgatcaggtcgaagacgacggggaccaagtggaagatgacggggaaaccgctaaaagctcaacccttgatatcggggccctgtctctgggcctggtcgtgccttgcccggagagaggaaaaggaccttcaggcgaggcagaccgattagttctcggagaggggctgtgcgattttcgcctccaggcccctcaggcctccgtgaccgctccttctgagcagaccacggagttcgggatccataagccccatcttgggaagtcaagctccctggataagcaattgcccgggccttcgggaggtgaagaagagaagcccatggggaatggatcaccaagtcctcctcctgggacatcactggataatccagtgccttctccgagtccaagcgaaatattcccagttacgcatagttttcctagttcagcgcacagcgatacgcaccacacctctacggcagagagccagaagaaagccaccgccgaaggctctgccggtcgtgtggagaacttcgggaaaagaaaaccattactgcaggcatgggtgagtccatcagagacacaccccgtgagcgcccaacccggggcaggaactggaagcgcaaagcatcggctccaccctgtgaagcccatgaatgctatggccacaaaagtcgcaaactgctcactgggcactgctacaattatcagcgagaacctgaacaacgaagtcatgatgaagaaatactccccttcagatccagcttttgcttacgcacaattgacccacgacgagttgatccaactcgtcctaaagcagaaggagacgatatccaagaaagaattccaggtcagagaactggaggattatatcgataacttgttggtcagggtcatggaggaaactcccaacatactgcgcatccccactcaggttggaaaaaaggctgggaaaatgtag

SEQ ID NO: 19621 - DNA, 3852 bp, Artificial Sequence
  derived and/or modified sequence
atgtccctgatggtgtccgcaggtcggggtctcggagccgtatggtctccaacacatgtccaagtgaccgtcctccaggctcgcggtctgcgagctaaaggacccggtggaacaagcgacgcctacgcggtgatccaagtaggcaaagagaagtacgctacaagtgtcagcgaaaggtctctgggagctccagtgtggagggaagaggcgaccttcgagcttccgtccttgttatccagcgggcctgccgctgccgcaacactgcagttgaccgtgctacatcgtgctctgctgggacttgataagttcctggggagagccgaggtggatctcagagacctgcatagagaccaaggcaggaggaagactcagtggtacaaacttaaaagtaaacccggaaaaaaagataaggagaggggggagatcgaagtggatatccagtttatgagaaacaatatgaccgcatccatgttcgaccttagtatgaaggacaagtccaggaatccctttggaaaactgaaagataagatcaaaggcaagaataaagatagcggaagcgacacggccagtgcaatcatcccatcaacaacccctagtgtagatagcgatgatgaaagcgtggtaaaggacaaaaagaaaaaaagcaaaatcaaaaccctgctttcaaagtcgaaccttcagaaaaccccgcttagccagagcatgtccgttctcccgacaagtaagcctgagaaggtgttgctgagaccgggtgactttcagtctcagtgggatgaggatgataacgaggatgagagctctagcgccagcgacgtgatgtcccataaacggaccgcttcgactgacttaaaacaactaaaccaggtgaattttactctgcctaagaaggaggggctatccttcctgggaggccttagaagcaagaatgatgtgctctctagatctaacgtatgcatcaatggcaatcatgtttatcttgaacagcccgaggctaaaggtgaaatcaaggattcatccccttcctcctccccttcacccaagggattccgcaagaagcacctgttctcaagcactgagaacctggccgcaggtagctggaaggaacccgctgaaggagggggtctcagtagcgatcgccagctgagtgagtcaagcacaaaggacagcctgaagtctatgaccttgccaagctatcgcccagccccactggtgtccggcgatctgcgagaaaacatggcacccgctaatagtgaagcaacgaaagaagcgaaagagagcaagaagcctgagtcaagaagatcttctttgttatcactgatgaccggaaagaaggacgtggctaaaggcagcgaaggcgaaaatcccctcaccgtaccagggagggagaaggaggggatgctgatgggagttaagccgggagaagatgcatctggacccgcagaagatttagtgagacgcagcgaaaaagacaccgccgcagtggtgtcccggcaaggatcatctttaaatctttttgaggacgtgcaaatcacagaacccgaagcagagcccgagtctaaatccgaaccccgtccacctatctccagtcccagagccccacagacacgggcagtcaagcccagactcgaggttagcccagaggctcagccaaccgctagattaccatcacctaccgacagcccaagctcattgccccctcttccaagtagcagcgggcaggcaagcgtccctagcgaattgggccatggcgctgacacacaaagctctgaaagtccttccgtgttctcctcgctgtcctcccccattgctgcccctatctccacctccactcctatcgagagctggcctctggtcgatcgtggccaggccaaatcagaaggcccaccattacttcctaaggccgaactgcagactgagtctctgacaccagtccccaacagcgggtcttcggcactggggagcctttttaagcagccaagtttccccgctaataagggcaccgaagatagcctcatggggagaacccgggagaccggcactgagaagaatacgtccagcttggagcttgaggagagtctgcctgagcaaccggagaccggcaggcaggaggaagagcttcctagattcccttgcaaaaagcaggattatagtcctagtagcggtgaagcacaggaggttcccttcgccctgtccctaagctcagacggggcagtgtcccccgttggcgagctcgcagccggtggggaccgggatctggaatctcaggccggatcactggtggagtctaaagcaagagacgcagctgaggaagttgccccaccactgcctatgggggcatcagtgccatccatagatagcatgatgaggaagctggaagaaatgggcctgaatctgcgaaaagatcagaaaaagacaaagaagagagtctcattttcagagcagctgttcaccgaagaggccgtggcaggggcagccctgttagtcgaaggccatagcagctgcccgcaggagctgaacccagcatggtcagtagccggaaacgcgagcgatggtgagccacccgaaagtcctcacgccgaggattccgaacgggagtccgttacaaccccgggaccagccacgtgcggcgcaccggcaagcccagcggaccatctgctcttgcctagtcaggaagagtcgttcagtgaggttcctatgagcgaggcctcatctgccaaagatacacccctatttaggatggagggtgaggacgctctggtgacccaataccagagtaaggcttctgaccacgagggcctcttaagcgatcccttgtcagaccttcagctggtctccgatttcaaaagcccgatcatggcagacctaaacctgagtttaccatctatcccagaggtcgcctccgatgatgaacggatcgatcaagtcgaagatgatggcgatcaagtggaggacgacggcgaaactgcaaagagcagcacccttgatatcggtgctctgtcgctcggattggtggtcccttgtcccgagaggggcaaggggcctagcggtgaggccgacagattggtgttgggcgagggactgtgcgactttaggctccaggcccctcaggcctctgttaccgcaccaagcgaacagacaacagaattcgggattcacaagccccacctcgggaaaagcagtagcttggacaaacagctgcccggtccgtcgggaggggaggaggaaaagccaatgggaaatgggagccctagcccccctcctggaaccagcctcgataatcctgtgccatcaccatctccaagtgagatattccctgtgactcattctttccctagttctgcccattcagacacacaccacaccagcaccgccgagtcccagaaaaaggccacagctgaaggaagtgctggccgtgtcgagaattttggaaagagaaaacctctgctccaagcctgggtgtccccctctgaaacacatcctgtgtctgctcagcctggcgcaggcacaggcagtgctaaacaccgactacaccctgtgaagcctatgaacgctatggccacaaaggtggctaactgttctcttgggactgccacaataattagcgagaacttgaataatgaagtaatgatgaaaaagtacagccccagcgacccagccttcgcttatgcacagctgacgcatgacgagctgatccagttggtactgaagcaaaaagagacaatctccaagaaagagttccaggtgcgcgagctagaggattatatagataatctgctcgttcgagtaatggaagagaccccaaatatattaaggattccaacccaagttggaaagaaagcaggaaagatgtag

SEQ ID NO: 19622 - DNA, 7811 bp, Artificial Sequence
  derived and/or modified sequence
tgttatcgtcaccatgtccctaatggtctcggctggccggggcctgggggccgtgtggtccccaacccacgtgcaggtgacggtgctgcaggcgcggggcctgcgggccaagggccccgggggcacgagcgacgcgtacgcggtgatccaggtgggcaaggagaagtacgccacctccgtgtcggagcgcagcctgggcgcgcccgtgtggcgcgaggaggccaccttcgagctgccatcgctgctgtcctccggacccgcggccgccgccaccctgcagctcaccgtgctgcaccgcgcgctgctcggcctcgacaagttcctgggccgcgccgaggtggacctgcgggatctgcaccgcgaccagggccgcaggaagacgcagtggtataagttgaaatccaaaccaggaaagaaggacaaggagcgaggagaaattgaggttgacatccagtttatgagaaacaacatgactgccagcatgtttgacctttctatgaaagacaagtctcggaatccatttggaaagctgaaggacaagatcaaggggaagaataaggacagtgggtcagacaccgcctccgccatcatccctagcacgacaccttcggtcgacagtgatgatgagtctgtggttaaagacaagaaaaagaaatcaaagatcaagaccttactttccaagtcaaatttgcagaagacgcctctttcccagtccatgtctgtcctgccgacttcaaagccagaaaaagtgctgcttcgtcccggagactttcagtcccagtgggatgaagatgacaatgaggatgagtcctcctcggcctcggatgtcatgtctcacaagagaacagcgagtacggatcttaagcaactgaaccaggtcaactttacccttcccaagaaggaaggactttcctttcttggtggccttcggtctaagaatgatgtcctttcccgctctaatgtctgcatcaatgggaaccatgtttacctggagcagccagaagccaagggtgagatcaaggatagcagcccgtcctcctccccatcccccaagggcttcagaaagaagcatttgttctcttctacagagaacctggcggctgggtcttggaaggagcctgctgaaggaggtgggctgtcttctgacaggcagctctccgaatcttccaccaaggactccttgaagtctatgaccctgccgtcctaccgacctgccccactggtcagtggggacctcagggaaaacatggcccccgcaaactcagaggccacaaaagaagctaaggagagcaagaagccagagagcaggaggtcctctttgctgtctctgatgacggggaagaaggatgtggctaagggcagtgaaggtgaaaaccctctcacggtcccagggagggagaaggaaggcatgctgatgggggttaagccgggggaggacgcatcggggcctgctgaagaccttgtgagaagatctgagaaagatactgcagctgttgtctccagacagggcagctccctgaacctctttgaagatgtgcagatcacagaaccagaagctgagccagagtccaagtctgaaccgagacctccaatttcctctccgagggctccccagaccagagctgtcaagccccgactggaagtgtctccagaggcgcaacccacagccaggcttccttcccctactgactccccttcctctcttcctcctcttccttctagctctggccaggcatctgtcccctctgaattgggacatggtgcagacacacagtcctctgagagtccttctgtcttctcctctctctcatctcccatagcagctcccatttccacatccactccaattgaaagctggcctctcgtagacaggggccaggccaagtctgaaggaccacccttgctccctaaggcagagttgcaaactgagagtttaacaccggttccaaattctggttcttctgccctgggatcacttttcaaacagccatcctttccagcaaataaagggacagaagattctctgatgggcaggacccgtgagacaggcacagagaagaacaccagcagccttgagttggaggagtctctcccagagcagcctgaaacagggcgacaagaggaagaacttccgagattcccctgcaaaaaacaagactacagcccatcatctggagaagcccaggaagtaccgtttgccctttcactcagcagtgatggagctgtgagccctgttggggagcttgcagcaggaggagacagagacttggagagtcaggctgggtctcttgtggagagcaaagccagggatgcagctgaagaagtggcgccccctcttcccatgggagcatcagtcccttccattgattccatgatgcggaagctggaagagatgggtctgaacctccgcaaggaccagaagaaaaccaagaagcgtgtgtcattttctgagcagctcttcacggaagaggcagtggcgggggctgccttgctggtggaaggacacagcagttgtccccaggagctgaaccctgcatggtctgttgctggaaacgcgtctgacggagagcctcctgagtctccccacgcagaggactcagaaagggaatcggtgaccacacctgggccagcgacgtgtggtgcgccagcctccccagcggatcacctcctcctcccctcccaggaggagagtttctccgaagtccccatgagtgaagcaagctcagcgaaagacactccactctttaggatggagggagaggatgcccttgtgactcagtatcagagcaaagccagtgaccacgaaggtttattgtctgaccccttgagtgaccttcagttggtctcagattttaaatctccaatcatggccgatctgaacttaagccttccttccattcctgaagtcgcatcggatgatgaaagaatagatcaggttgaagatgacggagatcaggttgaagatgatggagagacagcaaagtcgtcaactctggacataggagctttgtccttgggcttggtagtcccctgtcctgagaggggaaaggggcccagtggcgaggcagataggttggtactgggggagggcctgtgtgatttcaggctgcaagcaccccaggcatctgtgacagctccttcagagcagaccacagagttcggaattcacaaaccacatcttggcaagagctcaagcttggataaacagctgccaggccccagtggtggtgaggaagaaaaaccgatgggaaatgggagtccaagcccgcctcctggcacatccctggacaatcctgtacccagcccctccccttctgagatctttcctgtcacacactctttccccagctctgcacattctgacactcaccacaccagcacagcagaatctcaaaaaaaagccacagcagagggctccgctggtagagttgaaaattttggcaagaggaagccactcctccaggcctgggtctcaccctcggagacacatccagtctcagctcagccaggcgctggaactgggtcagccaagcacagacttcatcctgtgaagccaatgaatgcaatggccaccaaggttgctaactgcagcttgggaactgccaccatcatcagtgagaacttgaacaatgaggtcatgatgaagaaatacagcccctcggaccctgcatttgcatatgcgcagctgacccacgatgagctgattcagctggtcctcaaacagaaggaaacgataagcaagaaggagttccaggtccgcgagctggaagactacattgacaacctgcttgtcagggtcatggaagaaacccccaatatcctccgcatcccgactcaggttggcaaaaaagcaggaaagatgtaaatcagcagaaaaaaaacaccgagacgtttctgtgacttcactttcacctgctccaggggtcaaggacttgccttgcctgataaccagccagcaggctccgaatcaccatctccctcacatgttatccggcaagagtgaattctaccaatggaagccaggttaatgattacaattaatcttttactgtacattcccaaggctttagttttaaatgccactgtgcctttaacaaggttgtaaatattttatgcccaccagagatgtggtcataagatctgatcctgagccagagattcagatggcacaggaagtattcatgtattttaacactggggttttctttctttcatactgagattttttttcagtatgtatcctccagctcttaaagcttacctgagaaagctttaaatgagaaaaggaccatgcgattggtgctgtgttacatacacatactttcttggcttctgagtagctcaggtgtggcttttggctgcagatgttaaattttgataccatgtaaacctacccagcttctcagacttgggtcttgttttttgatgggaacagaggtgtttagagaaagcctctgagtatgcctttcagattttgaacaagcggccttttctaaacatcgacttctactactctctagccttaaaataccttctgcttagatccagggcccttctactggagataggaaaagtagaattcaggaattaaaagaattactctttattcaatttgaggaacttggtgaaagcccctcctcttatgacagccaggttcctgctggctagaccagcctattcagcgctttgctaggggattgggtggtccacgcactcgctaatacagttctccaggtgtggaatgatgtcaatacgattgcttggccttttccccctgtgcctttgctcggtgctctggtttcctcagcaacactccttgtaaggggcagagacagggtccaccaactccccaagatgaagaagccccttcaggccagtcgtggtggctcatgcctgtaatcccagcactttgcaaggccgaggagggtggatcacttgaggtcaggagttcgagaccagcctgaccaacatggcgaaaccccatctctactaaaaatacaaaaattagcttggcatggtggtgcgtgcctgtaatcccagctactcgggaggctggggcaggagaattgcttgaacttgggagatggaggctgcagcgagccaagatcgtgccactgcactccagcctgggcaagagtttttttaagactcttaaaaaaagagcctgggcaatttttttaagactctgtcttaaaaaaaactaaaaagaaaaaaagaagccccttcactctacaggggacaggagaccatggattggaccccaaagggattgaactgcatctgcatgtctgtcctttgaacactttctctccctgcccaaaaggaaacccaaattatttgtgggatactggggaaattgtagtgaagggcttaatgtagttaataaaagttaaaagtcagtagaaaacaggtgcctcagccttcaaatggttgctttttttccattttccctcatgaatagactcaccagcattttacccccttgttataaaactgtgcagagcaagaagatgatacttatttttgaatttgtatttttaaaactagatttatagactttttttttttttaactagggcacttgcttccttcttagctaaaagcaccagctgagatttttcaggtaattttgttgttactcacttaagactggaattagaatgtttctggtatttctcatttttttccctggctatgatagaatctcatctaatcttgacatctctcctaggggaagaatatcacaggctaatagcgtggttgggggtgaagatgatagcagttattaaatcaggaatctcttttatgtgtgtccttgttacattgaggttaagagacaaaatcattggcagtgcaatctctttccaggatttcgtttgctgtggcattggttatatcagagcactttaatctgaaggatgatactgtaacttgatttatctaattagcttttaattatctacagctattttattttatttaattctctcctacagtactgggaccactgtaaacttctcagatgacttgtatttttgtagtgctatgaaatttatttacatacttataaagaaaactgtatgttcacttgaactctgaaaatgtacatgtatggctggacgcggtggctcacgcctgtaatcccagcactttgggaggctgaggcgggtgaatcacttgattgaggtcaggagttcgagaccagcctggccaacatggcaaaaccccgtctctactaaaaaatacagaaattagctgggtgtggtggcagacagctgtaatctcagctgctcgggaggctgaggcacaagaatcgcttgagccagggaggtggaggttgcagtgagctgagatcacatcattgcactccagcctgggcaacgggcgagactctgtctcaaaaaaaagaaagaaagaaaaggtacatgtatatatttgtcctgcattatgttttttacttgatataaatgtatttttactgtgatagtccaagtgccctggggggcaggtgtgctctatgtggttcttcttccattggagagctggcgtagagatctgcagtgttcacaaggatgttggtttggagatgtctgctgctaggacctggggtgtgtgactcagtccatatgagagggacatctgggtggaggagtaaattcctgtgctctgaaatgccacttggtagctctggacaatgaaggacaattgactcaagggtgcctggcttctgctgctgctgggaaaaaattcagtttatagcattcctgcacctcccaaagtagataacctggaggtcattcagttaacaactgtccctgaggactcagttttgggggaggggttatctgggagaagctttagcctgttctgagccattaggagacattagtgaattggagcactggagaatcctacaaatggcctatgtctcagaagagctgggacctccttccagctgctgcagatgctgacaggccctgggaggctgctgtgctctggagaagctggagcagctcatttcttggcctagcctggctgcctcagaaagagcagtcaggacttgagggaagcatcaaattctatacccataaactgcagttggaagtcagctttttgaaatgtccagcctttgcccaattgtttcagatcatctcatgcctcaggctttggcaggtatcctgccctccatcttattccagtgtgttcacctcatcaaggcagcagagtggatgaaggagtaagtctgccctttgccatactgaacagctgtggaccccgattggtgagggctctgcatatgcctgtatgaaggagatacaggtgtgtgtgcacatgccggtatgaagaagacacaggcatgtgcttctcagttttgctaacagtgggagctcaacggggcagagggaggaaggtccatgatgctcagccacatactgtagagagaggcaatttaatgttaaatgacgcaccatcctccctcccacccttctcccagtcaactttttttctttttctagaactactaattatctctcaaggctgaaaaattaattgccttaggtggagaacttaattcctagtatccaccaaacttaactccgtatctccatatggtgtctccatatctactgtgtgagctacttaactgacgccctcttcctccaactgaaggatcgcccaacgtttttggattatagaattattatttcctgctttctttctttgggacttttgaatttctttggtttcgtttttaagaagtaacccaacatttcctacaacactaaataaaatggtacttacctttcaaa

SEQ ID NO: 19623 - DNA, 3852 bp, Artificial Sequence
  derived and/or modified sequence
atgagcctgatggtgagcgccggcagaggcctgggcgccgtgtggagccccacccacgtgcaggtgaccgtgctgcaggccagaggcctgagagccaagggccccggcggcaccagcgacgcctacgccgtgatccaggtgggcaaggagaagtacgccaccagcgtgagcgagagaagcctgggcgcccccgtgtggagagaggaggccaccttcgagctgcccagcctgctgagcagcggccccgccgccgccgccaccctgcagctgaccgtgctgcacagagccctgctgggcctggacaagttcctgggcagagccgaggtggacctgagagacctgcacagagaccagggcagaagaaagacccagtggtacaagctgaagagcaagcccggcaagaaggacaaggagagaggcgagatcgaggtggacatccagttcatgagaaacaacatgaccgccagcatgttcgacctgagcatgaaggacaagagcagaaaccccttcggcaagctgaaggacaagatcaagggcaagaacaaggacagcggcagcgacaccgccagcgccatcatccccagcaccacccccagcgtggacagcgacgacgagagcgtggtgaaggacaagaagaagaagagcaagatcaagaccctgctgagcaagagcaacctgcagaagacccccctgagccagagcatgagcgtgctgcccaccagcaagcccgagaaggtgctgctgagacccggcgacttccagagccagtgggacgaggacgacaacgaggacgagagcagcagcgccagcgacgtgatgagccacaagagaaccgccagcaccgacctgaagcagctgaaccaggtgaacttcaccctgcccaagaaggagggcctgagcttcctgggcggcctgagaagcaagaacgacgtgctgagcagaagcaacgtgtgcatcaacggcaaccacgtgtacctggagcagcccgaggccaagggcgagatcaaggacagcagccccagcagcagccccagccccaagggcttcagaaagaagcacctgttcagcagcaccgagaacctggccgccggcagctggaaggagcccgccgagggcggcggcctgagcagcgacagacagctgagcgagagcagcaccaaggacagcctgaagagcatgaccctgcccagctacagacccgcccccctggtgagcggcgacctgagagagaacatggcccccgccaacagcgaggccaccaaggaggccaaggagagcaagaagcccgagagcagaagaagcagcctgctgagcctgatgaccggcaagaaggacgtggccaagggcagcgagggcgagaaccccctgaccgtgcccggcagagagaaggagggcatgctgatgggcgtgaagcccggcgaggacgccagcggccccgccgaggacctggtgagaagaagcgagaaggacaccgccgccgtggtgagcagacagggcagcagcctgaacctgttcgaggacgtgcagatcaccgagcccgaggccgagcccgagagcaagagcgagcccagaccccccatcagcagccccagagccccccagaccagagccgtgaagcccagactggaggtgagccccgaggcccagcccaccgccagactgcccagccccaccgacagccccagcagcctgccccccctgcccagcagcagcggccaggccagcgtgcccagcgagctgggccacggcgccgacacccagagcagcgagagccccagcgtgttcagcagcctgagcagccccatcgccgcccccatcagcaccagcacccccatcgagagctggcccctggtggacagaggccaggccaagagcgagggcccccccctgctgcccaaggccgagctgcagaccgagagcctgacccccgtgcccaacagcggcagcagcgccctgggcagcctgttcaagcagcccagcttccccgccaacaagggcaccgaggacagcctgatgggcagaaccagagagaccggcaccgagaagaacaccagcagcctggagctggaggagagcctgcccgagcagcccgagaccggcagacaggaggaggagctgcccagattcccctgcaagaagcaggactacagccccagcagcggcgaggcccaggaggtgcccttcgccctgagcctgagcagcgacggcgccgtgagccccgtgggcgagctggccgccggcggcgacagagacctggagagccaggccggcagcctggtggagagcaaggccagagacgccgccgaggaggtggccccccccctgcccatgggcgccagcgtgcccagcatcgacagcatgatgagaaagctggaggagatgggcctgaacctgagaaaggaccagaagaagaccaagaagagagtgagcttcagcgagcagctgttcaccgaggaggccgtggccggcgccgccctgctggtggagggccacagcagctgcccccaggagctgaaccccgcctggagcgtggccggcaacgccagcgacggcgagccccccgagagcccccacgccgaggacagcgagagagagagcgtgaccacccccggccccgccacctgcggcgcccccgccagccccgccgaccacctgctgctgcccagccaggaggagagcttcagcgaggtgcccatgagcgaggccagcagcgccaaggacacccccctgttcagaatggagggcgaggacgccctggtgacccagtaccagagcaaggccagcgaccacgagggcctgctgagcgaccccctgagcgacctgcagctggtgagcgacttcaagagccccatcatggccgacctgaacctgagcctgcccagcatccccgaggtggccagcgacgacgagagaatcgaccaggtggaggacgacggcgaccaggtggaggacgacggcgagaccgccaagagcagcaccctggacatcggcgccctgagcctgggcctggtggtgccctgccccgagagaggcaagggccccagcggcgaggccgacagactggtgctgggcgagggcctgtgcgacttcagactgcaggccccccaggccagcgtgaccgcccccagcgagcagaccaccgagttcggcatccacaagccccacctgggcaagagcagcagcctggacaagcagctgcccggccccagcggcggcgaggaggagaagcccatgggcaacggcagccccagccccccccccggcaccagcctggacaaccccgtgcccagccccagccccagcgagatcttccccgtgacccacagcttccccagcagcgcccacagcgacacccaccacaccagcaccgccgagagccagaagaaggccaccgccgagggcagcgccggcagagtggagaacttcggcaagagaaagcccctgctgcaggcctgggtgagccccagcgagacccaccccgtgagcgcccagcccggcgccggcaccggcagcgccaagcacagactgcaccccgtgaagcccatgaacgccatggccaccaaggtggccaactgcagcctgggcaccgccaccatcatcagcgagaacctgaacaacgaggtgatgatgaagaagtacagccccagcgaccccgccttcgcctacgcccagctgacccacgacgagctgatccagctggtgctgaagcagaaggagaccatcagcaagaaggagttccaggtgagagagctggaggactacatcgacaacctgctggtgagagtgatggaggagacccccaacatcctgagaatccccacccaggtgggcaagaaggccggcaagatgtag

SEQ ID NO: 19624 - protein, 197 aa, Artificial Sequence
  derived and/or modified sequence
MAPKKPEPKKEAAKPAPAPAPAPAPAPAPAPEAPKEPAFDPKSVKIDFTADQIEEFKEAFSLFDRTPTGEMKITYGQCGDVLRALGQNPTNAEVLRVLGKPKPEEMNVKMLDFETFLPILQHISRNKEQGTYEDFVEGLRVFDKESNGTVMGAELRHVLATLGEKMTEAEVEQLLAGQEDANGCINYEAFVKHIMSG

SEQ ID NO: 19625 - protein, 87 aa, Artificial Sequence
  derived and/or modified sequence
PEAPKEPAFDPKSVKVIGCPCPRSQSHGAVIDFTADQIEEFKEAFMGAELRHVLATLVIKSAPPPKPTAGEKMTEAEVEQLLAGQED

SEQ ID NO: 19626 - DNA, 594 bp, Artificial Sequence
  derived and/or modified sequence
atggcacctaaaaaacctgagccgaagaaagaagcagcaaagcctgccccagctcccgcccccgcccccgctccagcccccgcccccgcaccagaagctccgaaagaacctgcatttgaccctaagtccgtcaagatcgattttaccgccgaccaaatcgaggagtttaaggaggctttttctctttttgacagaacaccaacaggagaaatgaaaattacctatggacaatgcggagatgtgctgcgggcactcggtcagaatccgacaaacgctgaagtgttgagagtgttgggcaaaccaaagcctgaagagatgaacgtgaagatgttggatttcgagacattcctgccaattttacagcatataagtaggaataaggaacaggggacctacgaagacttcgtggaaggtctgcgtgtgtttgacaaggaaagcaacggaactgtgatgggtgcggaactgaggcacgtgctcgcaaccttaggcgagaagatgacagaagctgaagtggagcagttgctcgccggccaggaggacgctaatggttgcattaattacgaagcttttgttaagcatatcatgagcgggtag

SEQ ID NO: 19627 - DNA, 594 bp, Artificial Sequence
  derived and/or modified sequence
atggcaccaaagaagccagaacctaagaaagaggccgctaaacccgcacctgctcccgcacccgcccccgctccagcgcctgctccggccccggaggcacccaaagaacccgccttcgatccaaaatctgtgaagattgattttaccgctgatcaaatagaagagtttaaggaggcgtttagcctgttcgatcgaacccccactggagagatgaagatcacttacggccagtgcggggatgtactgcgcgcccttggccaaaatccaacaaacgcagaggtccttagggttttaggaaaaccaaaaccagaagaaatgaatgtgaagatgttagatttcgagacgttcctgccgattttgcaacatatcagccgaaacaaggaacagggcacgtacgaggacttcgtcgaagggctgagggtttttgacaaggaatctaacggtactgtgatgggtgccgagctgaggcatgtgctggccacccttggcgaaaagatgaccgaggccgaggttgagcagctcctggctggccaagaggacgcgaacggatgcattaactacgaggcctttgtgaaacatatcatgtccggatag

SEQ ID NO: 19628 - DNA, 264 bp, Artificial Sequence
  derived and/or modified sequence
ccagaggctcccaaggagccagcattcgatccaaaaagcgtgaaagttattggatgtccctgtccccgctctcagtctcatggggctgtgatcgacttcacagctgaccagatcgaagagttcaaggaagccttcatgggagctgagctcaggcacgtgctggcaaccctggtcattaagtcagctcctccgcctaaaccaaccgccggagagaagatgaccgaggcagaagtggaacagttgctggctggacaggaagattag

SEQ ID NO: 19629 - DNA, 594 bp, Artificial Sequence
  derived and/or modified sequence
atggcccccaagaagccagagcccaagaaggaggccgccaagccagccccagccccagccccagccccagccccagccccagccccagcccctgaggcccccaaggagcccgcctttgaccccaagtctgtgaagattgacttcaccgctgaccagatcgaggagttcaaggaggccttcagcctgtttgacaggacccccaccggggagatgaagatcacctacggccagtgtggagatgtgctgcgggccctgggccagaaccccaccaatgctgaggtgctgcgggtgctgggcaagcccaagccagaggagatgaatgtgaagatgctggactttgagaccttcctgcccatcctgcagcacatcagcaggaacaaggagcagggcacctatgaagattttgtggagggcctgcgggtgtttgacaaggagagcaatggaacagtgatgggcgctgagctgcggcacgtgctggccaccctgggggagaagatgacagaagctgaggtggagcagctgctggccggccaggaggatgccaacggctgcatcaactatgaggcctttgtgaagcacatcatgagcggctag

SEQ ID NO: 19630 - DNA, 264 bp, Artificial Sequence
  derived and/or modified sequence
cctgaggcccccaaggagcccgcctttgaccccaagtctgtgaaggtgattggctgcccctgccccaggagccagagccatggagctgtgattgacttcaccgctgaccagatcgaggagttcaaggaggccttcatgggcgctgagctgcggcacgtgctggccaccctggtgatcaagagcgcccccccacccaagcccacagctggggagaagatgacagaggccgaggtggagcagctgctggccggccaggaggactag

SEQ ID NO: 19631 - DNA, 907 bp, Artificial Sequence
  derived and/or modified sequence
ctctctggctgctccggcatatttgagaaggtctgtttccctggtccttctgggtttccaccaattggcaagaagggatcagcctgtcctagagatcactcctctgccaaagatcccaacaagacaacatggctcccaagaagcctgagcctaagaaggaggcagccaagccagctccagctccagctccagcccctgcaccagcccctgccccagctcctgaggctcccaaggaacctgcctttgaccccaagagtgtaaagatagacttcactgccgaccagattgaagagttcaaagaggccttttcattgtttgaccggaccccgactggagagatgaagatcacctacggccagtgcggggatgtactgcgggccctgggccagaaccctaccaatgccgaggtgctgcgtgtgctgggcaagcccaagcctgaagagatgaatgtcaagatgctggactttgagacgttcttgcccatcctgcagcacatttcccgcaacaaggagcagggcacctatgaggacttcgtggagggcctgcgtgtctttgacaaggagagcaatggcacggtcatgggtgctgagcttcggcacgtccttgccaccctgggagagaagatgactgaggctgaagtggagcagctgttagctgggcaagaggatgccaatggctgcatcaattatgaagcctttgtcaagcacatcatgtcagggtgaagcagagtcttccaggtgcctggcccttggctttagccataccagggtgagttaaagagaggccccggctgggtgagctgagatggagtcctcgacttatcaccacaccactgccccaaggaccttacaggccctccctgttaataaacagctctaacacggccaggctgggctctgggattctg

SEQ ID NO: 19632 - DNA, 855 bp, Artificial Sequence
  derived and/or modified sequence
atctcatctcccagacgccacgtctctcggtttcttcttagatcactcctctgccaaagatcccaacaagacaacatggctcccaagaagcctgagcctaagaaggaggcagccaagccagctccagctccagctccagcccctgcaccagcccctgccccagctcctgaggctcccaaggaacctgcctttgaccccaagagtgtaaagatagacttcactgccgaccagattgaagagttcaaagaggccttttcattgtttgaccggaccccgactggagagatgaagatcacctacggccagtgcggggatgtactgcgggccctgggccagaaccctaccaatgccgaggtgctgcgtgtgctgggcaagcccaagcctgaagagatgaatgtcaagatgctggactttgagacgttcttgcccatcctgcagcacatttcccgcaacaaggagcagggcacctatgaggacttcgtggagggcctgcgtgtctttgacaaggagagcaatggcacggtcatgggtgctgagcttcggcacgtccttgccaccctgggagagaagatgactgaggctgaagtggagcagctgttagctgggcaagaggatgccaatggctgcatcaattatgaagcctttgtcaagcacatcatgtcagggtgaagcagagtcttccaggtgcctggcccttggctttagccataccagggtgagttaaagagaggccccggctgggtgagctgagatggagtcctcgacttatcaccacaccactgccccaaggaccttacaggccctccctgttaataaacagctctaacacggccaggctgggctctgggattctga

SEQ ID NO: 19633 - DNA, 261 bp, Artificial Sequence
  derived and/or modified sequence
cctgaggctcccaaggaacctgcctttgaccccaagagtgtaaaggtaatagggtgtccatgccccagatcgcagtcccatggggcagtgatagacttcactgccgaccagattgaagagttcaaagaggcctttatgggtgctgagcttcggcacgtccttgccaccctggtaattaagagcgcaccacctcccaaacccaccgcaggagagaagatgactgaggctgaagtggagcagctgttagctgggcaagaggat

SEQ ID NO: 19634 - DNA, 594 bp, Artificial Sequence
  derived and/or modified sequence
atggcccccaagaagcccgagcccaagaaggaggccgccaagcccgctccagccccagcaccggccccagctcccgccccagcgccggctcccgaagctcccaaggaaccagcattcgaccccaaaagtgtgaagatcgattttactgctgatcagatagaagaattcaaagaagccttttccctgtttgatcgtactcctactggcgagatgaaaatcacttacggtcagtgcggcgacgttttgagagcgctcgggcaaaacccaacaaatgccgaggtgctccgtgtgctgggtaagcccaagcctgaggaaatgaacgtcaaaatgctggatttcgagacttttctgcctatcctgcagcatatatcacggaacaaggaacaaggaacatacgaggattttgttgagggcctacgggttttcgataaagaatccaacgggacggtcatgggcgccgaacttcgccatgtcctggctactctgggagaaaagatgaccgaggctgaggtggagcagttgctggccgggcaggaggacgcaaatgggtgtatcaactatgaagccttcgtcaagcacatcatgtcgggctag

SEQ ID NO: 19635 - DNA, 594 bp, Artificial Sequence
  derived and/or modified sequence
atggcccccaagaagcccgagcccaagaaggaggccgccaagcccgcgccggccccagcgccagcacccgcacctgccccggccccagcaccagaagcccctaaggagcctgcatttgacccgaagagcgtgaagatcgacttcactgcggaccagattgaggagtttaaggaagctttttcacttttcgaccggacgcctaccggagagatgaagatcacctatggtcagtgcggtgacgtgctacgagccctggggcagaatccaactaacgccgaggtgctgagagtgttgggcaagcccaagcctgaagaaatgaacgtgaagatgctggactttgagacgtttctccctatcctccaacatatctctcgcaacaaggaacaaggcacatatgaggatttcgtcgagggtctgcgcgtgttcgacaaagagagtaatgggaccgttatgggggcagaactgcggcatgtgctggccactctgggagagaagatgacagaagccgaagtggagcagctcctcgccggccaggaagatgccaacggatgtattaactacgaggccttcgttaaacacatcatgtccggctag

SEQ ID NO: 19636 - DNA, 264 bp, Artificial Sequence
  derived and/or modified sequence
cccgaggcccccaaggagcccgccttcgaccccaagagcgtgaaggtcattgggtgcccttgtccccgttcacaatcgcacggggcagtcatcgactttacagccgaccagattgaagaattcaaggaagccttcatgggtgccgaactaagacacgtcctcgctactttagtgattaagagcgccccgccccccaaaccgacggcaggagagaaaatgacagaggccgaggtcgagcagctcctcgcagggcaagaggactag

SEQ ID NO: 19637 - DNA, 594 bp, Artificial Sequence
  derived and/or modified sequence
atggccccaaagaaacctgagccaaaaaaagaggccgctaaaccagcacccgctcccgcaccagccccagcacccgcaccggcaccagcgcctgaagcaccgaaggagcctgcatttgaccctaagtccgttaagatcgatttcaccgctgatcagattgaagaattcaaagaggcatttagcctttttgatcggactcccactggggaaatgaaaataacttacggccagtgcggggacgttctcagggctctggggcagaaccctaccaacgccgaggtgctgcgtgtgctaggtaaacctaaacctgaagagatgaacgtaaagatgctcgactttgaaactttcctgccaatcttgcagcatatatctcgcaataaggaacaggggacctacgaggattttgtcgaggggttgcgggtctttgataaagagtctaatgggaccgttatgggtgcggagctgaggcacgtactcgctaccttaggcgaaaagatgactgaggccgaggttgagcagctcctagctggacaggaggatgccaacggttgcatcaattatgaggcattcgtcaaacacattatgtccggttag

SEQ ID NO: 19638 - DNA, 594 bp, Artificial Sequence
  derived and/or modified sequence
atggcaccaaagaagccagaaccaaagaaagaggccgcaaagccggcacctgcccctgccccagcacccgcaccagcccctgcacccgctccggaagcgcctaaggaacctgcatttgaccccaagtcagtaaaaatagacttcactgccgaccagatcgaggagttcaaagaggccttttccctattcgaccgtacgcctacaggcgaaatgaagatcacctatgggcagtgcggggacgtgctcagagcgctcgggcagaaccctaccaatgcagaagtcctgcgcgtgttgggcaagccaaagcccgaggagatgaacgttaaaatgttagatttcgagaccttccttcctatccttcagcacatatcccgcaataaggaacagggcacttacgaagatttcgtggagggcctgcgcgtgtttgacaaggagtcaaatggcaccgtgatgggtgccgagctccgtcatgtcctcgccactcttggcgagaagatgactgaagcagaggtagagcagctcctggcaggccaagaagacgcaaacggatgcattaattatgaggcctttgtaaaacatatcatgagcggatag

SEQ ID NO: 19639 - DNA, 264 bp, Artificial Sequence
  derived and/or modified sequence
cctgaagcaccaaaggagcccgctttcgatcccaagagcgtgaaagtgatcgggtgtccatgtcccaggtctcagtcccacggagcagtaatcgactttaccgctgatcagattgaggaattcaaggaggcttttatgggagcggaactccgccacgtcctcgcgacactcgtcattaagtccgctcctccccctaagcccacagccggagagaaaatgaccgaagcagaggtcgagcaactccttgccggacaggaggactag

SEQ ID NO: 19640 - DNA, 594 bp, Artificial Sequence
  derived and/or modified sequence
atggcccccaagaagcccgagcccaagaaggaggccgccaagcccgcccccgcccccgcccccgcccccgcccccgcccccgcccccgcccccgaggcccccaaggagcccgccttcgaccccaagagcgtgaagatcgacttcaccgccgaccagatcgaggagttcaaggaggccttcagcctgttcgacagaacccccaccggcgagatgaagatcacctacggccagtgcggcgacgtgctgagagccctgggccagaaccccaccaacgccgaggtgctgagagtgctgggcaagcccaagcccgaggagatgaacgtgaagatgctggacttcgagaccttcctgcccatcctgcagcacatcagcagaaacaaggagcagggcacctacgaggacttcgtggagggcctgagagtgttcgacaaggagagcaacggcaccgtgatgggcgccgagctgagacacgtgctggccaccctgggcgagaagatgaccgaggccgaggtggagcagctgctggccggccaggaggacgccaacggctgcatcaactacgaggccttcgtgaagcacatcatgagcggctag

SEQ ID NO: 19641 - DNA, 264 bp, Artificial Sequence
  derived and/or modified sequence
cccgaggcccccaaggagcccgccttcgaccccaagagcgtgaaggtgatcggctgcccctgccccagaagccagagccacggcgccgtgatcgacttcaccgccgaccagatcgaggagttcaaggaggccttcatgggcgccgagctgagacacgtgctggccaccctggtgatcaagagcgcccccccccccaagcccaccgccggcgagaagatgaccgaggccgaggtggagcagctgctggccggccaggaggactag

SEQ ID NO: 19642 - protein, 966 aa, Artificial Sequence
  derived and/or modified sequence
MAELFMECEEEELEPWQKKVKEVEDDDDDEPIFVGEISSSKPAISNILNRVNPSSYSRGLKNGALSRGITAAFKPTSQHYTNPTSNPVPASPINFHPESRSSDSSVIVQPFSKPGYITNSSRVVSNKSSELLFDLTQDTGLSHYQGGPTLSMAGMSESSFLSKRPSTSEVNNVNPKKPKPSESVSGANSSAVLPSVKSPSVTSSQAMLAKGTNTSSNQSKNGTPFPRACPKCNIHFNLLDPLKNHMKYCCPDMINNFLGLAKTEFSSTVNKNTTIDSEKGKLIMLVNDFYYGKHEGDVQEEQKTHTTFKCFSCLKILKNNIRFMNHMKHHLELEKQSSESWENHTTCQHCYRQFPTPFQLQCHIESTHTPHEFSTICKICELSFETEHVLLQHMKDNHKPGEMPYVCQVCNYRSSSFSDVETHFRTSHENTKNLLCPFCLKVIKIATPYMHHYMKHQKKGIHRCTKCRLQFLTCKEKMDHKTQHHRTFIKPKQLEGLPPGTKVTIRASVGPLQSGASPTPSISASASTLQLSPPRTKNITAKNPAKSNTSKPNTVKSNASKPNTSKPNGSKSKYKPKISNMQKKQSTLASSNKKSKVNTALRNLRYRRGIHKCIECCSEIKDFANHFPTYVHCSFCRYNTSCSKAYVNHMMSFHSNRPSKRFCIFKKHSENLRGITLVCLNCDFLSDVSGLDNMATHLSQHKTHTCQVVMQKVSVCIPTSEHLSELKKEAPAKEQEPVSKEIARPNMAERETETSNSESKQDKAASSKEKNGCNANSFEGSSTTKSEESITVSDKENETCLADQETGSKNIVSCDSNIGADKVEKKKQIQHVCQEMELKMCQSSENIILSDQIKDHNSSEARFSSKNIKDLRLASDNVSIDQFLRKRHEPESVSSDVSEQGSIHLEPLTPSEVLEYEATEILQKGSGDPSAKTDEVVSDQTDDIPGGNNPSTTEATVDLEDEKERS

SEQ ID NO: 19643 - DNA, 2901 bp, Artificial Sequence
  derived and/or modified sequence
atggccgagctgttcatggagtgcgaggaggaggagctggagccctggcagaagaaggtgaaggaggtggaggacgacgacgacgacgagcccatcttcgtgggcgagatcagcagcagcaagcccgccatcagcaacatcctgaacagagtgaaccccagcagctacagcagaggcctgaagaacggcgccctgagcagaggcatcaccgccgccttcaagcccaccagccagcactacaccaaccccaccagcaaccccgtgcccgccagccccatcaacttccaccccgagagcagaagcagcgacagcagcgtgatcgtgcagcccttcagcaagcccggctacatcaccaacagcagcagagtggtgagcaacaagagcagcgagctgctgttcgacctgacccaggacaccggcctgagccactaccagggcggccccaccctgagcatggccggcatgagcgagagcagcttcctgagcaagagacccagcaccagcgaggtgaacaacgtgaaccccaagaagcccaagcccagcgagagcgtgagcggcgccaacagcagcgccgtgctgcccagcgtgaagagccccagcgtgaccagcagccaggccatgctggccaagggcaccaacaccagcagcaaccagagcaagaacggcacccccttccccagagcctgccccaagtgcaacatccacttcaacctgctggaccccctgaagaaccacatgaagtactgctgccccgacatgatcaacaacttcctgggcctggccaagaccgagttcagcagcaccgtgaacaagaacaccaccatcgacagcgagaagggcaagctgatcatgctggtgaacgacttctactacggcaagcacgagggcgacgtgcaggaggagcagaagacccacaccaccttcaagtgcttcagctgcctgaagatcctgaagaacaacatcagattcatgaaccacatgaagcaccacctggagctggagaagcagagcagcgagagctgggagaaccacaccacctgccagcactgctacagacagttccccacccccttccagctgcagtgccacatcgagagcacccacaccccccacgagttcagcaccatctgcaagatctgcgagctgagcttcgagaccgagcacgtgctgctgcagcacatgaaggacaaccacaagcccggcgagatgccctacgtgtgccaggtgtgcaactacagaagcagcagcttcagcgacgtggagacccacttcagaaccagccacgagaacaccaagaacctgctgtgccccttctgcctgaaggtgatcaagatcgccaccccctacatgcaccactacatgaagcaccagaagaagggcatccacagatgcaccaagtgcagactgcagttcctgacctgcaaggagaagatggaccacaagacccagcaccacagaaccttcatcaagcccaagcagctggagggcctgccccccggcaccaaggtgaccatcagagccagcgtgggccccctgcagagcggcgccagccccacccccagcatcagcgccagcgccagcaccctgcagctgagcccccccagaaccaagaacatcaccgccaagaaccccgccaagagcaacaccagcaagcccaacaccgtgaagagcaacgccagcaagcccaacaccagcaagcccaacggcagcaagagcaagtacaagcccaagatcagcaacatgcagaagaagcagagcaccctggccagcagcaacaagaagagcaaggtgaacaccgccctgagaaacctgagatacagaagaggcatccacaagtgcatcgagtgctgcagcgagatcaaggacttcgccaaccacttccccacctacgtgcactgcagcttctgcagatacaacaccagctgcagcaaggcctacgtgaaccacatgatgagcttccacagcaacagacccagcaagagattctgcatcttcaagaagcacagcgagaacctgagaggcatcaccctggtgtgcctgaactgcgacttcctgagcgacgtgagcggcctggacaacatggccacccacctgagccagcacaagacccacacctgccaggtggtgatgcagaaggtgagcgtgtgcatccccaccagcgagcacctgagcgagctgaagaaggaggcccccgccaaggagcaggagcccgtgagcaaggagatcgccagacccaacatggccgagagagagaccgagaccagcaacagcgagagcaagcaggacaaggccgccagcagcaaggagaagaacggctgcaacgccaacagcttcgagggcagcagcaccaccaagagcgaggagagcatcaccgtgagcgacaaggagaacgagacctgcctggccgaccaggagaccggcagcaagaacatcgtgagctgcgacagcaacatcggcgccgacaaggtggagaagaagaagcagatccagcacgtgtgccaggagatggagctgaagatgtgccagagcagcgagaacatcatcctgagcgaccagatcaaggaccacaacagcagcgaggccagattcagcagcaagaacatcaaggacctgagactggccagcgacaacgtgagcatcgaccagttcctgagaaagagacacgagcccgagagcgtgagcagcgacgtgagcgagcagggcagcatccacctggagcccctgacccccagcgaggtgctggagtacgaggccaccgagatcctgcagaagggcagcggcgaccccagcgccaagaccgacgaggtggtgagcgaccagaccgacgacatccccggcggcaacaaccccagcaccaccgaggccaccgtggacctggaggacgagaaggagagaagctag

SEQ ID NO: 19644 - DNA, 2901 bp, Artificial Sequence
  derived and/or modified sequence
atggcagaactgtttatggaatgcgaggaagaagagctggaaccttggcagaagaaagtcaaggaggtggaagatgacgatgacgatgagcccatttttgtgggcgagattagctcgtcaaaacccgccatctccaacattcttaatcgggtaaatccctctagctacagccgcgggctgaagaacggggcactgtcgagaggaataactgcggctttcaagcccacctcacagcactatactaaccccacttctaaccctgtccctgctagtcccatcaattttcacccagaaagccggtcctcggacagcagtgttattgtgcagccgttcagcaaacccggctatataacaaatagcagtcgcgtggtttctaataagagtagcgaactgctgtttgacctgactcaggatacaggcctgtctcactaccagggtggacccaccctgtcaatggccggaatgtccgaaagcagcttcttatctaagaggccatctaccagcgaagtgaataacgttaacccgaaaaagcctaagccttccgagagcgtgtccggtgcaaacagctcagctgtgctgccctccgttaaaagccctagcgtgacgagctctcaggcaatgctcgctaagggtactaacaccagttctaaccagtcaaaaaacggcaccccctttccaagggcatgtccaaagtgtaacatacatttcaatctactggatcccctaaagaaccatatgaagtactgttgcccagatatgatcaacaactttctgggattggcgaagaccgagttttctagtactgtcaataagaatactacaatagatagcgagaaggggaagctcattatgctggtgaacgacttctactacgggaagcacgagggggacgtgcaggaagaacaaaaaacccacacaaccttcaagtgtttcagctgcctgaagattcttaaaaataatatacgctttatgaaccacatgaagcatcatctggaactcgaaaagcaatccagcgaatcctgggagaatcacacaacctgtcagcactgttatagacaattccccaccccttttcaattgcaatgtcatatcgaaagtacgcacacccctcatgagttttccacaatctgtaagatctgcgagctgtcgtttgagaccgaacacgtgctcttgcaacacatgaaggacaaccataaacccggagagatgccctatgtctgtcaggtttgcaattataggtcttctagtttcagtgacgtcgaaacacatttcagaacaagccacgagaacaccaagaatctcttgtgtccattctgtttgaaagtgatcaaaatcgccaccccctacatgcatcattacatgaaacaccagaaaaaggggatccatcgatgtacaaaatgcaggttgcagttcttaacatgtaaggagaaaatggaccacaaaacgcagcaccataggacctttatcaagccgaagcaattggaggggttgccccctggcaccaaggttactattagggcttctgtggggccactgcagtcaggcgccagcccaacaccatctatcagcgcaagtgcatccacacttcagttgtccccccctcgaactaaaaacattacagctaaaaaccctgcaaagtccaatacttcaaagccaaataccgttaagagcaatgcaagcaagcccaacacttcaaaaccaaacggctctaaaagcaagtataaacccaagatctcgaacatgcaaaaaaaacagagcacgttggcctcttccaataaaaaatccaaggttaacaccgccctgagaaatctcagatatcgaagagggattcacaaatgcatcgagtgttgctcagagatcaaggactttgctaaccattttccaacgtacgtacactgctccttctgccgatacaataccagctgctcgaaggcatatgtcaaccatatgatgtcctttcactcaaaccggccctctaagaggttctgcattttcaaaaaacattctgagaaccttcggggaatcacactcgtctgcctgaactgcgattttctctccgacgtatctggattagataacatggctactcatctgagccaacataagacccacacatgccaggtcgtaatgcagaaagttagcgtatgtatcccaacaagcgaacatctgtctgaactgaaaaaagaggcgccagcgaaagagcaggagcccgtgagtaaagagatcgcgcgcccgaatatggctgagcgggaaaccgagacttcaaatagcgagtcaaagcaggataaggctgccagtagcaaagagaaaaatggatgcaatgcaaactcgtttgaaggaagcagcacaactaaatccgaggaatccattaccgtatctgacaaagagaatgagacatgccttgcagatcaggaaaccggatccaaaaatattgtgagctgtgatagtaatattggggctgacaaggtggagaagaagaaacagatccagcacgtttgtcaagagatggaactgaagatgtgtcagtctagcgaaaatatcatcctgagcgatcagattaaggatcacaatagtagtgaggcaagattctcctccaagaacattaaggacttgagactggcgtctgataatgtgtccattgatcagttcttacggaaacggcatgagcctgagtccgtctccagcgacgttagtgagcaagggtcaattcaccttgaaccactgacccccagtgaggttttggagtatgaggcaacggaaattctgcagaaaggctctggtgatccctccgccaaaactgacgaagtagtgagtgaccaaaccgacgacatccctgggggaaacaacccatcgactacagaggctacagtcgatctagaagatgagaaggaacggtcctag

SEQ ID NO: 19645 - DNA, 2901 bp, Artificial Sequence
  derived and/or modified sequence
atggctgagttgttcatggagtgcgaggaggaagaattggagccctggcagaaaaaagtgaaagaagtggaagacgacgatgacgacgaaccaatcttcgttggggagatctcatcgtcaaaacctgctattagtaatatccttaaccgcgtgaaccctagctcatacagtcgtggcctgaaaaacggagcattgtcccgtggtattacagccgcctttaaacccacatcccagcactacacaaacccgaccagcaacccagtccctgcttccccaattaacttccatccagaatcccggtcatcagattccagcgtcatagtacaacctttttcgaagcccgggtatattaccaattcatccagagtggtctctaataagagcagcgaactcctcttcgatttgacgcaagatactgggctgtcccactatcagggcggacctactctcagcatggctggaatgtcggaatctagttttctgtccaaacgcccatcaaccagcgaagtcaacaatgttaaccctaagaaacctaagcctagcgaatctgtgtccggtgcgaattcgtccgccgtgctgccaagcgtcaagtctccctcggtgacatcttcccaagcgatgctggctaagggaacgaacacgagcagcaaccagagtaagaatgggacgcctttccccagagcttgtccaaaatgtaacatccacttcaatcttttggatcctctgaaaaaccacatgaagtactgttgtcccgatatgatcaacaatttcctgggcctggcgaagactgagttctcatctacagtcaataagaacacaaccatcgattccgaaaagggcaaattgatcatgctggtgaatgacttttattacggcaagcacgaaggcgatgttcaggaagagcagaaaacacacaccacattcaagtgcttttcatgcttaaagattttaaaaaataacatcagattcatgaatcatatgaagcaccatctggagttagagaagcagagctccgaatcctgggagaatcacactacctgtcaacactgctacagacagttccccacgcccttccagcttcaatgccacattgagtctactcataccccacacgagtttagcacaatatgcaaaatctgcgagctgagctttgaaacagagcacgtgcttctccagcacatgaaagataatcacaagcctggggaaatgccatacgtctgtcaggtctgtaattaccggtcctcatctttctcggatgtggagacacattttaggacaagtcacgagaataccaaaaatctcctttgtcctttttgtctgaaggtcatcaaaatagcaacaccatatatgcaccactacatgaaacaccagaagaaaggcattcaccggtgcacaaagtgccgccttcaatttctcacctgcaaggagaaaatggatcacaagacccagcatcatagaaccttcataaaacctaagcaactggaaggcctgccacccggtactaaggtgacaatccgcgcgtctgttggccccctgcagtccggtgcttcgccaacccccagtatttctgcctcagcaagcactttgcaattatccccacctagaaccaaaaacataaccgcaaaaaacccagctaaatctaatacctcgaagccgaacaccgtgaaatctaatgcctccaagcccaacacctccaaacccaacggcagcaaatccaagtataagcccaaaattagcaacatgcagaagaagcagtcgactctggctagttccaacaagaagagcaaggtgaacacagcccttcgaaatctccggtatagaaggggaattcataaatgtatcgaatgttgcagcgagattaaagattttgccaatcatttccccacttacgtgcactgctctttttgcaggtataacacatcttgcagcaaggcatatgtcaaccacatgatgagttttcactctaatcgcccatccaaaaggttttgtatctttaagaagcactctgagaacctgcgcggtataacactggtctgtttgaattgcgacttcctatccgatgtatcagggctggataacatggcaacacacctaagtcagcacaaaacccacacgtgccaggtagtcatgcagaaggtctctgtctgtatccccacttctgaacatctgagtgagctgaaaaaggaggcccctgccaaggaacaggaacccgtatcaaaggagatcgcgcgtccaaacatggctgagagggagacagaaacaagcaactccgagagtaagcaggataaggctgcgtcctctaaggagaagaacggctgcaacgcgaattcattcgagggaagcagtaccaccaagtcagaagagagcataacagtgtctgataaagagaatgaaacctgtctggcggaccaggagaccggatcaaaaaacatcgtgtcttgtgacagcaatattggagcagacaaggtggagaagaagaagcagattcagcacgtgtgtcaggaaatggaactgaagatgtgccagtcttcagagaacataattctgtcagatcaaatcaaagaccacaacagttctgaggcccgattcagctcgaagaatattaaagacttgcgcctggcatcagacaatgtctctatcgatcagttcctgcggaagcggcacgagcccgaatcagtgtctagcgacgtctcagaacagggcagcattcatctggagccattaaccccgtctgaggtgctcgaatatgaagccaccgagattcttcagaaaggaagcggagacccaagcgcaaagaccgacgaggtggtgtctgaccagaccgacgacatccccggtggtaacaatccaagcactaccgaggcaaccgttgacctggaggatgaaaaagagaggagctag

SEQ ID NO: 19646 - DNA, 2901 bp, Artificial Sequence
  derived and/or modified sequence
atggccgagctgttcatggagtgtgaggaggaggagctggagccctggcagaagaaggtgaaggaggtggaggatgatgatgatgatgagcccatctttgtgggggagatcagcagcagcaagccagccatcagcaacatcctgaacagagtgaaccccagcagctacagccggggcctgaagaatggagccctgagccggggcatcacagctgccttcaagcccaccagccagcactacaccaaccccaccagcaaccctgtgcctgccagccccatcaacttccaccctgagagccgcagcagtgacagctctgtgattgtgcagcccttcagcaagccaggctacatcaccaacagcagccgggtggtgagcaacaagagcagcgagctgctgtttgacctgacccaggacaccggcctgagccactaccagggcggccccaccctgtccatggccggcatgtctgagagcagcttcctgagcaagaggcccagcaccagcgaggtgaacaacgtgaaccccaagaagcccaagcccagcgagagcgtgtctggggccaacagcagcgctgtgctgcccagcgtgaagagccccagcgtgaccagcagccaggccatgctggccaagggcaccaacaccagcagcaaccagagcaagaatggcacccccttcccccgggcctgccccaagtgcaacatccacttcaacctgctggaccccctgaagaaccacatgaagtactgctgcccagacatgatcaacaacttcctgggcctggccaagacagagttcagcagcacagtgaacaagaacaccaccattgattctgagaagggcaagctgatcatgctggtgaatgacttctactacggcaagcatgaaggagatgtgcaggaggagcagaagacccacaccaccttcaagtgcttcagctgcctgaagatcctgaagaacaacatccgcttcatgaaccacatgaagcaccacctggagctggagaagcagagcagcgagagctgggagaaccacaccacctgccagcactgctaccggcagttccccacccccttccagctgcagtgccacatcgagagcacccacacccctcatgagttcagcaccatctgcaagatctgtgagctgagctttgaaacagagcacgtgctgctgcagcacatgaaggacaaccacaagccaggagagatgccctacgtgtgccaggtgtgcaactaccgcagcagcagcttcagtgatgtggagacccacttccgcaccagccatgagaacaccaagaacctgctgtgccccttctgcctgaaggtgatcaagatcgccaccccctacatgcaccactacatgaagcaccagaagaagggcatccaccgctgcaccaagtgccgcctgcagttcctgacctgcaaggagaagatggaccacaagacccagcaccacaggaccttcatcaagcccaagcagctggagggcctgcccccaggcaccaaggtgaccatccgggcctctgtgggccccctgcagagcggggccagccccacccccagcatcagcgccagcgccagcaccctgcagctgagcccccccaggaccaagaacatcacagccaagaacccagccaagagcaacaccagcaagcccaacacagtgaagagcaatgccagcaagcccaacaccagcaagcccaacggcagcaagagcaagtacaagcccaagatcagcaacatgcagaagaagcagagcaccctggccagcagcaacaagaagagcaaggtgaacacagccctgaggaacctgcgctacagaagaggcatccacaagtgcatcgagtgctgcagcgagatcaaggactttgccaaccacttccccacctacgtgcactgcagcttctgccgctacaacaccagctgcagcaaggcctacgtgaaccacatgatgtccttccacagcaaccggcccagcaagcgcttctgcatcttcaagaagcacagcgagaacctgcggggcatcaccctggtgtgcctgaactgtgacttcctgagtgatgtgtctggcctggacaacatggccacccacctgagccagcacaagacccacacctgccaggtggtgatgcagaaggtgtctgtgtgcatccccaccagcgagcacctgtctgagctgaagaaggaggccccagccaaggagcaggagcctgtgtccaaggagatcgcccggcccaacatggccgagcgggagacagagaccagcaacagcgagagcaagcaggacaaggccgccagcagcaaggagaagaatggctgcaatgccaacagctttgagggcagcagcaccaccaagtctgaggagagcatcaccgtgtctgacaaggaaaatgagacctgcctggccgaccaggagaccggcagcaagaacatcgtgtcctgtgacagcaacatcggggctgacaaggtggagaagaagaagcagatccagcacgtgtgccaggagatggagctgaagatgtgccagagcagcgagaacatcatcctgagtgaccagatcaaggaccacaacagcagcgaggcccgcttcagcagcaagaacatcaaggacctgcggctggccagtgacaacgtgtccattgaccagttcctgaggaagagacatgagcctgagagcgtgtccagtgatgtgtctgagcagggcagcatccacctggagcccctgaccccatctgaggtgctggagtatgaggccacagagatcctgcagaagggcagcggggaccccagcgccaagacagatgaggtggtgtctgaccagacagatgacatccctgggggcaacaaccccagcaccacagaggccaccgtggacctggaggatgagaaggagaggagctag

SEQ ID NO: 19647 - DNA, 2901 bp, Artificial Sequence
  derived and/or modified sequence
atggccgagctgttcatggagtgcgaggaggaggagctggagccctggcagaagaaggtgaaggaggtcgaggacgacgacgatgacgagccaattttcgtgggagaaatctccagttcaaagcccgcgatttctaacatcctgaatagagtgaatcccagctcttatagcagaggtttgaaaaacggggccctcagtcgcgggattactgcagccttcaagccgacgtcccagcattacactaacccaacctccaaccctgttccagcatccccgataaatttccatccggagtccaggagttctgacagttcggtcattgtccaaccctttagtaaacccgggtacatcacaaattcctctcgcgtggtatccaacaaaagcagtgagctcctttttgatttgacccaagataccggcctttcgcactaccagggaggccctaccctttcaatggctgggatgtccgaatctagctttctgtccaagcggccttccacctcagaagttaataacgtcaacccaaaaaagcccaaaccctcagaatctgtgagcggcgccaatagcagcgcggtgctcccatctgtaaagtcaccttcagtgacttctagtcaggccatgttggccaaaggcactaacacatccagtaatcagagcaagaatggcactccctttccacgcgcctgtcctaagtgcaacattcacttcaatttgctcgatcccctgaagaaccatatgaaatactgttgtcctgatatgatcaataactttcttggactcgcgaagacagagttctccagtactgtgaacaagaatacgacaatcgattctgagaaaggcaagttgatcatgctggtgaatgatttttattatggcaagcacgagggggacgtccaggaggaacaaaaaacacacaccactttcaaatgcttctcatgtctgaaaatcttaaagaacaacattcggtttatgaaccacatgaaacaccacctggaacttgaaaaacagagctccgagagctgggaaaatcacacgacctgtcagcattgctatcggcagttccccaccccctttcagctgcaatgtcatatagaatccactcacaccccacacgagttttctaccatatgtaagatctgcgagctgtcttttgagaccgagcatgtgctgctccaacatatgaaggacaatcacaaaccgggagaaatgccgtatgtttgtcaggtgtgcaattacaggagtagcagcttctccgacgtcgagacacacttcaggacctctcatgagaatactaagaacctcctttgccccttttgtctcaaggtgattaagattgcaaccccctacatgcaccattacatgaaacaccagaaaaaaggtattcaccggtgtacaaagtgtagactacagtttctaacttgcaaggaaaaaatggatcacaaaacccaacatcaccggaccttcatcaagcccaagcagttggagggcttgcctcccggaactaaggtgacaattagagcatcggtcggccccctgcagagtggcgccagccccaccccctcaatttccgcgtccgctagcacgttacagctatcccctccgcgaacaaaaaacatcacagccaagaatccggccaaatcaaatacatccaaaccgaacaccgtgaagtccaatgcctcaaaaccgaatacatcaaagccgaacggatctaagtctaagtataaaccaaaaatcagcaatatgcagaagaagcagtcaacactcgcgtccagcaataaaaagtcaaaggtcaacactgcattgcgcaacttgagatacagacgtgggattcacaaatgcatcgaatgttgctccgaaatcaaagactttgcgaaccatttcccgacatatgtgcattgttcattttgtcggtataatacttcttgtagcaaggcctacgtgaaccatatgatgtcttttcacagcaatcggcccagcaaaagattctgtatcttcaaaaaacactctgagaatctccgggggattactctagtgtgcctaaactgcgattttctgagcgatgtgtccgggcttgataacatggctacacatttgtcacagcataagactcacacttgccaggttgtgatgcagaaggttagcgtctgcattccgaccagcgaacacttgagcgaactgaagaaggaggctccagccaaagagcaagagccagtgagcaaagagatcgccaggcccaatatggccgagagggaaaccgagacttctaactctgaaagcaaacaggataaggcggctagcagcaaggagaaaaacggttgtaacgcaaattcattcgagggaagctccaccaccaagagcgaggagagtatcactgtgtcggacaaagaaaatgagacctgcctggccgaccaggagacagggtctaagaacatcgtgtcatgtgactcgaatataggagccgacaaggtggagaaaaagaaacagattcagcatgtttgtcaagagatggagcttaagatgtgccaatcatctgaaaatatcattctgtccgaccagatcaaagaccataattccagcgaggccagattctcgtccaaaaatattaaggatttgcggcttgcttcggataatgtcagcattgatcagttcctgcgaaagagacatgaacccgagagtgtcagttccgatgtctctgagcagggtagtatacatctagaaccactaaccccgagcgaggtgctggaatatgaagcaactgagatcttgcagaaagggtccggtgacccctctgctaagacagatgaagtcgtgagcgaccagactgatgatatacctggaggtaacaatccctcgaccacagaggctacagtggatctggaggacgaaaaggaacggagctag

SEQ ID NO: 19648 - DNA, 2901 bp, Artificial Sequence
  derived and/or modified sequence
atggccgagctgttcatggagtgcgaggaggaggagctggagccctggcagaagaaggtaaaagaagtggaggacgatgacgatgatgaaccaattttcgtcggtgaaatctcatcctctaaacccgcaatatctaatattctgaaccgagtgaacccctcgagctacagcagggggctgaagaacggagcccttagccgcggcattactgctgcatttaagccaacatcccaacattatactaatccaactagtaaccccgtgcctgcatcccctattaactttcatcctgagtctaggtccagtgacagtagcgttatcgtgcaacctttcagtaaaccaggatatatcacaaattctagtcgagtggtgtctaacaagtcctctgaactcctgtttgacctgacacaggacactggcctgtcccactaccagggcgggcccactctgtccatggcaggcatgtccgagtcctctttcctatctaagcgtcccagtactagcgaggtgaacaacgtgaatcctaaaaagcctaaaccttctgaatcagtgtctggcgctaactcatcagccgtgctgccttctgtgaagtccccatccgttactagtagtcaggccatgctagctaaaggaaccaatactagttctaaccaatctaagaacggcacaccttttcccagggcatgtcccaaatgcaatatccacttcaatctgcttgatccgcttaaaaaccacatgaagtactgctgtccagacatgataaacaatttcctgggcctggccaaaaccgagttttcctcaacagttaacaaaaatacaaccatagattcagaaaagggtaaactaatcatgttggtcaacgatttctattatgggaaacatgaaggagacgtacaggaggaacagaaaacacacactactttcaagtgtttctcttgcctcaagatcctcaagaataacattagatttatgaatcacatgaaacatcatctcgagctagaaaagcaatcctctgagagttgggagaaccatacaacttgccagcactgctataggcagttcccgactccatttcaactccagtgccacatcgagagcacacacacccctcatgagttctcaactatatgtaagatctgcgaactgtctttcgagacagagcatgtgctactgcagcatatgaaagacaatcacaaacctggggagatgccctacgtctgccaggtgtgcaattatcgaagctcctccttctccgatgtcgagacgcatttcagaacttcgcatgagaatactaaaaacttattgtgcccattttgtttgaaggtaattaagattgcgaccccttacatgcatcactatatgaaacaccagaagaaggggattcaccgctgcaccaagtgccgcctgcagtttttgacctgcaaagagaaaatggatcataaaacacagcaccacaggaccttcatcaagcccaaacagctggaaggtctgccccccggtaccaaggttactattcgagcgtctgttggccctcttcaatctggcgcctcgcccacaccttcaatctctgcgtccgctagtaccttacagctttcccccccacgtacaaaaaatattaccgctaagaatccagcaaagagtaacacgtctaagccgaacactgtaaagtccaacgcctccaaaccgaatacttcaaagccaaatggtagtaagtcaaaatacaaacctaaaatctcgaacatgcagaagaagcagagcacattggctagtagcaacaagaagtccaaagttaataccgccttgaggaaccttcgctaccggaggggtattcataaatgtattgagtgctgtagtgaaattaaggactttgctaaccatttcccgacgtacgttcactgcagtttctgtagatacaacaccagctgctcaaaggcatatgtgaaccatatgatgtctttccacagtaacagaccatccaaacgcttctgcatctttaaaaaacattctgaaaatctccggggtattacgcttgtgtgcttgaactgtgacttcttaagtgacgtttctggactggacaatatggctacacacctgtcccagcacaagacccatacttgtcaggtcgtcatgcaaaaggtctcagtgtgcattcctacatccgagcacttaagcgaattaaagaaggaggcgccagccaaagaacaagaaccagtgtctaaggagatcgcccgtcccaacatggcggaaagagagaccgagacttcaaactctgagagcaagcaggacaaggcagcatcctcgaaggaaaaaaacggatgcaatgcaaacagttttgaaggcagttctactacaaagtccgaggagtccattaccgtgtccgacaaggagaacgagacctgtttggccgatcaggagactggatcaaagaacatcgtgtcgtgcgattccaacattggcgcagacaaagtggagaagaagaagcagattcagcatgtgtgccaggaaatggagctaaagatgtgtcagtcatctgaaaatatcatcctgtctgatcaaattaaggaccacaactctagcgaagccagatttagcagcaagaacataaaagacttgaggcttgcctccgacaacgtcagcatagatcagtttcttaggaaacgccatgagcccgagagcgtgtcttcagacgtctcagagcaggggtccatccatttggagccactgactccatctgaagttctcgaatacgaggctaccgaaatcttgcaaaaggggtctggcgatccatcagccaaaaccgacgaagttgtttctgaccagaccgacgacatacccggcggtaacaatccttcgaccactgaggctactgtcgatcttgaggatgagaaggagcggagttag

SEQ ID NO: 19649 - DNA, 2901 bp, Artificial Sequence
  derived and/or modified sequence
atggctgaattattcatggagtgcgaggaagaagaattggagccatggcagaaaaaagtaaaggaagtggaggacgacgacgacgacgaacctatcttcgttggggagatctctagcagcaaaccggcaatctccaacatcctgaacagagtcaatcccagctcttatagtcgcggactcaaaaatggagccctatcccgtgggattaccgcagccttcaaaccaacgagccagcattacactaaccccactagcaaccccgttcctgccagccctatcaatttccatcccgaatcgcgctccagtgactcctctgtgatcgtgcagcccttcagtaagcccggatatatcactaattcatcacgcgtggtatcaaataaaagctctgagctcctcttcgatttgacacaggacactggcttatctcactatcagggcggaccgacgttaagtatggcgggaatgtcggaaagcagctttctctcgaagagaccctctacctccgaagttaataacgtcaaccctaaaaaacctaagccttccgagtcagtgtctggagccaatagcagcgctgtcttacccagcgttaagagcccttccgtaacctcatctcaggcgatgctagccaagggaacaaatacttcatctaaccagtccaagaatggcactcccttccccagggcgtgccctaaatgtaacattcattttaacttactggaccccctgaagaaccacatgaagtattgttgtcccgatatgatcaataactttttaggcttggctaaaactgagttcagctccaccgttaacaaaaatactactattgattctgaaaaaggcaaattgatcatgctggtgaacgatttctattacggcaagcacgaaggggatgttcaagaggagcagaaaacgcataccacctttaagtgtttctcatgtctcaagatcctcaaaaacaacatccgcttcatgaatcatatgaagcaccacctggagctggagaaacaaagctccgaaagttgggagaaccacaccacctgccaacactgctaccgccagtttccgaccccttttcaactccagtgtcatatcgagtctacacacaccccacacgaattcagcactatctgcaagatctgcgagctcagttttgaaaccgagcacgtgctcctgcaacatatgaaggacaaccacaagccgggtgaaatgccttacgtctgtcaggtatgcaactatcgctcatcctcctttagtgacgtcgagacccattttagaaccagccatgagaacactaaaaacctgctctgccccttctgtctgaaggtgattaagatcgcaacaccatacatgcaccactacatgaagcatcagaaaaaagggatccatcgctgtaccaaatgtcgactgcagtttctaacctgcaaagaaaagatggatcataagactcagcaccatcggacctttataaaaccgaagcagttagaagggttgcccccaggaaccaaagttaccatacgggctagtgtgggaccccttcaaagcggcgctagccctactccgtctatctcagcctctgcaagtacacttcagcttagcccaccccgtaccaaaaacataaccgcgaagaatccagccaagtccaatactagtaaaccaaacacagtgaaaagcaacgcgtcaaaacccaacacttccaagcctaacggatctaaaagcaagtataagcctaaaattagcaacatgcagaaaaaacaatccactctagccagcagcaataagaagtcaaaagtaaacaccgccctcaggaacctgcggtatcgcagaggaattcacaaatgcatagagtgctgtagtgaaataaaggatttcgcaaaccacttcccaacctacgtgcattgttccttttgtagatataataccagttgttctaaggcctatgtgaatcacatgatgagcttccacagcaatcggccaagcaagcggttctgtatcttcaaaaagcactccgagaacttgcgtggcatcactctggtttgtcttaattgcgacttcctgagcgatgtctcagggcttgataatatggcgacccacttgtcacagcataagacacatacttgccaggttgtgatgcaaaaggtctctgtctgtatccccacctctgagcatctgtctgaattgaaaaaggaggctccggctaaggaacaagaaccagtttcaaaggagatcgccagaccaaacatggcagagcgggagacagagacctctaatagcgagtccaagcaggacaaggccgcaagctccaaggagaagaatggctgcaatgccaactcattcgaggggtcctctaccaccaagtcagaggagtccataaccgtgagtgataaagagaatgagacatgtctagccgaccaggaaacaggtagtaaaaacatcgtcagctgtgatagtaatattggagccgacaaggtggagaagaagaaacaaatccagcacgtctgccaggaaatggagcttaagatgtgccaaagctccgaaaacatcattctgtccgatcagattaaagaccataatagtagcgaggccaggttctcttccaagaacataaaggatctgaggttggcctcagacaacgtgagtattgaccaattcttacggaaaaggcatgaaccagagagtgtatcgagcgacgtgagcgagcagggatctatccacctcgagcccctgaccccctcagaggtgttagagtatgaggccactgaaattcttcaaaagggctcaggagacccgtccgcgaaaaccgatgaagtggtctccgaccagacagatgacatccctggaggcaacaacccctctacgacagaagctaccgttgatctggaggacgaaaaagaacggtcttag

SEQ ID NO: 19650 - DNA, 2901 bp, Artificial Sequence
  derived and/or modified sequence
atggccgaactgttcatggagtgtgaagaagaggaattagaaccatggcagaaaaaggttaaggaagtggaagatgatgatgatgatgaacctatcttcgttggggaaataagctcaagcaagccagcgattagtaacattctgaaccgtgtcaacccatcctcttattctagggggctgaagaatggggctttgtcacgaggcattacggcagccttcaaaccaacttcacagcattacacaaaccccacgagcaacccggttccggcatccccaattaattttcaccctgagagtcggagctctgactcatcggtcatagtgcagccatttagtaaaccaggctatatcaccaactccagccgggttgtgtccaacaaaagctcagaactgctgtttgacctaactcaggatactggcctgtcacactatcaagggggacccaccctgagtatggctggcatgtccgagagcagcttcttgtctaaacgccctagtaccagtgaggtgaataacgtcaatcccaaaaagccaaaaccttctgaatcagtgagtggtgcaaatagcagtgctgtgctcccctctgttaagtccccaagcgtgacatcttcgcaagctatgttggctaaaggaaccaacacgagctccaatcaatccaagaatggaaccccttttcccagagcttgcccgaaatgcaatattcacttcaacttgctggatccactcaaaaaccatatgaagtattgctgccctgatatgattaataactttctaggactagcaaagactgagttctcttctacagtgaacaagaacacgaccatcgacagcgagaaagggaagctcattatgcttgtgaatgatttctactacgggaaacacgagggcgatgttcaggaagagcagaaaacccacactacctttaaatgtttctcttgcctgaaaatattgaaaaacaacatacgctttatgaatcacatgaaacatcatctggaactggaaaaacaaagctccgaatcgtgggagaatcatactacatgccaacattgttaccggcagtttccaacaccattccagttacaatgtcatattgagtcaacacacactcctcatgagttttcaacgatctgtaagatctgtgagctgtcctttgagaccgagcacgttcttctacaacatatgaaggataaccataaacccggagagatgccttatgtatgccaggtttgcaactaccggagttctagcttcagtgatgtggagacacacttccggacatcccatgaaaacacaaagaacctcttatgccccttctgtctgaaagtgattaaaatcgctacgccatacatgcaccattacatgaaacatcagaagaaaggtatccataggtgcactaagtgtcggttgcagttcctgacatgtaaggagaagatggatcataagactcagcatcacagaacctttattaaacccaaacagttggaagggctaccccctggcacaaaggtcaccatcagagcctctgtaggaccactgcagagcggtgccagcccgacaccctcaatctctgcatcggcgtctacgctgcaactcagccccccacgaacgaaaaatattactgccaaaaaccctgccaaaagcaacacatctaagcccaatacagtgaagtccaatgcgtcaaaacccaatacctctaaacccaacggctctaaatcaaagtacaagccgaaaatctccaatatgcaaaaaaaacaatccactctggcatcctcgaacaaaaagtctaaggttaacacggcactgcgaaacttaaggtacaggcgcggaattcataaatgtatagagtgttgctccgaaattaaggacttcgccaatcactttccaacttacgtccattgtagcttctgtcggtataacacctcctgctctaaagcctatgtcaatcacatgatgagtttccattccaatagaccaagcaagaggttttgtatattcaagaagcatagcgaaaatctgagaggtattaccctggtttgtctgaattgtgacttcctgtcggacgtgtccggcctcgataatatggccacgcacctgagtcagcacaagacccatacttgtcaggtggtgatgcagaaagtcagtgtgtgtattcccacgtcggagcacctgtcggagcttaaaaaagaggccccagccaaggagcaggagcccgtgtcaaaggagatcgctcgcccaaacatggccgaaagggaaaccgagactagcaattctgaatcaaagcaggataaagccgcatcctccaaagaaaaaaacggttgcaacgccaattctttcgaggggagttctactacaaagtcggaggaatccattaccgtgagcgacaaggagaacgagacctgcctggcagatcaggagaccggatctaaaaacattgtatcctgtgactctaacatcggcgctgacaaagtcgagaaaaagaagcaaatccagcacgtgtgtcaggaaatggaattaaagatgtgccagtcttctgaaaacatcattctctccgaccagatcaaggatcacaactcatctgaggctagattttcctccaagaatataaaggatttgcgactcgcatccgataacgtttctatcgatcaatttctaagaaaacggcatgaacccgaatcagtcagcagcgatgtgtctgaacagggatctatccacctcgaacctctaacgccctctgaggttctcgagtacgaagccacagaaatcctgcagaaggggtccggagaccccagtgccaagactgacgaggtcgtgagtgaccagactgatgacattccgggaggtaacaacccctccacaacggaggcaacagtggaccttgaggatgagaaagaaaggtcctag

SEQ ID NO: 19651 - protein, 357 aa, Artificial Sequence
  derived and/or modified sequence
MGRQLAGCGDAGKKASFKMSTVHEILCKLSLEGDHSTPPSAYGSVKAYTNFDAERDALNIETAIKTKGVDEVTIVNILTNRSNAQRQDIAFAYQRRTKKELASALKSALSGHLETVILGLLKTPAQYDASELKASMKGLGTDEDSLIEIICSRTNQELQEINRVYKEMYKTDLEKDIISDTSGDFRKLMVALAKGRRAEDGSVIDYELIDQDARDLYDAGVKRKGTDVPKWISIMTERSVPHLQKVFDRYKSYSPYDMLESIRKEVKGDLENAFLNLVQCIQNKPLYFADRLYDSMKGKGTRDKVLIRIMVSRSEVDMLKIRSEFKRKYGKSLYYYIQQDTKGDYQKALLYLCGGDD

SEQ ID NO: 19652 - protein, 81 aa, Artificial Sequence
  derived and/or modified sequence
MSTVHEILCKLSLEGDHSTPPSAYGSVKAYTNFDAERDALNIETAIKTKGVDEVTIVNILTNRSNAQRQDIAFAYQRRTKK

SEQ ID NO: 19653 - protein, 47 aa, Artificial Sequence
  derived and/or modified sequence
MSTVHEILCKLSLEGDHSTPPSAYGSVKAYTNFDAERDALNIETAIK

SEQ ID NO: 19654 - protein, 65 aa, Artificial Sequence
  derived and/or modified sequence
MSTVHEILCKLSLEGDHSTPPSAYGSVKAYTNFDAERDALNIETAIKTKGVDEVTIVNILTNRSN

SEQ ID NO: 19655 - protein, 256 aa, Artificial Sequence
  derived and/or modified sequence
MSTVHEILCKLSLEGDHSTPPSAYGSVKAYTNFDAERDALNIETAIKTKGVDEVTIVNILTNRSNAQRQDIAFAYQRRTKKELASALKSALSGHLETVILGLLKTPAQYDASELKASMKGLGTDEDSLIEIICSRTNQELQEINRVYKEMYKTDLEKDIISDTSGDFRKLMVALAKGRRAEDGSVIDYELIDQDARDLYDAGVKRKGTDVPKWISIMTERSVPHLQKVFDRYKSYSPYDMLESIRKEVKGDLENAF

SEQ ID NO: 19656 - DNA, 1074 bp, Artificial Sequence
  derived and/or modified sequence
atggggcgacaattagcgggttgtggcgatgccggcaaaaaagccagttttaaaatgtctaccgtgcacgagatcctttgtaagttatcgcttgagggcgaccacagcacgccgcccagtgcttatggatctgtgaaggcgtataccaactttgacgccgagcgagacgctctgaacattgagacagctattaaaaccaagggagttgacgaagtcacaatagtgaacatcctgactaatcgttctaacgcacaacggcaggacatcgcttttgcatatcagcgcaggacaaaaaaggaactggcttccgccctgaaaagcgccctgtccggccatctcgagactgttattcttggactgttgaagacccccgcacagtatgatgcctccgaactgaaagctagcatgaagggactaggcactgacgaagatagcttgattgagattatatgttcacgcaccaaccaggaacttcaagaaatcaacagagtctacaaagagatgtacaaaaccgatctagagaaggacattattagcgacacctctggagatttcagaaaactgatggtggccctggccaaaggccgacgggctgaggatggctctgttatcgattatgagcttatagaccaggacgcccgcgatctgtatgacgctggagttaagaggaaagggacagacgttccaaaatggatctccattatgaccgaacgctccgtgcctcatctccagaaggtcttcgatcgttacaagtcttactccccatacgacatgctcgaatctattcgaaaagaagtcaaaggcgacttggagaacgcatttctcaacctcgtgcagtgtattcaaaataagcccttgtactttgccgataggctgtacgactcaatgaagggtaaaggcacacgcgacaaggtgttgattagaataatggtgtccaggtctgaggtggacatgctgaagattagaagcgagtttaagaggaagtacggtaaaagcctatattactacatccagcaggatacgaagggtgattatcagaaggccttgctgtacttatgtggcggcgacgactag

SEQ ID NO: 19657 - DNA, 1074 bp, Artificial Sequence
  derived and/or modified sequence
atgggccggcagctggccggctgtggagatgctgggaagaaggccagcttcaagatgagcacagtgcatgagatcctgtgcaagctgagcctggagggggaccacagcaccccacccagcgcctacggctctgtgaaggcctacaccaactttgatgctgagagagatgccctgaacatcgagacagccatcaagaccaagggcgtggatgaggtgaccatcgtgaacatcctgaccaacagaagcaatgcccagaggcaggacatcgcctttgcctaccagaggaggaccaagaaggagctggccagcgccctgaagagcgccctgagcggccacctggagaccgtcatcctgggcctgctgaagaccccagcccagtatgatgccagcgagctgaaggcctccatgaagggcctgggcacagatgaggacagcctgattgagatcatctgcagcaggaccaaccaggagctgcaggagatcaacagagtgtacaaggagatgtacaagacagacctggagaaggacatcatcagtgacaccagcggggacttcaggaagctgatggtggccctggccaagggccggcgggcagaagatggcagcgtcatcgactatgagctgattgaccaggatgcccgggacctgtatgatgctggggtgaagaggaagggcacagatgtgcccaagtggatcagcatcatgacagagaggtctgtgccccacctgcagaaggtgtttgaccgctacaagagctacagcccctatgacatgctggagagcatcaggaaggaggtgaagggggacctggagaatgccttcctgaacctggtgcagtgcatccagaacaagcccctgtactttgctgaccggctgtatgacagcatgaagggcaagggcacccgggacaaggtgctgatccgcatcatggtgagccgctctgaggtggacatgctgaagatccgctctgagttcaagaggaaatatggcaagagcctgtactactacatccagcaggacaccaagggggactaccagaaggccctgctgtacctgtgtggaggagatgactag

SEQ ID NO: 19658 - DNA, 1074 bp, Artificial Sequence
  derived and/or modified sequence
atgggccggcagctggccggctgcggcgacgccggcaagaaggcctcattcaaaatgtccaccgtgcatgagatcctgtgtaagctgtctctagaaggggatcactctactccaccctctgcctatggaagtgtgaaggcctacacaaatttcgacgccgaacgagacgccctcaatattgaaaccgcgattaagactaaaggggtagacgaagtgacaatagtcaacatcctgactaataggtcaaacgcccagcgtcaggacattgcctttgcctaccagaggcggactaagaaggagctcgcctctgccctgaagtccgctctgtcaggacacttggaaactgtcattctgggactgttgaagacgcctgctcagtacgatgctagcgagctgaaagcgagtatgaaaggcttggggactgacgaagacagcctaattgaaataatctgctcaaggactaatcaggagctgcaggaaataaaccgtgtgtataaagaaatgtacaaaacagatcttgaaaaggacataatctcagacacctcaggcgacttccgtaagctgatggtcgcgctggccaaaggaaggagagccgaagacggaagtgtgatcgactatgaattgatcgaccaggacgctagggatctctacgacgcaggcgtcaaacggaaggggaccgatgttcctaaatggatatccatcatgactgagcgatccgtgcctcacttgcagaaagttttcgatcgctataagagctattctccctacgacatgctcgagtcaataaggaaagaggtcaagggcgacctggaaaatgcgttcctgaacctggttcagtgtatccaaaataagccactgtattttgctgatcggttgtacgactccatgaagggaaaggggacccgtgacaaggtcctaatcagaatcatggtctcacggtccgaagtagacatgttaaaaatcaggtcagaattcaagaggaagtatggtaagtccctctactactatattcagcaggacaccaagggggattatcagaaagcactcctgtatttatgcggcggtgacgattag

SEQ ID NO: 19659 - DNA, 1444 bp, Artificial Sequence
  derived and/or modified sequence
ctcagcatttggggacgctctcagctctcggcgcacggcccaggtaagcggggcgcgccctgcccgcccgcgatgggccgccagctagcggggtgtggagacgctgggaagaaggcttccttcaaaatgtctactgttcacgaaatcctgtgcaagctcagcttggagggtgatcactctacacccccaagtgcatatgggtctgtcaaagcctatactaactttgatgctgagcgggatgctttgaacattgaaacagccatcaagaccaaaggtgtggatgaggtcaccattgtcaacattttgaccaaccgcagcaatgcacagagacaggatattgccttcgcctaccagagaaggaccaaaaaggaacttgcatcagcactgaagtcagccttatctggccacctggagacggtgattttgggcctattgaagacacctgctcagtatgacgcttctgagctaaaagcttccatgaaggggctgggaaccgacgaggactctctcattgagatcatctgctccagaaccaaccaggagctgcaggaaattaacagagtctacaaggaaatgtacaagactgatctggagaaggacattatttcggacacatctggtgacttccgcaagctgatggttgccctggcaaagggtagaagagcagaggatggctctgtcattgattatgaactgattgaccaagatgctcgggatctctatgacgctggagtgaagaggaaaggaactgatgttcccaagtggatcagcatcatgaccgagcggagcgtgccccacctccagaaagtatttgataggtacaagagttacagcccttatgacatgttggaaagcatcaggaaagaggttaaaggagacctggaaaatgctttcctgaacctggttcagtgcattcagaacaagcccctgtattttgctgatcggctgtatgactccatgaagggcaaggggacgcgagataaggtcctgatcagaatcatggtctcccgcagtgaagtggacatgttgaaaattaggtctgaattcaagagaaagtacggcaagtccctgtactattatatccagcaagacactaagggcgactaccagaaagcgctgctgtacctgtgtggtggagatgactgaagcccgacacggcctgagcgtccagaaatggtgctcaccatgcttccagctaacaggtctagaaaaccagcttgcgaataacagtccccgtggccatccctgtgagggtgacgttagcattacccccaacctcattttagttgcctaagcattgcctggccttcctgtctagtctctcctgtaagccaaagaaatgaacattccaaggagttggaagtgaagtctatgatgtgaaacactttgcctcctgtgtactgtgtcataaacagatgaataaactgaatttgtactttagaaa

SEQ ID NO: 19660 - DNA, 1676 bp, Artificial Sequence
  derived and/or modified sequence
gctcagcatttggggacgctctcagctctcggcgcacggcccagggtgaaaatgtttgccattaaactcacatgaagtaggaaatatttatatggatacaaaaggcacctgcatgggataatgtcaaatttcatagatactgctttgtgcttccttcaaaatgtctactgttcacgaaatcctgtgcaagctcagcttggagggtgatcactctacacccccaagtgcatatgggtctgtcaaagcctatactaactttgatgctgagcgggatgctttgaacattgaaacagccatcaagaccaaaggtgtggatgaggtcaccattgtcaacattttgaccaaccgcagcaatgcacagagacaggatattgccttcgcctaccagagaaggaccaaaaaggaacttgcatcagcactgaagtcagccttatctggccacctggagacggtgattttgggcctattgaagacacctgctcagtatgacgcttctgagctaaaagcttccatgaaggggctgggaaccgacgaggactctctcattgagatcatctgctccagaaccaaccaggagctgcaggaaattaacagagtctacaaggaaatgtacaagactgatctggagaaggacattatttcggacacatctggtgacttccgcaagctgatggttgccctggcaaagggtagaagagcagaggatggctctgtcattgattatgaactgattgaccaagatgctcgggatctctatgacgctggagtgaagaggaaaggaactgatgttcccaagtggatcagcatcatgaccgagcggagcgtgccccacctccagaaagtatttgataggtacaagagttacagcccttatgacatgttggaaagcatcaggaaagaggttaaaggagacctggaaaatgctttcctgaacctggttcagtgcattcagaacaagcccctgtattttgctgatcggctgtatgactccatgaagggcaaggggacgcgagataaggtcctgatcagaatcatggtctcccgcagtgaagtggacatgttgaaaattaggtctgaattcaagagaaagtacggcaagtccctgtactattatatccagcaagacactaagggcgactaccagaaagcgctgctgtacctgtgtggtggagatgactgaagcccgacacggcctgagcgtccagaaatggtgctcaccatgcttccagctaacaggtctagaaaaccagcttgcgaataacagtccccgtggccatccctgtgagggtgacgttagcattacccccaacctcattttagttgcctaagcattgcctggccttcctgtctagtctctcctgtaagccaaagaaatgaacattccaaggagttggaagtgaagtctatgatgtgaaacactttgcctcctgtgtactgtgtcataaacagatgaataaactgaatttgtactttagaaacacgtactttgtggccctgctttcaactgaattgtttgaaaattaaacgtgcttggggttcagctggtgaggctgtccctgtaggaagaaagctctgggactgagctgtacagtatggttgcccctatccaagtgtcgctatttaagttaaatttaaatgaaataaaataaaataaaatcagttcctgagtcacacaa

SEQ ID NO: 19661 - DNA, 1444 bp, Artificial Sequence
  derived and/or modified sequence
gctcagcatttggggacgctctcagctctcggcgcacggcccaggttatcttgtagcatagcaacttcggatttcactctacccggagagtttcccgcttggttgaacacattggcctcaggaagcttccttcaaaatgtctactgttcacgaaatcctgtgcaagctcagcttggagggtgatcactctacacccccaagtgcatatgggtctgtcaaagcctatactaactttgatgctgagcgggatgctttgaacattgaaacagccatcaagaccaaaggtgtggatgaggtcaccattgtcaacattttgaccaaccgcagcaatgcacagagacaggatattgccttcgcctaccagagaaggaccaaaaaggaacttgcatcagcactgaagtcagccttatctggccacctggagacggtgattttgggcctattgaagacacctgctcagtatgacgcttctgagctaaaagcttccatgaaggggctgggaaccgacgaggactctctcattgagatcatctgctccagaaccaaccaggagctgcaggaaattaacagagtctacaaggaaatgtacaagactgatctggagaaggacattatttcggacacatctggtgacttccgcaagctgatggttgccctggcaaagggtagaagagcagaggatggctctgtcattgattatgaactgattgaccaagatgctcgggatctctatgacgctggagtgaagaggaaaggaactgatgttcccaagtggatcagcatcatgaccgagcggagcgtgccccacctccagaaagtatttgataggtacaagagttacagcccttatgacatgttggaaagcatcaggaaagaggttaaaggagacctggaaaatgctttcctgaacctggttcagtgcattcagaacaagcccctgtattttgctgatcggctgtatgactccatgaagggcaaggggacgcgagataaggtcctgatcagaatcatggtctcccgcagtgaagtggacatgttgaaaattaggtctgaattcaagagaaagtacggcaagtccctgtactattatatccagcaagacactaagggcgactaccagaaagcgctgctgtacctgtgtggtggagatgactgaagcccgacacggcctgagcgtccagaaatggtgctcaccatgcttccagctaacaggtctagaaaaccagcttgcgaataacagtccccgtggccatccctgtgagggtgacgttagcattacccccaacctcattttagttgcctaagcattgcctggccttcctgtctagtctctcctgtaagccaaagaaatgaacattccaaggagttggaagtgaagtctatgatgtgaaacactttgcctcctgtgtactgtgtcataaacagatgaataaactgaatttgt

SEQ ID NO: 19662 - DNA, 1435 bp, Artificial Sequence
  derived and/or modified sequence
gcctcgcctagggaggatgtggcgggtataaaagccccacccaggccagccggctctgctcagcatttggggacgctctcagctctcggcgcacggcccagcttccttcaaaatgtctactgttcacgaaatcctgtgcaagctcagcttggagggtgatcactctacacccccaagtgcatatgggtctgtcaaagcctatactaactttgatgctgagcgggatgctttgaacattgaaacagccatcaagaccaaaggtgtggatgaggtcaccattgtcaacattttgaccaaccgcagcaatgcacagagacaggatattgccttcgcctaccagagaaggaccaaaaaggaacttgcatcagcactgaagtcagccttatctggccacctggagacggtgattttgggcctattgaagacacctgctcagtatgacgcttctgagctaaaagcttccatgaaggggctgggaaccgacgaggactctctcattgagatcatctgctccagaaccaaccaggagctgcaggaaattaacagagtctacaaggaaatgtacaagactgatctggagaaggacattatttcggacacatctggtgacttccgcaagctgatggttgccctggcaaagggtagaagagcagaggatggctctgtcattgattatgaactgattgaccaagatgctcgggatctctatgacgctggagtgaagaggaaaggaactgatgttcccaagtggatcagcatcatgaccgagcggagcgtgccccacctccagaaagtatttgataggtacaagagttacagcccttatgacatgttggaaagcatcaggaaagaggttaaaggagacctggaaaatgctttcctgaacctggttcagtgcattcagaacaagcccctgtattttgctgatcggctgtatgactccatgaagggcaaggggacgcgagataaggtcctgatcagaatcatggtctcccgcagtgaagtggacatgttgaaaattaggtctgaattcaagagaaagtacggcaagtccctgtactattatatccagcaagacactaagggcgactaccagaaagcgctgctgtacctgtgtggtggagatgactgaagcccgacacggcctgagcgtccagaaatggtgctcaccatgcttccagctaacaggtctagaaaaccagcttgcgaataacagtccccgtggccatccctgtgagggtgacgttagcattacccccaacctcattttagttgcctaagcattgcctggccttcctgtctagtctctcctgtaagccaaagaaatgaacattccaaggagttggaagtgaagtctatgatgtgaaacactttgcctcctgtgtactgtgtcataaacagatgaataaactgaatttgtactttagaaacacgt

SEQ ID NO: 19663 - DNA, 369 bp, Artificial Sequence
  derived and/or modified sequence
attccagcaggaaaacaggatggaggaaggtacaaagcatgaatgagcctggcctgtccagcagtggcacatggagcggtgaagagtgaagatgtgggggaatgaggctgcccagcttccttcaaaatgtctactgttcacgaaatcctgtgcaagctcagcttggagggtgatcactctacacccccaagtgcatatgggtctgtcaaagcctatactaactttgatgctgagcgggatgctttgaacattgaaacagccatcaagaccaaaggtgtggatgaggtcaccattgtcaacattttgaccaaccgcagcaatgcacagagacaggatattgccttcgcctaccagagaaggaccaaaaag

SEQ ID NO: 19664 - DNA, 812 bp, Artificial Sequence
  derived and/or modified sequence
gctcagcatttggggacgctctcagctctcggcgcacggcccaggttatcttgtagcatagcaacttcggatttcactctacccggagagtttcccgcttggttgaacacattggcctcaggaagagacgctcttctggctcttccgtgacgcattacaacagccatccaggccggtccagttacgctgcattccttcctccttcccatttcggcggacctgcatccagctagagactagcagattgaatcgatattcattaagttaggaatgcttccttcaaaatgtctactgttcacgaaatcctgtgcaagctcagcttggagggtgatcactctacacccccaagtgcatatgggtctgtcaaagcctatactaactttgatgctgagcgggatgctttgaacattgaaacagccatcaagaccaaaggtgtggatgaggtcaccattgtcaacattttgaccaaccgcagcaatgcacagagacaggatattgccttcgcctaccagagaaggaccaaaaaggaacttgcatcagcactgaagtcagccttatctggccacctggagacggtgattttgggcctattgaagacacctgctcagtatgacgcttctgagctaaaagcttccatgaaggggctgggaaccgacgaggactctctcattgagatcatctgctccagaaccaaccaggagctgcaggaaattaacagagtctacaaggaaatgtacaagactgatctggagaaggacattatttcggacacatctggtgacttccgcaagctgatggttgccctggcaaag

SEQ ID NO: 19665 - DNA, 557 bp, Artificial Sequence
  derived and/or modified sequence
ctgctcagcatttggggacgctctcagctctcggcgcacggcccaggttatcttgtagcatagcaacttcggatttcactctacccggagagtttcccgcttggttgaacacattggcctcaggaagagacgctcttctggctcttccgtgacgcattacaacagccatccaggccggtccagttacgctgcattccttcctccttcccatttcggcggacctgcatccagctagagactagcagattgaatcgatattcattaagttaggaatggttggtggtcctaagagcctcagcaaccgagaggagtcttgttatttaaaaaacaacgatactgggcgtggtcgtgggcctgtagtcccagctgctcaagctagtggatctcttgagtccaaggccaatcttccttcaaaatgtctactgttcacgaaatcctgtgcaagctcagcttggagggtgatcactctacacccccaagtgcatatgggtctgtcaaagcctatactaactttgatgctgagcgggatgctttgaacattgaaacagccatcaaga

SEQ ID NO: 19666 - DNA, 513 bp, Artificial Sequence
  derived and/or modified sequence
gctcagcatttggggacgctctcagctctcggcgcacggcccagagacgctcttctggctcttccgtgacgcattacaacagccatccaggccggtccacttccttcaaaatgtctactgttcacgaaatcctgtgcaagctcagcttggagggtgatcactctacacccccaagtgcatatgggtctgtcaaagcctatactaactttgatgctgagcgggatgctttgaacattgaaacagccatcaagaccaaaggtgtggatgaggtcaccattgtcaacattttgaccaaccgcagcaatgcacagagacaggatattgccttcgcctaccagagaaggaccaaaaaggaacttgcatcagcactgaagtcagccttatctggccacctggagacggtgattttgggcctattgaagacacctgctcagtatgacgcttctgagctaaaagcttccatgaaggggctgggaaccgacgaggactctctcattgagatcatctgctcca

SEQ ID NO: 19667 - DNA, 560 bp, Artificial Sequence
  derived and/or modified sequence
actctcagtgtgtcacagaggcacgaagggaagagagctcaaagggtgaaaatgtttgccattaaactcacatgaagtaggaaatatttatatggatacaaaaggcacctgcatgggataatgtcaaatttcatagatactgctttgtgcttccttcaaaatgtctactgttcacgaaatcctgtgcaagctcagcttggagggtgatcactctacacccccaagtgcatatgggtctgtcaaagcctatactaactttgatgctgagcgggatgctttgaacattgaaacagccatcaagaccaaaggtgtggatgaggtcaccattgtcaacattttgaccaaccgcagcaatgcacagagacaggatattgccttcgcctaccagagaaggaccaaaaaggaacttgcatcagcactgaagtcagccttatctggccacctggagacggtgattttgggcctattgaagacacctgctcagtatgacgcttctgagctaaaagcttccatgaaggggctgggaaccgacgaggactctctcattgagatcatctgct

SEQ ID NO: 19668 - DNA, 669 bp, Artificial Sequence
  derived and/or modified sequence
gaagggaagagagctcaaaggtcctgcagggtggaagtctgcatttcacagttttataagtgtcttttgtatcctttaatatagtgcaggctcagcgtatgcttgggtgaaaatgtttgccattaaactcacatgaagtaggaaatatttatatggatacaaaaggcacctgcatgggataatgtcaaatttcatagatactgctttgtgcttccttcaaaatgtctactgttcacgaaatcctgtgcaagctcagcttggagggtgatcactctacacccccaagtgcatatgggtctgtcaaagcctatactaactttgatgctgagcgggatgctttgaacattgaaacagccatcaagaccaaaggtgtggatgaggtcaccattgtcaacattttgaccaaccgcagcaatgcacagagacaggatattgccttcgcctaccagagaaggaccaaaaaggaacttgcatcagcactgaagtcagccttatctggccacctggagacggtgattttgggcctattgaagacacctgctcagtatgacgcttctgagctaaaagcttccatgaaggggctgggaaccgacgaggactctctcattgagatcatctgctccagaaccaaccaggagctgcaggaaattaacagagtctacaaggaaa

SEQ ID NO: 19669 - DNA, 521 bp, Artificial Sequence
  derived and/or modified sequence
gctcagcatttggggacgctctcagctctcggcgcacggcccagagacgctcttctggctcttccgtgacgcattacaacagccatccaggccggtccagttacgctgcattccttcctccttcccatttcggcggacctgcatccagctagagactagcagattgaatcgatattcattaagttaggaatgatggagcctggctctgtcacccagcctggagtgtagtcgcacgatctctcctcactgtagcctccgcctcccaggttcaagtgattctccagcctcaccctcccgagtagctgggattacagcttccttcaaaatgtctactgttcacgaaatcctgtgcaagctcagcttggagggtgatcactctacacccccaagtgcatatgggtctgtcaaagcctatactaactttgatgctgagcgggatgctttgaacattgaaacagccatcaagaccaaaggtgtggatgaggtcaccattgtcaacattttgaccaaccgcagcaatg

SEQ ID NO: 19670 - DNA, 755 bp, Artificial Sequence
  derived and/or modified sequence
tttggggacgctctcagctctcggcgcacggcccaggttatcttgtagcatagcaacttcggatttcactctacccggagagtttcccgcttggttgaacacattggcctcaggaagagacgctcttctggctcttccgtgacgcattacaacagccatccaggccggtccagttacgctgcattccttcctccttcccatttcggcggacctgcatccagctagagactagcagattgaatcgatattcattaagttaggaatgatggagcctggctctgtcacccagcctggagtgtagtcgcacgatctctcctcactgtagcctccgcctcccaggttcaagtgattctccagcctcaccctcccgagtagctgggattacagcttccttcaaaatgtctactgttcacgaaatcctgtgcaagctcagcttggagggtgatcactctacacccccaagtgcatatgggtctgtcaaagcctatactaactttgatgctgagcgggatgctttgaacattgaaacagccatcaagaccaaaggtgtggatgaggtcaccattgtcaacattttgaccaaccgcagcaatgcacagagacaggatattgccttcgcctaccagagaaggaccaaaaaggaacttgcatcagcactgaagtcagccttatctggccacctggagacggtgattttgggcctattgaagacacctgctcagtatgacgcttctgagctaaaagcttccatgaag

SEQ ID NO: 19671 - DNA, 878 bp, Artificial Sequence
  derived and/or modified sequence
actgcctgctacgaggccgcgcagagatgccccaggcgcggagagaagcggagcacagccgtgctagggacaggggcgccaccctgggcgggactgagcttccttcaaaatgtctactgttcacgaaatcctgtgcaagctcagcttggagggtgatcactctacacccccaagtgcatatgggtctgtcaaagcctatactaactttgatgctgagcgggatgctttgaacattgaaacagccatcaagaccaaaggtgtggatgaggtcaccattgtcaacattttgaccaaccgcagcaatgcacagagacaggatattgccttcgcctaccagagaaggaccaaaaaggaacttgcatcagcactgaagtcagccttatctggccacctggagacggtgattttgggcctattgaagacacctgctcagtatgacgcttctgagctaaaagcttccatgaaggggctgggaaccgacgaggactctctcattgagatcatctgctccagaaccaaccaggagctgcaggaaattaacagagtctacaaggaaatgtacaagactgatctggagaaggacattatttcggacacatctggtgacttccgcaagctgatggttgccctggcaaagggtagaagagcagaggatggctctgtcattgattatgaactgattgaccaagatgctcgggatctctatgacgctggagtgaagaggaaaggaactgatgttcccaagtggatcagcatcatgaccgagcggagcgtgccccacctccagaaagtatttgataggtacaagagttacagcccttatgacatgttggaaagcatcaggaaagaggttaaaggagacctggaaaatgctttcc

SEQ ID NO: 19672 - DNA, 558 bp, Artificial Sequence
  derived and/or modified sequence
tcagcatttggggacgctctcagctctcggcgcacggcccagagacgctcttctggctcttccgtgacgcattacaacagccatccaggccggtccagttacgctgcattccttcctccttcccatttcggcggacctgcatccagctagagactagcagattgaatcgatattcattaagttaggaatgcttccttcaaaatgtctactgttcacgaaatcctgtgcaagctcagcttggagggtgatcactctacacccccaagtgcatatgggtctgtcaaagcctatactaactttgatgctgagcgggatgctttgaacattgaaacagccatcaagaccaaaggtgtggatgaggtcaccattgtcaacattttgaccaaccgcagcaatgcacagagacaggatattgccttcgcctaccagagaaggaccaaaaaggaacttgcatcagcactgaagtcagccttatctggccacctggagacggtgattttgggcctattgaagacacctgctcagtatgacgcttctgagctaaaagcttccatgaag

SEQ ID NO: 19673 - DNA, 718 bp, Artificial Sequence
  derived and/or modified sequence
ctctcagctctcggcgcacggcccaggtaagcggggcgcgccctgcccgcccgcgatgggccgccagctagcggggtgtggagacgctgggaagaagggttatcttgtagcatagcaacttcggatttcactctacccggagagtttcccgcttggttgaacacattggcctcaggaagcttccttcaaaatgtctactgttcacgaaatcctgtgcaagctcagcttggagggtgatcactctacacccccaagtgcatatgggtctgtcaaagcctatactaactttgatgctgagcgggatgctttgaacattgaaacagccatcaagaccaaaggtgtggatgaggtcaccattgtcaacattttgaccaaccgcagcaatgcacagagacaggatattgccttcgcctaccagagaaggaccaaaaaggaacttgcatcagcactgaagtcagccttatctggccacctggagacggtgattttgggcctattgaagacacctgctcagtatgacgcttctgagctaaaagcttccatgaaggggctgggaaccgacgaggactctctcattgagatcatctgctccagaaccaaccaggagctgcaggaaattaacagagtctacaaggaaatgtacaagactgatctggagaaggacattatttcggacacatctggtgacttccgcaagctgatggttgccctggcaaag

SEQ ID NO: 19674 - DNA, 779 bp, Artificial Sequence
  derived and/or modified sequence
aggttatcttgtagcatagcaacttcggatttcactctacccggagagtttcccgcttggttgaacacattggcctcaggaaggtacttccttcaaaatgtctactgttcacgaaatcctgtgcaagctcagcttggagggtgatcactctacacccccaagtgcatatgggtctgtcaaagcctatactaactttgatgctgagcgggatgctttgaacattgaaacagccatcaagaccaaaggtgtggatgaggtcaccattgtcaacattttgaccaaccgcagcaatgcacagagacaggatattgccttcgcctaccagagaaggaccaaaaaggaacttgcatcagcactgaagtcagccttatctggccacctggagacggtgattttgggcctattgaagacacctgctcagtatgacgcttctgagctaaaagcttccatgaaggggctgggaaccgacgaggactctctcattgagatcatctgctccagaaccaaccaggagctgcaggaaattaacagagtctacaaggaaatgtacaagactgatctggagaaggacattatttcggacacatctggtgacttccgcaagctgatggttgccctggcaaagggtagaagagcagaggatggctctgtcattgattatgaactgattgaccaagatgctcgggatctctatgacgctggagtgaagaggaaaggaactgatgttcccaagtggatcagcatcatgaccgagcggagcgtgccccacctccagaaag

SEQ ID NO: 19675 - DNA, 594 bp, Artificial Sequence
  derived and/or modified sequence
atggctgtgatctttctctctgtgtcttaatcacttggaataaagaaccattgtgcttccttcaaaatgtctactgttcacgaaatcctgtgcaagctcagcttggagggtgatcactctacacccccaagtgcatatgggtctgtcaaagcctatactaactttgatgctgagcgggatgctttgaacattgaaacagccatcaagaccaaaggtgtggatgaggtcaccattgtcaacattttgaccaaccgcagcaatgcacagagacaggatattgccttcgcctaccagagaaggaccaaaaaggaacttgcatcagcactgaagtcagccttatctggccacctggagacggtgattttgggcctattgaagacacctgctcagtatgacgcttctgagctaaaagcttccatgaaggggctgggaaccgacgaggactctctcattgagatcatctgctccagaaccaaccaggagctgcaggaaattaacagagtctacaaggaaatgtacaagactgatctggagaaggacattatttcggacacatctggtgacttccgcaagctgatggttgccctggcaaag

SEQ ID NO: 19676 - DNA, 663 bp, Artificial Sequence
  derived and/or modified sequence
gctcagcatttggggacgctctcagctctcggcgcacggcccagagacgctcttctggctcttccgtgacgcattacaacagccatccaggccggtccagttacgctgcattccttcctccttcccatttcggcggacctgcatccagctagagactagcagattgaatcgatattcattaagttaggaatggttggtggtcctaagagcctcagcaaccgagaggagtcttgttatttaaaaaacaacgatactgggcgtggtcgtgggcctgtagtcccagctgctcaagctagtggatctcttgagtccaaggccaatcttccttcaaaatgtctactgttcacgaaatcctgtgcaagctcagcttggagggtgatcactctacacccccaagtgcatatgggtctgtcaaagcctatactaactttgatgctgagcgggatgctttgaacattgaaacagccatcaagaccaaaggtgtggatgaggtcaccattgtcaacattttgaccaaccgcagcaatgcacagagacaggatattgccttcgcctaccagagaaggaccaaaaaggaacttgcatcagcactgaagtcagccttatctggccacctggagacggtgattttgggcctattgaagacacctgctcagtatgacg

SEQ ID NO: 19677 - DNA, 1074 bp, Artificial Sequence
  derived and/or modified sequence
atgggaagacaactggccggttgcggagacgctgggaagaaagctagcttcaagatgtccactgttcacgaaatcctttgcaaactgtcactggagggcgatcattctaccccaccatcagcctacgggagtgtgaaagcctatacaaatttcgatgctgagagggacgcactcaatatagaaaccgccattaagaccaagggcgtggacgaagtcaccatagtgaatattctgactaatagatccaatgctcaaaggcaggacatcgcattcgcctaccagagacgcactaagaaagagctggcaagcgctctgaaatctgctctgagtggacacttggaaaccgtcattttggggctcctgaagacacctgcgcagtacgacgcttcggagctgaaggccagcatgaaaggactgggcaccgatgaggactcacttatcgaaattatctgctccagaacgaatcaagagttgcaggaaatcaatcgtgtttataaggagatgtacaagactgacttggaaaaggatataatctccgataccagtggcgacttccgcaagctaatggtagctctcgcaaagggcaggcgtgcagaagatggctcagtgatcgactatgagctaatagaccaggacgcacgcgacctgtacgatgccggagtgaagaggaagggaacggatgtgcccaagtggatcagtattatgacggaaaggagcgttccgcacctccagaaggtttttgataggtataaatcatacagtccttatgatatgcttgagagtatcaggaaggaagtgaagggagatctcgagaacgcatttttgaatttggtacaatgcatacagaataagcccctctattttgctgaccggctatacgatagtatgaaaggaaaagggaccagggacaaagttctcatcaggatcatggtgagccgatcagaagtagatatgctcaagatccgttctgagtttaagagaaagtatgggaagtccctgtactattatattcagcaagataccaaaggggactaccaaaaggctctcctttacctatgcggaggcgacgattag

SEQ ID NO: 19678 - DNA, 1074 bp, Artificial Sequence
  derived and/or modified sequence
atgggcagacagctggccggctgcggcgacgccggcaagaaggccagcttcaagatgagcaccgtgcacgagatcctgtgcaagctgagcctggagggcgaccacagcaccccccccagcgcctacggcagcgtgaaggcctacaccaacttcgacgccgagagagacgccctgaacatcgagaccgccatcaagaccaagggcgtggacgaggtgaccatcgtgaacatcctgaccaacagaagcaacgcccagagacaggacatcgccttcgcctaccagagaagaaccaagaaggagctggccagcgccctgaagagcgccctgagcggccacctggagaccgtgatcctgggcctgctgaagacccccgcccagtacgacgccagcgagctgaaggccagcatgaagggcctgggcaccgacgaggacagcctgatcgagatcatctgcagcagaaccaaccaggagctgcaggagatcaacagagtgtacaaggagatgtacaagaccgacctggagaaggacatcatcagcgacaccagcggcgacttcagaaagctgatggtggccctggccaagggcagaagagccgaggacggcagcgtgatcgactacgagctgatcgaccaggacgccagagacctgtacgacgccggcgtgaagagaaagggcaccgacgtgcccaagtggatcagcatcatgaccgagagaagcgtgccccacctgcagaaggtgttcgacagatacaagagctacagcccctacgacatgctggagagcatcagaaaggaggtgaagggcgacctggagaacgccttcctgaacctggtgcagtgcatccagaacaagcccctgtacttcgccgacagactgtacgacagcatgaagggcaagggcaccagagacaaggtgctgatcagaatcatggtgagcagaagcgaggtggacatgctgaagatcagaagcgagttcaagagaaagtacggcaagagcctgtactactacatccagcaggacaccaagggcgactaccagaaggccctgctgtacctgtgcggcggcgacgactag

SEQ ID NO: 19679 - protein, 235 aa, Artificial Sequence
  derived and/or modified sequence
MAWQGLAAEFLQVPAVTRAYTAACVLTTAAVQLELLSPFQLYFNPHLVFRKFQVWRLVTNFLFFGPLGFSFFFNMLFVFRYCRMLEEGSFRGRTADFVFMFLFGGVLMTLLGLLGSLFFLGQALMAMLVYVWSRRSPRVRVNFFGLLTFQAPFLPWALMGFSLLLGNSILVDLLGIAVGHIYYFLEDVFPNQPGGKRLLQTPGFLKLLLDAPAEDPNYLPLPEEQPGPHLPPPQQ

SEQ ID NO: 19680 - DNA, 708 bp, Artificial Sequence
  derived and/or modified sequence
atggcctggcagggcctggccgccgagttcctgcaggtgcccgccgtgaccagagcctacaccgccgcctgcgtgctgaccaccgccgccgtgcagctggagctgctgagccccttccagctgtacttcaacccccacctggtgttcagaaagttccaggtgtggagactggtgaccaacttcctgttcttcggccccctgggcttcagcttcttcttcaacatgctgttcgtgttcagatactgcagaatgctggaggagggcagcttcagaggcagaaccgccgacttcgtgttcatgttcctgttcggcggcgtgctgatgaccctgctgggcctgctgggcagcctgttcttcctgggccaggccctgatggccatgctggtgtacgtgtggagcagaagaagccccagagtgagagtgaacttcttcggcctgctgaccttccaggcccccttcctgccctgggccctgatgggcttcagcctgctgctgggcaacagcatcctggtggacctgctgggcatcgccgtgggccacatctactacttcctggaggacgtgttccccaaccagcccggcggcaagagactgctgcagacccccggcttcctgaagctgctgctggacgcccccgccgaggaccccaactacctgcccctgcccgaggagcagcccggcccccacctgccccccccccagcagtag

SEQ ID NO: 19681 - DNA, 860 bp, Artificial Sequence
  derived and/or modified sequence
gtgcttgagaaggttcaatggcgtggcagggactagcggccgagttcctgcaggtgccggcggtgacgcgggcttacaccgcagcctgtgtcctcaccaccgccgcggtgcagctggagctcctcagcccctttcaactctacttcaacccgcaccttgtgttccggaagttccaggtctggaggctcgtcaccaacttcctcttcttcgggcccctgggattcagcttcttcttcaacatgctcttcgtgttccgctactgccgcatgctggaagagggctccttccgcggccgcacggccgacttcgtcttcatgtttctcttcgggggcgtccttatgaccctgctgggactcctgggcagcctgttcttcctgggccaggccctcatggccatgctggtgtacgtgtggagccgccgcagccctcgggtgagggtcaacttcttcggcctgctcactttccaggcaccgttcctgccttgggcgctcatgggcttctcgctgctgctgggcaactccatcctcgtggacctgctggggattgcggtgggccatatctactacttcctggaggacgtcttccccaaccagcctggaggcaagaggctcctgcagacccctggcttcctaaagctgctcctggatgcccctgcagaagaccccaattacctgcccctccctgaggaacagccaggaccccatctgccacccccgcagcagtgacccccacccagggccaggcctaagaggcttctggcagcttccatcctacccatgacccctacttggggcagaaaaaacccatcctaaaggctgggcccatgcaagggcccacctgaataaacagaatgagctgca

SEQ ID NO: 19682 - DNA, 969 bp, Artificial Sequence
  derived and/or modified sequence
ggccacgcgtgcttgagaaggttcaatggcgtggcagggactagcggccgagttcctgcaggtgccggcggtgacgcgggcttacaccgcagcctgtgtcctcaccaccgccgcggtgcagctggagctcctcagcccctttcaactctacttcaacccgcaccttgtgttccggaagttccaggtctggaggctcgtcaccaacttcctcttcttcgggcccctgggattcagcttcttcttcaacatgctcttcgtgttccgctactgccgcatgctggaagagggctccttccgcggccgcacggccgacttcgtcttcatgtttctcttcgggggcgtccttatgaccctgctgggactcctgggcagcctgttcttcctgggccaggccctcatggccatgctggtgtacgtgtggagccgccgcagccctcgggtgagggtcaacttcttcggcctgctcactttccaggcaccgttcctgccttgggcgctcatgggcttctcgctgctgctgggcaactccatcctcgtggacctgctggggattgcggtgggccatatctactacttcctggaggacgtcttccccaaccagcctggaggcaagaggctcctgcagacccctggcttcctgtgagtgttgagagccctccctccctctccccaccctcagaaggatccccaccgatggggacctgtgctggcctgtgctcaacacgggcccctccccacagaaagctgctcctggatgcccctgcagaagaccccaattacctgcccctccctgaggaacagccaggaccccatctgccacccccgcagcagtgacccccacccagggccaggcctaagaggcttctggcagcttccatcctacccatgacccctacttggggcagaaaaaacccatcctaaaggctgggcccatgcaagggcccacctgaataaacagaatgagctgca

SEQ ID NO: 19683 - DNA, 708 bp, Artificial Sequence
  derived and/or modified sequence
atggcgtggcaggggcttgccgccgaattccttcaggttcctgcagtgactagggcatacactgccgcgtgcgttctgaccacagccgccgtacagttggagctgctgtcccctttccagttatattttaacccccaccttgtattcaggaagttccaggtctggagacttgtgaccaatttcttatttttcggccccctggggttcagtttctttttcaacatgctgttcgtcttcaggtattgcagaatgttggaggaggggagcttcagaggacgtactgctgattttgtatttatgtttcttttcggcggggtcctcatgacacttctcggcctactgggatccctgttcttcctcggacaggccctcatggctatgcttgtgtacgtctggtccaggcgatcacctagggtacgtgttaacttcttcgggctgttgactttccaggcccccttcctcccgtgggccctgatgggattctccctgctgctgggcaactccatactggttgatttgctcggaatcgccgttgggcatatatactatttcctggaagacgtctttccaaatcaaccggggggaaaacgactgctgcaaacccccggattcctcaaactgctgctggatgccccagccgaggatccaaattatctgcccctgcccgaagagcagcccggtccacatctgccacccccacaacaatag

SEQ ID NO: 19684 - DNA, 708 bp, Artificial Sequence
  derived and/or modified sequence
atggcctggcagggcctggccgctgagttcctgcaggtgcctgctgtgacccgggcctacacagctgcctgtgtgctgaccacagctgctgtgcagctggagctgctgagccccttccagctgtacttcaacccccacctggtgttcaggaagttccaggtgtggaggctggtgaccaacttcctgttcttcggccccctgggcttctccttcttcttcaacatgctgtttgtgttccgctactgcaggatgctggaggagggcagcttccggggccgcacagctgactttgtgttcatgttcctgtttggaggagtgctgatgaccctgctgggcctgctgggcagcctcttcttcctgggccaggccctgatggccatgctggtgtatgtgtggagccgccgcagcccccgggtgcgggtgaacttcttcggcctgctgaccttccaggcccccttcctgccctgggccctgatgggcttcagcctgctgctgggcaacagcatcctggtggacctgctgggcattgctgtgggccacatctactacttcctggaggatgtgttccccaaccagcccggcggcaagaggctgctgcagaccccaggcttcctgaagctgctgctggatgccccagctgaggaccccaactacctgcccctgcctgaggagcagcccggcccccacctgcccccaccccagcagtag

SEQ ID NO: 19685 - DNA, 708 bp, Artificial Sequence
  derived and/or modified sequence
atggcctggcagggcctggccgccgagttcctgcaggtgcccgccgtgacaagggcttataccgccgcctgcgttctgacgactgcagcagtccagctcgagctattgtccccgtttcaactgtattttaacccacacttggtttttcgaaagtttcaagtgtggcggctcgttaccaacttcctcttttttggccctctgggcttctcctttttctttaacatgctctttgtgttcaggtactgtcggatgctggaggaggggagctttcgcgggagaaccgccgactttgtctttatgtttctattcggcggtgtgctgatgacactcctcggtcttctgggctccctgttcttccttgggcaagccctgatggctatgctagtctacgtatggagtagacgtagtccacgtgttcgggtaaacttctttggcctccttaccttccaggcaccattcttgccctgggctctgatgggcttcagtcttctgcttggcaattccatcttagtggaccttctggggattgcggtgggacacatttattacttccttgaggatgtctttccgaaccaaccagggggaaaaagattactgcaaacaccaggcttccttaaactactgctggatgcaccagctgaggatcccaactaccttccgctgcctgaggagcagccaggaccccatctgcccccgccgcagcagtag

SEQ ID NO: 19686 - DNA, 708 bp, Artificial Sequence
  derived and/or modified sequence
atggcatggcaggggctcgccgcagaatttttacaagtgccagcggttacgagggcatataccgcagcatgtgttctaacaactgccgcagtccagctagagctgctgagcccatttcagctttactttaacccccacctggtttttcgtaaatttcaagtctggagactggtgaccaacttcttgtttttcggcccactcggattttcatttttttttaacatgctttttgtgttccgttattgtaggatgcttgaagaaggctcgttccggggaaggactgccgattttgtatttatgttcctgttcggcggagttctcatgacactgctgggccttctaggatccctgttttttctgggccaagctctcatggccatgctggtgtacgtatggtcccgcagatccccccgtgtgcgcgtcaacttttttggactgttgacttttcaagctccatttctgccatgggccctaatgggctttagcctcctgctgggcaacagtattctggtggatttgcttggcatcgctgtgggacacatctactactttctggaagacgtgtttccaaatcagccagggggaaagcggctactgcaaacccccggttttctcaaattattactggatgctccagctgaagaccccaattatttgccattgcctgaagaacaacccggaccacacctgccacctccgcagcaatag

SEQ ID NO: 19687 - protein, 683 aa, Artificial Sequence
  derived and/or modified sequence
MSSESSKKRKPKVIRSDGAPAEGKRNRSDTEQEGKYYSEEAEVDLRDPGRDYELYKYTCQELQRLMAEIQDLKSRGGKDVAIEIEERRIQSCVHFMTLKKLNRLAHIRLKKGRDQTHEAKQKVDAYHLQLQNLLYEVMHLQKEITKCLEFKSKHEEIDLVSLEEFYKEAPPDISKAEVTMGDPHQQTLARLDWELEQRKRLAEKYRECLSNKEKILKEIEVKKEYLSSLQPRLNSIMQASLPVQEYLFMPFDQAHKQYETARHLPPPLYVLFVQATAYGQACDKTLSVAIEGSVDEAKALFKPPEDSQDDESDSDAEEEQTTKRRRPTLGVQLDDKRKEMLKRHPLSVMLDLKCKDDSVLHLTFYYLMNLNIMTVKAKVTTAMELITPISAGDLLSPDSVLSCLYPGDHGKKTPNPANQYQFDKVGILTLSDYVLELGHPYLWVQKLGGLHFPKEQPQQTVIADHSLSASHMETTMKLLKTRVQSRLALHKQFASLEHGIVPVTSDCQYLFPAKVVSRLVKWVTVAHEDYMELHFTKDIVDAGLAGDTNLYYMALIERGTAKLQAAVVLNPGYSSIPPVFQLCLNWKGEKTNSNDDNIRAMEGEVNVCYKELCGPWPSHQLLTNQLQRLCVLLDVYLETESHDDSVEGPKEFPQEKMCLRLFRGPSRMKPFKYNHPQGFFSHR

SEQ ID NO: 19688 - DNA, 2052 bp, Artificial Sequence
  derived and/or modified sequence
atgagcagcgagagcagcaagaagagaaagcccaaggtgatcagaagcgacggcgcccccgccgagggcaagagaaacagaagcgacaccgagcaggagggcaagtactacagcgaggaggccgaggtggacctgagagaccccggcagagactacgagctgtacaagtacacctgccaggagctgcagagactgatggccgagatccaggacctgaagagcagaggcggcaaggacgtggccatcgagatcgaggagagaagaatccagagctgcgtgcacttcatgaccctgaagaagctgaacagactggcccacatcagactgaagaagggcagagaccagacccacgaggccaagcagaaggtggacgcctaccacctgcagctgcagaacctgctgtacgaggtgatgcacctgcagaaggagatcaccaagtgcctggagttcaagagcaagcacgaggagatcgacctggtgagcctggaggagttctacaaggaggccccccccgacatcagcaaggccgaggtgaccatgggcgacccccaccagcagaccctggccagactggactgggagctggagcagagaaagagactggccgagaagtacagagagtgcctgagcaacaaggagaagatcctgaaggagatcgaggtgaagaaggagtacctgagcagcctgcagcccagactgaacagcatcatgcaggccagcctgcccgtgcaggagtacctgttcatgcccttcgaccaggcccacaagcagtacgagaccgccagacacctgcccccccccctgtacgtgctgttcgtgcaggccaccgcctacggccaggcctgcgacaagaccctgagcgtggccatcgagggcagcgtggacgaggccaaggccctgttcaagccccccgaggacagccaggacgacgagagcgacagcgacgccgaggaggagcagaccaccaagagaagaagacccaccctgggcgtgcagctggacgacaagagaaaggagatgctgaagagacaccccctgagcgtgatgctggacctgaagtgcaaggacgacagcgtgctgcacctgaccttctactacctgatgaacctgaacatcatgaccgtgaaggccaaggtgaccaccgccatggagctgatcacccccatcagcgccggcgacctgctgagccccgacagcgtgctgagctgcctgtaccccggcgaccacggcaagaagacccccaaccccgccaaccagtaccagttcgacaaggtgggcatcctgaccctgagcgactacgtgctggagctgggccacccctacctgtgggtgcagaagctgggcggcctgcacttccccaaggagcagccccagcagaccgtgatcgccgaccacagcctgagcgccagccacatggagaccaccatgaagctgctgaagaccagagtgcagagcagactggccctgcacaagcagttcgccagcctggagcacggcatcgtgcccgtgaccagcgactgccagtacctgttccccgccaaggtggtgagcagactggtgaagtgggtgaccgtggcccacgaggactacatggagctgcacttcaccaaggacatcgtggacgccggcctggccggcgacaccaacctgtactacatggccctgatcgagagaggcaccgccaagctgcaggccgccgtggtgctgaaccccggctacagcagcatcccccccgtgttccagctgtgcctgaactggaagggcgagaagaccaacagcaacgacgacaacatcagagccatggagggcgaggtgaacgtgtgctacaaggagctgtgcggcccctggcccagccaccagctgctgaccaaccagctgcagagactgtgcgtgctgctggacgtgtacctggagaccgagagccacgacgacagcgtggagggccccaaggagttcccccaggagaagatgtgcctgagactgttcagaggccccagcagaatgaagcccttcaagtacaaccacccccagggcttcttcagccacagatag

SEQ ID NO: 19689 - DNA, 282 bp, Artificial Sequence
  derived and/or modified sequence
atgagcagcgagagcagcaagaagagaaagcccaaggtgatcagaagcgacggcgcccccgccgagggcaagagaaacagaagcgacaccgagcaggagggcaagtactacagcgaggaggccgaggtggacctgagagaccccggcagagactacgagctgtacaagtacacctgccaggagctgcagagactgatggccgagatccaggacctgaagagcagaggcggcaaggacgtggccatcgagatcgaggagagaagaatccagagctgcgtgtag

SEQ ID NO: 19690 - DNA, 486 bp, Artificial Sequence
  derived and/or modified sequence
atgagcagcgagagcagcaagaagagaaagcccaaggtgatcagaagcgacggcgcccccgccgagggcaagagaaacagaagcgacaccgagcaggagggcaagtactacagcgaggaggccgaggtggacctgagagaccccggcagagactacgagctgtacaagtacacctgccaggagctgcagagactgatggccgagatccaggacctgaagagcagaggcggcaaggacgtggccatcgagatcgaggagagaagaatccagagctgcgtgcacttcatgaccctgaagaagctgaacagactggcccacatcagactgaagaagggcagagaccagacccacgaggccaagcagaaggtggacgcctaccacctgcagctgcagaacctgctgtacgaggtgatgcacctgcagaaggagatcaccaagtgcctggagttcaagagcaagcacgaggagatcgacctggtgagctag

SEQ ID NO: 19691 - DNA, 672 bp, Artificial Sequence
  derived and/or modified sequence
atgagcagcgagagcagcaagaagagaaagcccaaggtgatcagaagcgacggcgcccccgccgagggcaagagaaacagaagcgacaccgagcaggagggcaagtactacagcgaggaggccgaggtggacctgagagaccccggcagagactacgagctgtacaagtacacctgccaggagctgcagagactgatggccgagatccaggacctgaagagcagaggcggcaaggacgtggccatcgagatcgaggagagaagaatccagagctgcgtgcacttcatgaccctgaagaagctgaacagactggcccacatcagactgaagaagggcagagaccagacccacgaggccaagcagaaggtggacgcctaccacctgcagctgcagaacctgctgtacgaggtgatgcacctgcagaaggagatcaccaagtgcctggagttcaagagcaagcacgaggagatcgacctggtgagcctggaggagttctacaaggaggccccccccgacatcagcaaggccgaggtgaccatgggcgacccccaccagcagaccctggccagactggactgggagctggagcagagaaagagactggccgagaagtacagagagtgcctgagcaacaaggagaagatcctgaaggagatcgaggtgaagaagtag

SEQ ID NO: 19692 - DNA, 2052 bp, Artificial Sequence
  derived and/or modified sequence
atgtcttctgaaagttcgaaaaagcggaaaccgaaagtgatccgtagtgacggggcaccggccgagggcaagagaaaccgatccgacacagagcaggaaggcaagtattactcagaagaggcagaggtcgatctccgagatccgggacgggattacgaactgtacaaatacacctgtcaagaactgcaacgccttatggccgaaattcaggatttgaaatcaagggggggaaaagacgtcgcaatcgaaattgaagagagacgtatccagagctgcgttcacttcatgaccttgaagaagttgaacaggctggcccatatcagactgaaaaaagggcgcgaccaaacccatgaagccaagcagaaagttgacgcctatcacttgcaacttcagaatctcctgtacgaagttatgcacctgcagaaagaaattaccaagtgcctggagtttaaatctaaacatgaagagatcgatttagtgagtcttgaggagttctacaaggaagccccaccagatatatccaaagctgaggttaccatgggggatccgcaccaacagactcttgccagactggactgggaacttgagcaacggaagcgcctggcggagaaataccgggagtgtttgagcaacaaggagaaaatcctgaaggagatcgaggttaaaaaggagtatctctccagcctgcaacctagattaaactcaatcatgcaggccagcctgcccgtccaagaatacctcttcatgcccttcgaccaagcacacaagcaatacgaaacagcccgccatctgcctcccccactgtatgttttgtttgtgcaagctaccgcatacggccaggcgtgcgataagacactgtccgtcgcaatcgagggatccgtggatgaggctaaggcactgttcaaaccgccagaggacagtcaggacgacgagtcagatagcgacgctgaggaggagcagacaacgaaacgaagacgcccaaccttaggggtccagttagatgataaaagaaaagagatgctcaaaaggcatccgttgagcgtaatgttggacttgaaatgtaaggacgactctgtcctccatctgaccttctactacttaatgaaccttaacatcatgactgtgaaagccaaggtgaccaccgccatggagctgatcactccaataagtgctggtgatctgctaagtccagatagtgtgttgagctgtctctacccaggcgatcatggcaaaaagactccaaaccctgcaaaccagtaccagtttgacaaggtggggatactcacattgagtgactacgttctggaactcggccacccctacctgtgggtgcaaaaattggggggcctgcatttccccaaggaacagccacagcagacggtgatcgcagatcattctctctccgcttcccacatggagacaacaatgaaactgctgaaaacccgggtgcaatcccgtcttgcactccataaacaattcgcctctttggaacatggcattgtaccggtcaccagtgactgccagtacctgtttccagccaaagtggtgtccagactcgtgaagtgggttaccgtggcccatgaggactatatggagctacactttacgaaggacatcgtggatgccggcctagcaggggatacaaacctctactacatggctctcatagaaaggggtaccgcaaagctgcaagctgctgttgtgttgaacccgggatacagcagtatcccgcccgtgtttcagctgtgcctgaactggaaaggagaaaaaaccaatagcaatgatgataatattcgagctatggagggcgaggtcaatgtgtgttacaaggaactttgcggtccgtggcccagccatcaactcctgacaaaccagctccagaggctgtgcgtcctgctggacgtatacctggagactgagtcccacgacgattccgtcgagggaccgaaggagttcccccaagaaaaaatgtgtttgaggttattcaggggtccttcccgaatgaagcctttcaaatataaccacccccaaggatttttctcacacaggtag

SEQ ID NO: 19693 - DNA, 2052 bp, Artificial Sequence
  derived and/or modified sequence
atgagctccgagagctctaaaaagagaaaacctaaggtgatacggtcagatggagctccggctgaaggcaaaagaaatcgttcagacacagaacaggagggaaagtactatagcgaagaggctgaagttgatctcagggatcctggcagggattatgagctgtataagtatacttgtcaggagctgcagcgactgatggccgagatccaggatctgaaaagtcgcggtgggaaggacgtagcaatcgaaattgaagaacgacggatacaaagctgcgttcactttatgactctgaagaaactgaaccggctggctcacattaggctcaagaaggggagggaccaaacgcacgaggcaaagcaaaaggtggatgcctatcaccttcaactgcagaatctgttgtatgaagttatgcatctgcagaaagagatcaccaagtgtttggaattcaaatctaaacatgaggaaatagacctggtaagcctggaggaattctacaaggaagcccctccagacatctccaaggccgaggtcactatgggagacccacatcagcaaactctggcccggcttgattgggagctggaacaacggaagcgactggcagaaaaataccgcgagtgtctgtccaacaaggaaaaaatcctaaaagagatcgaggtgaagaaggagtacctctctagtctccagccaagactgaactccataatgcaggccagtctcccagtgcaggagtacctattcatgcccttcgatcaggcccataaacagtacgagacagctagacatctcccaccacctctgtacgtactattcgtccaggcgactgcatatgggcaggcctgtgacaagaccctctcagtggccatagagggtagcgtcgatgaagcaaaggctctgtttaaaccacctgaagatagccaggacgatgagagcgactccgacgcagaagaggagcagacgactaagaggcggcgaccaactttgggcgtacaacttgacgataaaaggaaggagatgctgaagcgccacccactaagcgtgatgcttgatctgaaatgtaaggatgatagtgtcctgcatctgacgttctactacctgatgaatcttaatattatgacagttaaggcaaaggtgacgactgctatggagctgattaccccaattagtgctggggaccttctttccccagactcagttctgtcttgcctttatcccggagatcacgggaagaaaacccctaatcccgcaaatcagtaccagttcgataaagttgggattctgacactctcagactacgtactagagctgggacatccgtacctctgggtccagaagctgggcggtctccatttcccgaaagagcagcctcagcagactgttatcgccgaccactctctttctgctagccacatggaaacgactatgaagctgcttaaaaccagggttcagtcccggcttgcactccacaagcagtttgcgtctctggagcatggaattgtgcccgtgacttcggactgccagtacctatttccggccaaagttgtaagccgcctggtgaagtgggttacagttgcccatgaagactatatggagctgcactttaccaaggatatcgtggatgccgggttggccggggacaccaacctttattatatggcactcatagagaggggaactgcgaagctccaggctgcagtcgtccttaacccaggatacagctccattcctccagtattccagctgtgtctaaattggaagggcgagaaaacaaacagcaatgacgataacattcgcgccatggagggagaagtaaacgtctgttataaggaactgtgcgggccctggccaagccatcagttattaaccaaccagctgcagagactctgtgttcttctggatgtgtacctggagactgaaagtcacgatgattccgtcgagggccccaaagagttcccacaggaaaagatgtgcctcaggctgttccgcgggccctcaaggatgaagccatttaaatataaccacccccagggattctttagccatcgctag

SEQ ID NO: 19694 - DNA, 2052 bp, Artificial Sequence
  derived and/or modified sequence
atgtcaagcgagagctctaaaaaaagaaagcccaaggttatccggagcgacggggcccccgcagaaggcaagagaaatcggagcgacaccgagcaggaaggtaagtattactccgaagaagccgaggtggacctcagagatcccggtagagactacgagttatataaatacacatgtcaagaactgcagagactgatggctgagatccaggaccttaagtctcggggagggaaggatgtagctatcgagatcgaagaacgccggattcagagctgcgtccatttcatgaccctgaagaagctgaaccgcttagctcacattcgactgaaaaaaggtagagaccaaacccacgaagctaagcagaaggtggacgcgtatcacctgcagctccagaacctgttgtatgaggtgatgcacctacagaaggagattactaagtgcttggagtttaagagcaagcacgaagaaattgacctggtgtcactggaggagttctacaaggaggcacccccagacatatctaaggccgaggtgaccatgggcgatccgcatcagcaaaccctcgctcggctagactgggaactggagcagcgtaaacggttggccgaaaaataccgcgagtgccttagtaataaagaaaagattctcaaggaaatcgaggtgaaaaaggaatacctttctagcctgcagccaaggctcaactctatcatgcaggcatcattaccggtgcaggagtacctgtttatgccctttgaccaagcccataaacagtacgagaccgcaagacacttgccacctccgctctacgtgctcttcgtgcaggcgactgcatacggacaagcctgcgataagaccttgagtgtggccatagaggggtctgtggacgaagccaaagccctctttaaacctccagaggactcacaggacgatgagtcagacagcgacgctgaggaagagcaaaccacaaagaggagacggcctactctgggcgtccaacttgatgataagaggaaagaaatgctgaagcgccatcctctgtccgtgatgctcgatctgaagtgcaaggacgattccgtactgcacctgactttctattatctgatgaatctgaacattatgaccgttaaggccaaagtgacaacagcaatggaacttatcacacccattagtgccggcgatctgcttagtccagattctgtgttgagctgcctgtaccccggagaccatgggaaaaaaactcccaatccagccaaccagtaccagtttgataaggtcggaattcttaccttatctgactacgtgctggaactcggccacccttacctgtgggtgcagaaattaggagggcttcattttccaaaagaacagcctcagcagacagttatagcagatcacagtctgagcgcatcacacatggagactaccatgaaattgcttaaaaccagagtgcagtccagactcgcacttcacaaacagttcgcctcgttggagcacggcatcgtgcctgtgacctcagactgtcagtacctgtttcccgctaaggtcgtttctcgccttgtcaagtgggtcaccgtggcacatgaggactatatggaactgcacttcaccaaggacatcgtcgatgcagggctggcgggagacactaatctgtattacatggcactcatcgagcgcgggaccgccaagcttcaggccgctgtggtactcaatcccggctacagctcgattcctcctgtgttccagctgtgcctaaattggaaaggcgaaaaaaccaatagtaacgatgacaacattcgggcgatggaaggggaggtcaacgtctgttacaaggagctgtgtgggccctggccaagccaccaattgttgacaaatcagctacagcggctttgtgtgctgctggatgtgtaccttgaaaccgagtcccatgacgacagcgtggagggaccaaaagagttcccccaggagaaaatgtgtttgagactgtttagagggccctcccgaatgaaaccttttaagtataaccacccacagggcttcttcagccacaggtag

SEQ ID NO: 19695 - DNA, 282 bp, Artificial Sequence
  derived and/or modified sequence
atgagttccgagagttcaaagaaacgcaaaccaaaagtgattaggtccgacggcgcacccgcagaggggaaaagaaaccgctccgataccgaacaggaagggaagtactattctgaggaggcggaggtggaccttagggaccccggccgagactatgaactgtacaaatacacttgccaggaattgcagagactgatggccgagattcaagaccttaagagccggggggggaaagacgtcgcgattgagatcgaagagagacgtatccagtcctgcgtatag

SEQ ID NO: 19696 - DNA, 486 bp, Artificial Sequence
  derived and/or modified sequence
atgtcctccgagagttcgaaaaaaaggaaaccaaaggtgatcaggagtgatggggcaccagccgaggggaagcgaaatagaagcgacacagagcaggaggggaaatactactccgaggaggccgaagttgacctgagagatcccgggcgcgattatgaactgtataaatacacttgtcaggagcttcaacggctgatggcagaaatacaggacctcaaatcacggggtggtaaggatgttgccattgagattgaagagaggcgtattcagtcttgtgtccattttatgactctcaagaagttgaatcgcctggcccacattcgcctgaagaagggacgcgaccagacgcacgaggccaagcagaaggtggatgcttaccaccttcaactgcagaatctgctatatgaggtcatgcacctgcagaaggaaattactaagtgcttggagtttaaaagtaagcatgaggaaattgatctggtgtcctag

SEQ ID NO: 19697 - DNA, 672 bp, Artificial Sequence
  derived and/or modified sequence
atgtcctcagagtcatctaagaaaaggaaacccaaggtcatccggtctgatggtgcccctgctgaaggaaagcgcaataggtcggatacagaacaggagggcaagtactactccgaggaagccgaggtggatctgagagatccaggacgcgactatgaattgtacaaatatacttgtcaggaactgcaacgcttgatggctgagattcaggatttaaagtctagaggaggtaaagatgtagccatcgaaatcgaagagcgccggattcagtcctgcgtccatttcatgactctcaaaaaactgaatcgtctggcccacatacggctaaagaagggccgcgaccagactcatgaggccaaacagaaagtggatgcttaccatctgcagctgcagaacttgttgtatgaggtgatgcacttgcagaaggaaatcacaaagtgccttgagtttaaatcaaaacatgaggaaatcgatctcgttagcctggaggaattctacaaagaagctcctccggatatctcaaaggcagaggttacaatgggcgatccccaccaacaaacactagcacgactggattgggaactcgaacagcgcaaacgactggccgaaaaataccgcgagtgtctctccaacaaagaaaaaatactcaaagagatcgaagtaaaaaagtag

SEQ ID NO: 19698 - DNA, 2052 bp, Artificial Sequence
  derived and/or modified sequence
atgagctctgagtccagtaaaaaacgcaaacccaaggtgattaggagcgatggggcacccgcagaaggcaagaggaatcggtctgacacagaacaggaaggcaaatactatagcgaagaagccgaagtggatctgcgggatccaggtcgcgactacgagctctacaagtacacttgtcaggaactccaaagactgatggcagaaatccaggatcttaaatcccgcgggggcaaggacgttgctatcgaaatcgaagagcgtcgtatccagagctgcgtgcactttatgacacttaaaaagctgaatcggctcgcgcatattagattgaaaaagggtcgcgatcagacccatgaagcaaagcagaaagtagatgcctatcatttgcaactacaaaacttgttgtacgaggtgatgcacctgcagaaagaaatcactaaatgcctggaattcaaatctaaacacgaagaaatcgacctggtatctttggaagaattttataaagaagcaccgccggacatcagtaaggccgaggttacaatgggtgatcctcaccaacagaccctcgcccgtctggactgggagctggagcaacgaaaaaggttggctgagaagtatagagagtgcctttctaataaggaaaagatacttaaggagattgaggtcaaaaaggaatatttatcgtccttacagccgagactgaatagtattatgcaggcctccctgcctgtgcaggagtatttattcatgcctttcgaccaggcacacaagcagtacgaaaccgctagacatctgccgccacccctgtacgtcctgttcgtccaggccaccgcatatggtcaggcctgcgacaagaccttgtcggttgccattgaaggaagcgtggatgaggctaaagcactttttaaaccccccgaagattcccaggacgacgagagcgattccgacgcagaagaggaacagactacaaaacgaagacgacctacactgggtgtgcagttggacgataagcggaaggagatgctgaagcgccaccccttgtctgtaatgttggacctgaagtgcaaggatgacagtgtgctgcatctcaccttttactacctgatgaacctgaatattatgaccgtgaaggccaaggtgactactgcaatggagcttatcaccccgatctcagcaggagatctgctgtctcccgacagtgttctgtcctgtctttacccaggtgaccacggaaagaagaccccaaacccagcaaaccaatatcagtttgataaggtcggaattctgaccctgagtgattacgttctagagttgggccatccatacctgtgggtgcaaaaattaggtggtctgcactttcccaaggaacagcctcaacagaccgtcattgccgaccactccctttccgcaagtcatatggagacaaccatgaagctgctgaagactagggttcagtccaggctagctttgcacaagcaatttgcctccctggagcacggtatagtcccagtgacctccgattgtcagtatctgttccccgccaaagttgtctctagactggtaaagtgggtgactgttgctcatgaagattatatggagctgcattttaccaaggatattgtagatgcaggtctagcaggggatacaaacctgtactatatggcacttatcgagcgggggaccgctaagctgcaggccgctgtagtactgaaccccgggtattccagtattccccctgtgttccagctctgtctgaattggaaaggagagaagacaaattcgaacgacgataatatccgagctatggaaggagaggttaatgtgtgctataaagagttgtgtggtccctggccgtcccatcagttattgaccaatcagctgcagcggctgtgtgtccttttagacgtctatttggagacagagtcacacgacgattcagttgaagggcccaaagagtttcctcaagaaaaaatgtgtctgcgtctgttccggggaccatcgcgtatgaagccatttaagtataaccaccctcagggctttttctctcatagatag

SEQ ID NO: 19699 - DNA, 2052 bp, Artificial Sequence
  derived and/or modified sequence
atgagcagcgagagcagcaagaagaggaagcccaaggtgatccgcagtgatggagccccagctgagggcaagaggaacagaagtgacacagagcaggagggcaagtactacagcgaggaggccgaggtggacctgcgggaccccggccgggactatgagctgtacaagtacacctgccaggagctgcagaggctgatggccgagatccaggacctgaagagccggggcggcaaggatgtggccatcgagattgaggagcggcgcatccagagctgtgtgcacttcatgaccctgaagaagctgaaccggctggcccacatccggctgaagaagggccgggaccagacccatgaggccaagcagaaggtggatgcctaccacctgcagctgcagaacctgctgtatgaggtgatgcacctgcagaaggagatcaccaagtgcctggagttcaagagcaagcatgaggagattgacctggtgtccctggaggagttctacaaggaggcccccccagacatcagcaaggccgaggtgaccatgggagacccccaccagcagaccctggcccggctggactgggagctggagcagaggaagaggctggccgagaagtacagagaatgtctgagcaacaaggagaagatcctgaaggagattgaggtgaagaaggagtacctgagcagcctgcagccccggctgaacagcatcatgcaggccagcctgcctgtgcaggagtacctgttcatgccctttgaccaggcccacaagcagtatgaaacagcccggcacctgcccccacccctgtatgtgctgtttgtgcaggccacagcctacggccaggcctgtgacaagaccctgtctgtggccatcgagggctctgtggatgaggccaaggccctcttcaagcccccagaggacagccaggatgatgaaagtgacagtgatgctgaggaggagcagaccaccaagagaagaagacccaccctgggcgtgcagctggatgacaagaggaaggagatgctgaagaggcaccccctgtctgtgatgctggacctgaagtgcaaggatgacagcgtgctgcacctgaccttctactacctgatgaacctgaacatcatgacagtgaaggccaaggtgaccacagccatggagctgatcacccccatctctgctggggacctgctgagcccagattctgtgctgagctgcctgtacccaggggaccacggcaagaagacccccaacccagccaaccagtaccagtttgacaaggtgggcatcctgaccctgagtgactatgtgctggagctgggccacccctacctgtgggtgcagaagctgggcggcctgcacttccccaaggagcagccccagcagacagtgattgctgaccacagcctgagcgccagccacatggagaccaccatgaagctgctgaagaccagggtgcagagccggctggccctgcacaagcagtttgccagcctggagcacggcatcgtgcctgtgaccagtgactgccagtacctgtttcctgccaaggtggtgtcccggctggtgaagtgggtgacagtggcccacgaggactacatggagctgcacttcaccaaggacatcgtggatgctggcctggccggggacaccaacctgtactacatggccctgattgaaagaggaacagccaagctgcaggccgctgtggtgctgaaccctggctacagcagcatcccccctgtgttccagctgtgcctgaactggaagggggagaagaccaacagcaatgatgacaacatccgggccatggagggggaggtgaatgtgtgctacaaggagctgtgtggcccctggcccagccaccagctgctgaccaaccagctgcagaggctgtgtgtgctgctggatgtgtacctggagacagagagccatgatgattctgtggagggccccaaggagttcccccaggagaagatgtgcctgcggctcttccggggccccagcaggatgaagcccttcaagtacaaccacccccagggcttcttcagccacaggtag

SEQ ID NO: 19700 - DNA, 282 bp, Artificial Sequence
  derived and/or modified sequence
atgagcagcgagagcagcaagaagaggaagcccaaggtgatccgcagtgatggagccccagctgagggcaagaggaacagaagtgacacagagcaggagggcaagtactacagcgaggaggccgaggtggacctgcgggaccccggccgggactatgagctgtacaagtacacctgccaggagctgcagaggctgatggccgagatccaggacctgaagagccggggcggcaaggatgtggccatcgagattgaggagcggcgcatccagagctgtgtgtag

SEQ ID NO: 19701 - DNA, 486 bp, Artificial Sequence
  derived and/or modified sequence
atgagcagcgagagcagcaagaagaggaagcccaaggtgatccgcagtgatggagccccagctgagggcaagaggaacagaagtgacacagagcaggagggcaagtactacagcgaggaggccgaggtggacctgcgggaccccggccgggactatgagctgtacaagtacacctgccaggagctgcagaggctgatggccgagatccaggacctgaagagccggggcggcaaggatgtggccatcgagattgaggagcggcgcatccagagctgtgtgcacttcatgaccctgaagaagctgaaccggctggcccacatccggctgaagaagggccgggaccagacccatgaggccaagcagaaggtggatgcctaccacctgcagctgcagaacctgctgtatgaggtgatgcacctgcagaaggagatcaccaagtgcctggagttcaagagcaagcatgaggagattgacctggtgtcctag

SEQ ID NO: 19702 - DNA, 672 bp, Artificial Sequence
  derived and/or modified sequence
atgagcagcgagagcagcaagaagaggaagcccaaggtgatccgcagtgatggagccccagctgagggcaagaggaacagaagtgacacagagcaggagggcaagtactacagcgaggaggccgaggtggacctgcgggaccccggccgggactatgagctgtacaagtacacctgccaggagctgcagaggctgatggccgagatccaggacctgaagagccggggcggcaaggatgtggccatcgagattgaggagcggcgcatccagagctgtgtgcacttcatgaccctgaagaagctgaaccggctggcccacatccggctgaagaagggccgggaccagacccatgaggccaagcagaaggtggatgcctaccacctgcagctgcagaacctgctgtatgaggtgatgcacctgcagaaggagatcaccaagtgcctggagttcaagagcaagcatgaggagattgacctggtgtccctggaggagttctacaaggaggcccccccagacatcagcaaggccgaggtgaccatgggagacccccaccagcagaccctggcccggctggactgggagctggagcagaggaagaggctggccgagaagtacagagaatgtctgagcaacaaggagaagatcctgaaggagattgaggtgaagaagtag

SEQ ID NO: 19703 - DNA, 2052 bp, Artificial Sequence
  derived and/or modified sequence
atgagcagcgagagcagcaagaagcggaagcccaaggtgatccggagcgacggtgcccccgcagagggcaaacggaacagatccgacaccgaacaagaagggaagtactatagcgaagaggcagaagtggacctgcgcgacccggggagggactatgagctctacaagtacacatgtcaggaactgcagagacttatggctgagattcaggacttaaagtcccgcgggggtaaggacgtagccattgagatagaggaaaggaggatccaatcttgcgtccatttcatgactcttaaaaaactgaatcggctggcccatatcaggttgaagaaaggaagggatcagacccatgaggcaaagcagaaggtggatgcttaccacctgcagttgcagaatcttctgtatgaggtgatgcacctgcagaaagagatcaccaaatgcctcgagttcaaatcaaaacacgaggagattgacttagtgagcctggaggaattttataaagaagcccctcccgacatctcaaaagcggaagttacaatgggagaccctcatcagcagaccctagcccggctggactgggaactggaacagcggaagaggctagctgaaaagtaccgggaatgcttgagcaataaagagaaaattctgaaagagattgaggtgaaaaaagagtacttaagctcattgcagcccagactgaattctatcatgcaggcctcactccctgtccaagaatacctgtttatgccatttgaccaggctcacaaacagtatgagactgctcggcacctccctccacccctgtacgtcctgtttgtgcaagcgacagcctacggccaggcatgtgataaaactctgagtgtagccatagaaggcagcgtcgacgaggctaaggctttgtttaaaccgccagaggacagccaggacgacgaatccgattcagacgcagaggaggagcaaactacaaagagaagacggccgactctcggcgtacagctggacgacaagcggaaagagatgttgaaacggcacccactgagcgtgatgctggacttaaagtgcaaagatgatagcgtcctgcacctgaccttttattatttaatgaacctgaacatcatgacggtgaaggcgaaggtgactaccgcaatggagttaattactcctataagcgctggggatttgctgtctccagactcagtactttcttgcctttatcccggcgatcatggtaaaaaaacccccaatcccgcgaatcagtatcagttcgacaaggtcggcatccttactctgagcgattatgtgctagagctgggccacccctacctctgggtacagaagctgggtggactgcacttccccaaagaacagcctcagcagactgtgatcgctgaccacagtttgtccgcaagccatatggaaactaccatgaagctgctgaagacccgcgtgcagagccgcctcgctctccacaaacagttcgcttccctcgagcacggaattgtacccgtgaccagtgattgccagtatttgtttccagcgaaggtggtttctcgcctggtgaagtgggtcactgtggcccacgaggactacatggagctacactttactaaagatattgttgacgctgggctagctggggatacaaacctgtactacatggctctgatagagcggggaaccgctaaactgcaagcggccgtggtacttaatcctgggtacagttcgatcccccctgtgttccagctctgtctcaactggaaaggagaaaagacgaacagtaatgatgataatatcagagcaatggaaggggaagtgaacgtctgttacaaagagctctgcgggccttggcccagccatcagctcctcaccaatcaattgcagagactctgtgtcctgttagacgtgtacctcgagaccgagtcccacgatgacagtgtggaaggccctaaggaatttcctcaggagaagatgtgtctgagactgttccgggggccatctcggatgaaaccatttaagtataatcacccccagggtttcttcagtcacagatag

SEQ ID NO: 19704 - DNA, 2052 bp, Artificial Sequence
  derived and/or modified sequence
atgagcagcgagagcagcaagaagcggaagcccaaggtgatccggtccgatggcgcccccgccgaaggtaagcgtaaccgtagcgacactgagcaggagggcaagtactactcagaggaggccgaggtggatttgcgggatcctggcagggactacgagctgtacaaatatacatgccaggagctgcagaggctcatggcagagattcaggacttgaagtctcgtggaggcaaagacgtggccatcgagatcgaggagagaagaatccagtcttgcgtccatttcatgacattgaagaagttaaacagactggctcatattagactgaagaagggccgtgaccagacacatgaagctaagcagaaggtcgacgcttatcatctccagctgcaaaacctgctctacgaggtgatgcatctccaaaaagagattactaagtgtcttgaattcaagagcaagcatgaagaaatcgatctggtttctttagaggaattctataaggaagcgcctcctgatatctcgaaggcggaggttactatgggcgatcctcaccaacaaacactggccagattggattgggaactcgagcagcgcaaaaggcttgctgagaagtatagggagtgcttatctaataaggagaagattctaaaggaaattgaggttaagaaggagtatctgtcctcactgcagccgcgtctgaactccataatgcaagcgtccttgcccgttcaagagtatctgtttatgcctttcgaccaggcccacaaacagtacgagacagctcgtcatcttccaccgcccctctatgttcttttcgtgcaggcaacagcctatggtcaggcttgcgataaaaccctgtccgtcgctatagaagggtccgtggacgaggccaaagctttgttcaagcctccggaagactcccaggacgatgaaagcgactccgacgccgaagaggagcaaactacgaaacgacggcggcccaccctcggagtgcagctcgatgacaagagaaaggaaatgctgaagagacaccctctgagcgttatgctagatctcaagtgcaaagatgacagtgtgcttcatctcacattttactatctcatgaaccttaacatcatgaccgtgaaagcaaaagtgacaaccgctatggagctcataaccccgatctctgcaggcgacctcctctcacctgattccgtcctttcctgtctttatccgggcgatcacggtaaaaaaacaccaaatcccgcaaaccagtaccaatttgataaggtgggaatcctgaccctgtccgactacgtgctggaacttggtcatccttacttatgggtacagaagctgggaggtctgcatttccccaaggagcagccccaacaaaccgttatcgccgatcacagcctgtccgcatcacacatggagacaacaatgaaactgctgaagaccagagtgcagtctagattagcacttcacaaacaattcgccagcttggagcacgggatcgtgccagtgacatctgactgtcagtacctgtttccagccaaggtggtgagcagactggtgaagtgggtgacggtggcccatgaggattatatggaactgcacttcaccaaggacatcgtggacgcaggactagctggcgataccaatctgtattacatggccctgatcgagagagggacagctaaactccaggccgcggttgtcctgaaccctggctattcctcgatcccccccgttttccaactgtgtctaaactggaaaggcgaaaagaccaactccaatgacgacaatattcgcgctatggaaggcgaggtcaacgtgtgctataaagaactgtgtggaccctggccatcgcaccaattgttgaccaatcagctccaacggttatgcgtactgcttgacgtatatctggaaaccgaatcacatgacgatagtgtagaaggccccaaggagtttccccaggaaaaaatgtgcctgagactgttcaggggccccagcagaatgaagcctttcaagtacaatcaccctcagggctttttttctcatagatag

SEQ ID NO: 19705 - DNA, 2052 bp, Artificial Sequence
  derived and/or modified sequence
atgagcagcgagagcagcaagaagcggaagcccaaggtgatccggtccgacggggccccagctgaggggaagcggaatcggtctgacaccgaacaggagggcaaatactacagtgaggaagccgaggtggatctgcgcgatccaggccgcgattatgaactgtataaatatacttgtcaggaactgcagcggctgatggcggagattcaggacctcaaaagcaggggcggtaaagacgtcgcaatcgaaatcgaagagaggcggatccaaagttgcgtccattttatgacactcaagaagctcaaccggttggcccatatcaggttaaagaaaggtagagatcagacacacgaggcgaaacaaaaagtagatgcctatcatctgcagctgcagaatctgctttatgaagttatgcacttgcaaaaagaaattaccaagtgtctggagttcaaatcaaagcacgaggagatcgacctggtgtctctcgaagaattttataaagaggccccccccgatatctccaaagctgaagtgacaatgggagacccccaccagcagacactggccagactggactgggaactggaacagcggaaaagactggcggaaaagtatcgagaatgtctgagcaataaggaaaaaatattaaaggagatcgaggtgaaaaaggaatacctttccagtctccaacccaggctcaattcaataatgcaggcgtcgctgccagttcaggaatatctgttcatgccatttgaccaagcgcataagcagtacgaaacggcccgtcatttgcctccaccgctttatgtgttgtttgtgcaggctactgcctacggacaggcttgcgataagacattgagtgtcgccatcgaagggtccgtggacgaggcgaaagctctcttcaaaccccctgaggattcacaagatgacgaaagtgattccgatgcagaggaagaacaaaccactaaaagacggaggcctactttaggagttcagctcgacgacaaaaggaaggagatgttgaagagacaccctctgtccgtaatgctggacctcaaatgcaaggacgatagcgtgttacatcttacattttactacctcatgaacctgaacattatgactgtgaaggctaaggtaactacagccatggagctgattacacccatcagtgctggcgacctgttgtccccagactctgtgctttcctgtctgtatcccggcgaccatgggaagaagacaccaaatccagccaaccagtatcagtttgacaaggtaggcatccttacactgagtgattacgtcctagagctgggacatccatatctctgggtccagaagctagggggtctgcattttccaaaggaacagcctcagcagacagttatcgccgatcactccttgagcgcgtctcacatggagactacaatgaagcttttaaagacaagagtacaatcgagactggcactgcacaaacagtttgcttctctggaacatggcatcgtgcccgtgacctccgactgtcagtatctgtttccggctaaggtggttagtagattagtgaagtgggtgacggtggctcacgaagattacatggagctacacttcaccaaggatatcgtggacgctggcctggccggagataccaatctttattatatggcactgattgagcgtggcacggccaagctccaggctgcagttgttctcaatcctggatattctagcatcccccctgtgtttcaactgtgcttaaactggaagggcgaaaagaccaattcaaacgacgataacattagagcaatggaaggcgaagtgaacgtatgctacaaggaactgtgcggtccatggccttcacaccagcttctgacaaaccagttacagcgtctctgtgtcctcttggatgtctacctcgagacggagtcgcatgacgattctgtggaggggccaaaggaattccctcaggaaaaaatgtgtctgagactgttccgaggacccagcagaatgaaaccgtttaagtacaatcacccacagggatttttctcacaccgatag

SEQ ID NO: 19706 - DNA, 282 bp, Artificial Sequence
  derived and/or modified sequence
atgagcagcgagagcagcaagaagcggaagcccaaggtgatccggtcagacggagcacctgcagagggcaaaagaaaccgctctgacaccgaacaggaaggcaaatattacagcgaagaggcggaggtggatctgagagaccccgggcgggactacgagctgtacaagtacacctgtcaggagctgcagagattgatggctgagatacaggacttgaaatcgcgggggggcaaggacgtggctatcgaaatagaagagcggcgaatccaatcctgcgtgtag

SEQ ID NO: 19707 - DNA, 486 bp, Artificial Sequence
  derived and/or modified sequence
atgagcagcgagagcagcaagaagcggaagcccaaggtgatccggtctgatggcgcacctgcagaagggaagcggaatcgcagcgatactgagcaggaaggtaaatattattccgaagaggcagaagtggacctgagagatccaggccgcgattacgaactgtacaagtacacgtgtcaagagctgcaacggctgatggccgaaatccaggatctgaagtccaggggagggaaagatgtcgctatcgagattgaagagaggcggatccagtcttgtgtccactttatgacccttaaaaaactgaatcgcttagcccatattcgcctgaaaaaggggagggatcagactcatgaagctaaacagaaggtcgacgcataccatttacagcttcagaacttattgtacgaggtgatgcacttacaaaaagaaattacaaaatgcctggagtttaagagtaagcacgaagaaattgatctggtgtcctag

SEQ ID NO: 19708 - DNA, 672 bp, Artificial Sequence
  derived and/or modified sequence
atgagcagcgagagcagcaagaagcggaagcccaaggtgatccggtccgacggagcacccgcagaaggaaagcgcaacaggtctgacacagaacaggagggcaagtattattccgaggaggccgaggtcgatctgcgggaccctggtcgcgactatgaactgtacaagtatacttgccaggagctgcagcgccttatggccgagatccaagatctgaaaagtagaggtgggaaagacgtcgctattgaaattgaggagaggcggattcagtcatgcgtgcacttcatgacattaaagaagttgaatagactagctcacatccgcctgaagaaaggaagggaccaaacccatgaagcaaagcaaaaggtcgatgcttaccatctgcagcttcaaaatctgctctatgaagttatgcacctacagaaggagatcactaagtgtctggaatttaagtcgaagcatgaagagatcgatttagtgagccttgaggagttctacaaggaagcgcctcccgacatcagtaaggcagaggtgaccatgggagatccacaccaacagacccttgctcgattagactgggagctggaacagaggaaaagactggcagagaagtatcgagagtgcctgagcaataaagaaaaaattttgaaagaaatagaggtaaagaaatag

SEQ ID NO: 19709 - DNA, 2052 bp, Artificial Sequence
  derived and/or modified sequence
atgagcagcgagagcagcaagaagcggaagcccaaggtgatccggtcggacggggcgccagcggagggaaagagaaatcggagcgacaccgaacaggagggtaagtattatagcgaggaagctgaggtggatttaagagaccccggacgcgactatgaactatacaagtacacatgtcaggagctgcagaggctcatggcggagatccaagacctcaaatctcgaggaggaaaagatgtggccatcgagattgaggaacgcaggattcagtcctgtgtgcacttcatgacgctgaagaagttaaatagactagcacacatccgattgaagaagggcagggaccagacccacgaagcaaagcagaaggtagatgcgtatcatctgcagctgcagaatctgttatacgaggtgatgcatttgcagaaggagataacgaaatgcctcgagttcaaatctaagcacgaggagatagacttggtttccttagaagagttctataaagaggctccccccgacatctctaaagctgaagtcacaatgggtgatccacaccagcagacactggctcgtctggactgggaacttgaacagcggaaacgcctcgccgagaaataccgagaatgtctaagcaataaggaaaagatcctcaaagagattgaagtgaagaaggagtaccttagttccctccagcctagattgaatagcattatgcaggcctctctcccggtgcaggaatatctttttatgcccttcgatcaagcccataaacagtatgagactgccaggcacctgccacccccgctttacgtgctgtttgtccaggctaccgcatacggccaagcttgtgacaaaaccttatcggtcgcgattgaaggaagcgttgacgaggccaaggctttatttaagccccccgaggactcccaggatgacgagagtgattccgacgcagaggaagagcagacaactaagaggcggcgccctacacttggcgtccagcttgacgataaaagaaaggaaatgctgaaaaggcaccctctgagcgttatgctcgatctcaagtgcaaagatgactccgtacttcacctaacattctactacctgatgaatctgaacatcatgaccgtcaaggcaaaagtcaccaccgccatggaactgatcacaccaatttctgcgggggatctactgtctccggattctgtgctttcctgtttgtacccaggagatcacggtaaaaagacacccaacccggctaatcagtaccagttcgataaggtggggattctgaccctatctgattacgttcttgaactcggtcatccctacctgtgggtgcagaaactggggggtttacacttccctaaagaacagccccagcagaccgtgattgcagaccactctcttagcgcatcccatatggagactacaatgaaactgctcaagactcgggttcaatcgcgcttagccctgcacaaacagttcgcaagcttggagcacggtatagttccagtgacatccgactgtcaatatctttttccggcaaaggtagtatcccgtttagtgaaatgggtaacggttgcccacgaagattacatggaattgcatttcacaaaggatatcgttgatgccggtctcgccggggacaccaatctgtactacatggctctgatcgagcgcggtaccgcaaaactgcaggccgccgtagtgctcaatcccggctatagcagcatccccccggtattccagctgtgtcttaattggaaaggggaaaagaccaatagcaatgacgataatatcagggctatggagggtgaagtgaacgtgtgctataaggagttgtgcggaccatggccaagccaccagctgctcaccaatcaactccaaaggttgtgcgtgctgcttgatgtttacctcgagactgaatctcacgatgacagcgtggaggggcctaaagagtttccccaagagaagatgtgtcttagactgttcagaggcccatccaggatgaagcccttcaagtacaatcacccccaaggattctttagtcaccgatag

SEQ ID NO: 19710 - DNA, 2052 bp, Artificial Sequence
  derived and/or modified sequence
atgtcctccgagtccagtaaaaagcgaaaacccaaagtgatccggtccgacggggctcccgctgaagggaagaggaatcggtccgacaccgagcaagagggaaaatattattccgaggaagcggaagtcgatttgcgcgacccgggaagggactatgagctgtataagtatacctgccaggagcttcaacggctgatggctgagatccaggatctaaaaagtagaggaggcaaagatgtggccattgagatcgaggagcgcagaatccagagctgcgtccatttcatgactcttaagaagctcaacaggttagcacatattagactgaaaaaaggcagggatcaaacccatgaagccaagcagaaggtagacgcttatcatttgcagctgcagaacctactttatgaagtcatgcatctccagaaggagattaccaagtgcctagaatttaagtccaaacacgaagaaatcgaccttgtgagcctagaggagttctataaagaggctcctccagatatttcaaaggcagaagtgactatgggagatccccaccagcagacgctagcccgtctggactgggagcttgagcaaaggaaacgcttggccgagaagtacagggagtgtctttccaacaaggagaagattctgaaagagatagaggtgaaaaaagagtatctcagctctttacagcccagactgaatagcattatgcaggcgtctctgccggtgcaggaatacctatttatgcctttcgaccaagcccataagcagtatgaaacagccaggcatctgccaccgcctttatatgtgctctttgtgcaagccacagcttacggccaggcttgtgataaaaccttgtcggttgccatcgaggggtctgtggacgaggcaaaagctctgttcaagccgcctgaggacagccaggatgatgaaagcgattctgacgctgaggaagaacagacaaccaagcggagaaggcctacactcggagtacagttagatgacaaaagaaaggagatgctgaagagacatccactctcagtcatgctggacttgaagtgtaaggacgactcagtattgcacctaacattctactacctcatgaatctgaatatcatgaccgtgaaagccaaggtgactaccgcaatggagctgattacacctatttccgccggagacctgttgtcacccgatagcgttctctcatgcctctatcccggagaccacggaaagaaaactccaaaccctgcgaaccagtatcaattcgacaaggtcgggattctaacgttatccgactatgtgctcgaattaggtcacccatacctgtgggtgcagaaactgggcggtctgcacttccctaaagagcaacctcagcagacggtgatcgccgaccattccctgtctgccagccatatggaaactaccatgaagctgctcaagacccgagtccaaagccgcctggcactgcataagcaatttgcctctttggaacacggaatcgtgcccgtcacaagcgattgccagtacttattccccgctaaggtcgtctccagactcgtgaagtgggtcaccgtggctcatgaagactatatggaactacacttcactaaagacatcgtggacgccggtttggcgggtgacacgaacttgtattatatggcactgattgagcgaggcacagcaaaattacaggccgcagttgtgctgaatcccggatattccagtattccaccagtcttccaattgtgtctgaactggaaaggcgagaaaacgaactctaacgatgataatattagagctatggaaggcgaggtgaatgtttgttataaagaactttgtggcccatggccgagtcaccaactgttaaccaaccagctgcagagattatgcgtgctcctcgacgtctacctcgaaacagagtctcatgatgactctgtggaaggccctaaggagttcccccaagagaagatgtgcctccggttgtttagggggcctagcagaatgaagccattcaagtacaaccacccccagggattcttttcacaccgatag

SEQ ID NO: 19711 - DNA, 2052 bp, Artificial Sequence
  derived and/or modified sequence
atgtctagcgagtcgagcaaaaaacggaaaccaaaagtgatccgcagcgatggggcacctgccgagggaaagagaaatcgctccgataccgaacaagaaggcaaatactattccgaagaggcagaagtggatctacgcgacccagggagagactatgagttgtacaagtatacttgccaggaacttcagcgcctcatggccgaaatccaggacctcaagagcagggggggaaaagacgtcgccattgagatagaggaacgtcggatccaaagttgtgtgcactttatgaccttgaaaaagcttaacaggctggcacacatccggctaaagaaggggagagaccaaacccatgaagcgaaacagaaagtggacgcctaccacttacaactgcaaaacctgctgtacgaagtgatgcaccttcagaaggagatcaccaagtgtctggagtttaaatcaaagcatgaggagattgacctcgtgagcctggaagagttctacaaggaggctccacccgacatctctaaagccgaagtgactatgggtgatccacaccaacagaccttggccaggctggattgggagctggagcagaggaaacgactcgcggaaaaatacagggaatgtctgagcaacaaggaaaagatcctgaaggaaatagaggtcaaaaaggagtatttatcttcccttcagccccgactgaacagcattatgcaggccagcttacccgttcaggaatacctttttatgccattcgaccaagctcacaagcaatacgagacggcccgacacctaccgccaccgctctatgtgcttttcgtgcaggccacggcctatggtcaggcttgcgataaaacgctaagcgtggctatcgaaggttccgttgacgaggctaaggctctctttaagccacctgaagactctcaagatgatgagagcgattctgatgccgaggaggaacagacaacaaagaggcgtcggccaactttgggggtgcagttagatgacaaacgaaaagagatgctgaagaggcacccactgagcgttatgctggatttgaagtgcaaggacgacagtgtactgcacctgactttttattacctgatgaatctcaacatcatgaccgttaaggcaaaggtaacaaccgccatggagttgatcactccaatttccgccggagatctgttatcccccgacagcgtgctcagctgtctatatcccggagaccacgggaaaaaaactcctaaccccgctaatcaataccagttcgacaaggtcggcatattaacactgtccgattacgtactagaactaggacatccatacctatgggtgcaaaagctggggggtctccacttcccgaaagagcagccacaacagaccgtgattgctgaccacagtttgtcagcttctcatatggagactacaatgaagcttctgaagacaagagttcagtctcgtctggcactgcacaagcagtttgcctcactcgaacatgggatcgtgcccgtgacatccgactgccaatatctgttccccgcaaaagtggtgtctcgccttgtgaaatgggtcaccgtggcccatgaggactacatggaactgcacttcacaaaagacattgtcgacgccggactcgccggagataccaatctgtattacatggccctgattgaacggggaactgccaaactacaggccgcagttgtgttgaacccaggctattcttcaatacctccagtttttcaactgtgcctgaattggaagggtgaaaaaacaaactctaacgacgataatatccgggctatggaaggagaggtaaatgtgtgctataaagagttgtgtggaccctggccctcccaccagctgttaactaatcagctgcagaggttatgtgtgttactggatgtgtacctcgaaacagagagtcacgatgattcagtggaaggccctaaggaatttccccaagaaaagatgtgtcttagactctttcggggacccagtagaatgaagcccttcaaatataaccacccgcagggcttcttttcacacaggtag

SEQ ID NO: 19712 - DNA, 2052 bp, Artificial Sequence
  derived and/or modified sequence
atgagctcggagtcgtcaaaaaagcggaaacctaaagtaattcgatcagacggcgctccggcagaggggaaaagaaaccggtcagacactgagcaagaaggcaagtactactctgaagaggccgaagtggatctgcgcgatcctggccgtgattatgaattgtataaatatacttgtcaggaactgcaaaggcttatggctgaaatccaggatttgaagagtcggggtggaaaggacgtcgcaatcgaaatcgaggagcgtagaatccagagttgtgtccatttcatgacactgaagaagctaaatagacttgctcatattcggcttaagaagggacgggaccaaacacacgaagctaagcagaaagtggacgcctaccacttgcaactccaaaacctgttgtacgaagtgatgcatctgcaaaaggagattacaaaatgcctcgaattcaagagtaagcacgaggagattgaccttgtgtctctggaagagttctacaaagaggcgcctccggatatctccaaggcggaggtcaccatgggggatccccatcagcagacacttgctcgtcttgattgggaacttgaacagaggaagcggctcgccgaaaagtaccgcgaatgccttagcaacaaagagaaaattcttaaggagatcgaagttaaaaaggaatacttgagttcactgcagcccagactgaatagcataatgcaagcatccctcccggtacaagagtatcttttcatgcccttcgaccaggcgcataagcaatacgaaaccgcacgccatctccctccgcctctgtacgttttattcgtccaggctacagcatatgggcaggcctgcgataaaaccctctccgtcgcaattgaaggaagcgttgacgaagcaaaggccttatttaagcctcccgaggatagccaggatgatgagtctgattccgacgctgaggaggagcagaccactaagcgcaggaggccaaccctgggcgtccagctggacgacaaacgtaaggaaatgctgaagcgccacccgctgagtgttatgctggatctgaagtgcaaagacgactcagtattgcacctgaccttttattacctgatgaacttaaatattatgactgttaaagccaaggtgacaacagccatggaactgatcacccctatttctgccggagaccttctaagccctgactctgtcctcagttgcctgtaccctggagaccacgggaagaagactcctaatcctgctaatcagtatcagtttgacaaggtcggtatcctgactctgagtgactacgtcctggagctgggacatccatatctctgggtgcagaagctcgggggactacattttccaaaggagcagcctcaacaaacagtgatagctgatcactccctgtctgcctcccacatggagaccacaatgaagctcctcaagactcgtgttcagtcaaggttggctctccataagcaatttgcgtccctggaacacggcatcgtgcccgtgacaagcgattgtcagtacctgtttcctgcgaaagtggtcagccggcttgtcaagtgggtgacagtggcccacgaggattacatggaattgcatttcacgaaggacatagtggatgcaggacttgcaggtgacacgaacctgtactacatggcactaatagagaggggcacagctaagttgcaggctgcggtagtgctgaatccgggatatagctctattcctccggtctttcaattatgcctgaactggaagggtgagaagactaattctaacgatgacaatatccgtgcaatggaaggcgaagtaaacgtgtgctacaaagagttatgtgggccatggccatcccatcaacttctgactaatcagctgcagcgattgtgcgtgctcctggatgtttacctggagacggagagtcacgacgactctgtcgaggggccaaaagagttcccgcaagagaaaatgtgtctgaggttgttcagagggccatcacgcatgaagcccttcaaatacaaccacccccagggctttttttcccaccggtag

SEQ ID NO: 19713 - DNA, 282 bp, Artificial Sequence
  derived and/or modified sequence
atgtcaagtgagtctagtaagaagagaaagccaaaggtaatccgatccgacggagcgcctgccgagggcaaaagaaaccgcagcgacacagaacaggagggaaagtactactcagaggaggcagaagtcgacctccgcgaccccggacgggactatgaactgtataagtacacctgccaggaactgcagcggctgatggcggagatccaagatctaaaaagtcgcggtggcaaggacgttgccatcgaaatcgaggagaggcgcatccagagttgtgtgtag

SEQ ID NO: 19714 - DNA, 486 bp, Artificial Sequence
  derived and/or modified sequence
atgagcagcgaatccagtaagaaacgtaagcctaaagtgattcgcagcgatggagcccctgccgagggaaagaggaatcggagtgacacagagcaggaaggaaaatattactcagaagaagcagaagtcgacctccgggatcccggtagagattacgaattatacaaatacacatgccaggaattgcagaggctgatggccgagattcaggacttgaaatcccgcggagggaaagatgtggctatcgaaattgaagaaagacgaatccagtcttgcgtgcacttcatgaccctgaaaaaactgaatcggctcgcacatatcagattgaagaagggacgggaccagacccatgaggctaagcagaaggttgatgcctatcaccttcagctgcagaacctactctacgaagtgatgcacttacagaaggagataactaaatgtttggaattcaagagtaagcatgaggagatcgatctcgtgagctag

SEQ ID NO: 19715 - DNA, 672 bp, Artificial Sequence
  derived and/or modified sequence
atgagctccgagtcttccaagaagagaaagccgaaggtgattagaagcgacggagctcccgctgagggaaagagaaaccggtctgatacagagcaagaagggaagtactactcggaagaggctgaagtcgatttgagagaccctggcagggactacgagctgtataagtatacatgccaggagctccaaagattgatggcagagatccaggatttgaaaagccgcggagggaaggacgtcgccatagaaattgaagaaaggcggatccagtcatgcgtgcatttcatgaccctaaaaaaattgaaccggctagcacacattcggctgaaaaaaggtagagatcaaacccacgaagccaaacagaaggtcgacgcataccaccttcagctgcagaacctgctatatgaggtgatgcacctacaaaaagaaattacaaaatgcctcgagtttaaaagtaagcacgaagaaattgatctggtgtctttggaggagttctacaaggaagccccacctgatatcagcaaggccgaggtgactatgggagacccccatcagcagacgctcgctaggctcgattgggagctcgagcagaggaaacggctcgccgagaagtacagggagtgcctgtctaataaagagaaaatcctcaaggagatcgaagttaagaaatag

SEQ ID NO: 19716 - DNA, 2052 bp, Artificial Sequence
  derived and/or modified sequence
atgagcagtgagagttccaaaaagagaaagccaaaagtgatccgatccgatggtgcacccgctgaagggaagcgcaaccggagtgatactgagcaggaaggcaaatactacagtgaagaagctgaggtggatctcagagacccagggcgagactatgagttatacaaatatacatgtcaagagctgcaacgattgatggccgagattcaagatctgaaatcgcggggaggaaaagatgtcgctatcgaaatcgaggaacgacggatacagtcctgcgtgcacttcatgacactcaagaaactgaatagactcgcgcacattaggcttaaaaaaggcagagatcagacacacgaggctaaacagaaggtagatgcatatcatttgcagctccagaatctgctgtatgaggtcatgcacctgcaaaaggagatcaccaagtgccttgaattcaagagcaagcatgaggaaattgatcttgtgtcgctggaggaattctacaaagaggcgccacccgacatctccaaggctgaagtaaccatgggagacccacaccaacagactctggccagattggactgggagctcgaacagcgcaagcgcctggctgagaaataccgagaatgcctgtcaaacaaagagaaaatcctgaaggagattgaggtgaagaaagaatacctgagcagtctgcagcctcggcttaatagcattatgcaggcctccttgcccgtgcaggagtacctgttcatgccattcgaccaggcccacaaacagtatgagaccgcaagacacctgcctccacccctatacgtgttgtttgtgcaggctactgcttacggccaagcctgcgacaaaactctgtctgtggccattgaaggaagtgtggatgaggccaaagctctcttcaagcctccagaggactctcaagatgatgagagtgatagtgacgcggaggaggaacagaccactaagcgacgcagacctactctcggggtgcagctggatgataagcggaaggaaatgctgaaaaggcaccccctaagcgtgatgctcgacttgaagtgcaaagacgactctgttctgcacctgaccttttattatctgatgaatctgaacatcatgactgtgaaggccaaggtgactacagcgatggagttaatcactccaatatctgctggagatctcctgtcgccggacagcgttctgtcttgtctgtatcctggtgatcatgggaagaagaccccaaatcccgctaaccagtaccagtttgataaggtgggaatactgacgctgtctgattacgtcctggagctggggcacccttacttatgggtgcagaagctcggcggactgcacttcccgaaggagcaaccccagcagactgtcatcgcggaccactctctgtcagcttctcatatggagaccaccatgaaactgttaaagactagggttcaaagcagactggctttgcacaagcagttcgcatctttagaacatggtattgttcccgtgacttcagactgtcagtatctctttccagctaaagtcgtttcccggctggtgaaatgggttaccgtcgcccatgaggattacatggagctacactttactaaggatatcgtcgacgcaggccttgccggagacactaatctctactacatggcccttatcgagcgaggtacagcgaagctgcaagccgctgtagtgctgaatcctggctacagttctattccacccgttttccaactctgtcttaactggaaaggcgagaagactaactcgaatgacgacaatatccgcgctatggagggggaggtgaacgtgtgctacaaggagctgtgcgggccttggccatctcaccagctactgactaaccaactccagaggctgtgtgttctcctggatgtatatctggagacggagagccatgatgatagcgtggaagggccaaaggagttcccacaggaaaagatgtgtttaaggctgtttcgcggaccttctcgcatgaagccgttcaagtacaatcaccctcagggctttttctcgcacaggtag

SEQ ID NO: 19717 - DNA, 2560 bp, Artificial Sequence
  derived and/or modified sequence
gggcagtggggctgggagatggggcggggctgggcgctccgggactgaggtgctgatcgcccaaagggcgcccctgggctggggtctgacccggcttctcctccctcactacccgcggtccccggcctctcggcgctgcgctgttacctcatccgaaaagtgttcgctgcagcatcctcaggcttcacgttggagcctcttgattgtggaggaacaaccatgtcatcagaatcgagcaaaaaacggaagcccaaagtgatccgaagcgatggagccccagctgaaggaaagcggaatcgatctgacaccgagcaggaaggtaaatactacagtgaggaggccgaggtggatctgcgggaccctggcagagactatgagttatacaagtacacctgccaggagctacagaggctgatggctgagatccaagacctgaagagcaggggtggcaaggatgtggcaatagaaatagaagaacggaggatccagagctgtgtgcatttcatgactctaaagaagcttaaccgattagcccacatcaggttgaagaaaggaagagatcagacccacgaggctaagcagaaagtagatgcctatcatctgcagctccagaacctgttgtatgaggtgatgcacctacagaaggagatcaccaaatgtttggagtttaagtcaaagcatgaagaaattgatctggtcagtttagaggagttttataaggaggctccaccagatatcagcaaggccgaagtcaccatgggagaccctcaccagcaaacactggcacgtctggactgggagctggagcagcggaaaaggctggcagagaagtaccgagagtgcctatctaacaaggagaagattctcaaggagattgaggtgaagaaggagtacctgagcagcctccagccccgcctcaacagcatcatgcaggcttcccttccggtgcaggagtacctgtttatgccattcgaccaggctcacaagcagtatgagacagccagacacctgccgcctcccctctatgtcctctttgttcaggccactgcgtatgggcaggcctgtgataagacgttatctgtggcaatcgaaggcagtgtggatgaagccaaggctctgttcaaacctccagaggactcccaagatgacgagagtgactcagatgccgaggaggagcagactacgaagcgccggagacccacactgggggttcagttggacgacaaacgcaaggagatgctgaagaggcacccactgtctgtcatgctcgacctgaagtgcaaagatgacagtgtgcttcacctgactttctactacctcatgaacctcaacatcatgacagtaaaagccaaagtgacaactgccatggagctgatcacccccatcagtgcaggtgacttgctgtctcctgactcagtcctgagttgcttgtatcctggggatcatggaaagaaaactccgaatccagccaatcagtatcagtttgataaagttggcatcctgactttgagcgactatgtacttgagctaggtcacccctatttgtgggtgcagaagctgggtggcctccacttccccaaagagcagccccagcaaacagtgattgctgaccactcgctgagcgccagccacatggagaccaccatgaaacttctgaagaccagggtgcagtcccgcctggccctccacaaacagtttgcatccctagaacatggcattgtgccagttaccagtgattgccagtacctcttccctgccaaggttgtctctcgcctggtgaaatgggtgacagttgcccatgaggattacatggagctgcacttcaccaaagacattgtggatgcgggactggctggggacaccaatctctactacatggcgctcatcgaaaggggcacagccaaactgcaggccgctgtggtgttgaaccctggctactcctccatcccacctgttttccagctctgtttgaactggaaaggggagaaaaccaacagcaacgatgacaacattcgggccatggagggcgaagtcaatgtgtgctacaaggagctgtgtggcccttggcccagccaccagctgttgaccaaccagctgcagcggctgtgtgtgctgctggatgtttacctggagaccgagagccatgacgacagtgtggaggggcccaaggaatttccccaggagaagatgtgtctgcggctcttcaggggtcctagcaggatgaagccatttaaatacaaccatcctcagggattcttcagccatcgctgatctcccgcgcagaccgttgtttcccccaaggcctcaccctgagcactgggcttctgctttctgctctggcccacatgtgactcttgatattctccaaagacaccagccaattaaaaagcgtcacctgaccagtggcctttgtctgtggttcctggcaaggtggctttgcagtctggaagggcaggtgggagctgtgacacagtgtgaaaaagcatttgtagagagactttttctcagcagccaataaaagcagagtggaaaaagattccaattctgcagagagatgctc

SEQ ID NO: 19718 - DNA, 2676 bp, Artificial Sequence
  derived and/or modified sequence
gggcagtggggctgggagatggggcggggctgggcgctccgggactgaggtgctgatcgcccaaagggcgcccctgggctggggtctgacccggcttctcctccctcactacccgcggtccccggcctctcggcgctgcgctgttacctcatccgaaaagtgttcgctgcagcatcctcaggcttcacgttggagcctcttgattgtggtgttcagcattatttaagatcacctatgcatcatctgaagccacagtcccaggtcatcttcatcaccttccccagtggaatgcctcctgtgttaaagcccacaacaacccctgtggaggaacaaccatgtcatcagaatcgagcaaaaaacggaagcccaaagtgatccgaagcgatggagccccagctgaaggaaagcggaatcgatctgacaccgagcaggaaggtaaatactacagtgaggaggccgaggtggatctgcgggaccctggcagagactatgagttatacaagtacacctgccaggagctacagaggctgatggctgagatccaagacctgaagagcaggggtggcaaggatgtggcaatagaaatagaagaacggaggatccagagctgtgtgcatttcatgactctaaagaagcttaaccgattagcccacatcaggttgaagaaaggaagagatcagacccacgaggctaagcagaaagtagatgcctatcatctgcagctccagaacctgttgtatgaggtgatgcacctacagaaggagatcaccaaatgtttggagtttaagtcaaagcatgaagaaattgatctggtcagtttagaggagttttataaggaggctccaccagatatcagcaaggccgaagtcaccatgggagaccctcaccagcaaacactggcacgtctggactgggagctggagcagcggaaaaggctggcagagaagtaccgagagtgcctatctaacaaggagaagattctcaaggagattgaggtgaagaaggagtacctgagcagcctccagccccgcctcaacagcatcatgcaggcttcccttccggtgcaggagtacctgtttatgccattcgaccaggctcacaagcagtatgagacagccagacacctgccgcctcccctctatgtcctctttgttcaggccactgcgtatgggcaggcctgtgataagacgttatctgtggcaatcgaaggcagtgtggatgaagccaaggctctgttcaaacctccagaggactcccaagatgacgagagtgactcagatgccgaggaggagcagactacgaagcgccggagacccacactgggggttcagttggacgacaaacgcaaggagatgctgaagaggcacccactgtctgtcatgctcgacctgaagtgcaaagatgacagtgtgcttcacctgactttctactacctcatgaacctcaacatcatgacagtaaaagccaaagtgacaactgccatggagctgatcacccccatcagtgcaggtgacttgctgtctcctgactcagtcctgagttgcttgtatcctggggatcatggaaagaaaactccgaatccagccaatcagtatcagtttgataaagttggcatcctgactttgagcgactatgtacttgagctaggtcacccctatttgtgggtgcagaagctgggtggcctccacttccccaaagagcagccccagcaaacagtgattgctgaccactcgctgagcgccagccacatggagaccaccatgaaacttctgaagaccagggtgcagtcccgcctggccctccacaaacagtttgcatccctagaacatggcattgtgccagttaccagtgattgccagtacctcttccctgccaaggttgtctctcgcctggtgaaatgggtgacagttgcccatgaggattacatggagctgcacttcaccaaagacattgtggatgcgggactggctggggacaccaatctctactacatggcgctcatcgaaaggggcacagccaaactgcaggccgctgtggtgttgaaccctggctactcctccatcccacctgttttccagctctgtttgaactggaaaggggagaaaaccaacagcaacgatgacaacattcgggccatggagggcgaagtcaatgtgtgctacaaggagctgtgtggcccttggcccagccaccagctgttgaccaaccagctgcagcggctgtgtgtgctgctggatgtttacctggagaccgagagccatgacgacagtgtggaggggcccaaggaatttccccaggagaagatgtgtctgcggctcttcaggggtcctagcaggatgaagccatttaaatacaaccatcctcagggattcttcagccatcgctgatctcccgcgcagaccgttgtttcccccaaggcctcaccctgagcactgggcttctgctttctgctctggcccacatgtgactcttgatattctccaaagacaccagccaattaaaaagcgtcacctgaccagtggcctttgtctgtggttcctggcaaggtggctttgcagtctggaagggcaggtgggagctgtgacacagtgtgaaaaagcatttgtagagagactttttctcagcagccaataaaagcagagtggaaaaagattccaattctgcagagagatgctc

SEQ ID NO: 19719 - DNA, 2374 bp, Artificial Sequence
  derived and/or modified sequence
cccttccttacttccggttctctatggtgcgcgggcaagctttgctccgcctccggcagtggcttactcccggtgccaggttcttggagctgtgaggtgttcagcattatttaagatcacctatgcatcatctgaagccacagtcccaggtcatcttcatcaccttccccagtggaatgcctcctgtgttaaagcccacaacaacccctgtggaggaacaaccatgtcatcagaatcgagcaaaaaacggaagcccaaagtgatccgaagcgatggagccccagctgaaggaaagcggaatcgatctgacaccgagcaggaaggtaaatactacagtgaggaggccgaggtggatctgcgggaccctggcagagactatgagttatacaagtacacctgccaggagctacagaggctgatggctgagatccaagacctgaagagcaggggtggcaaggatgtggcaatagaaatagaagaacggaggatccagagctgtgtgcatttcatgactctaaagaagcttaaccgattagcccacatcaggttgaagaaaggaagagatcagacccacgaggctaagcagaaagtagatgcctatcatctgcagctccagaacctgttgtatgaggtgatgcacctacagaaggagatcaccaaatgtttggagtttaagtcaaagcatgaagaaattgatctggtcagtttagaggagttttataaggaggctccaccagatatcagcaaggccgaagtcaccatgggagaccctcaccagcaaacactggcacgtctggactgggagctggagcagcggaaaaggctggcagagaagtaccgagagtgcctatctaacaaggagaagattctcaaggagattgaggtgaagaaggagtacctgagcagcctccagccccgcctcaacagcatcatgcaggcttcccttccggtgcaggagtacctgtttatgccattcgaccaggctcacaagcagtatgagacagccagacacctgccgcctcccctctatgtcctctttgttcaggccactgcgtatgggcaggcctgtgataagacgttatctgtggcaatcgaaggcagtgtggatgaagccaaggctctgttcaaacctccagaggactcccaagatgacgagagtgactcagatgccgaggaggagcagactacgaagcgccggagacccacactgggggttcagttggacgacaaacgcaaggagatgctgaagaggcacccactgtctgtcatgctcgacctgaagtgcaaagatgacagtgtgcttcacctgactttctactacctcatgaacctcaacatcatgacagtaaaagccaaagtgacaactgccatggagctgatcacccccatcagtgcaggtgacttgctgtctcctgactcagtcctgagttgcttgtatcctggggatcatggaaagaaaactccgaatccagccaatcagtatcagtttgataaagttggcatcctgactttgagcgactatgtacttgagctaggtcacccctatttgtgggtgcagaagctgggtggcctccacttccccaaagagcagccccagcaaacagtgattgctgaccactcgctgagcgccagccacatggagaccaccatgaaacttctgaagaccagggtgcagtcccgcctggccctccacaaacagtttgcatccctagaacatggcattgtgccagttaccagtgattgccagtacctcttccctgccaaggttgtctctcgcctggtgaaatgggtgacagttgcccatgaggattacatggagctgcacttcaccaaagacattgtggatgcgggactggctggggacaccaatctctactacatggcgctcatcgaaaggggcacagccaaactgcaggccgctgtggtgttgaaccctggctactcctccatcccacctgttttccagctctgtttgaactggaaaggggagaaaaccaacagcaacgatgacaacattcgggccatggagggcgaagtcaatgtgtgctacaaggagctgtgtggcccttggcccagccaccagctgttgaccaaccagctgcagcggctgtgtgtgctgctggatgtttacctggagaccgagagccatgacgacagtgtggaggggcccaaggaatttccccaggagaagatgtgtctgcggctcttcaggggtcctagcaggatgaagccatttaaatacaaccatcctcagggattcttcagccatcgctgatctcccgcgcagaccgttgtttcccccaaggcctcaccctgagcactgggcttctgctttctgctctggcccacatgtgactcttgatattctccaaag

SEQ ID NO: 19720 - DNA, 738 bp, Artificial Sequence
  derived and/or modified sequence
aacagagatgacaaaagaccacttgaagagaggttcctaatactagacagatggagagtggcttggctgtttccccctgcatattggggttgaaaacttaaatgtgtagttccagtccttctatgcagagtctctcctgccctccctccttcctgcagtctcaccacgccaccacctccctcgggggcctccgcgctgagcttccggcctctacgcctcgcttccggtcggccgccccttccttacttccggttctctatggtgcgcgggcaagctttgctccgcctccggcagtggcttactcccggtgccaggttcttggagctgtgaggtgttcagcattatttaagatcacctatgcatcatctgaagccacagtcccaggtcatcttcatcaccttccccagtggaatgcctcctgtgttaaagcccacaacaacccctgtggaggaacaaccatgtcatcagaatcgagcaaaaaacggaagcccaaagtgatccgaagcgatggagccccagctgaaggaaagcggaatcgatctgacaccgagcaggaaggtaaatactacagtgaggaggccgaggtggatctgcgggaccctggcagagactatgagttatacaagtacacctgccaggagctacagaggctgatggctgagatccaagacctgaagagcaggggtggcaaggatgtggcaatagaaatagaagaacggaggatccagagctgtgtgc

SEQ ID NO: 19721 - DNA, 729 bp, Artificial Sequence
  derived and/or modified sequence
gagctgtgaggtgaggaggggacaagggcagtggggctgggagatggggcggggctgggcgctccgggactgaggtgctgatcgcccaaagggcgcccctgggctggggtctgacccggcttctcctccctcactacccgcggtccccggcctctcggcgctgcgctgttacctcatccgaaaagtgttcgctgcagcatcctcaggcttcacgttggagcctcttgattgtggaggaacaaccatgtcatcagaatcgagcaaaaaacggaagcccaaagtgatccgaagcgatggagccccagctgaaggaaagcggaatcgatctgacaccgagcaggaaggtaaatactacagtgaggaggccgaggtggatctgcgggaccctggcagagactatgagttatacaagtacacctgccaggagctacagaggctgatggctgagatccaagacctgaagagcaggggtggcaaggatgtggcaatagaaatagaagaacggaggatccagagctgtgtgcatttcatgactctaaagaagcttaaccgattagcccacatcaggttgaagaaaggaagagatcagacccacgaggctaagcagaaagtagatgcctatcatctgcagctccagaacctgttgtatgaggtgatgcacctacagaaggagatcaccaaatgtttggagtttaagtcaaagcatgaagaaattgatctggtcagttt

SEQ ID NO: 19722 - DNA, 1006 bp, Artificial Sequence
  derived and/or modified sequence
gggcagtggggctgggagatggggcggggctgggcgctccgggactgaggtgctgatcgcccaaagggcgcccctgggctggggtctgacccggcttctcctccctcactacccgcggtccccggcctctcggcgctgcgctgttacctcatccgaaaagtgttcgctgcagcatcctcaggcttcacgttggagcctcttgattgtggtgttcagcattatttaagatcacctatgcatcatctgaagccacagtcccaggtcatcttcatcaccttccccagtggaatgcctcctgtgttaaagcccacaacaacccctgtggaggaacaaccatgtcatcagaatcgagcaaaaaacggaagcccaaagtgatccgaagcgatggagccccagctgaaggaaagcggaatcgatctgacaccgagcaggaaggtaaatactacagtgaggaggccgaggtggatctgcgggaccctggcagagactatgagttatacaagtacacctgccaggagctacagaggctgatggctgagatccaagacctgaagagcaggggtggcaaggatgtggcaatagaaatagaagaacggaggatccagagctgtgtgcatttcatgactctaaagaagcttaaccgattagcccacatcaggttgaagaaaggaagagatcagacccacgaggctaagcagaaagtagatgcctatcatctgcagctccagaacctgttgtatgaggtgatgcacctacagaaggagatcaccaaatgtttggagtttaagtcaaagcatgaagaaattgatctggtcagtttagaggagttttataaggaggctccaccagatatcagcaaggccgaagtcaccatgggagaccctcaccagcaaacactggcacgtctggactgggagctggagcagcggaaaaggctggcagagaagtaccgagagtgcctatctaacaaggagaagattctcaaggagattgaggtgaagaagga

SEQ ID NO: 19723 - DNA, 4753 bp, Artificial Sequence
  derived and/or modified sequence
gcttccggtcggccgccccttccttacttccggttctctatggtgcgcgggcaagctttgctccgcctccggcagtggcttactcccggtgccaggttcttggagctgtgaggaggaacaaccatgtcatcagaatcgagcaaaaaacggaagcccaaagtgatccgaagcgatggagccccagctgaaggaaagcggaatcgatctgacaccgagcaggaaggtaaatactacagtgaggaggccgaggtggatctgcgggaccctggcagagactatgagttatacaagtacacctgccaggagctacagaggctgatggctgagatccaagacctgaagagcaggggtggcaaggatgtggcaatagaaatagaagaacggaggatccagagctgtgtgcatttcatgactctaaagaagcttaaccgattagcccacatcaggttgaagaaaggaagagatcagacccacgaggctaagcagaaagtagatgcctatcatctgcagctccagaacctgttgtatgaggtgatgcacctacagaaggagatcaccaaatgtttggagtttaagtcaaagcatgaagaaattgatctggtcagtttagaggagttttataaggaggctccaccagatatcagcaaggccgaagtcaccatgggagaccctcaccagcaaacactggcacgtctggactgggagctggagcagcggaaaaggctggcagagaagtaccgagagtgcctatctaacaaggagaagattctcaaggagattgaggtgaagaaggagtacctgagcagcctccagccccgcctcaacagcatcatgcaggcttcccttccggtgcaggagtacctgtttatgccattcgaccaggctcacaagcagtatgagacagccagacacctgccgcctcccctctatgtcctctttgttcaggccactgcgtatgggcaggcctgtgataagacgttatctgtggcaatcgaaggcagtgtggatgaagccaaggctctgttcaaacctccagaggactcccaagatgacgagagtgactcagatgccgaggaggagcagactacgaagcgccggagacccacactgggggttcagttggacgacaaacgcaaggagatgctgaagaggcacccactgtctgtcatgctcgacctgaagtgcaaagatgacagtgtgcttcacctgactttctactacctcatgaacctcaacatcatgacagtaaaagccaaagtgacaactgccatggagctgatcacccccatcagtgcaggtgacttgctgtctcctgactcagtcctgagttgcttgtatcctggggatcatggaaagaaaactccgaatccagccaatcagtatcagtttgataaagttggcatcctgactttgagcgactatgtacttgagctaggtcacccctatttgtgggtgcagaagctgggtggcctccacttccccaaagagcagccccagcaaacagtgattgctgaccactcgctgagcgccagccacatggagaccaccatgaaacttctgaagaccagggtgcagtcccgcctggccctccacaaacagtttgcatccctagaacatggcattgtgccagttaccagtgattgccagtacctcttccctgccaaggttgtctctcgcctggtgaaatgggtgacagttgcccatgaggattacatggagctgcacttcaccaaagacattgtggatgcgggactggctggggacaccaatctctactacatggcgctcatcgaaaggggcacagccaaactgcaggccgctgtggtgttgaaccctggctactcctccatcccacctgttttccagctctgtttgaactggaaaggggagaaaaccaacagcaacgatgacaacattcgggccatggagggcgaagtcaatgtgtgctacaaggagctgtgtggcccttggcccagccaccagctgttgaccaaccagctgcagcggctgtgtgtgctgctggatgtttacctggagaccgagagccatgacgacagtgtggaggggcccaaggaatttccccaggagaagatgtgtctgcggctcttcaggggtcctagcaggatgaagccatttaaatacaaccatcctcagggattcttcagccatcgctgatctcccgcgcagaccgttgtttcccccaaggcctcaccctgagcactgggcttctgctttctgctctggcccacatgtgactcttgatattctccaaagacaccagccaattaaaaagcgtcacctgaccagtggcctttgtctgtggttcctggcaaggtggctttgcagtctggaagggcaggtgggagctgtgacacagtgtgaaaaagcatttgtagagagactttttctcagcagccaataaaagcagagtggaaaaagattccaattctgcagagagatgctcacctcttgtctacgcacaccctatttgtgctttgcggggtgaggtcctcatgatcttgtatttattatcccaagttcctgctgttaagaggtggtaggagaagccaaaggcagcagagcacaaaaagcaaaactcttccctccccacccgctcttcccattagtcctgtcagggttgccgatggacaaattgtctctgatcgttggatgttataaatgtctgacagtgcagtgcaaacagaagacaaactcagttgatccttgaacaactcaggggttaggggcaccaacaccccctgccctgcacagttgaaaaatccgtgtataacttttgactccctaaaaacttaactaatagcctgctgttgaccagtagtatgctattagtagttacttactgctaacatagtcagtacatattttcagtatatattttgtatcttatacactgtattcttacaatacagtaaactagagaaaagaaaatgttataaggaaagtcacaagggggcctgagtgcagtggctcacgtctgtaatcccagcactttgggaggccaaggcgggtggatcacttgaggtcaggagtttgagaccagcctggccgacatggtgaaaccctgtctctactaaaaacatggaaattagccaagcgtggtggcgcatgcctgtagtcccagttactcaggaggctgaggcagaattacttgaacccatgaggcagaggttgcagtaagccaagatcacgctcctgcgctccggcttgggcgagagtgagactccgtctcaaaaataaataaataagaaagccataaggaagaaaatatatatctactattaagtagaagtggatcaccataaaggtcttcacatactgtctcagggttgaatagtctaaggaagaggaggggttggtcttggtgtctcagggatggcagaggcagaaaaagtgggggaggtggagggggaggcaggcaccactgttatttttattgaacaaaatctgtgcagggactcatgactgtaatcctagtactttggaaagctaaggcgggaggatcccttgaggccaggagttcaggtccagcctgggcaacgtagtgagagaccctgtatctacaaaaaatttaaaaatcagccaggtgtggtggtatgcaccaatagtcccagttactcagaaggctgaggtgggcggatgactggagtccaggagttcaaggtagcagtgagctattcatcgtgcctgtactgtactccagcctgggaaacaatgcgagtccctatctctaaaaaattttaaaaaaagaaatctgcatataatagacccacagagtccaaactattgttcagagatcaactgtacttcacagagagtaattctaagtcttacaggatttcatggagatggcgagagtggtgttggagaatcaatcacatacagagatacaggacagtgagaccaggtaacatttgaggagaatattttttttttattgagacagggtcttgctctgttgtccaggctggagtgcagtggcacgaacacagctcactgccgcctcaacctctcctgggttcaagtgatcctcctgcctcagcctcccaagtagctgggaccacaggtgtgtgccaccatttctggctaatttttaaattttttgtagaggcgggatcccactatttttcccaggctggtctcaaactcctgggctcaaatgatcctcccacctcggcctcccaaagtgctaggattataggcatgagccaccacacccggcctgagtagagtctttaaggtaatgacaaaagtgcctcaaaatataattatttgattaagagaagtcttgggaagataggtaacaacctttaaaatgttcataaaattacatcctttgtaatactcctgcaagtcaaagtaaaggatggcatagactattcttggacagttttgtcaaaaagtgtatcttgaccccaccatcagtactccattcttcattttaaaaaataagatgggctgggcacagtggcttacgcctttaatatcagtactttgggaggctggtgggcggatcacctgagatcaggagttcaagaccagcctggccaacatggtgaaaccccgtctctactaaaaatacaaaaattagctgggcatggtggtgcgcgcctgtaatcccagccactcgggaggctgaggcaggagaattgcttgaatccccgaggcggaggttgcactgagccgagatggtgccactgcaccatctggacaacagagcaagactccgtcttgg

SEQ ID NO: 19724 - DNA, 1133 bp, Artificial Sequence
  derived and/or modified sequence
gcggcaggaggcgggtgggtcaaggtaactctgggctacagagtccttgctgggggttcggggagcgcttggaccccggcttctgggacgcgtcaggagaagggagcactggctttgctttcatcaggccaaagatgcctttctttgggaatacgttcagtccgaagaagacacctcctcggaagtcggcatctctctccaacctgcattctttggatcgatcaacccgggaggtggagctgggcttggaatacggatccccgactatgaacctggcagggcaaagcctgaagtttgaaaatggccagtggatagcagagacaggggttagtggcggtgtggaccggagggaggttcagcgccttcgcaggcggaaccagcagttggaggaagagaacaatctcttgcggctgaaagtggacatcttattagacatgctttcagagtccactgctgaatcccacttaatggagaaggaactggatgaactgaggatcagccggaagagaaaatgaagaccccagagacatttattggggagtaggatgtggctgagtgctttttttttggccagactagcggattcagtcctggaagagagtatcatataatgagacccacaggcactggcacccttgggttggcaatagaaggtgacatggaatggagaaaaccaagattccagatggggatagtaactagaaggtgcttcagatgcactgcctgcgggtgccagtctgaaaaccagaccgcacagaggcctggggctgctgatgagctttttggtgctctccacacacaagctcgcaaacacacatgtcccagaatagctctgttgggttgtgttgggagaagcggctggagttcattctctcacccccttatgttggtgtttggcgtgtgacagcagttctacagagctctgtgttggggtcatggatgagcggctctcttggctcttaaaggcaggcctctctcttcttgcctttaaagaatcctccttcctcacacctggcctcctctggcttcagcttctcagcagcaagcaccagccttccacaacaacactatatttttatgctactttcctgtttgcactactacttttttattaaacgatgttaaataatctc

SEQ ID NO: 19725 - DNA, 1269 bp, Artificial Sequence
  derived and/or modified sequence
gcaggcggcaggaggcgggtgggtcaaggtaactctgggctacagagtccttgctgggggttcggggagcgcttggaccccggcttctgggacgcgtcagaatattatccagcaatgcaaatgaacaaactataactacacacagctgcatggataaatgtcagaaacatgacgttgagtgtgagaagccagatgcaaacgaggactcactgtgcaattctgtgcatgtacagtggccaggagaagggagcactggctttgctttcatcaggccaaagatgcctttctttgggaatacgttcagtccgaagaagacacctcctcggaagtcggcatctctctccaacctgcattctttggatcgatcaacccgggaggtggagctgggcttggaatacggatccccgactatgaacctggcagggcaaagcctgaagtttgaaaatggccagtggatagcagagacaggggttagtggcggtgtggaccggagggaggttcagcgccttcgcaggcggaaccagcagttggaggaagagaacaatctcttgcggctgaaagtggacatcttattagacatgctttcagagtccactgctgaatcccacttaatggagaaggaactggatgaactgaggatcagccggaagagaaaatgaagaccccagagacatttattggggagtaggatgtggctgagtgctttttttttggccagactagcggattcagtcctggaagagagtatcatataatgagacccacaggcactggcacccttgggttggcaatagaaggtgacatggaatggagaaaaccaagattccagatggggatagtaactagaaggtgcttcagatgcactgcctgcgggtgccagtctgaaaaccagaccgcacagaggcctggggctgctgatgagctttttggtgctctccacacacaagctcgcaaacacacatgtcccagaatagctctgttgggttgtgttgggagaagcggctggagttcattctctcacccccttatgttggtgtttggcgtgtgacagcagttctacagagctctgtgttggggtcatggatgagcggctctcttggctcttaaaggcaggcctctctcttcttgcctttaaagaatcctccttcctcacacctggcctcctctggcttcagcttctcagcagcaagcaccagccttccacaacaacactatatttttatgctactttcctgtttgcactactacttttttattaaacgatgttaa

SEQ ID NO: 19726 - DNA, 615 bp, Artificial Sequence
  derived and/or modified sequence
gcgcgtggcgggcaggcggcaggaggcgggtgggtcaaggtaactctgggctacagagtccttgctgggggttcggggagcgcttggaccccggcttctgggacgcgtcaggtcgccgtgaagatgattgcatgagatcgtgcgtgtgaacgtttgttgacagctgttacttgagtccgacagccctgggggccgtgcatctgcgtaacatggctacctctgaactccttgggggacacgtatatctttgagaatccgatgaaaaccagagattccgcccttgttttcttagaattaaaattaccacagactgggtaatttataaagaaaagaagtttatttggctcacagttctggagactgggaagtccaagagcatggtgcaagtatctggagaagggagcactggctttgctttcatcaggccaaagatgcctttctttgggaatacgttcagtccgaagaagacacctcctcggaagtcggcatctctctccaacctgcattctttggatcgatcaacccgggaggtggagctgggcttggaatacggatccccgactatgaacctggcagggcaaagcctgaagtttgaaaatggccagtggatagcag

SEQ ID NO: 19727 - DNA, 744 bp, Artificial Sequence
  derived and/or modified sequence
aaggtaactctgggctacagagtccttgctgggggttcggggagcgcttggaccccggcttctgggacgcgtcaggtcgccgtgaagatgattgcatgagatcgtgcgtgtgaacgtttgttgacagctgttacttgagtccgacagccctgggggccgtgcatctgcgtaacatggctacctctgaactccttgggggacacgtatatctttgagaatccgatgaaaaccagagattccgcccttgttttcttagaattaaaaatattatccagcaatgcaaatgaacaaactataactacacacagctgcatggataaatgtcagaaacatgacgttgagtgtgagaagccagatgcaaacgaggactcactgtgcaattctgtgcatgtacagtggccaggagaagggagcactggctttgctttcatcaggccaaagatgcctttctttgggaatacgttcagtccgaagaagacacctcctcggaagtcggcatctctctccaacctgcattctttggatcgatcaacccgggaggtggagctgggcttggaatacggatccccgactatgaacctggcagggcaaagcctgaagtttgaaaatggccagtggatagcagagacaggggttagtggcggtgtggaccggagggaggttcagcgccttcgcaggcggaaccagcagttggaggaagagaacaatctcttgcggctgaaagtggacatcttattagacatg

SEQ ID NO: 19728 - protein, 1502 aa, Artificial Sequence
  derived and/or modified sequence
MADRFSRFNEDRDFQGNHFDQYEEGHLEIEQASLDKPIESDNIGHRLLQKHGWKLGQGLGKSLQGRTDPIPIVVKYDVMGMGRMEMELDYAEDATERRRVLEVEKEDTEELRQKYKDYVDKEKAIAKALEDLRANFYCELCDKQYQKHQEFDNHINSYDHAHKQRLKDLKQREFARNVSSRSRKDEKKQEKALRRLHELAEQRKQAECAPGSGPMFKPTTVAVDEEGGEDDKDESATNSGTGATASCGLGSEFSTDKGGPFTAVQITNTTGLAQAPGLASQGISFGIKNNLGTPLQKLGVSFSFAKKAPVKLESIASVFKDHAEEGTSEDGTKPDEKSSDQGLQKVGDSDGSSNLDGKKEDEDPQDGGSLASTLSKLKRMKREEGAGATEPEYYHYIPPAHCKVKPNFPFLLFMRASEQMDGDNTTHPKNAPESKKGSSPKPKSCIKAAASQGAEKTVSEVSEQPKETSMTEPSEPGSKAEAKKALGGDVSDQSLESHSQKVSETQMCESNSSKETSLATPAGKESQEGPKHPTGPFFPVLSKDESTALQWPSELLIFTKAEPSISYSCNPLYFDFKLSRNKDARTKGTEKPKDIGSSSKDHLQGLDPGEPNKSKEVGGEKIVRSSGGRMDAPASGSACSGLNKQEPGGSHGSETEDTGRSLPSKKERSGKSHRHKKKKKHKKSSKHKRKHKADTEEKSSKAESGEKSKKRKKRKRKKNKSSAPADSERGPKPEPPGSGSPAPPRRRRRAQDDSQRRSLPAEEGSSGKKDEGGGGSSSQDHGGRKHKGELPPSSCQRRAGTKRSSRSSHRSQPSSGDEDSDDASSHRLHQKSPSQYSEEEEEEDSGSEHSRSRSRSGRRHSSHRSSRRSYSSSSDASSDQSCYSRQRSYSDDSYSDYSDRSRRHSKRSHDSDDSDYASSKHRSKRHKYSSSDDDYSLSCSQSRSRSRSHTRERSRSRGRSRSSSCSRSRSKRRSRSTTAHSWQRSRSYSRDRSRSTRSPSQRSGSRKRSWGHESPEERHSGRRDFIRSKIYRSQSPHYFRSGRGEGPGKKDDGRGDDSKATGPPSQNSNIGTGRGSEGDCSPEDKNSVTAKLLLEKIQSRKVERKPSVSEEVQATPNKAGPKLKDPPQGYFGPKLPPSLGNKPVLPLIGKLPATRKPNKKCEESGLERGEEQEQSETEEGPPGSSDALFGHQFPSEETTGPLLDPPPEESKSGEATADHPVAPLGTPAHSDCYPGDPTISHNYLPDPSDGDTLESLDSSSQPGPVESSLLPIAPDLEHFPSYAPPSGDPSIESTDGAEDASLAPLESQPITFTPEEMEKYSKLQQAAQQHIQQQLLAKQVKAFPASAALAPATPALQPIHIQQPATASATSITTVQHAILQHHAAAAAAAIGIHPHPHPQPLAQVHHIPQPHLTPISLSHLTHSIIPGHPATFLASHPIHIIPASAIHPGPFTFHPVPHAALYPTLLAPRPAAAAATALHLHPLLHPIFSGQDLQHPPSHGT

SEQ ID NO: 19729 - DNA, 6857 bp, Artificial Sequence
  derived and/or modified sequence
gggtgtcgcaggagggaaggagcgaaccggagagcgtcgtcctgagaggagtgaaggcggcaaaatggcggaccgcttctcccgcttcaacgaagaccgagactttcagggtaatcactttgatcagtatgaggaaggacacttggaaattgaacaagcgtcacttgacaagcctatagaatcggataatattggacaccgcttactccagaaacatgggtggaagctgggccagggattgggaaaatctcttcaggggagaacagatcccattccaatcgttgtcaagtatgatgtcatgggcatgggtcgcatggaaatggagcttgattatgctgaagatgctaccgaacggcgccgtgtcctagaagtagaaaaagaagacacagaagagctgagacaaaagtacaaggattatgttgacaaagagaaggcaattgccaaagccttggaagacctcagagccaacttttattgtgaactgtgtgataagcaatatcagaaacatcaggaatttgataaccatatcaactcctatgatcatgcacacaagcagagattaaaagatctgaagcagagagagtttgctcgaaatgtctcttcaagatcccgcaaggatgagaaaaaacaggaaaaagcccttcggcggctccatgagttggcagagcaaagaaaacaagctgaatgtgcacctggaagtggtcccatgttcaaaccaaccacagtggctgtagatgaagaaggtggagaagatgataaagatgaatcagctacaaatagtggcacaggtgccactgcttcttgtggcctgggatctgaattctccacagataaaggaggccctttcactgcagtacaaatcactaataccactggactggcccaggctcctgggttagcctcccaaggcatcagctttggcattaagaataatctggggaccccattgcaaaaattgggagtgtcattttcttttgccaaaaaggctcctgtcaaactcgaatcaatagcatcagttttcaaggaccatgcggaggaagggacctctgaagatggaacaaaacccgatgagaagagttctgaccaaggactgcagaaggtaggagactctgatgggagcagtaatcttgatggtaaaaaagaggatgaagaccctcaggatggagggtcccttgcctcaacattatccaaattaaaaaggatgaaacgagaagaaggagctggggctacagagcctgagtattaccactacatccccccagcacactgcaaagtaaaacctaattttccctttctactttttatgagagccagtgaacaaatggatggtgataatactacacacccaaagaatgccccagagagtaaaaaaggcagttctcccaagcctaaaagctgcatcaaggcggcagcaagccaaggagcagaaaagacagttagtgaagtctctgagcagccgaaggaaaccagcatgaccgagccctcagaaccaggaagcaaagctgaggcaaagaaggccttaggaggggatgtaagtgatcagagtttagaaagtcatagtcagaaggtttcagagacccaaatgtgtgagtccaactcttctaaagaaacctctctggccaccccagcagggaaagaaagccaagaaggacccaaacatcctactggtcccttcttcccagttttgagcaaagatgaaagcactgccctccagtggccatcagaactattaattttcaccaaggcagaaccctccatttcatacagttgtaaccctttatattttgactttaaactttcaaggaacaaagatgccagaactaaaggaacagaaaaaccaaaggatataggaagctcctcaaaggaccatctccaaggcctagatcctggtgagccaaataaaagcaaggaagtgggcggagagaaaatagtacgttcctcaggaggcagaatggacgcacctgcttcagggtctgcctgtagcggcctgaacaagcaggagcctgggggtagccatgggtctgagacagaagacacagggagaagccttcccagcaagaaagaacgatctgggaagtcccaccggcacaaaaagaaaaagaagcacaaaaaatccagcaaacacaaacgtaaacacaaggctgacacagaagagaaaagctctaaggcagagtcaggggagaaatctaagaagcgcaagaaacgaaaacgaaagaagaataagtcatcagccccagcagattctgaacgaggacccaaaccagaaccccctgggagtggcagtcccgcaccaccaagaagaaggcggagagctcaagatgactcccagcggagatccctcccagctgaagaggggagcagtggcaaaaaggatgaaggtgggggtggtagcagctcccaagaccatggtgggaggaaacacaaaggtgaacttccaccttcatcctgccagcgaagagcaggcaccaaacggagcagccggtctagccatcggagccaacccagtagtggagatgaggatagtgatgatgcttcctcacaccggctgcaccagaagtctccatcccagtacagtgaggaagaagaagaggaagattcaggcagtgagcattcccgcagccgctcaaggtctggccggcgccattcctcgcatcgttcctcccggcgttcttactcaagtagctcagatgcctcttcagaccagagctgctatagtagacagcgcagttactctgatgacagctacagtgactacagtgacagatcacgaaggcactccaagcgctcccatgactcagatgactcagactatgccagctccaaacaccgatcaaaacggcacaaatattcatcttctgatgatgactatagcctcagttgcagccagtcccgaagccgatctcggagtcataccagagagcgctcaagatcccggggccgcagccgcagcagcagttgtagtcgtagtcgaagcaagcggagaagccgtagcaccacagcccacagctggcaacggagccggagctatagccgggaccgcagccgcagcaccaggagcccttcccagagatcaggctccaggaagagatcatggggtcacgagagccctgaggagaggcattctgggcgtcgggacttcattcgttctaagatctaccgctcccagtccccccactatttccgatcaggccggggagaaggtcctgggaagaaagatgatggcagaggagatgacagtaaagcaacaggtccaccttcccagaacagcaacattggcacaggaagagggtcagaaggtgactgcagtcctgaagacaagaactctgtcactgccaaactgctactggagaagatccagtcaaggaaagtggagaggaaacctagtgtgagtgaggaggtgcaggccacccctaataaagctgggcccaagctcaaggaccccccacaaggttactttgggcccaagctccccccatctcttggcaataagcctgtccttccactgatagggaagctcccagctacccgaaagcccaataagaagtgtgaagagtctggcttggaaaggggggaagagcaagaacagtcagagacagaagaggggcccccagggagtagtgatgccctatttgggcatcagttcccttcagaggaaacaactggccccttattagacccacccccagaagagtcaaagtctggagaagctactgctgatcaccctgtggctccactaggcaccccagcacattctgactgctaccctggggacccaaccatctcccataactacctccccgaccccagtgatggggacaccctggagtccctggatagcagcagtcagccaggccctgtggagtccagcttgctgcctatagcaccagaccttgagcatttccccagttatgcacctcccagtggggatcctagtattgagtcaacagatggggctgaggatgcttcactggcccccctggaaagccagcccatcaccttcacccctgaggagatggagaagtacagcaagctccagcaggctgctcagcaacacatccagcagcagcttctggccaagcaagtaaaggcctttccagcctcagctgccctggccccagccacaccagccctgcaacccatccacattcagcagccagctacagcctctgccacctccatcacaactgttcagcatgccatcctacaacatcatgctgccgcagctgctgccgccatcggcattcaccctcacccccatccccaaccacttgcccaggtgcatcatattccccagccccatctgacccccatttctttgtcccacctcactcactcaatcatccctggccaccctgccacctttctcgctagccatcccatccacatcattcccgcctcagccatccatcctgggcccttcacctttcaccctgtcccacatgctgccctctaccccaccctacttgctccacggcctgctgcagcagctgccactgcacttcaccttcacccactacttcaccccatcttctcaggtcaggacctgcaacatccccccagccatggcacgtgagttgggggatgggatcctaggtagggccaggggaggagacccataaatgttcccttgggggtgttgagccattaataccagcaagtagaagctgggatgggcagtgtctgacagccaaagaattgagttttggcttgcaggggtgggtttagatttgaagtttgctttcagtttactatcagggatttctttttcctgtcctcctctcaatttgtccctccctcttctgtgtttctaagctagggaacaccagtaagtgctacccacccctctgcagcaacatctccaaactgtcaagtttagataatcccctcctccctctgcttttttcctctgctcttcccttctgtaaattttaaaacattttcctcccctctggccagtgggttgtcaccagagcacttgctgtgggcccatctggtcttgccttctcagcgccacagggaaggccaagctgttctagtggtggaagtgccaccattttggggtagtatctttgaccatctttggtgacgttacgttatcccaggtgaggtggaaagcgtctcacctggaacctgatataactcaggctgcaattccatccagttcccacatcaacggagccacacatttggcactgttatcttggtatccctcatcccagaagaggcatctccatatcccagaaaagaagatcctatcatgaataaaagctgtatggcccagagaggagctcatgtgtctaaagtgaagggtatattttcttctgttgtgttgatgtttccttcttaatttataggatttttttaatgtaaaaaattgcactgaactctataaacgtaaatgctgctttttgtagctcatataaaaaaggttccatatttgtagtatactgcaataatattttttacatccagctctttaagtgatcctcgttctggtggctttgtgtaaatatgtttgccctagttgaattaagaaactctaaaggttataaaatgaaaacaaaaaataaaatatttgttttctgctagatgcaaaactgactaagcatgtatattttaccaaacttatgtattttttgaagttatgaactataaaatgttaaaacattttttgctgggacaaaatgttaagtaatttgcagtatgtagtgcccccagtattgggatttttgagctaatgggcagcagtcagctgggggcttctgagggatgctcatctttaacagtctccctcatgtacttttgctgttttacacagagaaacaggtagaccccacagaggagaaggaggggattcaacagctttattgtctggaagcagtgagatttggtgattgtctggggggattcctgggtttccctgggtaccttgttccaggcagtcagtccatttgccttcctagtacttagccccctctgacaattttttttttaatgtgccttttgggttggtagaaacggaagtagaagtaggctggaggatgagttgggacagtcttccttttgttgggaggtgagcacatttacagatattttgcttcatagtttccatgccctctgcccagctcagtttagacagtaaacgttccttgtttcttttctcccatgacactgacaagaggaattaccacctcagcctcttttgcccctcttcttgcctttcacccaggctctcagccctaattaacacactgacccaaaggtgcttgtgttgcaggtcccatctcctttgatgaggttaacaattcccactttggcattttcctaactattcgtgtggctagaattggttggttggtcacttgacaagaaaaaccatacttacctgggccaaggctctgttcctgccttcgcaaattctcaaaagagtaaagtttatgaaaagaaagtggcaggcaaacacaactcttgactgccctcccaccctcctacctgttcagtactcatctgattcagaagcatcacttcttggataactagcactggaaaaatgaaatcatctgtgtaagtgaagggactcatttttctttgctttcagcccatgtaaataaataatacagtattaacattttcgtgctgcttcccattagcttgtagattgagccatactctggctgcctctttgccttcctaggggcattttctttaacttccagaatagtgattttaaaagtaaaaataaaaataaaccttacttacaagcataacagattgtatttaactttatcacatatgatagagatatatatgctgtaaaatgagggaaaggaactttctaataaaccaatgatttgtgg

SEQ ID NO: 19730 - DNA, 4710 bp, Artificial Sequence
  derived and/or modified sequence
gcgtcgtcctgagaggagtgaaggcggcaaaatggcggaccgcttctcccgcttcaacgaagaccgagactttcagggtaatcactttgatcagtatgaggaaggacacttggaaattgaacaagcgtcacttgacaagcctatagaatcgcccagtttttaaagccaggataatattggacaccgcttactccagaaacatgggtggaagctgggccagggattgggaaaatctcttcaggggagaacagatcccattccaatcgttgtcaagtatgatgtcatgggcatgggtcgcatggaaatggagcttgattatgctgaagatgctaccgaacggcgccgtgtcctagaagtagaaaaagaagacacagaagagctgagacaaaagtacaaggattatgttgacaaagagaaggcaattgccaaagccttggaagacctcagagccaacttttattgtgaactgtgtgataagcaatatcagaaacatcaggaatttgataaccatatcaactcctatgatcatgcacacaagcagagattaaaagatctgaagcagagagagtttgctcgaaatgtctcttcaagatcccgcaaggatgagaaaaaacaggaaaaagcccttcggcggctccatgagttggcagagcaaagaaaacaagctgaatgtgcacctggaagtggtcccatgttcaaaccaaccacagtggctgtagatgaagaaggtggagaagatgataaagatgaatcagctacaaatagtggcacaggtgccactgcttcttgtggcctgggatctgaattctccacagataaaggaggccctttcactgcagtacaaatcactaataccactggactggcccaggctcctgggttagcctcccaaggcatcagctttggcattaagaataatctggggaccccattgcaaaaattgggagtgtcattttcttttgccaaaaaggctcctgtcaaactcgaatcaatagcatcagttttcaaggaccatgcggaggaagggacctctgaagatggaacaaaacccgatgagaagagttctgaccaaggactgcagaaggtaggagactctgatgggagcagtaatcttgatggtaaaaaagaggatgaagaccctcaggatggagggtcccttgcctcaacattatccaaattaaaaaggatgaaacgagaagaaggagctggggctacagagcctgagtattaccactacatccccccagcacactgcaaagtaaaacctaattttccctttctactttttatgagagccagtgaacaaatggatggtgataatactacacacccaaagaatgccccagagagtaaaaaaggcagttctcccaagcctaaaagctgcatcaaggcggcagcaagccaaggagcagaaaagacagttagtgaagtctctgagcagccgaaggaaaccagcatgaccgagccctcagaaccaggaagcaaagctgaggcaaagaaggccttaggaggggatgtaagtgatcagagtttagaaagtcatagtcagaaggtttcagagacccaaatgtgtgagtccaactcttctaaagaaacctctctggccaccccagcagggaaagaaagccaagaaggacccaaacatcctactggtcccttcttcccagttttgagcaaagatgaaagcactgccctccagtggccatcagaactattaattttcaccaaggcagaaccctccatttcatacagttgtaaccctttatattttgactttaaactttcaaggaacaaagatgccagaactaaaggaacagaaaaaccaaaggatataggaagctcctcaaaggaccatctccaaggcctagatcctggtgagccaaataaaagcaaggaagtgggcggagagaaaatagtacgttcctcaggaggcagaatggacgcacctgcttcagggtctgcctgtagcggcctgaacaagcaggagcctgggggtagccatgggtctgagacagaagacacagggagaagccttcccagcaagaaagaacgatctgggaagtcccaccggcacaaaaagaaaaagaagcacaaaaaatccagcaaacacaaacgtaaacacaaggctgacacagaagagaaaagctctaaggcagagtcaggggagaaatctaagaagcgcaagaaacgaaaacgaaagaagaataagtcatcagccccagcagattctgaacgaggacccaaaccagaaccccctgggagtggcagtcccgcaccaccaagaagaaggcggagagctcaagatgactcccagcggagatccctcccagctgaagaggggagcagtggcaaaaaggatgaaggtgggggtggtagcagctcccaagaccatggtgggaggaaacacaaaggtgaacttccaccttcatcctgccagcgaagagcaggcaccaaacggagcagccggtctagccatcggagccaacccagtagtggagatgaggatagtgatgatgcttcctcacaccggctgcaccagaagtctccatcccagtacagtgaggaagaagaagaggaagattcaggcagtgagcattcccgcagccgctcaaggtctggccggcgccattcctcgcatcgttcctcccggcgttcttactcaagtagctcagatgcctcttcagaccagagctgctatagtagacagcgcagttactctgatgacagctacagtgactacagtgacagatcacgaaggcactccaagcgctcccatgactcagatgactcagactatgccagctccaaacaccgatcaaaacggcacaaatattcatcttctgatgatgactatagcctcagttgcagccagtcccgaagccgatctcggagtcataccagagagcgctcaagatcccggggccgcagccgcagcagcagttgtagtcgtagtcgaagcaagcggagaagccgtagcaccacagcccacagctggcaacggagccggagctatagccgggaccgcagccgcagcaccaggagcccttcccagagatcaggctccaggaagagatcatggggtcacgagagccctgaggagaggcattctgggcgtcgggacttcattcgttctaagatctaccgctcccagtccccccactatttccgatcaggccggggagaaggtcctgggaagaaagatgatggcagaggagatgacagtaaagcaacaggtccaccttcccagaacagcaacattggcacaggaagagggtcagaaggtgactgcagtcctgaagacaagaactctgtcactgccaaactgctactggagaagatccagtcaaggaaagtggagaggaaacctagtgtgagtgaggaggtgcaggccacccctaataaagctgggcccaagctcaaggaccccccacaaggttactttgggcccaagctccccccatctcttggcaataagcctgtccttccactgatagggaagctcccagctacccgaaagcccaataagaagtgtgaagagtctggcttggaaaggggggaagagcaagaacagtcagagacagaagaggggcccccagggagtagtgatgccctatttgggcatcagttcccttcagaggaaacaactggccccttattagacccacccccagaagagtcaaagtctggagaagctactgctgatcaccctgtggctccactaggcaccccagcacattctgactgctaccctggggacccaaccatctcccataactacctccccgaccccagtgatggggacaccctggagtccctggatagcagcagtcagccaggccctgtggagtccagcttgctgcctatagcaccagaccttgagcatttccccagttatgcacctcccagtggggatcctagtattgagtcaacagatggggctgaggatgcttcactggcccccctggaaagccagcccatcaccttcacccctgaggagatggagaagtacagcaagctccagcaggctgctcagcaacacatccagcagcagcttctggccaagcaagtaaaggcctttccagcctcagctgccctggccccagccacaccagccctgcaacccatccacattcagcagccagctacagcctctgccacctccatcacaactgttcagcatgccatcctacaacatcatgctgccgcagctgctgccgccatcggcattcaccctcacccccatccccaaccacttgcccaggtgcatcatattccccagccccatctgacccccatttctttgtcccacctcactcactcaatcatccctggccaccctgccacctttctcgctagccatcccatccacatcattcccgcctcagccatccatcctgggcccttcacctttcaccctgtcccacatgctgccctctaccccaccctacttgctccacggcctgctgcagcagctgccactgcacttcaccttcacccactacttcaccccatcttctcaggtcaggacctgcaacatccccccagccatggcacgtgagttgggggatgggatcctaggtagggccaggggaggagacccataaatgttcccttgggggtgttgagccattaataccagcaagtagaagctgggatgggcagtgtctgacagccaaagaattgagttttggcttgcaggggtgggtttag

SEQ ID NO: 19731 - DNA, 163 bp, Artificial Sequence
  derived and/or modified sequence
agagcgtcgtcctgagaggagtgaaggcggcaaaatggcggaccgcttctcccgcttcaacgaagaccgagactttcagggtaatcactttgatcagtatgaggaaggacacttggaaattgaacaagcgtcacttgacaagcctatagaatcgagttgtttt

SEQ ID NO: 19732 - DNA, 4692 bp, Artificial Sequence
  derived and/or modified sequence
gcgtcgtcctgagaggagtgaaggcggcaaaatggcggaccgcttctcccgcttcaacgaagaccgagactttcagggtaatcactttgatcagtatgaggaaggacacttggaaattgaacaagcgtcacttgacaagcctatagaatcggataatattggacaccgcttactccagaaacatgggtggaagctgggccagggattgggaaaatctcttcaggggagaacagatcccattccaatcgttgtcaagtatgatgtcatgggcatgggtcgcatggaaatggagcttgattatgctgaagatgctaccgaacggcgccgtgtcctagaagtagaaaaagaagacacagaagagctgagacaaaagtacaaggattatgttgacaaagagaaggcaattgccaaagccttggaagacctcagagccaacttttattgtgaactgtgtgataagcaatatcagaaacatcaggaatttgataaccatatcaactcctatgatcatgcacacaagcagagattaaaagatctgaagcagagagagtttgctcgaaatgtctcttcaagatcccgcaaggatgagaaaaaacaggaaaaagcccttcggcggctccatgagttggcagagcaaagaaaacaagctgaatgtgcacctggaagtggtcccatgttcaaaccaaccacagtggctgtagatgaagaaggtggagaagatgataaagatgaatcagctacaaatagtggcacaggtgccactgcttcttgtggcctgggatctgaattctccacagataaaggaggccctttcactgcagtacaaatcactaataccactggactggcccaggctcctgggttagcctcccaaggcatcagctttggcattaagaataatctggggaccccattgcaaaaattgggagtgtcattttcttttgccaaaaaggctcctgtcaaactcgaatcaatagcatcagttttcaaggaccatgcggaggaagggacctctgaagatggaacaaaacccgatgagaagagttctgaccaaggactgcagaaggtaggagactctgatgggagcagtaatcttgatggtaaaaaagaggatgaagaccctcaggatggagggtcccttgcctcaacattatccaaattaaaaaggatgaaacgagaagaaggagctggggctacagagcctgagtattaccactacatccccccagcacactgcaaagtaaaacctaattttccctttctactttttatgagagccagtgaacaaatggatggtgataatactacacacccaaagaatgccccagagagtaaaaaaggcagttctcccaagcctaaaagctgcatcaaggcggcagcaagccaaggagcagaaaagacagttagtgaagtctctgagcagccgaaggaaaccagcatgaccgagccctcagaaccaggaagcaaagctgaggcaaagaaggccttaggaggggatgtaagtgatcagagtttagaaagtcatagtcagaaggtttcagagacccaaatgtgtgagtccaactcttctaaagaaacctctctggccaccccagcagggaaagaaagccaagaaggacccaaacatcctactggtcccttcttcccagttttgagcaaagatgaaagcactgccctccagtggccatcagaactattaattttcaccaaggcagaaccctccatttcatacagttgtaaccctttatattttgactttaaactttcaaggaacaaagatgccagaactaaaggaacagaaaaaccaaaggatataggaagctcctcaaaggaccatctccaaggcctagatcctggtgagccaaataaaagcaaggaagtgggcggagagaaaatagtacgttcctcaggaggcagaatggacgcacctgcttcagggtctgcctgtagcggcctgaacaagcaggagcctgggggtagccatgggtctgagacagaagacacagggagaagccttcccagcaagaaagaacgatctgggaagtcccaccggcacaaaaagaaaaagaagcacaaaaaatccagcaaacacaaacgtaaacacaaggctgacacagaagagaaaagctctaaggcagagtcaggggagaaatctaagaagcgcaagaaacgaaaacgaaagaagaataagtcatcagccccagcagattctgaacgaggacccaaaccagaaccccctgggagtggcagtcccgcaccaccaagaagaaggcggagagctcaagatgactcccagcggagatccctcccagctgaagaggggagcagtggcaaaaaggatgaaggtgggggtggtagcagctcccaagaccatggtgggaggaaacacaaaggtgaacttccaccttcatcctgccagcgaagagcaggcaccaaacggagcagccggtctagccatcggagccaacccagtagtggagatgaggatagtgatgatgcttcctcacaccggctgcaccagaagtctccatcccagtacagtgaggaagaagaagaggaagattcaggcagtgagcattcccgcagccgctcaaggtctggccggcgccattcctcgcatcgttcctcccggcgttcttactcaagtagctcagatgcctcttcagaccagagctgctatagtagacagcgcagttactctgatgacagctacagtgactacagtgacagatcacgaaggcactccaagcgctcccatgactcagatgactcagactatgccagctccaaacaccgatcaaaacggcacaaatattcatcttctgatgatgactatagcctcagttgcagccagtcccgaagccgatctcggagtcataccagagagcgctcaagatcccggggccgcagccgcagcagcagttgtagtcgtagtcgaagcaagcggagaagccgtagcaccacagcccacagctggcaacggagccggagctatagccgggaccgcagccgcagcaccaggagcccttcccagagatcaggctccaggaagagatcatggggtcacgagagccctgaggagaggcattctgggcgtcgggacttcattcgttctaagatctaccgctcccagtccccccactatttccgatcaggccggggagaaggtcctgggaagaaagatgatggcagaggagatgacagtaaagcaacaggtccaccttcccagaacagcaacattggcacaggaagagggtcagaaggtgactgcagtcctgaagacaagaactctgtcactgccaaactgctactggagaagatccagtcaaggaaagtggagaggaaacctagtgtgagtgaggaggtgcaggccacccctaataaagctgggcccaagctcaaggaccccccacaaggttactttgggcccaagctccccccatctcttggcaataagcctgtccttccactgatagggaagctcccagctacccgaaagcccaataagaagtgtgaagagtctggcttggaaaggggggaagagcaagaacagtcagagacagaagaggggcccccagggagtagtgatgccctatttgggcatcagttcccttcagaggaaacaactggccccttattagacccacccccagaagagtcaaagtctggagaagctactgctgatcaccctgtggctccactaggcaccccagcacattctgactgctaccctggggacccaaccatctcccataactacctccccgaccccagtgatggggacaccctggagtccctggatagcagcagtcagccaggccctgtggagtccagcttgctgcctatagcaccagaccttgagcatttccccagttatgcacctcccagtggggatcctagtattgagtcaacagatggggctgaggatgcttcactggcccccctggaaagccagcccatcaccttcacccctgaggagatggagaagtacagcaagctccagcaggctgctcagcaacacatccagcagcagcttctggccaagcaagtaaaggcctttccagcctcagctgccctggccccagccacaccagccctgcaacccatccacattcagcagccagctacagcctctgccacctccatcacaactgttcagcatgccatcctacaacatcatgctgccgcagctgctgccgccatcggcattcaccctcacccccatccccaaccacttgcccaggtgcatcatattccccagccccatctgacccccatttctttgtcccacctcactcactcaatcatccctggccaccctgccacctttctcgctagccatcccatccacatcattcccgcctcagccatccatcctgggcccttcacctttcaccctgtcccacatgctgccctctaccccaccctacttgctccacggcctgctgcagcagctgccactgcacttcaccttcacccactacttcaccccatcttctcaggtcaggacctgcaacatccccccagccatggcacgtgagttgggggatgggatcctaggtagggccaggggaggagacccataaatgttcccttgggggtgttgagccattaataccagcaagtagaagctgggatgggcagtgtctgacagccaaagaattgagttttggcttgcaggggtgggtttag

SEQ ID NO: 19733 - DNA, 4509 bp, Artificial Sequence
  derived and/or modified sequence
atggctgaccgtttttcacggtttaacgaggacagagacttccaggggaaccattttgaccagtatgaggaggggcacctggaaatcgaacaagctagtttggataagccgattgaaagcgataacattgggcaccggctgctgcaaaaacatggatggaagcttggccagggactggggaagtctctgcagggcagaactgatccgatccctatcgtggtgaaatacgacgtgatgggcatgggcaggatggaaatggagcttgattacgctgaagatgcaacagaacgccggcgagttctggaggtggagaaggaggatacagaagagctcagacagaagtacaaggattacgtggacaaggagaaggccatcgcgaaagccctcgaggatctccgtgccaacttttactgcgaattgtgtgataaacagtatcagaagcaccaggaatttgataaccatattaactcttatgatcacgcacataagcagcgcctgaaggacctgaaacaaagagaatttgctagaaatgtgtcttcccggtcacgaaaggatgagaaaaaacaggaaaaagcactgagacgtctccatgagttggctgaacaacgaaagcaggccgaatgtgcccccggatccggccctatgttcaaacccacgactgtggctgtggatgaggaagggggcgaggacgacaaggatgaatcagctactaactctgggaccggcgcaaccgcgtcctgtgggctcgggagcgaattctccacggacaaggggggcccctttactgctgttcaaatcactaacaccactgggctggcacaggcccccggattagcctcgcaggggatctccttcgggatcaaaaacaacctcggtactcccctgcagaagcttggcgtttcgttcagcttcgccaaaaaggctccagtgaaattggagagtatcgctagcgtcttcaaagatcacgcagaggagggcactagtgaggacggaactaagcctgacgaaaaaagtagtgatcaggggctgcagaaggtcggggacagcgatggatcatccaatttggatggaaagaaggaggacgaggacccccaggatggtggctcgctcgccagtacactttcaaaactcaaacgcatgaaacgcgaagaaggcgccggagccaccgagcccgaatactaccactatattcctcccgctcactgtaaagtaaaaccaaacttcccgttcctgttatttatgagagcatctgagcagatggacggcgataacactacccatcccaagaatgcgcctgagagtaagaaagggagcagtcccaagcccaagtcttgcattaaggccgcagcatctcaaggagcggagaaaaccgtaagcgaagtctcagagcaacctaaagaaacgtccatgacagagccatccgaacccgggtctaaagcagaagccaagaaggcactgggtggggacgtgtctgatcagagcctcgagagccactctcaaaaggtctctgaaacgcagatgtgtgaatctaattcttctaaagaaacctccctcgctacgccagccggtaaggagtcgcaggagggccccaagcacccaacaggaccattcttccccgtcctctcaaaggacgagagtactgctctgcagtggccttcagaacttctcattttcaccaaggccgagccttctattagctattcctgtaaccctctgtattttgacttcaagctttcacggaacaaggatgcaaggaccaaggggactgaaaagcccaaggatatcggctctagtagtaaggatcacctccaggggctggatccgggagagcctaacaagagtaaggaggtgggcggagaaaaaatagtaagaagctccggcggaagaatggacgccccagcttctggaagtgcctgctctggccttaacaagcaggaaccagggggctctcatggatcagaaactgaagacactggacggagcctgccatctaaaaaggaacgatccggtaagtctcacaggcacaagaagaagaagaaacataaaaagtcgagcaagcataagcggaagcacaaggcggataccgaagagaaaagcagcaaggctgaaagcggcgagaagtctaaaaagcgcaagaagagaaagagaaaaaaaaacaaatctagcgcacctgctgactcagagaggggaccgaagccagagccaccaggatccgggagtccagcccccccccggcgacggcgccgcgcacaggatgactcacagcggcggtctctgcccgccgaagaaggatcctccggtaaaaaggatgaaggcgggggaggtagcagcagtcaagaccacggcggccggaaacataagggcgagctgcctccgagttcctgccagcgccgcgccggcactaagaggtcctcccgctctagtcacaggtcccagccatccagcggcgacgaagattcagacgacgccagctcccataggttgcaccagaagagcccttcccagtatagcgaggaggaggaggaagaagacagtggtagtgaacactccagatcaagaagccggagtggacggcgtcactcctcacatcgctctagtcgtaggagctactccagtagttcggacgcttctagcgatcagtcttgttactctcgacagcgcagctattccgatgattcatacagcgactacagcgaccggagccggaggcactcaaagcggagccatgactcagacgactcggattatgcctctagcaaacatcgaagtaaacgccataaatattccagttctgacgatgactattccctatcctgttcgcagtcacggtcaagatcacgctctcatacaagagaaagatctaggtctcgcggccgctccagatcctccagttgttctaggtctagaagcaaacgtagaagtagaagcaccactgctcattcttggcagaggtctcggtcttactctcgcgacaggtcccggtccacacgcagtcccagccagcggagcggctcacgcaaaaggtcctggggacacgagtctccggaagagcgtcacagcggtagacgggatttcatccgatcaaaaatctatcgatcccagagcccacactatttccggtccggccggggggaaggtccaggtaagaaagatgatgggaggggcgatgactccaaggccacaggccccccatcgcagaatagcaatatcggaacaggccgaggaagtgaaggcgactgctcacccgaggacaagaacagcgttacagcaaagctgctgctcgagaaaatccagagcaggaaggtagagagaaagccaagtgttagcgaggaggtgcaagcaactcctaataaagcaggtcccaaattgaaggatcctccgcagggctacttcggaccaaagctgccgccgagcctgggaaacaagcctgttctaccgctgatcgggaagctgccagctacgaggaagcctaataagaaatgtgaggagtctggactggagcgcggtgaggagcaagagcagagtgagacagaggagggaccccctggcagctcagacgcgctcttcggccatcaatttccatctgaggagactacaggacccctgctggatcctccaccagaagagtctaaatcaggagaagctacggcagaccacccggtcgcaccattgggtacgccggcccacagtgactgctacccaggggacccaactatctcccacaactacctccctgatccctctgatggcgacactctggagtccctcgattcatcttcacaacctggaccggtggaatctagtttgctcccaattgcaccagatcttgaacacttcccaagttatgccccaccatccggagatcctagcatcgagtctacagacggagcggaggacgcctcacttgccccgcttgagagccagccaatcactttcacgcccgaagagatggaaaaatactccaagctccagcaggctgcccagcagcatatacaacagcagcttctcgctaagcaggtcaaggcattccccgcttctgcagctctggcaccagccacaccagctttgcagcctatccacatacagcagccagctaccgcatccgctacctcaatcaccaccgtgcaacatgctatcctgcagcatcacgctgccgcggcagccgcggcaatcggaattcacccccacccccaccctcagcctttggcccaagtgcatcacattcctcagccacatctcaccccaatttcactctcccaccttacacattccatcatccccggacaccccgcaacattcctcgcctcacacccaattcacataatcccggcttctgctatacatccaggacctttcaccttccatccagtgccacacgcagcattgtacccaaccctcctcgccccacgcccggctgctgccgctgctaccgccctccacctgcacccccttctgcacccaatttttagtggccaggacttacaacacccacctagccacgggacctag

SEQ ID NO: 19734 - DNA, 4509 bp, Artificial Sequence
  derived and/or modified sequence
atggctgatcggttttccaggttcaacgaggatcgcgacttccagggcaaccattttgatcagtatgaggaaggccaccttgaaattgagcaagcctctctcgacaaaccaattgagtcagataacatcggacatcgacttttgcaaaaacacggttggaaattaggacaaggcctgggtaagagtcttcagggtcgaacggaccctatccccattgtagtgaaatatgatgttatggggatggggcggatggagatggagctggattacgctgaggacgccacggagcgtcggagagtgctagaagtggaaaaggaggacactgaggaactgaggcagaaatacaaagattacgtggataaagaaaaagcgatcgctaaggcattagaggacctgcgggcaaatttctactgcgaactatgtgacaaacagtaccagaagcatcaagagtttgataaccatattaattcttacgaccacgctcataaacagagactgaaagatctgaagcagagggagttcgcacgtaacgtttcatcaaggtcccgcaaagacgaaaagaagcaggagaaggcactacggcgcttacatgagttggccgagcagagaaaacaagctgaatgtgctcccggctcagggcctatgttcaagcccacaaccgtggccgttgatgaggaggggggagaggatgacaaagacgaaagcgccaccaactccggaacaggtgcaacagctagctgcggtctgggcagtgagttctcaacggacaaaggcggtccatttacagccgtgcaaataactaacactaccggcctagcccaggctccgggattagccagtcagggaatatccttcggaatcaagaataacctggggactcccctccaaaagctgggcgtgtctttttcatttgccaaaaaggccccggtgaagctggagtctatcgcttccgtgttcaaagatcacgccgaagaaggcaccagtgaagatgggaccaaacccgacgaaaagtcctccgatcaaggactgcagaaagtgggggacagcgacggaagttcaaacctcgacggcaagaaggaggatgaagaccctcaagacggtgggtccctcgctagtactctgtccaagcttaaaaggatgaagagagaagagggggctggcgccacggagccggaatattaccattatatccctcccgcacactgtaaagtgaagcccaatttcccttttctgctcttcatgcgggcctccgaacaaatggacggcgacaataccacgcaccccaagaatgcacccgaatcgaaaaaaggctcatccccaaaaccaaaatcctgcattaaggcagcagcctctcaaggagctgagaagacggtcagtgaagtgagcgaacaacccaaagagacctccatgacagagccaagcgaacctggttccaaagctgaggctaagaaggctttagggggggatgtgagcgaccagagcctggagagccactcacaaaaagtgagtgagacgcagatgtgcgaaagcaatagctccaaagaaacctctcttgccacccccgcaggaaaagagtcacaagaaggacctaagcatccaacggggcccttctttcctgttctgagtaaggatgaaagcactgccctgcagtggccctccgagcttctaatttttaccaaggcagaaccctccatttcctattcatgcaacccactgtacttcgatttcaaactctcacggaataaagacgctcgcactaagggaactgagaagccgaaagacataggttcttcaagtaaggaccacctgcagggactagatcctggcgaacctaacaagagtaaggaggtagggggagaaaagattgtgcgaagtagcggaggccgcatggatgcaccagcttctggcagcgcttgttccggactcaacaaacaggagccaggcggcagccacggtagtgaaactgaagacaccgggagaagcctgccctctaaaaaggaacgaagcggcaaatctcacaggcacaagaagaagaaaaaacacaaaaagtccagcaaacacaaaagaaaacacaaggctgacaccgaggaaaaaagttctaaagccgagagtggcgagaagtccaaaaagaggaaaaaaaggaagagaaagaaaaataaaagttcagctcccgcagattccgagagaggcccgaagccagaacctcctgggtctgggtctcccgccccaccccgcagaagaaggcgcgcacaagacgactcacagcgtcgttccctccccgcggaggaaggctcatcaggtaaaaaagatgaggggggtggcggaagcagtagccaggaccatggcggccgtaagcataagggtgagctcccaccctcctcttgccagaggcgtgccggcaccaagcgaagctccaggagtagccaccgttcccagcctagttccggcgatgaggacagcgatgatgcctcttcgcatcgcctccaccagaagagcccctcccagtattccgaagaggaggaagaagaagattctggatccgaacacagcagatctcggtctcgctctggcaggcgtcactcgtcacaccgatcatcacgtcggagctactctagtagttccgacgcgtcctccgaccagtcttgctatagccggcagcgatcgtacagcgacgattcttacagcgattatagtgaccgctctaggagacattcaaaaagatctcacgacagtgatgattctgattacgcctcctccaagcaccgctccaaacggcacaagtatagctcttcagatgatgactattcactcagttgctcacagagtaggtctagatcaagatcacatactcgagagcgtagcagaagtaggggccggtccaggtcatcctcatgctctagaagcaggagcaagcgcagatcccgctcaactactgcgcattcgtggcaaaggagtcggtcgtactcaagggatcgaagcaggtccactaggtcaccgtcccaacgatctggaagtcgaaaacgttcatggggccacgagtctccagaggagcgccattctgggcggagagactttatccggagtaagatatatcgcagccagtcaccacactacttccgctctggcaggggggagggaccaggtaaaaaagacgacggccgtggcgatgatagcaaggctactggacccccctcccaaaactccaacattggaaccgggcgagggtcagagggcgactgcagccccgaggacaaaaactccgtaactgccaaattgttactggagaaaatacagagtagaaaggtggaacggaagccatccgttagcgaggaagtccaggctaccccgaataaggcaggccctaaactcaaggacccgcctcaggggtatttcggccctaaactgcctcctagcctgggaaacaagccagtgcttcccctgattggcaaactcccagcaacacgtaaacccaacaagaaatgtgaggaatcagggcttgaacgaggggaagaacaggaacaatccgaaacagaggagggtcccccagggtccagcgacgccctgttcgggcatcaattcccaagtgaggaaaccaccggacccctattagacccacccccagaagaaagtaaatccggtgaagccaccgccgaccacccagtggctccccttggcacccctgcacatagcgactgttaccccggggatccgaccatttcccataattacctccctgacccctcggacggcgacaccctggagtctctcgattcttccagccaaccaggcccggtcgagtcatcactgctccctatcgcccccgacctggaacactttccatcttacgctcctcccagcggggatcccagtatcgaatccaccgatggcgctgaggatgcatctctggctcctctggaatcccagccgattacttttacccctgaagagatggagaaatatagcaagctgcagcaggccgctcagcagcacatccagcagcaactattggcgaaacaggtgaaggcttttccagcaagtgcagctctggcaccggctacgcccgcgttgcagccaattcacattcagcagccagctaccgcttctgctaccagtatcactacagtccagcatgctatcctgcaacaccatgcagctgcagctgccgcggccattggcattcaccctcacccacaccctcagcccttggcgcaggtacatcatataccgcaacctcacttgacaccaatcagtttaagccacctgacccacagtatcatcccagggcaccctgccaccttcctggcctctcaccccatccatatcatacccgcatccgccattcacccgggacccttcacctttcaccccgtgccgcatgccgccctctacccgaccctcctggcaccccgccctgccgccgctgcagccaccgccttgcatcttcaccccttgttgcatcctatattctcaggccaagacctgcagcacccgcccagtcacgggacgtag

SEQ ID NO: 19735 - DNA, 4509 bp, Artificial Sequence
  derived and/or modified sequence
atggctgaccgcttcagccgcttcaatgaagatcgggacttccagggcaaccactttgaccagtatgaggagggccacctggagattgagcaggccagcctggacaagcccatcgagagtgacaacatcggccaccggctgctgcagaagcacggctggaagctgggccagggcctgggcaagagcctgcagggccgcacagaccccatccccatcgtggtgaagtatgatgtgatgggcatgggccgcatggagatggagctggactatgcagaagatgccacagaaagaagaagagtgctggaggtggagaaggaggacacagaggagctgcggcagaagtacaaggactatgtggacaaggagaaggccatcgccaaggccctggaggacctgcgggccaacttctactgtgagctgtgtgacaagcagtaccagaagcaccaggagtttgacaaccacatcaacagctatgaccacgcccacaagcagaggctgaaggacctgaagcagcgggagtttgccagaaatgtgagcagccgcagcaggaaggatgagaagaagcaggagaaggccctgcggcggctgcacgagctggccgagcagaggaagcaggctgaatgtgcccctggcagcggccccatgttcaagcccaccaccgtggccgtggatgaggagggcggagaagatgacaaggatgaaagtgccaccaacagcggcactggagccacagccagctgtggcctgggcagcgagttcagcacagacaagggcggccccttcaccgctgtgcagatcaccaacaccaccggcctggcccaggcccctggcctggccagccagggcatcagctttggcatcaagaacaacctgggcacccccctgcagaagctgggcgtgtccttctcctttgccaagaaggcccctgtgaagctggagagcatcgcctctgtgttcaaggaccatgctgaggagggcaccagtgaagatggcaccaagccagatgagaagagcagtgaccagggcctgcagaaggtgggggacagtgatggcagcagcaacctggatggcaagaaggaggatgaggacccccaggacggcggcagcctggccagcaccctgagcaagctgaagaggatgaagcgggaggagggcgctggggccacagagcctgagtactaccactacatccccccagcccactgcaaggtgaagcccaacttccccttcctgctcttcatgagggccagcgagcagatggatggagacaacaccacccaccccaagaatgcccctgagagcaagaagggcagcagccccaagcccaagagctgcatcaaggctgctgccagccagggcgctgagaagacagtgtctgaggtgtctgagcagcccaaggagacctccatgacagagcccagcgagcccggcagcaaggccgaggccaagaaggccctgggcggagatgtgtctgaccagagcctggagagccacagccagaaggtgtctgagacccagatgtgtgagagcaacagcagcaaggagaccagcctggccaccccagctgggaaggagagccaggagggccccaagcaccccaccggccccttcttccctgtgctgagcaaggatgagagcacagccctgcagtggcccagcgagctgctgatcttcaccaaggccgagcccagcatctcctacagctgcaaccccctgtactttgacttcaagctgagcaggaacaaggatgcccggaccaagggcacagagaagcccaaggacatcggcagcagcagcaaggaccacctgcagggcctggaccccggggagcccaacaagagcaaggaggtgggcggggagaagatcgtgcgcagcagcggcggccgcatggatgccccagccagcggcagcgcctgcagcggcctgaacaagcaggagcccggcggcagccacggcagcgagacagaggacaccggccgcagcctgcccagcaagaaggagaggtctgggaagagccaccgccacaagaagaagaagaagcacaagaagagcagcaagcacaagaggaagcacaaggctgacacagaggagaagagcagcaaggccgagagcggggagaagagcaagaagaggaagaagaggaagaggaagaagaacaagagcagcgccccagctgacagcgagcggggccccaagccagagcccccaggcagcggcagccctgcccccccaagaagaagaagaagagcccaggatgacagccagaggaggagcctgcctgctgaggagggcagcagcggcaagaaggatgagggcggcggcggcagcagcagccaggaccatggaggcaggaagcacaagggggagctgccccccagcagctgccagaggagagctggcaccaagaggagcagccgcagcagccacaggagccagcccagcagtggagatgaggacagtgatgatgccagcagccaccggctgcaccagaagagccccagccagtacagcgaggaggaggaggaggaggacagcggcagcgagcacagccgcagccgcagccgcagcggccgccgccacagcagccacaggagcagcagaagaagctacagcagcagcagtgatgccagcagtgaccagagctgctacagccggcagaggagctacagtgatgacagctacagcgactacagcgacaggagccgccgccacagcaagaggagccatgacagtgatgacagcgactatgccagcagcaagcacaggagcaagaggcacaagtacagcagcagtgatgatgactacagcctgagctgcagccagagccgcagccgcagccgcagccacacccgggagaggagccgcagccggggccgcagccgcagcagcagctgcagccgcagccgcagcaagaggaggagccgcagcaccacagcccacagctggcagaggagccgcagctacagccgggacaggagccgcagcaccaggagccccagccagaggagcggcagcaggaagaggtcctggggccacgagagccctgaggagcggcacagcggccggcgggacttcatccgcagcaagatctaccgcagccagagcccccactacttccgcagcggccgcggggagggccctgggaagaaggatgatggaagaggagatgacagcaaggccactggaccacccagccagaacagcaacatcggcaccggccggggcagcgagggggactgcagccctgaggacaagaacagcgtgacagccaagctgctgctggagaagatccagagcaggaaggtggagaggaagcccagcgtgtctgaggaggtgcaggccacccccaacaaggccggccccaagctgaaggaccccccccagggctacttcggccccaagctgccccccagcctgggcaacaagcctgtgctgcccctcatcggcaagctgcctgccaccaggaagcccaacaagaagtgtgaggagagcggcctggagcggggggaggagcaggagcagagcgagacagaggagggccccccaggcagcagtgatgccctgtttggccaccagttccccagcgaggagaccaccggccccctgctggaccccccacctgaggagagcaagagcggggaggccacagctgaccaccctgtggcccccctgggcaccccagcccacagcgactgctacccaggggaccccaccatcagccacaactacctgcctgaccccagtgatggagacaccctggagagcctggacagcagcagccagcccggccctgtggagagcagcctgctgcccatcgccccagacctggagcacttccccagctatgccccacccagcggggaccccagcattgagagcacagatggagcagaagatgccagcctggcccccctggagagccagcccatcaccttcaccccagaggagatggagaagtacagcaagctgcagcaggccgcccagcagcacatccagcagcagctgctggccaagcaggtgaaggccttccctgccagcgctgccctggccccagccaccccagccctgcagcccatccacatccagcagcctgccacagccagcgccaccagcatcaccaccgtgcagcacgccatcctgcagcaccacgccgctgctgctgctgctgccatcggcatccacccccacccccacccccagcccctggcccaggtgcaccacatcccccagccccacctgacccccatcagcctgagccacctgacccacagcatcatccctggccacccagccaccttcctggccagccaccccatccacatcatcccagccagcgccatccaccctggccccttcaccttccaccctgtgccccacgccgccctgtaccccaccctgctggcccccaggcctgctgctgctgctgccacagccctgcacctgcaccccctgctgcaccccatcttcagcggccaggacctgcagcacccccccagccacggcacctag

SEQ ID NO: 19736 - DNA, 4509 bp, Artificial Sequence
  derived and/or modified sequence
atggccgaccggttcagccggttcaacgaggaccgggacttccagggaaaccacttcgaccaatacgaagaagggcatctcgaaattgagcaagcatcacttgacaagcccattgagagcgataacattgggcatagattgctgcaaaaacacggctggaagctcggtcaaggactcggcaaatccctccagggaagaaccgaccccatccccattgtggtgaagtacgatgtcatggggatgggaagaatggagatggagcttgattatgccgaggatgcaaccgagcgacgacgcgtcctcgaggttgagaaagaggatacagaggaattgagacagaagtacaaggactatgtcgataaggaaaaggcaatcgctaaagctttggaagacctccgtgcgaacttctactgcgagctctgcgacaagcagtaccagaaacaccaggagttcgataaccatattaatagctatgatcacgcccataagcagcggctgaaggacttgaagcagcgtgaatttgcaagaaatgtgtcatctcggtcccggaaggacgagaagaagcaagagaaggccctccggcggctgcacgagctcgctgaacagaggaagcaggctgaatgcgctcctgggtctggccccatgtttaagccaactaccgtagccgtcgatgaagagggaggcgaggatgataaagatgagagcgcgactaactcaggcactggcgccactgcatcctgtgggctgggctctgagttttcgaccgataagggcggccctttcacggcggtgcagattactaacaccaccggactcgctcaggccccaggcttggcatcgcagggtattagctttggaattaagaacaatctcggaactcccctacagaaattgggtgtgtcattctccttcgccaagaaggccccagtgaaactggaatctatcgcttccgtgttcaaggaccacgcagaagaggggacctctgaggacgggacaaaacccgatgagaaaagcagtgaccaagggctgcagaaagttggtgattccgatgggtcttcgaatctggacgggaagaaggaagatgaagaccctcaggatgggggaagcctagccagtacactgtcaaaactgaagcggatgaaaagagaagagggggccggggccacagagccagagtattaccattatattccacctgcacattgtaaggtgaagcccaacttcccgtttctgctgtttatgcgggcttccgagcagatggacggagacaacaccacacatccaaagaacgcccccgaaagcaagaaaggttcttccccgaaaccaaagagctgcatcaaggcagccgcatctcagggggccgaaaagacagttagcgaggtgtctgagcagcccaaggaaacctctatgaccgagccctcggagcctggctccaaggctgaagccaaaaaggctctaggcggggatgttagcgaccagagcctcgagagtcattctcagaaggtgtcagagacacagatgtgcgagtcaaacagttctaaggagacaagtctcgcgacccctgctggcaaagagagtcaggagggacccaaacatcccaccgggccttttttccccgtgttgagtaaggacgaatcgacagcactccaatggcccagtgaactcctgatctttactaaagcagagccttccatcagctatagttgtaatcctctgtatttcgattttaaactgtcaagaaacaaagatgccagaactaaaggtacggagaaaccaaaggacattgggagcagctctaaagaccatctgcagggtctagatcccggagagcctaataaatctaaggaagtgggcggagaaaaaatcgttcggtcatcagggggacggatggacgctcctgctagtggctctgcatgttctgggctgaataaacaggaacccggaggatcccatgggtctgagacagaggacacaggcaggagcctcccttccaagaaagaaaggtcggggaagagccatcgccataagaagaagaaaaaacacaagaagagcagtaaacacaagagaaagcataaggccgacactgaagagaaaagttccaaggcggaatctggggagaagtctaaaaagcggaaaaagcgtaagagaaaaaaaaataagagtagcgctccggccgactccgagcggggccccaagcctgaaccccctgggagtggatccccagcgcctccacgtagacgcaggagagcccaagatgattcccaaaggcggagtctccccgccgaggagggctcatccggcaagaaagacgagggtggcggcggatcaagtagtcaggatcacggaggccggaaacacaagggggagttgccccccagctcctgccaaaggcgagccggaaccaaaagaagctctcgatcaagccacagatctcagccctcttccggcgacgaagattccgacgatgcctcatcccatcgtcttcaccaaaaatcaccgagccagtattccgaagaggaagaggaagaggacagtgggtcagagcattccaggtcgagatctaggtctgggcgtagacactcctcccaccggagctccagacggtcttactcctcttcttcggacgcttccagcgatcagagctgctattctaggcagagatcatattcagatgattcctattcagactatagcgacagatcccggcgtcactccaaacgcagtcacgactccgacgactccgactacgcaagctcgaaacacaggtccaaacggcataagtatagcagttctgatgacgactactcactaagctgcagtcaatcccgttcacgctcccgcagtcacacacgtgagcggtcaagaagtaggggtcggagccgatcttcctcatgctctagatccagaagtaaacgtagaagtagaagtaccacagcccatagctggcagcggtcgagaagttactcgcgtgataggtctaggtctacgagatcgccgtcacaaagatcaggatctaggaagcggagctgggggcacgagtctcccgaagagagacactccggtcgtagagatttcattcgctcaaaaatatacaggagccagtctccacattactttcggagcggccgcggcgaaggccccgggaagaaggatgacgggcggggagacgactcaaaagccaccgggcctccatctcagaatagcaacatcggcacaggacgtggcagcgaaggcgattgttcccctgaggataaaaattccgtcacagctaagttgctgctcgagaagatccagtcgagaaaggtggagcgcaagcccagcgtctctgaggaagtccaggcaacgcctaataaagcagggccaaagctcaaagaccctcctcagggatacttcggccctaagctgccaccttcactgggaaataagccagtactcccccttatcgggaaacttcctgccactcgcaaaccaaacaagaaatgcgaggaatctggcctggagagaggggaagaacaggagcagtctgaaacagaagaggggcctccaggaagctccgacgcgttgttcggacaccagtttccctcagaagagaccacgggaccgctgctggaccctccacctgaagagagtaaaagtggggaagctacagctgatcaccccgtggcccccctgggtacacccgcacactcagattgctaccccggagacccaaccatctcacacaactaccttcctgaccccagcgatggcgacacactggagagcctggattcatctagtcagccaggcccagttgaatcaagcctactgcctatcgctcctgacttggagcattttcccagctacgcaccccccagcggtgaccctagcatcgagagcaccgacggtgcggaggatgcaagcctagcccctctcgaaagccaacccatcacgtttactccggaggaaatggagaaatactccaagctccagcaggcggctcagcagcacattcagcagcagctactagcaaagcaggtgaaagcgtttccagccagtgcagcactagctccagccactcccgcactgcagccaatccacattcaacagcctgctacagcatctgctacatcgataaccacagttcaacacgccatattacagcaccacgcggcggccgcggcggctgctattgggattcacccccatccacacccacagccactggcacaggtgcaccatataccacagcctcacttgacgcctattagcctgtctcacctcacccacagcataatcccagggcaccccgccacattcttagcctcgcacccaattcatatcattcctgcctctgctatccaccccgggccctttacattccaccctgtgccccatgctgccctgtatccaacactgctggcaccacgaccagctgcagcagcagccaccgctctgcacctacacccattgctccatccaatttttagtgggcaagacctccaacatcctccctcccacggaacatag

SEQ ID NO: 19737 - DNA, 4509 bp, Artificial Sequence
  derived and/or modified sequence
atggccgaccggttcagccggttcaacgaggaccgggacttccaggggaaccatttcgatcagtacgaagaagggcacctcgagattgagcaggcctctctggacaagcccatagagtctgacaacatcggccaccgcctactccaaaagcatgggtggaagctgggacagggcctgggtaagtcattgcagggacggaccgaccccatcccaatcgtggtgaagtatgacgtcatgggcatggggaggatggagatggagctagactatgcggaggatgccactgagaggaggcgtgtcctagaagtggagaaagaggatacggaagaacttcggcaaaagtacaaagactatgtagataaagagaaggccatcgctaaggctctcgaggatttgcgtgccaatttctactgcgagctgtgcgataagcaatatcagaagcaccaggaattcgataaccacatcaattcttacgatcatgcgcacaagcagcgactgaaagatctgaaacagcgcgagtttgctaggaacgtcagttcaaggtctcgcaaggacgagaagaaacaagaaaaagccctgaggcgcttgcatgagctggctgaacagcggaaacaggccgagtgcgcaccagggtcaggtccaatgttcaaacctacaacagtcgctgttgacgaagaagggggtgaggacgacaaggatgagtccgccaccaacagcggaacgggtgccactgcatcgtgtggtcttggttccgagttctcaactgataaaggtggtccattcacagccgtgcaaatcacaaacaccacggggctagcacaggcacctggactcgcctcccaggggatttcgttcgggatcaagaataacctggggaccccactccagaagctcggggtgtccttctccttcgccaagaaggctccagtgaagctcgaatctatcgcgagtgtgttcaaggatcatgcagaggagggaacctccgaggatgggaccaagccagatgagaagtcctccgaccagggactgcagaaagtgggcgattcagatggatcctccaacctggacgggaagaaagaggatgaggatccccaagatggcggctccctggcttcaaccctgtccaagctgaagaggatgaagagagaagagggcgctggcgctacagagccagaatattaccactacatcccacccgctcattgcaaggttaagccaaatttccctttcctgcttttcatgcgagcttcggagcaaatggatggtgataatactacacacccaaagaatgccccagagtctaaaaaggggagtagtcctaagcccaagtcatgtatcaaggcagccgcgagtcagggcgccgagaagactgtgtccgaggtgtccgagcagccgaaggaaactagcatgacagagccttccgagcccgggagcaaggccgaggccaagaaagcccttgggggagatgtgtcagatcaaagcctggaaagtcattctcagaaggtttccgaaacacagatgtgcgaatcaaacagcagcaaggagacgtctctggccacccccgctggcaaagagagccaggagggtcccaagcaccctactggaccattcttccctgtgctctcaaaggatgaaagcaccgcactgcagtggccctcggagctactcatcttcaccaaggccgaaccttctattagttactcgtgcaacccgctttatttcgacttcaagttaagtcgaaacaaagatgctagaactaaaggcacagaaaaaccaaaggatatcggcagtagctctaaagaccacttacagggactggacccgggcgagccaaataaatctaaagaggtgggaggagagaaaattgtgcgatctagcggcggacgtatggacgccccggcatctgggagcgcctgctctgggctgaataagcaggaacccggtggatcccacggctccgagaccgaggacactgggcggtccctcccctcaaagaaggagcgaagcggaaagtcccataggcacaagaagaagaaaaaacataagaagagtagtaagcacaagagaaagcacaaagccgatacagaagaaaaatcctcaaaggctgagagcggcgaaaaaagtaaaaaacgcaaaaagcggaagagaaagaaaaataaatcatcagccccagcagactcggagcgcggccccaaacccgagccccccggcagcggtagccctgcacctccacgccgtcggagaagggctcaggacgacagccagaggagaagcctgcccgcggaagaaggcagctccggcaagaaagatgagggcggcggaggcagctcatctcaggatcatggtggccggaagcacaaaggggagctgcccccctcatcgtgccagcgtagggcaggcacaaagaggagctctcggtcctcgcaccgaagccagccaagtagcggtgacgaggacagcgacgacgcctcctctcatagactccatcagaaatctccatcccagtactcggaagaggaggaagaggaagattccggcagtgaacacagccgctctagatctcgctccggccgccggcactcctcacatagatcctctagaagatcttatagctcaagtagtgatgcctctagtgatcaatcttgttactccaggcagaggtcctactctgacgattcttattctgattattcggataggtctaggcggcatagtaagcgctctcacgactctgacgactccgactacgcgagctctaagcaccgaagcaaacgacacaaatactcttcatccgatgacgattacagcctgagctgtagtcagtccaggtcccgttcacggtcccacacaagggagcgtagccggagtagaggtcgttctagaagctcttcttgcagcaggtcccgttctaaacgcaggagtaggagcacgacagcccattcatggcagaggagccggtcctacagccgggataggtcccgcagtacacggagcccgagtcagcggagcggatcccggaagaggagctgggggcatgagagtccggaagagagacacagcgggagacgagatttcattaggtcaaagatttacagatcgcaaagcccacactattttcggagcggccgaggggaaggtcctgggaagaaagatgacggacgcggcgacgacagcaaggcaaccggacccccttctcagaactccaatattggaactgggaggggaagcgagggggattgctcccctgaggacaagaactccgtcacagccaagttgctgctcgaaaagatccagagccggaaggtagagcgtaagcccagtgtcagtgaggaagtccaggctacacccaataaagccggcccgaagctgaaggatcccccccagggatattttgggcccaagctgccgccgagccttggaaacaagccagtgctccctctgataggaaagctgccagccactagaaagccaaataagaaatgtgaagagagtgggctggaaaggggcgaggagcaagaacaaagcgaaacagaggagggtcctccaggcagttctgacgccctattcgggcaccagtttcccagcgaggaaacgacaggtcctctgctggatcccccccctgaggagagcaagagcggggaggcaaccgccgatcatcccgtcgccccattagggacccctgcccacagcgactgttacccaggtgaccctactataagccacaattacctgcccgacccaagcgacggggacactctggagtcccttgacagttcctcccagccagggccagtggagagcagcctattgccaattgctcccgacttagagcacttcccgtcatatgcccccccatccggagacccctctattgagagcacagacggagcagaggacgctagtctggctcccctggaaagtcaaccgataacattcacccccgaagaaatggagaaatacagtaaattgcagcaggcggcccaacagcacattcagcaacagctcctagcaaaacaggtcaaggcgtttccggcaagcgctgccttggcccctgcgacccccgctctccaaccaatacacatccagcaaccggcaacagctagcgcaacctccattactaccgtccagcacgccatcttgcagcatcatgccgccgctgccgcagccgccattgggattcatccacacccccacccccagcccctggctcaggtccatcacattcctcagccccacctcacacctatttcactttcccacctgacgcacagcattattcccggccaccccgctacttttctggcctcccacccaattcacataatccccgcctctgcgatacacccaggtccttttacctttcatcccgttccgcacgctgcactatatccaactctgcttgcacccagaccagccgcggctgccgcaaccgcactgcacctccatccgctcctgcaccccatttttagcggacaggatcttcagcatcctccatctcacgggacttag

SEQ ID NO: 19738 - DNA, 4509 bp, Artificial Sequence
  derived and/or modified sequence
atggctgaccggttttccaggttcaacgaagaccgggatttccaggggaaccatttcgatcaatatgaagagggacacctggagatcgagcaggcttcactggataaacccattgagtccgacaatatcggccatcgtctgcttcagaaacatgggtggaagctcgggcagggccttggtaaatcactccaagggagaactgaccccattcctattgtggtgaaatatgacgtgatgggaatgggcagaatggaaatggagcttgattacgctgaggatgccaccgaacgccgacgcgtccttgaagtggagaaggaagacaccgaggaactcaggcagaagtacaaggattatgtcgacaaggagaaagcaatcgctaaagcgctggaagacctgagagctaacttttactgcgaattgtgtgataaacagtatcaaaagcaccaggagttcgataaccacatcaattcatacgaccatgctcacaaacagcgcctgaaggacctgaaacagagagagttcgcacgcaatgtaagctctcgcagtaggaaagatgagaaaaagcaagagaaagccctgcgacggctccatgagctggccgaacaaaggaaacaagctgagtgcgctccaggctcaggcccaatgttcaaacctacaactgtggccgtggacgaggagggcggagaagatgacaaagatgaaagcgccaccaattctggaactggagccacagcctcatgtgggctcggttcagagtttagtaccgacaagggaggaccgttcactgctgttcagatcacaaacacaacggggttagcccaggcacctggcctagcctcccagggcatctcctttgggattaagaacaacctcggaacccctctgcagaaactaggcgtctcctttagctttgctaaaaaggcccctgtcaaactcgagagcattgcctctgtatttaaagatcatgccgaagagggcacatcagaggatgggaccaaaccggatgagaaaagttctgaccagggtctgcagaaggtgggggacagcgatggctcgtctaatcttgacggcaaaaaagaggatgaggacccacaagatggcggttcattggctagtacactgtccaaactcaagcgtatgaaaagagaggagggggctggcgcaaccgaacctgagtactaccactacattccacctgcccattgcaaggttaagccgaactttccttttctcttgttcatgcgggcttccgagcagatggatggtgataacacgactcatccaaagaacgctcccgaatcaaagaagggatcctcccctaagcccaaatcttgcatcaaggccgcagcaagccagggagccgagaaaaccgtgtcagaggtttcagagcaacctaaggaaacatccatgactgagccctcggaacccggatccaaagccgaggcaaagaaggccctgggtggcgatgtgagtgatcagagtttagaaagtcacagccagaaggtctctgagactcagatgtgcgaatcgaatagttcaaaggaaacctcattggctaccccagcaggtaaggagtcacaagagggccctaagcacccaactggtccgttttttcctgtcttgtccaaggacgagagcaccgctctccaatggccttccgagttgttgatttttacgaaagcagaaccttctatctcctactcatgtaaccctctgtatttcgatttcaagctaagtcgaaacaaggatgcccgaaccaagggcaccgagaagccaaaagacatcgggtcaagctctaaagaccaccttcaggggctggatcctggagaaccaaataagtccaaggaagtaggcggtgagaaaattgtcaggtcgtctggcggtcggatggacgctcctgctagcggctcagcgtgctcgggccttaataagcaggagcccggaggatcccacggctctgagacagaggatacagggagatccctgccttccaagaaggaacgttctggcaaaagccacaggcacaagaaaaagaagaagcataagaaatccagtaaacacaaacggaaacataaagccgatacagaggagaagtcctcaaaagccgaaagcggagagaaatcaaaaaagaggaaaaaaaggaagcgaaaaaagaataagagctcagcccctgccgattcagaaaggggacccaagcctgagcctcctggatcaggatcgcccgcaccccctaggcgcaggcgccgtgctcaggacgactctcagagacgctctcttccagcggaggagggatcatcggggaaaaaagatgaaggaggtgggggatccagttctcaggatcacgggggaagaaaacacaaaggggaactccctcccagttcctgccagcgtagagcaggaaccaaacgctcttccaggtcctcacatcggtcccagccttcttccggagatgaggatagtgatgatgccagtagtcaccgactccaccaaaaatctccaagtcagtattctgaggaagaagaggaggaggatagcgggtctgagcactcaaggtcacggagcaggagtggcaggaggcacagcagccatagaagctctaggcggagctactctagctcctccgacgcaagtagcgatcagagctgctacagccgccagcggagttactcagacgacagctatagcgattacagcgatagatcgcgtcggcattcaaagcgttcccatgattcggacgactccgactacgccagttccaagcacaggagtaaacggcacaagtactccagctccgacgatgattattcactatcatgcagtcagtccaggtcacgcagtcgctcacacacaagggagaggagtagatccagggggcgatctcgcagctccagctgttctcgcagccgaagtaagcgcagaagccgctccactaccgcacatagctggcagaggtctaggtcatattctcgggaccgctccaggagtacccgatcgcctagccagaggtcaggctcccgtaaaagaagctggggccatgagtctcctgaagagaggcactcaggcagaagagattttattagatctaagatctataggagccagagccctcactactttaggagtggtagaggcgagggacctggtaaaaaagatgatggcaggggagatgactctaaagccacagggccaccatctcagaactccaacatcggaaccgggagaggatcagaaggagattgttcaccagaagacaagaactctgtcacagccaagcttctcctcgaaaaaatacagtctagaaaggtggaacgcaagccctctgtcagtgaagaggtgcaagccactcctaacaaagcaggcccaaaattgaaagaccctccacaagggtatttcggacccaaactgccacctagcttgggaaacaaacctgttctccccctcatcgggaagctaccagccactcgaaagccaaacaaaaaatgtgaggagtccggcttggaacggggtgaggagcaggagcagtctgaaacagaagagggcccacccggaagctcagacgccctgttcggtcatcaattcccatctgaggaaaccactggcccattgttggacccccctcctgaggagtctaaatctggcgaagctacagctgatcatcctgtggccccactgggaaccccggctcacagcgactgctatcccggagatcccacaatttcccacaattacctcccagacccatctgatggggataccttagaaagtctggacagcagctcccaaccgggacccgtggagtcttccctgcttccaatcgctcctgatctggagcactttcccagctatgctcccccttcgggcgacccttcaattgaaagtaccgatggggcagaagatgcctctctggctcctcttgagtcccagcccataacgttcaccccagaggagatggagaagtacagtaagctgcaacaggctgcccagcagcatatacagcagcaacttttggcaaaacaggttaaagctttccctgccagcgccgcactcgccccagcgactccagccctgcaaccaatccacatccagcagcccgctaccgcgtctgcaaccagcattaccacagtacagcacgctatactgcagcaccacgcagccgctgcggctgccgcaatcggtatccacccacatccacaccctcagccactcgctcaggtgcatcacatcccccagccacacttaacgcccattagtttgtctcatttaacgcattcaatcattcccggacatcctgcaacttttctcgcctcacatcctatccatataattcccgcttcggccatccacccagggccatttaccttccaccccgttccccacgccgcattgtatcccactctgctcgctccccgaccagccgcagctgctgctaccgcgcttcatctgcatcctctgttgcaccccattttttctggccaggatctgcagcaccccccatcccacggcacgtag

SEQ ID NO: 19739 - DNA, 4509 bp, Artificial Sequence
  derived and/or modified sequence
atggcagacagatttagtagattcaacgaagaccgagacttccagggcaatcatttcgaccaatatgaggaaggacacctcgaaatcgaacaggcttccctggataagcctattgaatcagacaacatcggacataggcttctgcaaaagcatggttggaagctcggacaaggtctgggcaagtccttgcagggccgtaccgatcctattcctatcgtggtcaagtatgacgtgatgggcatgggaaggatggagatggagcttgattacgctgaagatgccacagagcggaggcgggtgctggaagtggagaaagaggatacggaggagctgcggcagaaatataaagattatgtagataaggagaaagcaattgctaaggcacttgaggacctgcgggcaaacttttactgcgagctttgtgataagcagtaccagaagcaccaggagtttgataaccatatcaactcgtacgaccatgcccacaagcagcgcttaaaggacctgaagcagagggagttcgccagaaacgtaagtagtagatcaagaaaggacgagaaaaaacaggagaaagcacttcggagactgcacgagctggctgagcagcgtaaacaagccgaatgtgctcccggatcgggccctatgttcaagccaacaaccgtggccgtagatgaggagggaggcgaggacgacaaagatgaatccgcaactaacagcggcacaggtgctactgcctcctgcggacttgggtctgagttttccactgacaagggcggtccttttactgctgtgcagattaccaacaccacgggcctcgcccaggcgcctggattggcctcccagggaatttcattcggcattaaaaacaatctcggcaccccattgcagaaactcggggtctccttttcattcgctaagaaggctcccgtgaaactcgagagtatcgcaagcgtatttaaggatcatgctgaagaaggtacctccgaggacggcacgaaacctgatgaaaagtctagcgatcagggcctccagaaagtgggcgattctgacggctcttcaaatcttgatggcaagaaggaggatgaagacccgcaggatggtggcagtctcgcctcaaccctaagcaaactcaagcgcatgaagcgcgaggagggagccggtgccaccgagcctgaatactatcactatatcccacccgctcattgtaaggtgaaaccgaactttcccttcttgctcttcatgcgcgcttccgagcagatggatggcgataatacgacgcaccccaagaatgctcctgaatccaagaaggggtccagtcccaagccgaagtcgtgtatcaaggcagccgctagccagggggctgaaaaaactgtcagcgaggtgtccgagcaaccgaaagaaactagcatgaccgaacccagtgaaccaggcagcaaagccgaggctaagaaggctctgggcggtgatgtcagtgatcagagcttggaaagccacagtcagaaggtctccgagactcagatgtgtgagagcaactcatctaaagagacttcactcgccactcccgcaggtaaggagagtcaggagggccctaagcacccaactggcccattcttccccgtcctgagtaaagacgagagcacggccctccaatggccctccgagctgctaatctttacaaaggcagaacctagcatcagctattcctgtaacccgctgtattttgatttcaagctttcaagaaacaaagatgccagaactaaaggtaccgagaagcccaaggacatcggaagttcgtccaaggatcatctgcaaggcctggaccctggagagcctaacaagagtaaggaggtgggcggtgagaaaatagtaagatctagcggtggccgtatggacgcacctgcttctggctccgcttgctccggtttgaataagcaggagccgggtggaagccacggctcggagactgaagataccggacgctctctcccttccaagaaagaacgttctggcaagagccaccgtcacaagaagaagaagaagcacaaaaagtctagcaaacacaagcgaaagcataaagctgacacagaagaaaagagctctaaagccgaatctggcgagaaatctaagaagcgaaagaaacggaagcggaagaagaacaaatctagcgccccagccgattcagagcgcggtccgaagcccgaaccaccaggatctggaagtccagctccacctcgccgtagacggcgagcccaggacgattctcaacggaggtctctcccagctgaggaaggcagctctggcaagaaggatgaagggggaggcggtagttctagccaggatcatggagggagaaaacacaagggtgagctgccgcctagttcatgccagaggagagctgggaccaagagatctagtcggtcctcccacaggagccagccttcatcgggcgacgaagactcggatgacgcatcctcacatcgattgcatcagaaatcccccagtcagtatagcgaagaagaggaagaggaagactctggctccgagcatagcagatcacggagccgatccgggaggagacatagcagccaccgtagctccaggaggagttactcttcttctagcgacgcttcaagcgatcagagctgttattcacgtcagagatcatatagcgatgactcctattccgattacagcgaccggtctcgacgtcactctaaacggtctcacgatagcgacgattccgactatgccagcagtaaacaccggagcaagcgccataaatatagctcaagcgacgatgactattccctgagctgtagccaatcaagaagccgcagtcgttctcatacacgcgagagaagcaggtcccgtggaagatctcgctcatcctcctgctccagaagccggagtaagcggagatccaggagcaccaccgctcattcctggcaacggagccgcagctatagcagggatcgaagcaggtctaccaggtctccatcccaacgcagtggctctcgtaaaagatcatggggacacgagagtcccgaggagcggcattccggcagaagagacttcattcgctctaaaatttacaggtctcagtctccacattattttagatccggaagaggagagggtcctggcaagaaagacgatgggagaggtgacgacagcaaagctacaggcccaccaagccagaacagcaacatcgggaccgggaggggtagtgagggcgactgttcacccgaagacaaaaactcagtgacggcaaagttgctcctggagaaaattcagtcaagaaaggttgagagaaagcctagtgtgagtgaggaggtccaggcgacacccaacaaggctggacccaaactgaaagaccctccacaagggtatttcggcccaaagttgcccccttccttgggtaacaagccagttctgccattaatagggaagctgccagcaactcgcaaacccaacaagaaatgcgaggaatccggactggagagaggagaagagcaggagcagagcgaaaccgaggaaggtcctcctggcagctcagatgctctgtttggacatcagttcccgtcggaagaaactaccggtccactgttggatcccccaccggaggagtcaaagtcgggcgaagccaccgccgaccacccggtggctccactgggcactccagctcacagcgactgttaccccggagacccgactatttcccacaactacctgccggatccaagtgacggcgatacgctcgagagtctggactcaagctcacagcccggacccgttgagtcgagccttctgcctatagcacccgatctcgaacacttccccagctatgctccaccctctggcgatccctccattgagagcacagacggcgctgaggacgccagcctggctccacttgaaagccaacccattaccttcacaccagaggaaatggagaagtactccaagttacagcaagcggctcagcagcatatccagcagcagttgctagcaaagcaggttaaggctttcccagcttcagccgcactggcgccagcaactcccgctctgcaacctatccacatccagcagccagctaccgcaagtgccaccagtattacgacagtacagcacgccattctccagcaccacgcagccgctgccgcagctgccataggcattcaccctcacccacaccctcagccgctggcgcaggtacaccacatccctcagccgcatctgaccccaatcagcctgtcccacctgacccattccataatcccaggccaccccgctacttttctggcaagccatccaatacacatcatccccgctagcgcaatccatcctggcccatttactttccaccctgtgccacacgctgcactataccccactctgctggctccgcgtcccgctgctgccgcagcgactgcactgcatctacatcctctgctgcacccaatcttttctggccaagatctgcagcatcctccaagccacggcacctag

SEQ ID NO: 19740 - DNA, 4509 bp, Artificial Sequence
  derived and/or modified sequence
atggccgacagattcagcagattcaacgaggacagagacttccagggcaaccacttcgaccagtacgaggagggccacctggagatcgagcaggccagcctggacaagcccatcgagagcgacaacatcggccacagactgctgcagaagcacggctggaagctgggccagggcctgggcaagagcctgcagggcagaaccgaccccatccccatcgtggtgaagtacgacgtgatgggcatgggcagaatggagatggagctggactacgccgaggacgccaccgagagaagaagagtgctggaggtggagaaggaggacaccgaggagctgagacagaagtacaaggactacgtggacaaggagaaggccatcgccaaggccctggaggacctgagagccaacttctactgcgagctgtgcgacaagcagtaccagaagcaccaggagttcgacaaccacatcaacagctacgaccacgcccacaagcagagactgaaggacctgaagcagagagagttcgccagaaacgtgagcagcagaagcagaaaggacgagaagaagcaggagaaggccctgagaagactgcacgagctggccgagcagagaaagcaggccgagtgcgcccccggcagcggccccatgttcaagcccaccaccgtggccgtggacgaggagggcggcgaggacgacaaggacgagagcgccaccaacagcggcaccggcgccaccgccagctgcggcctgggcagcgagttcagcaccgacaagggcggccccttcaccgccgtgcagatcaccaacaccaccggcctggcccaggcccccggcctggccagccagggcatcagcttcggcatcaagaacaacctgggcacccccctgcagaagctgggcgtgagcttcagcttcgccaagaaggcccccgtgaagctggagagcatcgccagcgtgttcaaggaccacgccgaggagggcaccagcgaggacggcaccaagcccgacgagaagagcagcgaccagggcctgcagaaggtgggcgacagcgacggcagcagcaacctggacggcaagaaggaggacgaggacccccaggacggcggcagcctggccagcaccctgagcaagctgaagagaatgaagagagaggagggcgccggcgccaccgagcccgagtactaccactacatcccccccgcccactgcaaggtgaagcccaacttccccttcctgctgttcatgagagccagcgagcagatggacggcgacaacaccacccaccccaagaacgcccccgagagcaagaagggcagcagccccaagcccaagagctgcatcaaggccgccgccagccagggcgccgagaagaccgtgagcgaggtgagcgagcagcccaaggagaccagcatgaccgagcccagcgagcccggcagcaaggccgaggccaagaaggccctgggcggcgacgtgagcgaccagagcctggagagccacagccagaaggtgagcgagacccagatgtgcgagagcaacagcagcaaggagaccagcctggccacccccgccggcaaggagagccaggagggccccaagcaccccaccggccccttcttccccgtgctgagcaaggacgagagcaccgccctgcagtggcccagcgagctgctgatcttcaccaaggccgagcccagcatcagctacagctgcaaccccctgtacttcgacttcaagctgagcagaaacaaggacgccagaaccaagggcaccgagaagcccaaggacatcggcagcagcagcaaggaccacctgcagggcctggaccccggcgagcccaacaagagcaaggaggtgggcggcgagaagatcgtgagaagcagcggcggcagaatggacgcccccgccagcggcagcgcctgcagcggcctgaacaagcaggagcccggcggcagccacggcagcgagaccgaggacaccggcagaagcctgcccagcaagaaggagagaagcggcaagagccacagacacaagaagaagaagaagcacaagaagagcagcaagcacaagagaaagcacaaggccgacaccgaggagaagagcagcaaggccgagagcggcgagaagagcaagaagagaaagaagagaaagagaaagaagaacaagagcagcgcccccgccgacagcgagagaggccccaagcccgagccccccggcagcggcagccccgccccccccagaagaagaagaagagcccaggacgacagccagagaagaagcctgcccgccgaggagggcagcagcggcaagaaggacgagggcggcggcggcagcagcagccaggaccacggcggcagaaagcacaagggcgagctgccccccagcagctgccagagaagagccggcaccaagagaagcagcagaagcagccacagaagccagcccagcagcggcgacgaggacagcgacgacgccagcagccacagactgcaccagaagagccccagccagtacagcgaggaggaggaggaggaggacagcggcagcgagcacagcagaagcagaagcagaagcggcagaagacacagcagccacagaagcagcagaagaagctacagcagcagcagcgacgccagcagcgaccagagctgctacagcagacagagaagctacagcgacgacagctacagcgactacagcgacagaagcagaagacacagcaagagaagccacgacagcgacgacagcgactacgccagcagcaagcacagaagcaagagacacaagtacagcagcagcgacgacgactacagcctgagctgcagccagagcagaagcagaagcagaagccacaccagagagagaagcagaagcagaggcagaagcagaagcagcagctgcagcagaagcagaagcaagagaagaagcagaagcaccaccgcccacagctggcagagaagcagaagctacagcagagacagaagcagaagcaccagaagccccagccagagaagcggcagcagaaagagaagctggggccacgagagccccgaggagagacacagcggcagaagagacttcatcagaagcaagatctacagaagccagagcccccactacttcagaagcggcagaggcgagggccccggcaagaaggacgacggcagaggcgacgacagcaaggccaccggcccccccagccagaacagcaacatcggcaccggcagaggcagcgagggcgactgcagccccgaggacaagaacagcgtgaccgccaagctgctgctggagaagatccagagcagaaaggtggagagaaagcccagcgtgagcgaggaggtgcaggccacccccaacaaggccggccccaagctgaaggaccccccccagggctacttcggccccaagctgccccccagcctgggcaacaagcccgtgctgcccctgatcggcaagctgcccgccaccagaaagcccaacaagaagtgcgaggagagcggcctggagagaggcgaggagcaggagcagagcgagaccgaggagggcccccccggcagcagcgacgccctgttcggccaccagttccccagcgaggagaccaccggccccctgctggaccccccccccgaggagagcaagagcggcgaggccaccgccgaccaccccgtggcccccctgggcacccccgcccacagcgactgctaccccggcgaccccaccatcagccacaactacctgcccgaccccagcgacggcgacaccctggagagcctggacagcagcagccagcccggccccgtggagagcagcctgctgcccatcgcccccgacctggagcacttccccagctacgccccccccagcggcgaccccagcatcgagagcaccgacggcgccgaggacgccagcctggcccccctggagagccagcccatcaccttcacccccgaggagatggagaagtacagcaagctgcagcaggccgcccagcagcacatccagcagcagctgctggccaagcaggtgaaggccttccccgccagcgccgccctggcccccgccacccccgccctgcagcccatccacatccagcagcccgccaccgccagcgccaccagcatcaccaccgtgcagcacgccatcctgcagcaccacgccgccgccgccgccgccgccatcggcatccacccccacccccacccccagcccctggcccaggtgcaccacatcccccagccccacctgacccccatcagcctgagccacctgacccacagcatcatccccggccaccccgccaccttcctggccagccaccccatccacatcatccccgccagcgccatccaccccggccccttcaccttccaccccgtgccccacgccgccctgtaccccaccctgctggcccccagacccgccgccgccgccgccaccgccctgcacctgcaccccctgctgcaccccatcttcagcggccaggacctgcagcacccccccagccacggcacctag

SEQ ID NO: 19741 - protein, 353 aa, Artificial Sequence
  derived and/or modified sequence
MEHTHAHLAANSSLSWWSPGSACGLGFVPVVYYSLLLCLGLPANILTVIILSQLVARRQKSSYNYLLALAAADILVLFFIVFVDFLLEDFILNMQMPQVPDKIIEVLEFSSIHTSIWITVPLTIDRYIAVCHPLKYHTVSYPARTRKVIVSVYITCFLTSIPYYWWPNIWTEDYISTSVHHVLIWIHCFTVYLVPCSIFFILNSIIVYKLRRKSNFRLRGYSTGKTTAILFTITSIFATLWAPRIIMILYHLYGAPIQNRWLVHIMSDIANMLALLNTAINFFLYCFISKRFRTMAAATLKAFFKCQKQPVQFYTNHNFSITSSPWISPANSHCIKMLVYQYDKNGKPIKVSP

SEQ ID NO: 19742 - DNA, 1062 bp, Artificial Sequence
  derived and/or modified sequence
atggagcacacccacgcccacctggccgccaacagcagcctgagctggtggagccccggcagcgcctgcggcctgggcttcgtgcccgtggtgtactacagcctgctgctgtgcctgggcctgcccgccaacatcctgaccgtgatcatcctgagccagctggtggccagaagacagaagagcagctacaactacctgctggccctggccgccgccgacatcctggtgctgttcttcatcgtgttcgtggacttcctgctggaggacttcatcctgaacatgcagatgccccaggtgcccgacaagatcatcgaggtgctggagttcagcagcatccacaccagcatctggatcaccgtgcccctgaccatcgacagatacatcgccgtgtgccaccccctgaagtaccacaccgtgagctaccccgccagaaccagaaaggtgatcgtgagcgtgtacatcacctgcttcctgaccagcatcccctactactggtggcccaacatctggaccgaggactacatcagcaccagcgtgcaccacgtgctgatctggatccactgcttcaccgtgtacctggtgccctgcagcatcttcttcatcctgaacagcatcatcgtgtacaagctgagaagaaagagcaacttcagactgagaggctacagcaccggcaagaccaccgccatcctgttcaccatcaccagcatcttcgccaccctgtgggcccccagaatcatcatgatcctgtaccacctgtacggcgcccccatccagaacagatggctggtgcacatcatgagcgacatcgccaacatgctggccctgctgaacaccgccatcaacttcttcctgtactgcttcatcagcaagagattcagaaccatggccgccgccaccctgaaggccttcttcaagtgccagaagcagcccgtgcagttctacaccaaccacaacttcagcatcaccagcagcccctggatcagccccgccaacagccactgcatcaagatgctggtgtaccagtacgacaagaacggcaagcccatcaaggtgagcccctag

SEQ ID NO: 19743 - DNA, 1281 bp, Artificial Sequence
  derived and/or modified sequence
atcacggccaagggtaggagccagtcctgcggggagagaggcgctgctgctccagctgccgctgcctccgccgccgccaccaccgagccggcgaccagagtcgggctggcaggccgggcgcgaagcggcaaggggagcgaggggcgcgctcatggagcacacgcacgcccacctcgcagccaacagctcgctgtcttggtggtcccccggctcggcctgcggcttgggtttcgtgcccgtggtctactacagcctcttgctgtgcctcggtttaccagcaaatatcttgacagtgatcatcctctcccagctggtggcaagaagacagaagtcctcctacaactatctcttggcactcgctgctgccgacatcttggtcctctttttcatagtgtttgtggacttcctgttggaagatttcatcttgaacatgcagatgcctcaggtccccgacaagatcatagaagtgctggaattctcatccatccacacctccatatggattactgtaccgttaaccattgacaggtatatcgctgtctgccacccgctcaagtaccacacggtctcatacccagcccgcacccggaaagtcattgtaagtgtttacatcacctgcttcctgaccagcatcccctattactggtggcccaacatctggactgaagactacatcagcacctctgtgcatcacgtcctcatctggatccactgcttcaccgtctacctggtgccctgctccatcttcttcatcttgaactcaatcattgtgtacaagctcaggaggaagagcaattttcgtctccgtggctactccacggggaagaccaccgccatcttgttcaccattacctccatctttgccacactttgggccccccgcatcatcatgattctttaccacctctatggggcgcccatccagaaccgctggctggtacacatcatgtccgacattgccaacatgctagcccttctgaacacagccatcaacttcttcctctactgcttcatcagcaagcggttccgcaccatggcagccgccacgctcaaggctttcttcaagtgccagaagcaacctgtacagttctacaccaatcataacttttccataacaagtagcccctggatctcgccggcaaactcacactgcatcaagatgctggtgtaccagtatgacaaaaatggaaaacctataaaagtatccccgtgattccataggtgtggcaactactgcctctgtctaatccatttccagatgggaaggtgtcccatcctatg

SEQ ID NO: 19744 - DNA, 1613 bp, Artificial Sequence
  derived and/or modified sequence
gtggagcgggtccgaggtgggaggcgcacagacgggctccgggagcccctcccgaggccccgcgcagcgcgccccgcaccctgcgccccgcgccctgcgggagggctgagccaagactccaggcgggcaggtgcggagcgagcagaggggatcacggccaagggtaggagccagtcctgcggggagagaggcgctgctgctccagctgccgctgcctccgccgccgccaccaccgagccggcgaccagagtcgggctggcaggccgggcgcgaagcggcaaggggagcgaggggcgcgctcatggagcacacgcacgcccacctcgcagccaacagctcgctgtcttggtggtcccccggctcggcctgcggcttgggtttcgtgcccgtggtctactacagcctcttgctgtgcctcggtttaccagcaaatatcttgacagtgatcatcctctcccagctggtggcaagaagacagaagtcctcctacaactatctcttggcactcgctgctgccgacatcttggtcctctttttcatagtgtttgtggacttcctgttggaagatttcatcttgaacatgcagatgcctcaggtccccgacaagatcatagaagtgctggaattctcatccatccacacctccatatggattactgtaccgttaaccattgacaggtatatcgctgtctgccacccgctcaagtaccacacggtctcatacccagcccgcacccggaaagtcattgtaagtgtttacatcacctgcttcctgaccagcatcccctattactggtggcccaacatctggactgaagactacatcagcacctctgtgcatcacgtcctcatctggatccactgcttcaccgtctacctggtgccctgctccatcttcttcatcttgaactcaatcattgtgtacaagctcaggaggaagagcaattttcgtctccgtggctactccacggggaagaccaccgccatcttgttcaccattacctccatctttgccacactttgggccccccgcatcatcatgattctttaccacctctatggggcgcccatccagaaccgctggctggtacacatcatgtccgacattgccaacatgctagcccttctgaacacagccatcaacttcttcctctactgcttcatcagcaagcggttccgcaccatggcagccgccacgctcaaggctttcttcaagtgccagaagcaacctgtacagttctacaccaatcataacttttccataacaagtagcccctggatctcgccggcaaactcacactgcatcaagatgctggtgtaccagtatgacaaaaatggaaaacctataaaagtatccccgtgattccataggtgtggcaactactgcctctgtctaatccatttccagatgggaaggtgtcccatcctatggctgagcagctctccttaagagtgctaatccgatttcctgtctcccgcagactgggcaattctcagactggtagatgagaagagatggaagagaagaaaggagagcatgaagcttgtttttacttatgcatttatttccacagagtcgtaatgacagcaaaagctcctaccagtttgaagat

SEQ ID NO: 19745 - DNA, 1062 bp, Artificial Sequence
  derived and/or modified sequence
atggaacacacccatgcacatctggccgcaaacagctccttgtcctggtggtctcccggtagtgcttgcggcttgggttttgtgcccgtcgtgtactactctctattgctgtgtctcgggttgcctgccaacattcttacagtcataattctgtcacaattggtggcccggaggcagaagagtagttacaactaccttctggctttggctgcggccgacatcttggtcctattcttcattgtgtttgtcgacttcttgctagaggacttcatcctaaacatgcagatgccccaggtcccagacaagattatagaggtgctcgagttcagcagtatacacactagcatctggatcaccgtccctctgaccatcgacagatacattgctgtgtgccacccgctcaagtaccatacggtgagctatcccgcacggactagaaaggtgattgtatcagtgtatataacctgctttttgactagcattccatattactggtggccaaacatatggaccgaagactatattagcactagcgtgcaccacgtgctgatctggattcactgttttaccgtatatctagtcccctgctctatcttttttattctcaattccatcatagtgtacaagcttcgaagaaaaagtaactttcgcttacgtgggtactcaacaggcaaaaccaccgccatcctcttcaccatcaccagcatctttgccacattgtgggcccctcgcattataatgattctctatcatctgtacggagcccccattcaaaaccgatggctggttcacataatgagtgacatcgccaacatgttggctttgctcaacaccgcaataaattttttcttgtattgtttcatctccaagagatttcgcacaatggccgctgccacactcaaggcattctttaaatgtcagaagcaaccagtccagttctacaccaatcataatttctccattacctcgagtccctggatttctcctgcgaactcacactgcattaagatgttggtgtatcagtacgataaaaacggaaaacctatcaaagtctctccgtag

SEQ ID NO: 19746 - DNA, 1062 bp, Artificial Sequence
  derived and/or modified sequence
atggagcacactcacgcccatctcgccgcaaattcgagcctgtcctggtggtctcctgggagcgcttgcggccttggattcgttccagtagtctattactcactgcttctatgtctgggcctgcctgcaaacattttaaccgtcattatcctctcacaacttgttgcccggcgccagaagagttcatataattacctcttagctctggctgccgccgatatccttgtgctgttcttcatagtcttcgtcgatttcctccttgaggacttcatccttaatatgcagatgccccaagttcccgacaagatcattgaggtgctggagttcagctccatccacacttccatctggatcaccgttccactgactatcgacaggtacatcgctgtatgtcatccgctgaagtatcacacggtgtcctaccccgcccgcactcgtaaagtgattgtcagcgtctatattacctgctttctgacttccattccttattactggtggccaaatatctggaccgaagactacattagcactagcgtccatcacgtgctgatctggatccactgtttcaccgtgtatcttgtcccttgttctattttttttatcctgaattctattatcgtgtataaactcagaagaaaaagtaacttcaggctgaggggttacagcactggtaagaccaccgccattctgtttacaattaccagtatctttgcaaccctgtgggctccccgcatcattatgatactgtatcatctctacggcgcccccatccagaatcgctggctcgtacatattatgagtgacatcgcaaacatgctcgccttgctgaataccgccatcaatttcttcctgtactgctttattagtaagcggttccggacgatggccgccgcaaccctgaaggccttcttcaagtgtcagaagcagcccgttcagttctacactaaccataattttagtattacctcttcgccatggatctctcctgctaactcccactgtatcaaaatgctggtttaccagtacgacaagaacggcaaaccaatcaaagtgtccccgtag

SEQ ID NO: 19747 - DNA, 1062 bp, Artificial Sequence
  derived and/or modified sequence
atggagcacacccacgcccacctggccgccaacagcagcctgtcctggtggagccctggcagcgcctgtggcctgggctttgtgcctgtggtgtactacagcctgctgctgtgcctgggcctgcctgccaacatcctgaccgtcatcatcctgagccagctggtggcccggcggcagaagagcagctacaactacctgctggccctggccgctgctgacatcctggtgctcttcttcatcgtgtttgtggacttcctgctggaggacttcatcctgaacatgcagatgccccaggtgcctgacaagatcatcgaggtgctggagttcagcagcatccacaccagcatctggatcaccgtgcccctgaccatcgaccgctacatcgctgtgtgccaccccctgaagtaccacacagtgtcctacccagcccggaccaggaaggtgattgtgtctgtgtacatcacctgcttcctgaccagcatcccctactactggtggcccaacatctggacagaggactacatcagcacctctgtgcaccacgtgctgatctggatccactgcttcaccgtgtacctggtgccctgcagcatcttcttcatcctgaacagcatcatcgtgtacaagctgcggaggaagagcaacttccggctgcggggctacagcacaggcaagaccacagccatcctcttcaccatcaccagcatctttgccaccctgtgggccccccgcatcatcatgatcctgtaccacctgtatggagcccccatccagaaccgctggctggtgcacatcatgtctgacatcgccaacatgctggccctgctgaacacagccatcaacttcttcctgtactgcttcatcagcaagcgcttccgcaccatggctgctgccaccctgaaggccttcttcaagtgccagaagcagcctgtgcagttctacaccaaccacaacttcagcatcaccagcagcccctggatcagccctgccaacagccactgcatcaagatgctggtgtaccagtatgacaagaatggcaagcccatcaaggtgagcccctag

SEQ ID NO: 19748 - DNA, 1062 bp, Artificial Sequence
  derived and/or modified sequence
atggagcacacccacgcccacctggccgccaacagcagcctgagctggtggagtcccgggtctgcttgtggcctgggatttgtgccagtggtgtattactcccttctcctctgcctgggactgcccgcaaatatcctgaccgtcattatcctgagtcagctcgtggcccgcaggcaaaagagcagctacaattatctgcttgccctggctgccgcagatatcttggtgctgttttttattgtgtttgtggattttttactggaagattttatcctgaacatgcaaatgccacaggtgcccgataagattatcgaagtgctcgaattctctagcatccacactagcatttggattacagtgccactcactattgacaggtacatcgccgtctgtcaccccctgaaatatcataccgtgtcgtatcccgcccggacacgcaaggtgatcgtgtcagtatatataacttgctttttaaccagcatcccctattattggtggcctaatatctggaccgaagactacatttccacaagcgttcaccacgtactcatttggatacactgcttcacagtgtaccttgtgccatgctcaatcttctttattttgaatagtattattgtgtataagctacgcagaaagtcaaacttcaggctcagaggctacagtaccggcaaaacgacggcaatacttttcacaatcacttctatatttgccactctgtgggccccccgaattattatgatcctttatcatctgtacggagcacccatccagaacaggtggctggtgcacataatgtccgacatcgccaacatgctcgctttacttaacactgctatcaatttctttctgtattgtttcatatccaagcgatttcgaacaatggcggccgccactctcaaggccttttttaagtgccagaagcaacctgtgcagttttatacaaaccataatttctcaatcacttcatcgccatggatttcaccagccaacagtcactgcatcaagatgctggtgtatcagtacgacaagaacggcaagcccattaaggtgtctccttag

SEQ ID NO: 19749 - DNA, 1062 bp, Artificial Sequence
  derived and/or modified sequence
atggagcacacccacgcccacctggccgccaacagcagcctgagctggtggtcgcccggctccgcctgtgggctggggtttgtacccgtcgtgtactatagtctgttactctgtctgggccttcctgcaaacattttaacggtgatcatcttatcgcagctggtggccaggcgccagaaatcgtcctataactacttgttggcacttgccgcagctgatatcttggtgcttttctttatcgtctttgtagacttcctacttgaagatttcattttaaacatgcagatgccccaggtgccagacaaaataattgaggtgctggagttcagcagtatccacaccagcatttggattacagtgccactaaccatagaccgttacatagcagtgtgccacccgctaaaataccataccgtttcatacccagcaaggaccagaaaagtgatcgtcagtgtctacatcacctgcttcctcacaagcatcccctactactggtggcctaacatttggacagaggactacataagtacatcagtgcaccacgtgcttatatggatccattgctttacggtgtatcttgtaccctgttctatattcttcatcctgaatagcataattgtgtataagctgcgaaggaaaagtaatttccggttgagagggtactctacagggaaaacgaccgcaatcctgttcacaattactagcattttcgcaacactttgggctccacgtattataatgatcttgtaccacttatatggagctcccatacagaatcgatggcttgtacacattatgtcggacatcgccaacatgctggctctgctgaacacagccattaacttctttctgtattgcttcatctctaaacgcttcagaacaatggccgcagcaaccctgaaagcattttttaaatgccagaaacagcccgtgcagttttataccaatcacaacttctccattacctcatcaccttggatctcaccagctaacagccattgtatcaaaatgctcgtgtatcagtatgacaagaatggcaagccgattaaagtcagcccctag

SEQ ID NO: 19750 - DNA, 1062 bp, Artificial Sequence
  derived and/or modified sequence
atggaacatacacatgcccatctggcagctaacagttcgctgtcctggtggtcaccgggaagtgcctgcggactcgggttcgtgcccgtggtgtactattctctccttttgtgcttaggcttgcccgctaatattctgaccgtcatcatactctcccagctagtcgcacgcaggcagaagtctagctataattacctgcttgcccttgccgctgctgacatcctggttctcttcttcatcgtcttcgtggattttctcctggaggacttcatcttgaacatgcaaatgccacaggtgccagataagatcattgaggtgttagaattcagttccatccatacttccatctggataaccgtgcctctcaccattgatcgctatattgccgtgtgccaccctctgaagtatcacactgtctcctaccctgcacgaacgaggaaggtcattgtctccgtttatatcacctgtttcctgacttctatcccatactattggtggcccaatatctggaccgaagactacataagcacaagcgttcatcatgtacttatatggattcactgctttactgtgtacctggtgccatgttcaatcttttttattctgaacagcatcatcgtgtataaactgagacgtaaaagtaacttcagactgcggggatattcaacaggcaaaactacagccatcttgttcacaattacttccattttcgccaccctgtgggcccctagaattattatgatcctgtatcatttgtatggggcaccaattcagaatcgctggttagtgcatataatgagcgacatcgccaatatgctggccctgctcaatactgctatcaatttttttctctactgtttcatttcaaagcggtttcgaactatggctgccgctacattaaaggcgtttttcaaatgccagaaacagcccgtccaattttacaccaaccataatttttcgataacttcctctccgtggatctcaccagcaaatagccattgtattaagatgcttgtgtaccaatatgacaagaacggaaagcctattaaggtatcgccttag

SEQ ID NO: 19751 - DNA, 1062 bp, Artificial Sequence
  derived and/or modified sequence
atggagcacacccatgcacacttggcagcaaatagttcgctgagctggtggagccccggttccgcttgtggactggggttcgtacccgtggtgtattattcgctgctgttgtgtctggggttgcccgctaacatcctaactgtgattatcttgtctcagctggtggcccgacggcaaaaatcctcatacaattacttactagcactcgccgctgccgacatcctggtgctgttcttcattgtcttcgtggatttcttactggaggactttattctgaacatgcagatgccccaggtgcctgataagatcatagaggtactggagttctcttctatccatacttccatatggataactgtgcccctcaccatagaccggtatattgcagtgtgtcatcctcttaaataccatacagtttcctacccggctcgtacacggaaggtgattgtgtccgtgtacataacatgctttctcactagtatcccgtactactggtggcccaatatctggacggaggattacatttctacatcagtccaccacgtgctgatctggattcattgttttaccgtgtatttagtgccttgttcaattttttttatcctgaactctatcattgtatacaagctcagacggaaaagtaatttcagactgcgcggatactcaacagggaagacaacggccattctattcactattacatctattttcgcaacactatgggcacccagaatcatcatgattctatatcacctatatggggcacccatacagaatcggtggctggttcatattatgagcgatatcgctaatatgctcgcattgctgaacaccgccattaatttttttctttattgttttatctccaagcgctttcggacaatggccgcagcaacactgaaagcattcttcaaatgtcagaagcaacccgtgcagttctacaccaaccacaattttagcatcacctcatccccctggatttccccggcaaactctcattgcatcaagatgctagtctatcagtacgacaaaaatggcaaacccattaaggtaagtccatag

SEQ ID NO: 19752 - protein, 214 aa, Artificial Sequence
  derived and/or modified sequence
MRPGGFLGAGQRLSRAMSRCVLEPRPPGKRWMVAGLGNPGLPGTRHSVGMAVLGQLARRLGVAESWTRDRHCAADLALAPLGDAQLVLLRPRRLMNANGRSVARAAELFGLTAEEVYLVHDELDKPLGRLALKLGGSARGHNGVRSCISCLNSNAMPRLRVGIGRPAHPEAVQAHVLGCFSPAEQELLPLLLDRATDLILDHIRERSQGPSLGP

SEQ ID NO: 19753 - DNA, 645 bp, Artificial Sequence
  derived and/or modified sequence
atgagacccggcggcttcctgggcgccggccagagactgagcagagccatgagcagatgcgtgctggagcccagaccccccggcaagagatggatggtggccggcctgggcaaccccggcctgcccggcaccagacacagcgtgggcatggccgtgctgggccagctggccagaagactgggcgtggccgagagctggaccagagacagacactgcgccgccgacctggccctggcccccctgggcgacgcccagctggtgctgctgagacccagaagactgatgaacgccaacggcagaagcgtggccagagccgccgagctgttcggcctgaccgccgaggaggtgtacctggtgcacgacgagctggacaagcccctgggcagactggccctgaagctgggcggcagcgccagaggccacaacggcgtgagaagctgcatcagctgcctgaacagcaacgccatgcccagactgagagtgggcatcggcagacccgcccaccccgaggccgtgcaggcccacgtgctgggctgcttcagccccgccgagcaggagctgctgcccctgctgctggacagagccaccgacctgatcctggaccacatcagagagagaagccagggccccagcctgggcccctag

SEQ ID NO: 19754 - DNA, 645 bp, Artificial Sequence
  derived and/or modified sequence
atgaggccaggcgggtttcttggtgcaggccagcgcctgagccgggcaatgtcccgctgtgtgctggaaccaaggcctcccggcaagcgatggatggtggcggggttagggaacccaggcttacccggaacacgacactcagtcggaatggctgtgttgggccagctggcacgtaggctgggggtagctgagtcttggactagagatcgacattgcgcggccgacctagccctcgctcccttgggtgatgcccagcttgtcctgctgcgtccacggcgcctaatgaacgcaaatgggcgctctgtggcacgcgccgcagaattgttcggcctgaccgccgaagaagtttacctggtccatgacgagttggacaagcctttgggcaggcttgctctcaagctgggtggttccgcacgcggacataacggcgtacgttcatgcattagctgcctgaacagcaatgccatgccacggctgcgagtcgggattggaagacccgcacatccagaagcagtccaggcccacgtgttgggctgtttttctcccgccgagcaggagctgcttcccctcctcctggatcgagctacggatttgattctggatcacatcagggagcggtctcagggcccatcgctgggaccatag

SEQ ID NO: 19755 - DNA, 645 bp, Artificial Sequence
  derived and/or modified sequence
atgcgaccaggaggcttcttgggggccggacaacgcctgagtcgcgctatgtcaagatgcgtgctggagccccggccacccggtaagaggtggatggtggcagggctggggaacccaggcttgcctgggacccggcactcggtgggcatggctgtgctggggcagctcgctcggcggctgggagtcgcagaatcttggacccgggacagacattgtgcagccgacctggccctcgctcctctcggtgacgcgcagctggtactgctgagaccaaggcgccttatgaatgccaatggccggagtgtcgctcgcgccgctgagctgtttggacttacggcggaggaggtgtacctggttcatgacgaactggacaaacctctgggcagacttgcacttaagttgggaggcagtgctcggggacacaatggagtgagatcatgcatctcctgccttaacagtaacgccatgccacgactgcgtgtcggcattggcagaccggctcaccccgaggccgtgcaagctcacgtactggggtgcttctctccagccgaacaggaattgcttcccctgctcctcgatagggccacagatctgatcctcgaccacatccgcgagaggtcacaaggccctagtctgggaccttag

SEQ ID NO: 19756 - DNA, 645 bp, Artificial Sequence
  derived and/or modified sequence
atgaggcctgggggcttcctgggcgccggccagaggctgagccgggccatgagccgctgtgtgctggagccccggcccccaggcaagcgctggatggtggccggcctgggcaaccctggcctgcccggcaccaggcacagcgtgggcatggctgtgctgggccagctggcccggcggctgggcgtggccgagagctggacccgggacagacactgtgccgctgacctggccctggcccccctgggagatgcccagctggtgctgctgcggccccggcggctgatgaatgccaacggccgctctgtggcccgggctgctgagctgtttggcctgacagctgaggaggtgtacctggtgcatgatgagctggacaagcccctgggccgcctggccctgaagctgggcggcagcgcccggggccacaacggggtgcgcagctgcatcagctgcctgaacagcaatgccatgccccggctgcgggtgggcatcggccggcctgcccaccctgaggccgtgcaggcccacgtgctgggctgcttcagccctgctgagcaggagctgctgcccctgctgctggaccgggccacagacctgatcctggaccacatccgggagaggagccagggccccagcctgggcccctag

SEQ ID NO: 19757 - DNA, 645 bp, Artificial Sequence
  derived and/or modified sequence
atgcggcccggcggcttcctgggcgccggccagcggctgagccgggcaatgagccggtgtgtgctggagccacgtccccccgggaaacgctggatggtggctgggctaggcaaccctggactgccaggaactcggcattctgtcggaatggctgtactgggacaattggcgaggcgacttggcgtagcggaatcatggaccagagaccggcactgtgccgctgacttggcactggcgcccttgggagacgctcagctcgttctcctgcggcctcggcgccttatgaacgcgaatgggcgctccgtagctcgggccgccgaactcttcgggttaactgcggaggaagtatacctggtccacgatgagcttgacaagcctttagggagacttgctctgaagctgggtgggagcgcccggggccacaatggcgtgagatcctgtatttcgtgcctgaatagcaacgcaatgcctcggctgcgcgtcggtatcggaaggcccgcacatccagaagcggtccaggctcacgtgttggggtgcttctcaccagccgaacaggagctgcttcctctgctcttagacagggcaaccgacctcatccttgatcacattcgtgaacgctcccagggaccctctctgggaccttag

SEQ ID NO: 19758 - DNA, 645 bp, Artificial Sequence
  derived and/or modified sequence
atgcggcccggcggcttcctgggcgccggccagcggctgagccgggccatgtcccgatgcgtgctggagccaaggcctccgggaaaacgctggatggttgccggactcggcaaccccgggctgcctggaactaggcacagtgttgggatggcagtgctgggccagctggctagacgactgggggtggcagagagctggacaagggacagacactgtgctgccgaccttgcactagcgccgttgggagacgcgcagctcgtcctgttaagaccaaggagactgatgaacgcaaatgggaggagtgtggctagagcagcagagctgttcggattgactgctgaggaagtgtacctcgtacacgatgagctcgataagccccttggcaggcttgccctgaagcttggcggatcagctcggggccacaacggtgtcaggtcgtgcatttcttgtctgaattcgaatgcgatgccacgccttagagtagggatcgggcgacccgctcatcctgaagcagtccaagcccatgtgctgggatgtttcagccctgccgaacaagaactcctgcctctcttattagatagggccactgacctgatcttggatcacatcagagagagatcccaaggcccctccctaggaccctag

SEQ ID NO: 19759 - DNA, 2692 bp, Artificial Sequence
  derived and/or modified sequence
atcttctcctgcagcaggcccatgcgcgtgttggcgccctcgtcctgagggctcagcgccagcgcctgctggtagtccgcctcggcaaaggccaggttgcccagctggaagaagcaatctagggtccggaggcggggatgctttggaacacgtggctggtcccaaagatgtgctgcaggatccctttgggggctggaatcacccatggctttgggatgtcccgtgaggggccctggtcaaccttcagggcatcctagaaccgaaggacagcaagctggagcaggcccccgagacgacccccacccactgacacactccccagcattctgcagggagggaggagaggcggaaatgaggcctggaaggaggcactcccactcggggttccggtggcgctcccagccccattccccttagggacgctccaacctgtccctctgcagtcctgcccttctccctctcctgtggtcaaggtcagggatcagggtcctcatgcttacaacaccgtctgttctcccccagggccttcccagctcccacttccggctactgacaccccaagctttgatgtctccagctcaggcctggtcccaagtctcaggccttgggggtcctacagtcccttgggtaaccttcaggaccctcactccagcaggccacactgagcacctcacctgacttctgccccaggttctcccattttggtgaggtcaccttccccaccagctacccaagccagagacctctgtccaagcagccgccgagccttacaaggatctttcacatgcctggttcttggcatggcggccagggccttccctgagtcggactgctgcccctgcctctcccggccttcaccctttcctgcgaacccagcctcggtctctctgcctggccctctgcctttgcgttagtcttctcccaagcccgcacctcgtccgaatctgtcatgaggccccttccaggaggaccccgaggcctctgccaactacctcgcggccctggccctgacgttgctaggcaccatcaccaggacgcccacaggccccacccctctggccacgcccccgggaaccaagctttttgagccggagggaggtagaaaacttttattagctggagaggttgaggcctacagcggggaaaggacttgccagattttcgccgcaagtcagggccatagcggggggcataacaaggcctcccaaccgaaggtcaagcaagagctccgagcgtcccacacaagtcccgaagggacactgtgacgccgcgctactgaaggcgcctgggttcccggactcggccaccgcctcgccgcttccgcccctcagaagcatggcggccacgtagcccggcccggattggacgttggcggtggacgccaaacagttggcaacacgattggctgctgcggggtgatgacgtcagggggcggtgtcggagtgaatgggggcagcatgaggccgggcggctttttgggcgccggacagcggctgagtagagccatgagccgatgtgttttggagcctcgccccccggggaagcggtggatggtggctggcctggggaatcccggactgcccggcacgcgacacagcgtgggcatggcggtgctggggcagctggcgcggcggctgggtgtggcggagagttggacgcgcgaccggcactgtgccgccgacctcgccctggccccgctgggggatgcccaactggtcctgctccggccacggcggcttatgaacgccaacgggcgcagcgtggcccgggctgcggagctgtttgggctgactgccgaggaagtctacctggtgcatgatgagctggacaagcccctggggagactggctctgaagctggggggcagtgccaggggccacaatggagtccgttcctgcattagctgcctcaactccaatgcaatgccaaggctgcgggtgggtatcgggcgcccggcgcaccctgaggcggttcaggcccatgtgctgggctgcttctcccctgctgagcaggagctgctgcctctgttgctggatcgagccaccgacctgatcttggaccacatccgtgagcgaagccaggggccctcactggggccgtgacactagtggccatggctgcctgcctgactgtagtgcccaccaacccagccactgccacagagctgccacgccagccttggtatctactttttatacaaatctcctctagactgttccaggctgcctgcggattaaagtgggggtgactgtgactggaccagtccatttctggagtaggttcttctctctgtgtcctacttgggacgtaggggaacttcaggaagactaaacttttcaagcctttttagagaaccaggggcacgcatctgtaagattaaagatgctggcttggaggccgggtgcagtggctcacacctataatcccagcactttgggaggccgaggctgggggattgcttgacgtcaggagttcgagaccagcctggccaacatggtgaaaccctgtctctactaaaaatacaaaaagtagccaggcatggtggtgcatgcctgtaatccctgctacttgggagactgaggcaggagaatcacttgaacctgggaggcggaggttgctgtgagctgagattgtggcactgcactccagtctgggtgacagagtgagactctgtctcaaaaaaaaaaaaaaa

SEQ ID NO: 19760 - DNA, 814 bp, Artificial Sequence
  derived and/or modified sequence
ggagtgaatgggggcagcatgaggccgggcggctttttgggcgccggacagcggctgagtagagccatgagccgatgtgttttggagcctcgccccccggggaagcggtggatggtggctggcctggggaatcccggactgcccggcacgcgacacagcgtgggcatggcggtgctggggcagctggcgcggcggctgggtgtggcggagagttggacgcgcgaccggcactgtgccgccgacctcgccctggccccgctgggggatgcccaactggtcctgctccggccacggcggcttatgaacgccaacgggcgcagcgtggcccgggctgcggagctgtttgggctgactgccgaggaagtctacctggtgcatgatgagctggacaagcccctggggagactggctctgaagctggggggcagtgccaggggccacaatggagtccgttcctgcattagctgcctcaactccaatgcaatgccaaggctgcgggtgggtatcgggcgcccggcgcaccctgaggcggttcaggcccatgtgctgggctgcttctcccctgctgagcaggagctgctgcctctgttgctggatcgagccaccgacctgatcttggaccacatccgtgagcgaagccaggggccctcactggggccgtgacactagtggccatggctgcctgcctgactgtagtgcccaccaacccagccactgccacagagctgccacgccagccttggtatctactttttatacaaatctcctctagactgttccaggctgcctgcggattaaagtgggggtgactgtg

SEQ ID NO: 19761 - DNA, 645 bp, Artificial Sequence
  derived and/or modified sequence
atgcggccaggtggtttcctcggggctggacagagactctccagggccatgtccagatgcgtgctcgaacctcggcctcctggcaagaggtggatggtcgcgggactgggcaatccgggacttccaggcacccggcactcagtgggcatggccgtcctgggacagctagccagaagacttggcgttgctgagagttggactcgggaccgtcactgtgccgctgatctggcactggccccactgggcgacgcgcagctggtgctcctgaggcctaggagactcatgaatgccaatggtcggtccgtcgctagggccgcagagctatttggtctgaccgctgaggaagtatatctagtgcacgacgaactggataaacctctgggaaggctggccttaaagctggggggttcagcacgcggacacaacggcgtgcgtagctgcattagttgtttgaactcaaatgccatgcctaggctgcgcgtgggaatcggtcgccctgctcaccccgaggcagtgcaggctcatgtccttggctgcttctcacccgctgagcaagagctgttacctttactgctcgatcgggctaccgatttgattctggatcatattagagaacgatcccaaggaccttccttaggcccttag

SEQ ID NO: 19762 - DNA, 645 bp, Artificial Sequence
  derived and/or modified sequence
atgcgccctggcggattcctgggcgcaggccagcgactgtctagggctatgtcccgatgtgtcctcgaacccagacctcccggtaaacggtggatggtagctggtcttggcaaccccggtctgcctggcacgaggcattctgtaggaatggcagtcctgggccaattagctagaaggctaggtgtcgccgagtcatggactcgcgatcggcactgtgcagcagatcttgccctggcaccactcggagacgcccagctcgtcctgttacggccaaggcggttaatgaacgcgaatggacgatcagtagctcgagcggctgagctttttggactgaccgccgaagaggtctacctggtacatgacgagcttgacaaaccattaggcaggcttgctttaaagcttggaggctccgcacgagggcacaacggggtgcgctcatgcattagttgtctgaactctaatgccatgcctaggctccgggtggggatcgggaggccggcacatcctgaagcagttcaggcccacgttctcgggtgcttctcgccagcagagcaggaactgcttcccctccttctggatagagcaacagatctaatcctcgatcacattagagagcggagtcagggacccagcttaggaccctag

SEQ ID NO: 19763 - protein, 232 aa, Artificial Sequence
  derived and/or modified sequence
MLGAMFRAGTPMPPNLNSQGGGHYFIDRDGKAFRHILNFLRLGRLDLPRGYGETALLRAEADFYQIRPLLDALRELEASQGTPAPTAALLHADVDVSPRLVHFSARRGPHHYELSSVQVDTFRANLFCTDSECLGALRARFGVASGDRAEGSPHFHLEWAPRPVELPEVEYGRLGLQPLWTGGPGERREVVGTPSFLEEVLRVALEHGFRLDSVFPDPEDLLNSRSLRFVRH

SEQ ID NO: 19764 - DNA, 699 bp, Artificial Sequence
  derived and/or modified sequence
atgctgggcgccatgttcagagccggcacccccatgccccccaacctgaacagccagggcggcggccactacttcatcgacagagacggcaaggccttcagacacatcctgaacttcctgagactgggcagactggacctgcccagaggctacggcgagaccgccctgctgagagccgaggccgacttctaccagatcagacccctgctggacgccctgagagagctggaggccagccagggcacccccgcccccaccgccgccctgctgcacgccgacgtggacgtgagccccagactggtgcacttcagcgccagaagaggcccccaccactacgagctgagcagcgtgcaggtggacaccttcagagccaacctgttctgcaccgacagcgagtgcctgggcgccctgagagccagattcggcgtggccagcggcgacagagccgagggcagcccccacttccacctggagtgggcccccagacccgtggagctgcccgaggtggagtacggcagactgggcctgcagcccctgtggaccggcggccccggcgagagaagagaggtggtgggcacccccagcttcctggaggaggtgctgagagtggccctggagcacggcttcagactggacagcgtgttccccgaccccgaggacctgctgaacagcagaagcctgagattcgtgagacactag

SEQ ID NO: 19765 - DNA, 699 bp, Artificial Sequence
  derived and/or modified sequence
atgctgggcgcgatgttccgagccggcacccctatgccgcccaacctgaactcccagggaggaggccactactttattgaccgtgatggcaaagcttttagacacatcctcaacttcctgaggctcggacggttggacttgccccgtggttatggagagactgcccttctccgggctgaggctgatttctatcagatccgccctctgctggacgccttaagagagctagaagccagccagggaacccctgcgccaacagccgcgcttcttcatgctgacgtggacgtgagtcctcggctcgttcatttttctgcaaggcggggcccccaccattacgagttgagcagcgtgcaggtagacaccttccgggccaatctgttttgcactgattcagaatgtctaggcgccctcagagcacggttcggcgtcgcatcaggagatcgggctgaaggttcccctcatttccaccttgagtgggcaccccgcccggtagagctgccagaggtggaatatggccggctaggtctgcagcccctctggacaggcggacctggcgagaggcgcgaggtcgtcggaacacctagctttctggaagaagtgctgcgcgtggcccttgagcatggatttaggttggacagcgtattccccgatcctgaagacctgctcaattcccggagccttagatttgtccggcactag

SEQ ID NO: 19766 - DNA, 699 bp, Artificial Sequence
  derived and/or modified sequence
atgctgggcgccatgttccgggccggcacccccatgccacccaacctgaacagccagggcggcggccactacttcatcgacagagatggcaaggccttccgccacatcctgaacttcctgcggctgggccgcctggacctgccccggggctatggagaaacagccctgctgcgggcagaggccgacttctaccagatccggcccctgctggatgccctgcgggagctggaggccagccagggcaccccagcccccacagctgccctgctgcacgcagatgtggatgtgagcccccggctggtgcacttcagcgcccggcggggcccccaccactatgagctgagctctgtgcaggtggacaccttccgggccaacctcttctgcacagattctgagtgcctgggcgccctgcgggccaggtttggagtggccagcggggacagagctgagggcagcccccacttccacctggagtgggcccccaggcctgtggagctgcctgaggtggagtatggccgcctgggcctgcagcccctgtggacaggaggccctggagagcggcgggaggtggtgggcacccccagcttcctggaggaggtgctgcgggtggccctggagcacggcttccggctggacagcgtcttcccagaccctgaggacctgctgaacagccgcagcctgcgctttgtgcgccactag

SEQ ID NO: 19767 - DNA, 699 bp, Artificial Sequence
  derived and/or modified sequence
atgctgggcgccatgttccgggccggcacccccatgccccccaacctcaacagccaaggtgggggccactacttcatagacagagacgggaaggcctttcgccacattttgaacttcctgagactgggaaggctggacctccctcgggggtatggtgaaactgcacttctgcgggccgaggccgatttctaccagatccgtcctttgttggacgccctgcgagaacttgaagctagccaaggaacgccagcacctaccgctgccctactccacgcagatgtagatgtctcaccgagactggtgcacttctcagcgcgcagagggccacaccactatgaactctcttctgttcaggtcgataccttcagagcaaacctattttgtacggacagcgagtgtttaggggccctccgggctcgttttggagtcgcgtccggcgacagagccgaaggctcccctcatttccacttagaatgggcacctcgccccgtggagcttccagaggtggagtatggccgtctgggcctgcagccattgtggaccgggggaccaggtgaaagaagggaagtggtgggaacgccttcctttctggaggaagtcctgcgcgtcgcactggaacacggcttcaggttggacagtgttttccccgatcccgaggatcttctgaacagccgttcactacgcttcgtgcgccattag

SEQ ID NO: 19768 - DNA, 699 bp, Artificial Sequence
  derived and/or modified sequence
atgttgggtgcaatgttccgggctggcactcccatgccaccaaacctaaattcccaagggggagggcattattttatcgacagggatggaaaggcctttcgtcacatcctcaacttcctgagactcggccgactagatcttcctcgtggatatggagagaccgccctccttagagctgaagcagacttttaccagatcagacccctgctcgacgctctgcgggaactggaggcttcccagggcacacctgcacctaccgccgcattgttacacgcagatgtggacgtgagccctcgcttggtgcactttagcgcccgacggggacctcaccattacgaactttccagcgtgcaggtggacacttttagggctaatcttttttgtaccgattccgaatgtctgggggctcttagggcgaggtttggtgttgcctccggggatagggctgagggttcaccgcattttcacctcgagtgggccccaaggccggtggaacttcccgaagtggaatacggacggctagggttacagcctctgtggaccggcggaccaggcgagagacgggaagtggttgggacccccagtttccttgaggaggttctgagggttgctttagagcacgggtttcgcctggattctgtctttcccgaccccgaggacctgctaaattcgaggtccctcaggtttgtcagacattag

SEQ ID NO: 19769 - DNA, 3051 bp, Artificial Sequence
  derived and/or modified sequence
attagaggctccagccccgccgacttgcagacgtgagatcgggcacacctgagcggcggcggggcggtcgtggccacatccggggcgacgtgcctgagtcaccccgtcccgccagcgtctgccagtccagccagtccgcccagtctctcgcgtccgagactcgcctccagcctcccacctccgcccgggccgcgcgagcctcgcgggggcgggggcggggcgccaaggggcggggctgtctcttaaagggccccgggccgctgcccttaggccacttcctgggggcggagaggacctcagcggctgcggcgacacccagggaaggcggcgcggccgggtcccgaaactcctggctgtttccatcagagccctcggacactcccagcccgggctgagcacgcatcgtcgctccccggcggatacaagggggctccgccatccgctcccgtcagttcggcctccatctcctgggacccgcgccggcagccaggccaggcctctgagtggccccagagccctggctggactcgtccacggcggcagcgatctgcccggggtctcggaggccatcccttcagagtcggccctgtgctcgccaccgtcacctgctggttggattccggaaacccactgtctgaagaccacagaggggtgtcgctgaccaccccaaatcggatacgtccagacctcaagctcccttcccctctctggctgccctctgctcttttcatctcttctctcaaccttttggggatttctgtgtcctgacaccacctccccatccaccaccaaagtagccggggtgagccccaaaccttactgggtgtgctccacctgtgcctccaacccagcgaatctgacagcttcgacccaattctgcacacacccaggaagttctgccttttcttttctttcggtgtctcctgtacttcccaaaatttctcctcctcctgtgccctcttcgcccccctcctttgggggccccgtgaccctgaatgtggggggcacactatattccaccactttggagaccctgacccgcttcccagactctatgctgggggccatgtttagggccggcacccccatgccccccaacctcaattcccaaggaggcggccactacttcatcgaccgggatggcaaggccttccggcacatcctcaatttcctgaggctgggccgcctggacctgccccgtgggtacggagagacagcgctgctcagggcagaggctgacttctaccagatccggcccctcctggacgcgctgcgggaactggaggcctctcaggggacccctgcacccacagctgccctgctccacgcagatgtagatgtcagcccccgcctggtgcacttctctgctcgccggggaccccatcactatgagctgagctccgtccaggtggacaccttccgagccaaccttttctgcaccgactctgagtgtctaggtgctttgcgggcccgatttggtgtggccagtggggatagggcagaggggagcccacattttcatctggagtgggccccccgccccgtggaactccccgaggtggagtatgggagactggggctgcagccgctgtggactggggggccaggagagcggcgggaggtggtgggcaccccaagcttcctggaggaggtgctgcgggtggctctcgagcacggcttccgactagactctgtcttccccgaccccgaagacctgctcaactccaggtctctgcgctttgtccggcactgaggatgctgttctcagtttgactgtggggaggagagagaatggggtactagcacccctgaagcctctttccagctctgcttcaggagctatgagagtcgggactctcctgcacctgactggagctcagatgtgggcaggaattcccaaacctgagcccaccaaggactcacaagtggtccagaaggtctcaacctgtgctgaccctgggaggggtagggaaggttctctcagcttgttcttgcctaaggctgagcacctccagtctctccttgatttggagctcagtgtttaagggcttggaaaaggggggaacatctctttacccagactagacctagcaaaaccctggaaggatattgaggtctggggaaaagggaggactttgcattttcccaatgcggtctcttggaccatggcttctactcctgaagctgggtggcctggcctggcctgaccaatgagaggccagaacactctggaacatcggaagaggagttctttgctatgttccaagccatctactgagggaggcagaaaggccacaacccaccctaggttgatgtatgggagctaggacagtccccatggcaatggggctggagcatccctcatctggaagaatcccatactgatggcagggctggccagggggaagagggtagtatctgtgggtcctggcctttcttcatgtgtgcgtgcatatcagcccgtgtggctgactgatgtataggtccctggcatcctggttcatatctgtgttgctgactacagtgtctgtgatgtccgcatgtccaggcctgtttggggttgcctagcgactcttctggcacagggtgtgtctgtggtatacctgtgaggtggttgacaattagtagtttaatcacagggtgtgtgtgtgtgtgtgtgtgtgtgtgtttatgtgcacgcatgtatatgcatcaccacgtagccaggaggggcctgttggggtttgagtcactgggatcttcctggtgagaggtaagagaagtcactgggcttagctgggcctctgaggcctgtatggaactcttggttgctgaggcaaccatggacctgttgctaggagatagctggggaaggcccaaggccgcccagggcagagagaggagacgaagagtttgggacagtgggggaggagatgggaagggatgggatttctgggtcccagagcgggtgggatactcacgcacagcttcttcactggtggggggtggggcacacattatttctcactggtcatgatttacaagaagaaaaataaaactgcttttggaacc

SEQ ID NO: 19770 - protein, 175 aa, Artificial Sequence
  derived and/or modified sequence
MLRTEVPRLPRSTTAIVWSCHLMATASAMAGPSSETTSEEQLITQEPKEANSTTSQKQSKQRKRGRHGPRRCHSNCRGDSFATYFRRVLKQVHQGLSLSREAVSVMDSLVHDILDRIATEAGRLARSTKRQTITAWETRMAVRLLLPGQMGKLAESEGTKAVLRTSLYAIQQQRK

SEQ ID NO: 19771 - DNA, 894 bp, Artificial Sequence
  derived and/or modified sequence
cgtgaagctggcccgagacgtggagccatgctgcgtaccgaagtgccccggcttccccggtccacaaccgccattgtctggtcgtgccatctaatggccactgcctccgccatggctggaccttcctctgagacgacctctgaggaacagctgatcacccaggagcccaaagaggccaactccactacgtcccagaagcagagcaagcagaggaagcgagggcgccatgggccccgcaggtgccactccaactgccgcggggacagcttcgccacctatttccgccgggtgctgaagcaggttcaccagggcctcagcctttcccgggaggccgtgagtgtcatggattctttggttcatgacatattggaccgcatcgccaccgaggctggtcgcctggcccgctccaccaagcgccagaccatcactgcctgggagacccggatggctgtgcgcctgctgctgccggggcagatgggcaagctcgccgagtccgaaggcacgaaggctgtcctcagaacttcactgtatgccatacagcaacagagaaagtgaatacgctgatacaagaagcaagaatattagaaaaatgtcatgaaaatagttgaagagaaatgctcactgcacaaggagaccaagaaaaaccccccacgaaatcagccacaactaaatcgctctggacggtgccgccaggtgaccctacatgtccggagcaacactttgaaaaccaaagacgcttggcagaaccctgttcctttccagagacagagctgtgtaccttgtctaaaacaccgcatctcactcagtgacttatttctcattatgctaattgttttcgctttaaagcgccagtctttctgtcaaatgggacatacaaataaatttctaaaatta

SEQ ID NO: 19772 - DNA, 528 bp, Artificial Sequence
  derived and/or modified sequence
atgttaagaacagaggtgccgcgtctccccaggagtaccacagccatcgtttggtcgtgtcacctcatggcgacagcgtcggcaatggctgggccaagctccgagacaacctcagaagagcagctgataacgcaagaacccaaagaggctaattcaaccacatcacagaagcaaagtaagcagcgtaagagaggccgacatgggccacggcgatgtcactcaaactgccgcggtgattcgtttgctacatatttcagacgagttctgaagcaggtccaccaaggcctcagtctctccagagaagccgtgtctgtgatggactctctggttcacgacattctggatcgcatcgccaccgaagcgggacgattagctagatccaccaagaggcagacaattaccgcgtgggagacccgtatggctgtgcggctgttgctgcccggacagatgggcaagcttgccgagtccgaggggaccaaggccgtcctcagaacaagcctatatgctattcaacagcagcggaaatag

SEQ ID NO: 19773 - DNA, 528 bp, Artificial Sequence
  derived and/or modified sequence
atgctgagaaccgaggtgcccagactgcccagaagcaccaccgccatcgtgtggagctgccacctgatggccaccgccagcgccatggccggccccagcagcgagaccaccagcgaggagcagctgatcacccaggagcccaaggaggccaacagcaccaccagccagaagcagagcaagcagagaaagagaggcagacacggccccagaagatgccacagcaactgcagaggcgacagcttcgccacctacttcagaagagtgctgaagcaggtgcaccagggcctgagcctgagcagagaggccgtgagcgtgatggacagcctggtgcacgacatcctggacagaatcgccaccgaggccggcagactggccagaagcaccaagagacagaccatcaccgcctgggagaccagaatggccgtgagactgctgctgcccggccagatgggcaagctggccgagagcgagggcaccaaggccgtgctgagaaccagcctgtacgccatccagcagcagagaaagtag

SEQ ID NO: 19774 - DNA, 528 bp, Artificial Sequence
  derived and/or modified sequence
atgctgcgtaccgaggtccctcggctcccacggagcaccaccgcgatcgtatggagctgccatttaatggcgaccgccagtgcgatggctggcccttcatcagaaactacgtccgaggaacagctcattacccaggagcccaaagaggctaacagcaccaccagtcagaagcaaagcaaacagaggaagcgcggccgtcacggtcccaggaggtgtcattccaactgccggggagatagcttcgccacctacttccgtagagtccttaaacaggtccatcagggccttagtctgagcagggaagctgttagcgttatggacagccttgtgcacgacatactggaccgcattgcgaccgaagccggaaggcttgcccgcagtacaaagcgccagacgattactgcgtgggaaacgcgcatggctgtgagactgctcctgccaggccagatgggaaaactagcagaaagtgaaggcaccaaagcagtgctcagaacgagcttatacgccattcaacagcagagaaagtag

SEQ ID NO: 19775 - DNA, 528 bp, Artificial Sequence
  derived and/or modified sequence
atgctgaggacagaggtgccccggctgcccaggagcaccacagccatcgtgtggagctgccacctgatggccacagccagcgccatggccggccccagcagcgagaccaccagcgaggagcagctgatcacccaggagcccaaggaggccaacagcaccaccagccagaagcagagcaagcagaggaagagaggaagacatggcccccggcgctgccacagcaactgccgcggggacagctttgccacctacttccggcgggtgctgaagcaggtgcaccagggcctgagcctgagccgggaggccgtgtctgtgatggacagcctggtgcatgacatcctggacagaattgccacagaagctggccgcctggcccggagcaccaagaggcagaccatcacagcctgggagaccaggatggctgtgcggctgctgctgcccggccagatgggcaagctggccgagagcgagggcaccaaggctgtgctgcggaccagcctgtatgccatccagcagcagaggaagtag

SEQ ID NO: 19776 - DNA, 528 bp, Artificial Sequence
  derived and/or modified sequence
atgctgcggaccgaggtgccccggctgccccggagcaccaccgccattgtgtggagctgtcatttaatggctacagctagcgccatggccggtccatcttcggagacaacatcagaggaacagttgattacacaggaaccaaaggaggcaaattccactacaagccagaagcagtcaaaacaaagaaagagaggccgccacggtcccagacgctgccatagcaattgtcgtggcgactcatttgccacttatttccggagggtcttgaagcaggtccatcagggactgtccctgtcccgggaggctgtctccgtcatggacagccttgtgcatgacatcttggacaggatcgcaaccgaggccggaagactcgccaggtctaccaaaagacagaccattacggcatgggagactaggatggctgtgcgtctgctgctgccaggccaaatggggaaattggctgaatccgaaggcaccaaggccgtgcttagaacttccctgtacgccattcaacagcagagaaagtag

SEQ ID NO: 19777 - protein, 152 aa, Artificial Sequence
  derived and/or modified sequence
MRGPGHPLLLGLLLVLGAAGRGRGGAEPREPADGQALLRLVVELVQELRKHHSAEHKGLQLLGRDCALGRAEAAGLGPSPEQRVEIVPRDLRMKDKFLKHLTGPLYFSPKCSKHFHRLYHNTRDCTIPAYYKRCARLLTRLAVSPVCMEDKQ

SEQ ID NO: 19778 - protein, 92 aa, Artificial Sequence
  derived and/or modified sequence
MRGPGHPLLLGLLLVLGPSPEQRVEIVPRDLRMKDKFLKHLTGPLYFSPKCSKHFHRLYHNTRDCTIPAYYKRCARLLTRLAVSPVCMEDKQ

SEQ ID NO: 19779 - DNA, 1373 bp, Artificial Sequence
  derived and/or modified sequence
cgcgggagcgcggcccctccgaggtccgcccgcggccggggagctgcctggcacccgcggcttccaaaggggaaagaaagttgcgcccgcgccaggcgcagcgcgctcggcggacgcggcctttcgggcgaaagttaggaggggccgggctggcgggcgggcgggttccgggggctcctttccgcaccagcggcggtcgctccccgtgggcgggacctcgggcgtgatcgtcgaggagaccgcggctccctcacctgccggcttgttcctcggggtccgcggagcgagcccagctctcggcgcgtgtcggagtctcccagccccgcggccccgagcgcacgatgcgcggacccgggcaccccctcctcctggggctgctgctggtgctgggggcggcggggcgcggccgggggggcgcggagccccgggagccggcggacggacaggcgctgctgcggctggtggtggaactcgtccaggagctgcggaagcaccactcggcggagcacaagggcctgcagctcctcgggcgggactgcgccctgggccgcgcggaggcggcggggctggggccttcgccggagcagcgagtggaaattgttcctcgagatctgaggatgaaggacaagtttctaaaacaccttacaggccctctttattttagtccaaagtgcagcaaacacttccatagactttatcacaacaccagagactgcaccattcctgcatactataaaagatgcgccaggcttcttacccggctggctgtcagtccagtgtgcatggaggataagcagtgagcagaccgtacaggagcagcacaccaggagccatgagaagtgccttggaaaccaacagggaaacagaactatctttatacacatcccctcatggacaagagatttatttttgcagacagactcttccataagtcctttgagttttgtatgttgttgacagtttgcagatatatattcgataaatcagtgtacttgacagtgttatctgtcacttatttaaaaaaaaaacacaaaaggaatgctccacatttgacgtgtagtgctataaaacacagaatatttcattgtcttcattaggtgaaatcgcaaaaaatatttctttagaaacataagcagaatcttaaagtatattttcatataacataatttgatattctgtattactttcactgttaaattctcagagtattatttggaacggcatgaaaaattaaaatttcggtcatgttttagagacagtggagtgtaaatctgtggctaattctgttggtcgtttgtattataaatgtaaaatagtattccagctattgtgcaatatgtaaatagtgtaaataaacacaagtaataaatgaa

SEQ ID NO: 19780 - DNA, 459 bp, Artificial Sequence
  derived and/or modified sequence
atgcgcggtcccggacatcctctgttgctgggcttactgctggtgctgggcgctgccggacggggtagaggcggagctgagccgagagaacctgcagacggccaggcgttattgcgcttggtggtggaactggtccaggagttgagaaaacatcactctgcggagcataaaggcttgcaactacttggcagggattgcgcactcgggcgagccgaggcagcaggactgggcccatctcccgagcaaagagtagaaatcgttcctcgagatctgcgcatgaaggataagtttcttaaacacttaacaggacctctttacttctcccctaagtgtagtaaacactttcaccgcctgtaccacaatacccgggactgcaccatcccggcttattataagagatgcgcgagactgctgacaagacttgcggtgtcgcctgtgtgtatggaggacaaacagtag

SEQ ID NO: 19781 - DNA, 279 bp, Artificial Sequence
  derived and/or modified sequence
atgcgaggtcctggtcatcccctcctccttgggttgctcctcgtgttggggccatctccagagcagcgagtggagatcgtgccaagggatctgcggatgaaggataagtttctgaagcacctgacaggtccgttgtatttttcgcctaagtgtagtaagcacttccatcggttataccacaatactcgggattgcaccatccctgcatactataaacgctgcgcacgactgctgaccagacttgctgtaagcccggtttgcatggaggataagcaatag

SEQ ID NO: 19782 - DNA, 459 bp, Artificial Sequence
  derived and/or modified sequence
atgcggggaccaggacacccacttttactcggcttactgttggtccttggggctgccggtaggggaagagggggagcagaacctcgggaaccagccgacgggcaagcactgctgagactggtggtagaacttgttcaagagctccgcaaacaccactccgctgaacataaggggctgcaactgctgggtagagactgtgcactcggtcgcgctgaggctgcaggactggggccatcccccgagcagcgcgtggaaatcgttccccgcgacctccgtatgaaggataaatttcttaagcatctcaccggacctctgtacttttcgcctaagtgctccaagcacttccatagactttatcataatacgagagactgtaccatacccgcctactataagcggtgcgcaagacttttgaccaggctggccgtgtcgcccgtttgcatggaagataagcaatag

SEQ ID NO: 19783 - DNA, 279 bp, Artificial Sequence
  derived and/or modified sequence
atgagaggtcctggccatcccctgttattggggctactgttagtgctcggacccagccccgaacagcgggttgaaatagtgccccgagatctgagaatgaaggataagtttctaaaacacctgactgggcctctctatttcagccccaagtgtagtaaacattttcaccgcctttaccataacacacgtgattgtaccatcccagcctattacaaaaggtgcgctagactactgacccggctcgcagtgtcacccgtctgcatggaagacaaacagtag

SEQ ID NO: 19784 - DNA, 861 bp, Artificial Sequence
  derived and/or modified sequence
atgcgcggacccgggcaccccctcctcctggggctgctgctggtgctggggccttcgccggagcagcgagtggaaattgttcctcgagatctgaggatgaaggacaagtttctaaaacaccttacaggccctctttattttagtccaaagtgcagcaaacacttccatagactttatcacaacaccagagactgcaccattcctgcatactataaaagatgcgccaggcttcttacccggctggctgtcagtccagtgtgcatggaggataagcagtgagcagaccgtacaggagcagcacaccaggagccatgagaagtgccttggaaaccaacagggaaacagaactatctttatacacatcccctcatggacaagagatttatttttgcagacagactcttccataagtcctttgagttttgtatgttgttgacagtttgcagatatatattcgataaatcagtgtacttgacagtgttatctgtcacttatttaaaaaaaaaacacaaaaggaatgctccacatttgacgtgtagtgctataaaacacagaatatttcattgtcttcattaggtgaaatcgcaaaaaatatttctttagaaacataagcagaatcttaaagtatattttcatataacataatttgatattctgtattactttcactgttaaattctcagagtattatttggaacggcatgaaaaattaaaatttcggtcatgttttagagacagtggagtgtaaatctgtggctaattctgttggtcgtttgtattataaatgtaaaatagtattccagctattgtgcaatatgtaaatagtgtaaataaacacaagtaataaatgaagtgtttgtt

SEQ ID NO: 19785 - DNA, 459 bp, Artificial Sequence
  derived and/or modified sequence
atgcggggaccaggacacccacttttactcggcttactgttggtccttggggctgccggtaggggaagagggggagcagaacctcgggaaccagccgacgggcaagcactgctgagactggtggtagaacttgttcaagagctccgcaaacaccactccgctgaacataaggggctgcaactgctgggtagagactgtgcactcggtcgcgctgaggctgcaggactggggccatcccccgagcagcgcgtggaaatcgttccccgcgacctccgtatgaaggataaatttcttaagcatctcactggaccactgtatttttcccctaaatgttcgaaacacttccatcggctttatcataatacaagagattgcactatccccgcctactacaaaagatgcgccagactcctgacgaggttggctgtaagccccgtatgcatggaagacaagcaatag

SEQ ID NO: 19786 - DNA, 459 bp, Artificial Sequence
  derived and/or modified sequence
atgagaggccccggccaccccctgctgctgggcctgctgctggtgctgggcgccgccggcagaggcagaggcggcgccgagcccagagagcccgccgacggccaggccctgctgagactggtggtggagctggtgcaggagctgagaaagcaccacagcgccgagcacaagggcctgcagctgctgggcagagactgcgccctgggcagagccgaggccgccggcctgggccccagccccgagcagagagtggagatcgtgcccagagacctgagaatgaaggacaagttcctgaagcacctgaccggccccctgtacttcagccccaagtgcagcaagcacttccacagactgtaccacaacaccagagactgcaccatccccgcctactacaagagatgcgccagactgctgaccagactggccgtgagccccgtgtgcatggaggacaagcagtag

SEQ ID NO: 19787 - DNA, 279 bp, Artificial Sequence
  derived and/or modified sequence
atgagaggccccggccaccccctgctgctgggcctgctgctggtgctgggccccagccccgagcagagagtggagatcgtgcccagagacctgagaatgaaggacaagttcctgaagcacctgaccggccccctgtacttcagccccaagtgcagcaagcacttccacagactgtaccacaacaccagagactgcaccatccccgcctactacaagagatgcgccagactgctgaccagactggccgtgagccccgtgtgcatggaggacaagcagtag

SEQ ID NO: 19788 - DNA, 459 bp, Artificial Sequence
  derived and/or modified sequence
atgcgtggtcctgggcatcctttgcttctcggtctcctgctcgtgcttggggctgctggccgcgggcggggtggggctgagcctcgggaaccagcagacggtcaggcccttctgagactggtcgtggaactggtccaggaattgaggaaacaccactcagccgaacacaagggcttgcagctgctggggagagactgtgcgctcggccgggccgaagccgcaggcctcggcccgtcaccagagcagcgagtggagattgtgcccagagacttgaggatgaaggataagtttttgaagcatctgacagggcccctgtacttctctccaaagtgtagcaagcatttccataggctttatcacaataccagggactgcacaattcctgcctactacaagaggtgcgcccggctgctgactcgcttagctgtttcaccagtctgtatggaggataaacaatag

SEQ ID NO: 19789 - DNA, 279 bp, Artificial Sequence
  derived and/or modified sequence
atgagaggacccgggcaccccctccttctgggactgctcctggtgctcggacccagccccgagcagagagtggaaatcgtgccccgggacctcaggatgaaggataagtttctaaaacacctcaccggcccattgtatttttcaccaaagtgcagtaaacacttccacagactctatcacaacacgagagattgcacaattcccgcttactacaagcggtgtgcgcggctgctgactcgcttggctgtgagcccggtgtgcatggaagacaaacaatag

SEQ ID NO: 19790 - DNA, 459 bp, Artificial Sequence
  derived and/or modified sequence
atgaggggccctggccaccccctgctgctgggcctgctgctggtgctgggcgctgctggccggggccggggcggcgctgagccccgggagccagcagatggccaggccctgctgcggctggtggtggagctggtgcaggagctgaggaagcaccacagcgctgagcacaagggcctgcagctgctgggccgggactgtgccctgggccgggcagaggccgccggcctgggccccagccctgagcagagggtggagatcgtgccccgggacctgaggatgaaggacaagttcctgaagcacctgaccggccccctgtacttcagccccaagtgcagcaagcacttccaccggctgtaccacaacacccgggactgcaccatcccagcctactacaagagatgtgcccggctgctgacccggctggccgtgtcccctgtgtgcatggaggacaagcagtag

SEQ ID NO: 19791 - DNA, 279 bp, Artificial Sequence
  derived and/or modified sequence
atgaggggccctggccaccccctgctgctgggcctgctgctggtgctgggccccagccctgagcagagggtggagatcgtgccccgggacctgaggatgaaggacaagttcctgaagcacctgaccggccccctgtacttcagccccaagtgcagcaagcacttccaccggctgtaccacaacacccgggactgcaccatcccagcctactacaagagatgtgcccggctgctgacccggctggccgtgtcccctgtgtgcatggaggacaagcagtag

SEQ ID NO: 19792 - DNA, 459 bp, Artificial Sequence
  derived and/or modified sequence
atgcggggccccggccaccccctgctgctgggcctgctgctggtgcttggggcagcaggtagaggaagaggaggtgccgagccaagagaacctgccgacggccaggcactgctgcgcctggtcgtcgagcttgtgcaggagctgcgcaaacaccattccgcagaacacaagggtctacaactactcgggcgagactgcgccttaggacgcgcagaagcagcaggattgggaccgagcccagagcagagggttgaaatagtcccacgggatcttcgcatgaaagataagttcctgaagcacctcacgggcccattgtatttcagtcccaagtgctctaagcactttcaccgactctaccacaacactagggattgtacaatacctgcctattataagcgttgcgctcgtctcctgacccggcttgccgttagcccagtgtgcatggaagataaacaatag

SEQ ID NO: 19793 - DNA, 279 bp, Artificial Sequence
  derived and/or modified sequence
atgcggggccccggccaccccctgctgctgggcctgctgctggtgttgggcccttcccctgagcagagggtcgaaatcgtgccacgcgaccttcggatgaaagataagttccttaagcatcttaccggcccactgtatttctctcctaaatgctccaaacacttccaccgcttatatcacaatacacgagattgtaccatcccagcttattataaaaggtgtgctcgactcctgacacgcctggcagttagccccgtttgcatggaggacaagcagtag

SEQ ID NO: 19794 - RNA, 459 nt, Artificial Sequence
  derived and/or modified sequence
augcggggaccaggacacccacuuuuacucggcuuacuguugguccuuggggcugccgguaggggaagagggggagcagaaccucgggaaccagccgacgggcaagcacugcugagacuggugguagaacuuguucaagagcuccgcaaacaccacuccgcugaacauaaggggcugcaacugcuggguagagacugugcacucggucgcgcugaggcugcaggacuggggccaucccccgagcagcgcguggaaaucguuccccgcgaccuccguaugaaggauaaauuucuuaagcaucucaccggaccucuguacuuuucgccuaagugcuccaagcacuuccauagacuuuaucauaauacgagagacuguaccauacccgccuacuauaagcggugcgcaagacuuuugaccaggcuggccgugucgcccguuugcauggaagauaagcaauag

SEQ ID NO: 19795 - RNA, 279 nt, Artificial Sequence
  derived and/or modified sequence
augagagguccuggccauccccuguuauuggggcuacuguuagugcucggacccagccccgaacagcggguugaaauagugccccgagaucugagaaugaaggauaaguuucuaaaacaccugacugggccucucuauuucagccccaaguguaguaaacauuuucaccgccuuuaccauaacacacgugauuguaccaucccagccuauuacaaaaggugcgcuagacuacugacccggcucgcagugucacccgucugcauggaagacaaacaguag

SEQ ID NO: 19796 - RNA, 459 nt, Artificial Sequence
  derived and/or modified sequence
augcggggaccaggacacccacuuuuacucggcuuacuguugguccuuggggcugccgguaggggaagagggggagcagaaccucgggaaccagccgacgggcaagcacugcugagacuggugguagaacuuguucaagagcuccgcaaacaccacuccgcugaacauaaggggcugcaacugcuggguagagacugugcacucggucgcgcugaggcugcaggacuggggccaucccccgagcagcgcguggaaaucguuccccgcgaccuccguaugaaggauaaauuucuuaagcaucucacuggaccacuguauuuuuccccuaaauguucgaaacacuuccaucggcuuuaucauaauacaagagauugcacuauccccgccuacuacaaaagaugcgccagacuccugacgagguuggcuguaagccccguaugcauggaagacaagcaauag

SEQ ID NO: 19797 - protein, 144 aa, Artificial Sequence
  derived and/or modified sequence
MEAQAQGLLETEPLQGTDEDAVASADFSSMLSEEEKEELKAELVQLEDEITTLRQVLSAKERHLVEIKQKLGMNLMNELKQNFSKSWHDMQTTTAYKKTHETLSHAGQKATAAFSNVGTAISKKFGDMSYSIRHSISMPAMRRK

SEQ ID NO: 19798 - DNA, 435 bp, Artificial Sequence
  derived and/or modified sequence
atggaggcccaggcccagggcctgctggagaccgagcccctgcagggcaccgacgaggacgccgtggccagcgccgacttcagcagcatgctgagcgaggaggagaaggaggagctgaaggccgagctggtgcagctggaggacgagatcaccaccctgagacaggtgctgagcgccaaggagagacacctggtggagatcaagcagaagctgggcatgaacctgatgaacgagctgaagcagaacttcagcaagagctggcacgacatgcagaccaccaccgcctacaagaagacccacgagaccctgagccacgccggccagaaggccaccgccgccttcagcaacgtgggcaccgccatcagcaagaagttcggcgacatgagctacagcatcagacacagcatcagcatgcccgccatgagaagaaagtag

SEQ ID NO: 19799 - DNA, 435 bp, Artificial Sequence
  derived and/or modified sequence
atggaagcgcaagcgcaggggctgcttgagacagagcccctgcagggaaccgatgaggacgctgtggcttctgccgatttcagttcaatgctgtctgaggaggaaaaggaggagcttaaagccgaacttgtgcagctggaagacgagattactactttaaggcaggtgctgtccgctaaggaacggcacctcgtggagatcaagcagaaactcggtatgaatcttatgaatgaactcaaacagaacttcagcaagtcctggcatgacatgcaaactacgaccgcctataaaaagacacatgagacgttgagccatgccggacagaaggccacagctgcctttagcaacgtgggcacagcgatttcgaagaagtttggcgacatgtcatattcgattcgccatagcataagcatgccagctatgcgtagaaaatag

SEQ ID NO: 19800 - DNA, 1308 bp, Artificial Sequence
  derived and/or modified sequence
ttggtttgggccaggtggactggaaggggcggaggtaaccagaagcggctagtggcggctgcctgcgtccccaaccccctccgcgcagcgctcgcgacacgcgtgccaggagtgggagcgagcggcggggccagctgcgttctgagcctgggcgcagctgccatctgctctgggaagcaccagggtgtccccgccgccctcagctcgaagtcagccaccatggaggcgcaggcacaaggtttgttggagactgaaccgttgcaaggaacagacgaagatgcagtagccagtgctgacttctctagcatgctctctgaggaggaaaaggaagagttaaaagcagagttagttcagctagaagacgaaattacaacactacgacaagttttgtcagcgaaagaaaggcatctagttgagataaaacaaaaactcggcatgaacctgatgaatgaattaaaacagaacttcagcaaaagctggcatgacatgcagactaccactgcctacaagaaaacacatgaaaccctgagtcacgcagggcaaaaggcaactgcagctttcagcaacgttggaacggccatcagcaagaagttcggagacatgagttactccattcgccattccataagtatgcctgctatgagacgaaagtaggcggtacgaaccctaatggaggcagttttgaggaggtcctcagctccacggcccatgccagtgcccagagcttggcaggaggctcccggcggaccaaggaggaggagctgcagtgctaagtccagccagcgtgcagctgcatccagaaaccggccactacccagcccatctctgcctgtgcttatccagataagaagaccaaaatcccgctgggaaaaacccaggccttgacattgttattcaaatggcccctccagaaagtttaatgatttccatttgtatttgtgttgatgatggaccacttgaccatcacatttcagtattcatagatgactgtcacattttaaaatgttcccacttgagcaggtacacaactggtcataattcctgtctgtgtaattcgatgtatatttttccaaacatgtagctattgtttgctttgatttttgcttggcctcctttatgatgtgcatgtccttgaaggctgaatgaacagtccctttcagttcagcagatcaacaggatggagctcttcatgactgtctccagcaataggatgatttactataaatttcatccaactacttgtgatctctctcacctacatcaattatgtatgttaatttcagcaattaaaagaattgattttaatga

SEQ ID NO: 19801 - DNA, 435 bp, Artificial Sequence
  derived and/or modified sequence
atggaggcccaggcccagggcctgctggagacagagcccctgcagggcacagatgaagatgctgtggccagcgctgacttcagctccatgctgtctgaggaggagaaggaggagctgaaggccgagctggtgcagctggaggatgagatcaccaccctgcggcaggtgctgagcgccaaggagcggcacctggtggagatcaagcagaagctgggcatgaacctgatgaatgagctgaagcagaacttcagcaagtcctggcatgacatgcagaccaccacagcctacaagaagacccatgagaccctgagccacgccggccagaaggccacagctgccttcagcaatgtgggcacagccatcagcaagaagtttggagacatgagctacagcatccgccacagcatctccatgcctgccatgaggaggaagtag

SEQ ID NO: 19802 - DNA, 435 bp, Artificial Sequence
  derived and/or modified sequence
atggaggcccaggcccagggcctgctggagaccgagcccctgcagggcacagatgaggatgccgtggctagcgctgattttagctctatgctgtccgaggaggagaaagaggaactgaaagccgaacttgtccagctggaggacgaaatcaccactttgaggcaggttctgagtgctaaagaaagacatctcgttgaaataaagcagaaactcggtatgaacctgatgaacgagctcaagcagaatttcagcaagtcctggcacgatatgcagactaccaccgcatacaaaaaaacacacgaaaccctgagccacgccggacagaaggccacagcggccttctccaacgtcgggacagccatctccaagaagttcggcgatatgagttatagtatcagacattccataagcatgccagctatgagacgtaagtag

SEQ ID NO: 19803 - DNA, 435 bp, Artificial Sequence
  derived and/or modified sequence
atggaagctcaagcccagggccttttggagaccgaacctttacaggggacagatgaggatgcggtcgctagcgccgatttttcctccatgctgtccgaggaagaaaaggaagagctgaaggcggagctcgtgcagctcgaggacgagatcactactctgcgtcaggtgttgagcgctaaagaaaggcatctggtggagatcaagcagaaacttgggatgaaccttatgaatgagcttaagcagaacttcagtaaatcttggcatgacatgcagactactacggcctacaaaaaaactcacgaaaccctgtcgcatgcagggcaaaaagctacggccgcattcagcaacgtgggcaccgccatcagtaagaaatttggggatatgtcctattcaattcgacattcaatatcaatgccagccatgagacgaaagtag

SEQ ID NO: 19804 - protein, 131 aa, Artificial Sequence
  derived and/or modified sequence
MEAQAQGLLETEPLQGTDEDAVASADFSSMLSEEEKEELKAELVQLEDEITTLRQVLSAKERHLVEIKQKLGMNLMNELKQNFSKSWHDMQTTTAYKKTHETLSHAGQKATAAFSNVGTAISKKFGDMRRK

SEQ ID NO: 19805 - protein, 102 aa, Artificial Sequence
  derived and/or modified sequence
MLSEEEKEELKAELVQLEDEITTLRQVLSAKERHLVEIKQKLGMNLMNELKQNFSKSWHDMQTTTAYKKTHETLSHAGQKATAAFSNVGTAISKKFGDMRRK

SEQ ID NO: 19806 - DNA, 396 bp, Artificial Sequence
  derived and/or modified sequence
atggaggcccaggcccagggcctgctggagaccgagcccctgcagggcaccgacgaggacgccgtggccagcgccgacttcagcagcatgctgagcgaggaggagaaggaggagctgaaggccgagctggtgcagctggaggacgagatcaccaccctgagacaggtgctgagcgccaaggagagacacctggtggagatcaagcagaagctgggcatgaacctgatgaacgagctgaagcagaacttcagcaagagctggcacgacatgcagaccaccaccgcctacaagaagacccacgagaccctgagccacgccggccagaaggccaccgccgccttcagcaacgtgggcaccgccatcagcaagaagttcggcgacatgagaagaaagtag

SEQ ID NO: 19807 - DNA, 396 bp, Artificial Sequence
  derived and/or modified sequence
atggaagcccaggctcagggtttgctggagacagaacctttgcagggcactgatgaagacgccgtggccagcgctgatttcagctcaatgctgagcgaggaggaaaaggaagagctgaaagccgaattggtgcaattggaagatgaaattacgacactgaggcaggtgctctcagccaaagaaagacacctggttgagatcaagcagaaactcggaatgaatctcatgaacgaactgaaacagaattttagtaaaagctggcatgacatgcagaccaccacagcttacaaaaaaacacatgaaactctgtcacacgcagggcagaaagctaccgccgccttctcaaacgtggggaccgctatttctaaaaagtttggagatatgaggaggaagtag

SEQ ID NO: 19808 - DNA, 2147 bp, Artificial Sequence
  derived and/or modified sequence
aggtaaccagaagcggctagtggcggctgcctgcgtccccaaccccctccgcgcagcgctcgcgacacgcgtgccaggagtgggagcgagcggcggggccagctgcgttctgagcctgggcgcagctgccatctgctctgggaagcaccagggtgtccccgccgccctcagctcgaagtcagccaccatggaggcgcaggcacaaggtttgttggagactgaaccgttgcaaggaacagacgaagatgcagtagccagtgctgacttctctagcatgctctctgaggaggaaaaggaagagttaaaagcagagttagttcagctagaagacgaaattacaacactacgacaagttttgtcagcgaaagaaaggcatctagttgagataaaacaaaaactcggcatgaacctgatgaatgaattaaaacagaacttcagcaaaagctggcatgacatgcagactaccactgcctacaagaaaacacatgaaaccctgagtcacgcagggcaaaaggcaactgcagctttcagcaacgttggaacggccatcagcaagaagttcggagacatgagacgaaagtaggcggtacgaaccctaatggaggcagttttgaggaggtcctcagctccacggcccatgccagtgcccagagcttggcaggaggctcccggcggaccaaggaggaggagctgcagtgctaagtccagccagcgtgcagctgcatccagaaaccggccactacccagcccatctctgcctgtgcttatccagataagaagaccaaaatcccgctgggaaaaacccaggccttgacattgttattcaaatggcccctccagaaagtttaatgatttccatttgtatttgtgttgatgatggaccacttgaccatcacatttcagtattcatagatgactgtcacattttaaaatgttcccacttgagcaggtacacaactggtcataattcctgtctgtgtaattcgatgtatatttttccaaacatgtagctattgtttgctttgatttttgcttggcctcctttatgatgtgcatgtccttgaaggctgaatgaacagtccctttcagttcagcagatcaacaggatggagctcttcatgactgtctccagcaataggatgatttactataaatttcatccaactacttgtgatctctctcacctacatcaattatgtatgttaatttcagcaattaaaagaattgattttaatgactttgaattcttaatttctttgtcttaaaagttgctagttatgattttacagatgcaattttaaatcaacttttagccaggtgcggcggctcacacctgtaatcccaactattttggatgccaaggtgagaggattgcttgaggccaggagttaaagatcagcctgggcaacacagaccctgtctctacaaaaaaagaaaaaaattagccagacatagtgttgcttgcctgtagtcccagctactctagaggctgaggcaggaggattgcatgagcctaggagttcgaaactgcagtgagctatgattgcaccactgcactactccagcctgggtgacagagtgggacactgtctccaaaaatagtaataataagtagtcaacttttactgctaatttggtgaacatgagagaggatatgaaaataaatattacctcagctatcctaggatgttaaaataatctccaattttaaaattctctccaatctacatacagtagtagttagtcagataaaggatatccaaaaaagagatagctagaaaatgggagaagcagagttctgcaacccctttcagtttgtaaattgttcacatgtatgaaaataactggtatttatcaatccactcagatttctgcactaacttttatcttatatatcatatgtatctcttttctttttctaaatgggaacatatatttgttattaggtggcagagatatagccttaagatatatttgtaaaatgcacactgaatagacatccaacctaaaaaaaatcactatttaaaaagcccatataatatatacatatttgttagcatgctaattgttcatgttttgtgtttattaaatagaagtgatatatatgacattttgaagtaaagcacatctgaaaaattctactcaaa

SEQ ID NO: 19809 - DNA, 396 bp, Artificial Sequence
  derived and/or modified sequence
atggaggcccaggcccagggcctgctggagacagagcccctgcagggcacagatgaagatgctgtggccagcgctgacttcagctccatgctgtctgaggaggagaaggaggagctgaaggccgagctggtgcagctggaggatgagatcaccaccctgcggcaggtgctgagcgccaaggagcggcacctggtggagatcaagcagaagctgggcatgaacctgatgaatgagctgaagcagaacttcagcaagtcctggcatgacatgcagaccaccacagcctacaagaagacccatgagaccctgagccacgccggccagaaggccacagctgccttcagcaatgtgggcacagccatcagcaagaagtttggagacatgaggaggaagtag

SEQ ID NO: 19810 - DNA, 1165 bp, Artificial Sequence
  derived and/or modified sequence
ccttggtgtgtgcataaggccacatgacctcaggtcaggaataaaagcttagggctgagcagctcactctttggttgagaatccagttggctcccctggagtgaagttctacacagaccctggaggaaccaccccatctgtttgttggagactgaaccgttgcaaggaacagacgaagatgcagtagccagtgctgacttctctagcatgctctctgaggaggaaaaggaagagttaaaagcagagttagttcagctagaagacgaaattacaacactacgacaagttttgtcagcgaaagaaaggcatctagttgagataaaacaaaaactcggcatgaacctgatgaatgaattaaaacagaacttcagcaaaagctggcatgacatgcagactaccactgcctacaagaaaacacatgaaaccctgagtcacgcagggcaaaaggcaactgcagctttcagcaacgttggaacggccatcagcaagaagttcggagacatgagacgaaagtaggcggtacgaaccctaatggaggcagttttgaggaggtcctcagctccacggcccatgccagtgcccagagcttggcaggaggctcccggcggaccaaggaggaggagctgcagtgctaagtccagccagcgtgcagctgcatccagaaaccggccactacccagcccatctctgcctgtgcttatccagataagaagaccaaaatcccgctgggaaaaacccaggccttgacattgttattcaaatggcccctccagaaagtttaatgatttccatttgtatttgtgttgatgatggaccacttgaccatcacatttcagtattcatagatgactgtcacattttaaaatgttcccacttgagcaggtacacaactggtcataattcctgtctgtgtaattcgatgtatatttttccaaacatgtagctattgtttgctttgatttttgcttggcctcctttatgatgtgcatgtccttgaaggctgaatgaacagtccctttcagttcagcagatcaacaggatggagctcttcatgactgtctccagcaataggatgatttactataaatttcatccaactacttgtgatctctctcacctacatcaattatgtatgttaatttcagcaattaaaagaattgatttt

SEQ ID NO: 19811 - DNA, 396 bp, Artificial Sequence
  derived and/or modified sequence
atggaggcccaggcccagggcctgctggagaccgagcccctgcagggcactgatgaagacgcggtagcgagtgctgacttttcctctatgctcagcgaggaagaaaaggaggagcttaaagccgaactcgtccagttagaggacgagatcactaccctgcggcaggtgctgtccgctaaagagagacacctagtcgaaattaagcagaagctgggcatgaatttgatgaacgagctgaagcagaatttttcaaagagctggcacgacatgcaaacaactaccgcatataagaaaacccacgaaaccctgtcccacgccggtcagaaggctactgcggctttttctaatgtgggcaccgctatctcgaagaagttcggagacatgcgaagaaagtag

SEQ ID NO: 19812 - DNA, 396 bp, Artificial Sequence
  derived and/or modified sequence
atggaggcccaggctcagggccttctggagacagaacccttgcagggcaccgatgaggatgcagtagcttctgccgacttttcatcgatgttaagtgaggaggaaaaggaagagttaaaagctgaacttgtacaattggaggatgaaataactaccctcagacaagttctctccgccaaagaacgccacctcgtcgagatcaagcaaaaactgggaatgaacctgatgaacgagctgaagcagaatttttcaaaatcctggcatgatatgcagacaactacagcttataaaaaaacacacgagacattgagccacgccggacagaaggccaccgccgcatttagcaatgtgggcacggccatcagcaagaagttcggcgatatgcgccgaaagtag

SEQ ID NO: 19813 - DNA, 915 bp, Artificial Sequence
  derived and/or modified sequence
acatctctgccttctcattttctcttaatttttttctttttttggcttcttggtattctttgctttcttggagctcgtcacacatttaggaggatttttgtcttttctggaatttttagttgttttttggtgggagggtctgtcagtgcatctagtcctccacactatggaagcagaagttggtttaaattcactttaaaaattgccttctgttttatcaattctgcctaaaggtttgttggagactgaaccgttgcaaggaacagacgaagatgcagtagccagtgctgacttctctagcatgctctctgaggaggaaaaggaagagttaaaagcagagttagttcagctagaagacgaaattacaacactacgacaagttttgtcagcgaaagaaaggcatctagttgagataaaacaaaaactcggcatgaacctgatgaatgaattaaaacagaacttcagcaaaagctggcatgacatgcagactaccactgcctacaagaaaacacatgaaaccctgagtcacgcagggcaaaaggcaactgcagctttcagcaacgttggaacggccatcagcaagaagttcggagacatgagacgaaagtaggcggtacgaaccctaatggaggcagttttgaggaggtcctcagctccacggcccatgccagtgcccagagcttggcaggaggctcccggcggaccaaggaggaggagctgcagtgctaagtccagccagcgtgcagctgcatccagaaaccggccactacccagcccatctctgcctgtgcttatccagataagaagaccaaaatcccgctgggaaaaacccaggccttgacattgttattcaaatggcccctccagaaagtttaatgatttccatttgtatttgtgttgatgatggaccacttg

SEQ ID NO: 19814 - DNA, 811 bp, Artificial Sequence
  derived and/or modified sequence
gcggcttgtggctcccaagttagggagtgagaggatcgcccgccgagggggtggctccgcagcccggctgcgcgagacgcttcccgctcggggacccgccttccgaggccaggtgaacgttaccggccccctgacctccagcagatccacacgtttgttggagactgaaccgttgcaaggaacagacgaagatgcagtagccagtgctgacttctctagcatgctctctgaggaggaaaaggaagagttaaaagcagagttagttcagctagaagacgaaattacaacactacgacaagttttgtcagcgaaagaaaggcatctagttgagataaaacaaaaactcggcatgaacctgatgaatgaattaaaacagaacttcagcaaaagctggcatgacatgcagactaccactgcctacaagaaaacacatgaaaccctgagtcacgcagggcaaaaggcaactgcagctttcagcaacgttggaacggccatcagcaagaagttcggagacatgagacgaaagtaggcggtacgaaccctaatggaggcagttttgaggaggtcctcagctccacggcccatgccagtgcccagagcttggcaggaggctcccggcggaccaaggaggaggagctgcagtgctaagtccagccagcgtgcagctgcatccagaaaccggccactacccagcccatctctgcctgtgcttatccagataagaagaccaaaatcccgctgggaaaaacccaggccttgacattgttattcaaatggcccctccagaaagtttaatgatttccatttgtat

SEQ ID NO: 19815 - DNA, 684 bp, Artificial Sequence
  derived and/or modified sequence
gccattctcctgcctcagcctcctgagtagctgggactacaggtgcccgccaccaggcccggctaattttttgtatttttagtagaggcggggttttgcagtgttaaccaggatggtctcgatctcctgaccttgtgatcagcccaccttggcctcccaaagtgctgggattacaggcttgagccaccgcgcctggcccagcttttcttttattagatagcaatgaggatgggatccgaagtagagcttccaacgaccctcaggagcgctgagcgaccaagtgaagtacctacaggacccatttgtgttcactgatctattggagcagctggggattgtggtttgttggagactgaaccgttgcaaggaacagacgaagatgcagtagccagtgctgacttctctagcatgctctctgaggaggaaaaggaagagttaaaagcagagttagttcagctagaagacgaaattacaacactacgacaagttttgtcagcgaaagaaaggcatctagttgagataaaacaaaaactcggcatgaacctgatgaatgaattaaaacagaacttcagcaaaagctggcatgacatgcagactaccactgcctacaagaaaacacatgaaaccctgagtcacgcagggcaaaaggcaactgcagctttcagcaacgttggaacggccatc

SEQ ID NO: 19816 - protein, 835 aa, Artificial Sequence
  derived and/or modified sequence
MAAEEVLQTVDHYKTEIERLTKELTETTHEKIQAAEYGLVVLEEKLTLKQQYDELEAEYDSLKQELEQLKEAFGQSFSIHRKVAEDGETREETLLQESASKEAYYLGKILEMQNELKQSRAVVTNVQAENERLTAVVQDLKENNEMVELQRIRMKDEIREYKFREARLLQDYTELEEENITLQKLVSTLKQNQVEYEGLKHEIKRFEEETVLLNSQLEDAIRLKEIAEHQLEEALETLKNEREQKNNLRKELSQYISLNDNHISISVDGLKFAEDGSEPNNDDKMNGHIHGPLVKLNGDYRTPTLRKGESLNPVSDLFSELNISEIQKLKQQLMQVEREKAILLANLQESQTQLEHTKGALTEQHERVHRLTEHVNAMRGLQSSKELKAELDGEKGRDSGEEAHDYEVDINGLEILECKYRVAVTEVIDLKAEIKALKEKYNKSVENYTDEKAKYESKIQMYDEQVTSLEKTTKESGEKMAHMEKELQKMTSIANENHSTLNTAQDELVTFSEELAQLYHHVCLCNNETPNRVMLDYYRQSRVTRSGSLKGPDDPRGLLSPRLARRGVSSPVETRTSSEPVAKESTEASKEPSPTKTPTISPVITAPPSSPVLDTSDIRKEPMNIYNLNAIIRDQIKHLQKAVDRSLQLSRQRAAARELAPMIDKDKEALMEEILKLKSLLSTKREQIATLRAVLKANKQTAEVALANLKNKYENEKAMVTETMTKLRNELKALKEDAATFSSLRAMFATRCDEYVTQLDEMQRQLAAAEDEKKTLNTLLRMAIQQKLALTQRLEDLEFDHEQSRRSKGKLGKSKIGSPKIVSSLLPPYRHSAHN

SEQ ID NO: 19817 - DNA, 2508 bp, Artificial Sequence
  derived and/or modified sequence
atggctgccgaggaggtgctgcaaactgtcgaccactacaaaacggagattgagagattgactaaagagctcacagagacaacccacgagaagatccaagcagctgaatacggtctcgtggtgctcgaggaaaagcttacactgaagcaacagtacgatgagctcgaagcagagtatgattcactgaagcaggagctcgaacagctcaaggaggcttttggacaatcctttagtatccacagaaaagttgccgaagacggcgagaccagagaggaaaccctcctgcaggaatctgcgagcaaagaagcatactatctgggcaagatcttggagatgcagaatgaactcaaacaatcccgagccgtcgtgacaaacgttcaggccgagaatgagaggctgaccgcagtggtgcaggatctgaaggagaacaatgagatggtggagctgcaacgtatcagaatgaaagacgagatccgcgagtataaattcagggaagctcgcctgcttcaagactatacagagctagaagaagaaaatatcaccttgcagaagctggtatccaccttgaaacaaaatcaggtagaatacgaaggactgaagcatgagataaagcgcttcgaggaggagacagtgcttctcaactcacagttggaagacgccatacgactgaaggagatagcagagcaccagctcgaagaggcgctagaaaccctgaaaaatgaacgtgaacagaaaaacaatcttaggaaggagctgagccagtatatcagcctgaacgataatcatatcagtatctcggtagatggacttaaatttgccgaggatggttccgagccgaacaacgatgataaaatgaacggccacattcacggaccgcttgtcaaactgaatggggattatcgaactcccacactgagaaagggtgaatcactcaaccccgtaagcgacctgttttccgaattgaacatatcggagatacagaaactgaagcagcagcttatgcaggttgagcgagagaaggcgattcttctggccaaccttcaggagagccagacacagcttgagcatacaaagggcgcacttacagagcagcatgaaagggtgcatcggctgacagagcacgttaacgcaatgcggggtctgcagtcctccaaggaactcaaggccgaacttgatggcgagaaggggagagattcaggggaagaagcacatgattacgaggtggatattaatggactggagatccttgagtgtaaataccgcgtggccgtgactgaggtaattgacctgaaggcggagatcaaagcactcaaagaaaagtacaataaatccgtggaaaattataccgatgagaaggcgaaatacgaaagtaagatccaaatgtatgacgaacaggtgacctctctggagaaaaccacaaaggagtcaggagagaaaatggcacacatggagaaagagctacagaagatgaccagcatcgcaaatgagaaccatagcaccctgaacacagcccaggatgaactggtgacattctcggaggaactcgcccaactatatcaccacgtctgcctgtgtaacaatgagaccccaaatagggttatgctggattactatagacaaagtagagtgactcggagcgggtccctcaaaggccccgatgatccaaggggcctgctgtcaccaaggctggcccgccggggcgtgtcttccccagtcgaaactagaacatcatcagaaccagtggctaaagagtctactgaagcttcaaaggagcctagccccacaaaaacaccaactatctcgcctgtgatcactgccccaccgtcctcaccagtactcgacacaagtgacatccgcaaagaaccaatgaacatctataacctcaatgctatcattcgcgaccagatcaagcatctgcagaaagcagttgatcgatccctgcagttgagccgtcagcgagccgcggcgagagagctggctccaatgatcgataaggacaaagaagccctgatggaggaaatcctcaaactgaagagcttattgtcaaccaaaagggaacagatcgctacccttagggccgtgttgaaggccaacaagcagacagcagaagtggccctggccaatttgaagaacaagtatgagaacgagaaagcaatggtgacagagacaatgactaagctgaggaacgagcttaaggctctcaaggaagacgcagcaactttttcctccctgagggccatgtttgcaacacgatgcgacgagtatgtgacgcaactagacgagatgcagagacagcttgccgccgcagaggatgagaagaaaactttaaataccttgctgcggatggcaatccaacagaaactggccttaacacagcgcctggaggatctagaattcgatcatgagcagagtcgccggtcaaaagggaagctgggcaaatctaaaatcggctcacctaaaattgtatcttcgctgctgcctccatacaggcatagtgcccacaattag

SEQ ID NO: 19818 - DNA, 2508 bp, Artificial Sequence
  derived and/or modified sequence
atggctgctgaggaggtgctgcagacagtggaccactacaagacagaaattgagcggctgaccaaggagctgacagagaccacccatgagaagatccaggccgcagaatatggcctggtggtgctggaggagaagctgaccctgaagcagcagtatgatgagctggaggccgagtatgacagcctgaagcaggagctggagcagctgaaggaggccttcggccagagcttcagcatccacaggaaggtggctgaagatggagagacccgggaggagaccctgctgcaggagagcgccagcaaggaggcctactacctgggcaagatcctggagatgcagaatgagctgaagcagagcagagctgtggtgaccaacgtgcaggctgaaaatgaaaggctgacagctgtggtgcaggacctgaaggagaacaatgagatggtggagctgcagaggatccgcatgaaggatgagatccgggagtacaagttccgggaggcccggctgctgcaggactacacagagctggaggaggagaacatcaccctgcagaagctggtgtccaccctgaagcagaaccaggtggagtatgagggcctgaagcatgagatcaagagatttgaggaggagaccgtgctgctgaacagccagctggaggatgccatccggctgaaggagattgctgagcaccagctggaggaggccctggagaccctgaagaatgaaagagagcagaagaacaacctgaggaaggagctgagccagtacatcagcctgaatgacaaccacatcagcatctctgtggatggcctgaagtttgctgaagatggcagcgagcccaacaatgatgacaagatgaatggccacatccacggccccctggtgaagctgaatggagactaccgcacccccaccctgaggaaaggagagagcctgaaccctgtgtctgacctcttcagcgagctgaacatcagcgagatccagaagctgaagcagcagctgatgcaggtggagcgggagaaggccatcctgctggccaacctgcaggagagccagacccagctggagcacaccaagggggccctgacagagcagcacgagcgggtgcaccggctgacagagcacgtgaatgccatgaggggcctgcagagcagcaaggagctgaaggccgagctggatggagagaagggccgggacagcggggaggaggcccatgactatgaggtggacatcaatggcctggagatcctggagtgcaagtacagagtggccgtgacagaggtgattgacctgaaggccgagatcaaggccctgaaggagaagtacaacaagtctgtggagaactacacagatgagaaggccaagtatgagagcaagatccagatgtatgatgagcaggtgaccagcctggagaagaccaccaaggagagcggggagaagatggcccacatggagaaggagctgcagaagatgaccagcatcgccaatgaaaaccacagcaccctgaacacagcccaggatgagctggtgaccttcagcgaggagctggcccagctgtaccaccacgtgtgcctgtgcaacaatgagacccccaacagagtgatgctggactactaccggcagagccgggtgaccaggagcggcagcctgaagggcccagatgacccccggggcctgctgagcccccggctggccaggagaggagtgagcagccctgtggagaccaggaccagcagcgagcctgtggccaaggagagcacagaggccagcaaggagcccagccccaccaagacccccaccatcagccctgtgatcacagccccacccagcagccctgtgctggacaccagtgacatcaggaaggagcccatgaacatctacaacctgaatgccatcatccgggaccagatcaagcacctgcagaaggctgtggacaggagcctgcagctgagccggcagagagctgctgcccgggagctggcccccatgattgacaaggacaaggaggccctgatggaggagatcctgaagctgaagagcctgctgagcaccaagcgggagcagatcgccaccctgcgggctgtgctgaaggccaacaagcagacagctgaggtggccctggccaacctgaagaacaagtatgaaaatgagaaggccatggtgacagagaccatgaccaagctgagaaatgagctgaaggccctgaaggaggatgctgccaccttcagcagcctgcgggccatgtttgccacccgctgtgatgaatatgtgacccagctggatgagatgcagaggcagctggccgctgctgaagatgagaagaagaccctgaacaccctgctgaggatggccatccagcagaagctggccctgacccagaggctggaggacctggagtttgaccacgagcagagcagaagaagcaagggcaagctgggcaagagcaagattggcagccccaagatcgtgagcagcctgctgcccccctaccgccacagcgcccacaactag

SEQ ID NO: 19819 - DNA, 2508 bp, Artificial Sequence
  derived and/or modified sequence
atggccgccgaggaggtgctgcagaccgtggaccactacaagaccgaaatagaacgtctgacgaaagagcttaccgagaccacacacgagaaaattcaagccgcagaatatggtctagtagtactggaagagaagttgaccctgaaacaacagtacgacgagctggaggccgaatacgattccctgaagcaggagctggagcagttaaaggaggctttcggccagtctttttctatacaccggaaggtggccgaggacggagaaactcgcgaggagacactgctgcaggaaagcgcatccaaagaggcgtattatttaggaaagatcctggagatgcaaaacgaattaaagcagtcgagagccgtggtcacgaatgtacaggcagagaatgaacgactgaccgccgtcgtgcaggatctgaaggagaataatgagatggtggagctgcaacggatccgaatgaaagacgaaatccgcgagtacaagtttcgagaggcacgcctgctccaggactataccgaactcgaggaagagaatattacgctacaaaagctagtgagcactctgaagcaaaaccaagtagaatatgagggactgaaacatgaaatcaaacgcttcgaggaggaaacagttttgctcaacagtcagctggaggacgctatccggctgaaggagattgcagaacaccagctcgaggaggctctcgaaacattgaagaatgaacgggaacagaagaacaatcttcgtaaggagctatcccagtacatcagcctaaatgacaaccacatctctatcagcgtcgatggcttgaagtttgcagaggacgggtcagagcccaataacgacgataagatgaacgggcacatccacggcccactggtgaaactcaacggcgactaccggacccccactctcaggaagggggaatctctgaatccagtgagtgatctgttctctgagctgaacatatctgagatccagaagctcaagcagcagctcatgcaggtagaaagggagaaagcgattcttctggctaatctacaggaatctcagacccaactggagcacactaaaggggctctaactgaacagcacgaacgggtacataggctgacggagcatgttaacgcaatgagaggcctccagagcagcaaagaactgaaggccgaacttgacggcgaaaagggacgggattcaggggaggaggcccatgactacgaggtggacattaacggcctcgagatactggaatgcaagtatagagtagcagtcaccgaagtgattgacctgaaggccgaaatcaaagcgttaaaggagaaatataacaagtcggtcgagaactacactgacgaaaaggcaaagtacgagagtaaaatccagatgtacgacgagcaggttacatcccttgagaagactaccaaagaatctggcgagaaaatggctcatatggaaaaagaactccagaaaatgactagcatagccaatgaaaaccactccaccttaaataccgcccaggacgaactggtgactttctctgaagagctggcccagctgtaccaccatgtctgtctgtgcaacaatgaaactcctaatcgcgtgatgctcgattattatcggcagagcagagtcacacgcagcgggagtctgaaggggcccgacgaccctcggggacttttatcccccaggctggccaggcgtggcgtgtcctctcctgttgaaacgaggacatctagcgaacccgttgccaaggaaagtaccgaagcctccaaggagccttcaccaacaaaaaccccaaccatcagcccggtcatcacagcccccccgagtagccccgtgctggatacttcagacatcaggaaggaaccaatgaacatctacaacctgaacgccatcattcgggatcaaataaagcacttgcagaaggctgttgaccgctcactccagctgagcaggcagagagctgcagcccgggagctagcccccatgatagacaaagataaggaagcgcttatggaggaaatcctcaagctcaaatcactgttgagcacaaagagggagcagatcgccactttaagggctgtgctcaaggcaaataagcagaccgccgaagttgctttggctaacctcaaaaataagtacgagaatgagaaggcaatggtcactgagacaatgacaaagctgagaaatgaacttaaggcacttaaggaggatgccgctacgttcagctcattacgcgccatgtttgcaactcgctgtgacgagtacgtaacacagcttgatgaaatgcagcgccagttggcggccgcagaagacgagaagaagacactgaatacactgcttcgtatggctattcagcagaaactcgccctcactcaaagacttgaagatctggagtttgaccacgagcagtcacgccgttctaagggcaaactgggcaagtccaagattggaagcccaaaaattgtatcatcactgcttcccccttataggcactcagctcataattag

SEQ ID NO: 19820 - DNA, 2508 bp, Artificial Sequence
  derived and/or modified sequence
atggccgcagaagaggtgctccaaaccgtggatcactataagaccgagatagagaggttgaccaaggaattaacggaaaccacacatgaaaaaatccaggctgccgaatatgggctagtggtgctcgaagagaaactgacacttaagcaacagtacgatgaactggaggccgagtacgactctttaaagcaggagctcgagcagctgaaagaagcctttgggcagagtttttctatccatcggaaggttgcagaggacggcgaaacaagagaggagaccctgctacaggagtccgcatccaaagaagcatactacctcggcaagatcctggagatgcaaaacgagctgaagcagtcccgggctgtagtgactaacgtacaggcagaaaacgagcgcctgacagcagtcgtgcaggacctcaaggaaaataacgagatggtcgagctccagcgcattagaatgaaagatgaaatccgtgagtacaagttccgcgaagcgagactgctgcaggactatacagaattagaggaagagaatattacactgcagaaactggtgtcgaccttgaagcagaaccaggttgaatacgagggccttaagcatgagattaaaaggtttgaagaggagaccgtgctcctgaattctcagctggaggacgctatacgtctgaaagaaatcgctgagcatcagcttgaggaagccctggaaaccctgaagaatgagcgggagcagaaaaataacctcaggaaggaactgagtcaatacatctcgctgaatgataatcatatttctattagcgttgatggcctgaagtttgccgaggatgggtctgaacccaataacgatgacaagatgaatggacacatccacgggccactggtaaagctgaacggcgactaccggaccccaactctgaggaagggcgagagcctgaatccagtttccgacctcttcagcgagctgaacataagcgagatccagaagctgaaacagcaacttatgcaggtggagagggaaaaagcgatcctccttgcaaacttacaagaatcacaaacccagttagaacacactaagggggcactgactgagcagcacgagagggtgcacaggctgactgaacatgtcaacgccatgaggggactgcaaagtagtaaagaactcaaagcggagcttgatggagagaaaggacgggacagcggagaagaagcacacgattacgaagtcgatattaatgggcttgagatcttggagtgcaagtaccgcgtagccgtcactgaggttatcgacttaaaggccgaaattaaggcactgaaagaaaaatacaataaatctgtcgagaactatacagacgaaaaggccaaatatgaaagtaagatacagatgtatgacgagcaagtgacttctctggagaagaccactaaggaatctggggaaaagatggcccacatggagaaagaactacaaaagatgacctcaatcgccaatgagaaccactctactctaaacactgcgcaggatgaattggtgaccttctctgaggagctagctcaactgtaccatcacgtatgtctgtgtaataatgagactcctaaccgcgtcatgctcgactactaccgccagtctcgcgtcaccagatcgggaagcttaaaggggccagatgatcctcggggactcttatctccgaggctggctcggagaggtgtaagctctccggttgaaactcgcacgtcgtctgaacctgtggccaaggagagtacggaggccagcaaagaaccctcaccgactaaaacacccaccatttcccctgtgatcacagcccctcctagttcacccgttctggacacatccgacattcgaaaagagccaatgaacatctacaatctcaacgcaataatccgtgatcagatcaagcacctccaaaaggctgtcgatcgctccctccaattatctcggcagagggccgcagctcgagaattagcaccaatgatcgataaagacaaagaagcccttatggaagaaatcctgaaactgaagtccctgctgtcaaccaagcgcgagcagatcgccacattacgtgccgtactcaaggccaataagcagacggccgaggtggccctggccaacctgaagaacaagtacgagaatgaaaaggccatggtgactgagaccatgactaagctcaggaacgaattaaaggccctgaaagaggatgcggcaaccttcagttccctgcgagccatgttcgcaacaaggtgcgatgaatatgtgacccagttggacgagatgcagcggcagctcgccgcagcagaagatgaaaaaaagaccttgaacactctgctgcggatggctatacagcagaaattagctctgactcaaaggctcgaagacttggaattcgaccacgaacaatcgcggagatctaagggcaaacttggaaagtcaaagattggttccccgaaaatcgttagctctttgctccctccctacaggcattccgcacacaattag

SEQ ID NO: 19821 - DNA, 8811 bp, Artificial Sequence
  derived and/or modified sequence
ctcgggcggtgtagctgccgctgccaccagagccggcggggcatcgcgctgctcattcatccggccgcactttcttttccgtttccacccatcccttcccatttccttctccctttccccgccagcttcgcatccatctcccccaccccgtaaccccctcctgcctccatccaccggggctatggccgcagaagaggtattgcagacggtggaccattataagactgagatagagaggctaaccaaggagctcacggagaccacccacgagaagatccaggctgccgagtacgggctggtggtgctggaggagaagctgaccctcaaacagcagtatgatgaactggaggctgagtacgacagcctcaaacaggagctggagcagctcaaagaggcatttgggcagtccttctccatccaccggaaggttgctgaagatggagagactcgggaggaaacgcttctgcaggagtcagcatcgaaggaggcttactatctggggaagatcttggagatgcagaacgagctgaaacagagccgggctgtggtcactaatgtacaggcagaaaacgagaggctcaccgcagtcgtgcaggatctgaaggagaacaatgagatggtggagctacagagaatacggatgaaggatgaaatccgagaatataagttccgggaggcacggctccttcaggactatactgaattggaagaagaaaatatcacattgcagaaactagtgtccacgttgaagcagaaccaggttgaatacgaaggcttaaagcatgagattaagcgatttgaggaggagacggtactgctgaacagccagctggaagatgccatccgattgaaagagattgctgagcaccaactggaagaagccctcgagactttaaaaaatgaaagagagcaaaagaacaacctgcggaaggagctctcccagtatatcagcctcaatgataaccatatcagcatctcagtagatggactcaaatttgccgaggatgggagtgaaccaaacaatgatgacaaaatgaacggtcatatccatgggcctcttgtgaaactgaatggagactatcggactcccaccttaaggaaaggagagtctctgaaccctgtctctgacttattcagtgagctgaacatttcagaaatacagaagttgaagcagcagcttatgcaggtagagcgggaaaaggccattcttttggccaacctacaggagtcacagacacagctggaacacaccaagggggcactgacggagcagcatgagcgggtgcaccggctcacagagcacgtcaatgccatgaggggcctgcaaagcagcaaggagctcaaggctgagctggacggggagaagggccgggactcaggggaggaggcccatgactatgaggtggacatcaatggtttagagatccttgaatgcaaatacagggtggcagtaactgaggtgattgatctgaaagctgaaattaaggccttaaaggagaaatataataaatctgtagaaaactacactgatgagaaggccaagtatgagagtaaaatccagatgtatgatgagcaggtgacaagccttgagaagaccaccaaggagagtggtgagaagatggcccacatggagaaggagttgcaaaagatgaccagcatagccaacgaaaatcacagtacccttaatacggcccaggatgagttagtgacattcagtgaggagttagctcagctttaccaccatgtgtgtctatgtaataatgaaactcccaacagggtcatgctggattactataggcagagcagagtcacccgcagtggcagcctgaaagggcccgatgatcccagaggacttttgtccccacgattagccaggcggggtgtgtcatccccggtagaaacaaggacctcatctgaaccagttgcaaaagaaagcacagaggccagcaaagaaccaagtccaactaagacccccacaatctctcctgttattactgccccaccgtcatctccagtattggatacaagtgacatccgcaaagagccaatgaatatctacaaccttaatgccataatccgggaccaaatcaagcatctgcagaaagctgtggaccggtccttgcaactgtctcgtcaaagagcagcggctcgggagctagcccccatgattgataaagacaaggaagccttaatggaagagatcctcaagctaaagtccctgctgagcaccaaacgggagcagatcgccacattgagggcggtgttgaaagccaacaagcagacagctgaggtggcgctagctaatctcaagaacaaatatgaaaatgaaaaagcaatggtgactgaaaccatgacgaagcttagaaatgaactgaaggctttgaaagaagatgctgcaaccttctcatccctgagagcaatgtttgcaacaagatgtgatgaatatgtcacccagttggatgagatgcagagacagttagcagctgcagaggatgagaagaagactctgaacactttgttacgaatggctatccagcaaaaactcgccctgacccagaggctggaggacttagagtttgaccatgagcagtcccgacgcagcaaaggcaaacttggaaagagcaagatcggcagccctaaaattgtcagcagcctgctgcctccgtaccgccacagtgctcacaactagccgggaggcaagactgcccaactgtcagtcctgacacagctctccctgaggagcagccacattccagctcccagtgcgcccctctccactgtctctccaagcctcctcacccctagtcttcatctcctgtggacgaacatctggggtggaagttttgtagccacacacaggatactgcccaagatccagcgggtgttttcttctcggttgttagatgtacaattggattaatgtccatcgttttggaagacgagagaaagttgagaagaacacgaagcacagaccctgatgtgataaaacattttgtggtttctctgagtcacagataaacttctgccatcaaatggctacagttcatttaaatttaaaaaaaagaaaaaagaaacagaaaacgtgtctcagatggctggctttacctcgatagcataagagagacctaagacatgtaaaatacgtatattgcagtatcatctttcctcacactccaaattcagctagggaagttgattccaatatgtttgtcattgatatttattttgtactttatttgctacatgatttatgtctatacaaataatttctctgaggtgaatttaattcatttattttcaaataagcataatttgctcaattaagtatgagtttgaatttagtttgaaatctggaattggccagactgtggtcatttttcttgcacaaaatgataaatgaggtgcatcagaatgttaacaataactgtattttgctgctacgctggtattgtttaggcacttactttctaatcagtagctcattaactgctgggttttgtttttgtatttttaactagagttcttcactggacattactaagtaaatctaagaaagagactaagttatgatttattgacttattcaagttttgatggcatctttacttttattttttcattgcagttgagtagatgtactggtgctgctcctttgtatgtgtgtatgtgtgtgataacgttaaagaaggctcaataacttgaagggaaaaaaatggtgtgtttatttaatgaccagaattttttttacttctcccaaaatcagggtcctactgagtctttcctgataaaaggtatcaagtacaaatgggaaaatatatacatatatagatgtaagatagcctttaattaattaatttacccagagagtgttcaaagtttgattaaaattgtatgttttgttgttgttagtttttttcataacgaatcttccttgccaaaaaaacaatagataataaaccttagctcattgtctacttttgacaaacactcaggtgcctacaaacattctattatcttgagataatacatgttcctggttaatttacagattctgctgggtaacttttatgacttgatttaaggcagtggattttcatagcaaaatttattttgcacataatctgacaaacaaggaaaacagctaactgagctgaaaggtctaacactctcgggctccttaaccatcaagtgctgcccacacaattgctcctagccctgattccttgtctttgtcaggtagccttaacttatttaaaaccataagggtttgaccttttcatataaagacatctgtaacttctcttcaaaacaaaaatgaccctcactgttaacacaaaggacagttaccagtgtagggcactgagaaaggagatccaggagccactcagcttattgagcggacatgggtggcacagaaatggagtggtccatcagagaccaaatggtaagtcgtaaagcacattgcaggagctttcgttagtcatacgcctattaagtagtggtcgctattaccaaagcaaccaggacgttttgtgttctttatatgagtgctattttccacagtgtcatttattatgcaacgtggagtaaagagttgaaatcttcaccaaaataagggttcaggttaaagtacagaaacagaaacaaaacgattcgacatgaagttcccaaccatagcagcctaaccttctgctcttttctacctgcatggccttgctgttcctaaacattgtcttcatttcactggcgttgtatctgcctagtaccagtattagtgagactgtggattttatcagagttcaatgaaagaaagcttacccctgccctcactttgtgttttttatttttccccctttctcaagcaccacgtatttggacctgagaagtggcatagctgctaagttgacttttaataaaaaactgtttgtgcctgagggaaatatatgcctttttaaaaagtacctcagaacatgttcgtagatcgtctcatcggttttgtttggtgggactgggagttcagcaggaagtattgtctgtgtgtgatgacggggcagtattgccagtcggcaatgttgtatttgcattctttatccctaactctgaatctaggactccatgaaaagccgggtcacccacaaaacatttcttccaatacaaagtgtattattacgtctattataaactagtttcatttcagttatttatcttcatagagtgggaaagtctttttctgaaatactaattctatgaaaataataattttagtgaatctttgccaagaagttatagaaacttggaaataaatttctcattttcagcacaaaattaagtgatagtccctaagcagtaagagagaataccatgtatttacactgtggcatcatttagtatagtttacactgagccatatttatttataggcatttaaagtgaatcagtatgtgtagtgttgataaaaatcagtatctgtaaagataacatcaggaattcaaaaggaaattgaaaaggggcagaactagtgagaaccaaaaagaatgaactccagtaagactaattgaagacatacttggagaggaaaaataaacagcagaaatgcactaaaaaatactggctaattattgcaaacagagtgagcaaagattaatgctaactagtaaaagtagttagcaaagtaaacaggtagttttttaaaagtaagcacaattacaatattgaatagtatggagaaatgcttttctcctgaggattttccttaatcaaaaaataagaagaagcaataaattgtctttggcctgagtgctgagtggcataaataaaggagcttggcttaatctttctggtccacacataatccattagatcccattcatatatccaactctggattctaataaaataatttggagaactttgagaaaaaggaaaactgttaaataagaaaagacctatttagaaattatactttagtctaacgaagaggaggtacaatagtagtcttcaagaaaagaatatttaacaaatgatagatatcagctatagatattgttactaagtctagaataaaaaaggcttcagtgtgaaggatgtatagtaactctaggaaagagatttttaacactgggaaattaacgtggaaattgataatcataaagaatatttgttttgtaaaaattgaatatcattggtggtctagtaagtattaagtggcaagataggagaatgcatttcagttctgggagctcataatcctgtgattcttttattttaagttttaaaatacattaaaattttactggttaatcataaaatattttatatttgaaaataggatggcaatctttatttttccaagatatttgttggaaaaaaatgatcgttggtattattttttctttcagctatattccatggtatctttaaaattgttcagaatataggacttttactaaaaaaattcaattgtcagagtctaaaaaaacaatgtcctcaggaatacttcagaaatagaaggtatgcaatcccttagtggggggcaaacacatttcagatttcgtctttatttaaaaggatcttcagtctacaacatttgcttttttcgtgctttggaaaatatccttgtgcagataagttcttctgtttgaaacaagcatgaaacattggtccaataacctaagaatgtggagatttcttgatattctgtattaattaaagttctctacatgtctcaaatggagatcacaaaacatgaaaaggaagaaatgaaatatcttttcttctgggatgagtgtcaattttaatgtataattgtcataatcaatcagccaaaagttacaatctgtccctcagagacattgggggaagctgatggatttccagtaaggaactgtggtgggttcaaactcaggctgccacaaatacattgatatggtaggtaggaagtaggactaaatttgaaagaaacttatgggataaagttcacaattttaaaaaggttgccctccagtttttttgtttgtttataaactagagtgatttttaagtaacccttatatttaaggctgcaaaaaatgtacaagagtatgttttcaagtaaagggaacataattcttcaaaaagctgttgaactggagttatgataggttatgacagagagcatgatcagtgctgatactgacaagtacttttttaccttaaaatcaacttctatggaactacaagatcaatctagctcccgagtgacattttccattgtctgtaataatgccctcggatgagttgtgtctaaaattaagttcatctttatttatatgcgaacttaactgccatagtccctaatgtattgcgtttgtaacctgatcgtattatgtttacagctgaaagatttcatctagacatgtctttcgtccttattattcaaagtgtaattgaaagagatatttagtattaagacatgttccccaattgagaattttccagaatattctacttaagaagaagaagagcaattaactgcctttagtgtaagggcgagagtgcatagaaatatgcaatgtaaaatgtttgcatgaattatttcacatcatgtaagctttcccatattcataagatgaacactatagaagtctcatttctctgtgatcttctgtccattaggaaagtaaggagattgttatctatatctagtctcctttccatattgaactgcatggctctaatcctcagtgtatttttatcccttctcgagttatttaaaatttgccctatttaagctgaagcctggataaactgctgagccagattattcctgtgattggagtttaattgctgtagaacacttgttgagaacacattttttactttttttctttcagaattattcctcaatcattgttctctaatgaaaacaccgagaagtaaatctggtgcttcttagtgtaaatatgtttttctttttaaaaagtcattttaaaacaaagatgagagaactataaagtaaggggaaatatcattttatttaaaaataattattcaatgatagataatggagatacagaatgactcattgggttcataggtatgatttgtgcagccagtcttagaggaaatacatcattttaacattattcccacaaaatgttaaagctcaatggtttgactatgagagtcaaacaattactatttgaaaatctcttatgacatttttataatctactctgtttttatttgcatgattatgcttatgtgatgaaccatccatgattctgatattgtatttctttccagtattaacatgtgtattgtgtggccaactctgatttgtacaccgtattattgttgtaatgattcaactgttcctacatttaattgcagtttaattattatgccttttggggttaaatgatgtgaagtgtttccacctactgataaataccatatgaaaacacgactaaaagactgatttaagaaacttgttatttttaaaaatatgaatttcaaaagaaatgttctcaaagacacatgcatttattttaaattcaaaaaattcttatgaatttattattgcttgtactttaactttttttattgtagacaatcctaagtgaataatgtctcatgggagaacacatgatatgtgcttgtatttgtgtaatctgatcatgcactcaatggttggaaaaggcactccagtgctaagaaaataaccagaagccaatatatcgattcttatatctcggtttatgttaccaactgaatatggtgtaatgcataactttttccagtaaataaactggttattttttgttcatttca

SEQ ID NO: 19822 - DNA, 2508 bp, Artificial Sequence
  derived and/or modified sequence
atggccgccgaggaggtgctgcagaccgtggaccactacaagaccgagatcgagagactgaccaaggagctgaccgagaccacccacgagaagatccaggccgccgagtacggcctggtggtgctggaggagaagctgaccctgaagcagcagtacgacgagctggaggccgagtacgacagcctgaagcaggagctggagcagctgaaggaggccttcggccagagcttcagcatccacagaaaggtggccgaggacggcgagaccagagaggagaccctgctgcaggagagcgccagcaaggaggcctactacctgggcaagatcctggagatgcagaacgagctgaagcagagcagagccgtggtgaccaacgtgcaggccgagaacgagagactgaccgccgtggtgcaggacctgaaggagaacaacgagatggtggagctgcagagaatcagaatgaaggacgagatcagagagtacaagttcagagaggccagactgctgcaggactacaccgagctggaggaggagaacatcaccctgcagaagctggtgagcaccctgaagcagaaccaggtggagtacgagggcctgaagcacgagatcaagagattcgaggaggagaccgtgctgctgaacagccagctggaggacgccatcagactgaaggagatcgccgagcaccagctggaggaggccctggagaccctgaagaacgagagagagcagaagaacaacctgagaaaggagctgagccagtacatcagcctgaacgacaaccacatcagcatcagcgtggacggcctgaagttcgccgaggacggcagcgagcccaacaacgacgacaagatgaacggccacatccacggccccctggtgaagctgaacggcgactacagaacccccaccctgagaaagggcgagagcctgaaccccgtgagcgacctgttcagcgagctgaacatcagcgagatccagaagctgaagcagcagctgatgcaggtggagagagagaaggccatcctgctggccaacctgcaggagagccagacccagctggagcacaccaagggcgccctgaccgagcagcacgagagagtgcacagactgaccgagcacgtgaacgccatgagaggcctgcagagcagcaaggagctgaaggccgagctggacggcgagaagggcagagacagcggcgaggaggcccacgactacgaggtggacatcaacggcctggagatcctggagtgcaagtacagagtggccgtgaccgaggtgatcgacctgaaggccgagatcaaggccctgaaggagaagtacaacaagagcgtggagaactacaccgacgagaaggccaagtacgagagcaagatccagatgtacgacgagcaggtgaccagcctggagaagaccaccaaggagagcggcgagaagatggcccacatggagaaggagctgcagaagatgaccagcatcgccaacgagaaccacagcaccctgaacaccgcccaggacgagctggtgaccttcagcgaggagctggcccagctgtaccaccacgtgtgcctgtgcaacaacgagacccccaacagagtgatgctggactactacagacagagcagagtgaccagaagcggcagcctgaagggccccgacgaccccagaggcctgctgagccccagactggccagaagaggcgtgagcagccccgtggagaccagaaccagcagcgagcccgtggccaaggagagcaccgaggccagcaaggagcccagccccaccaagacccccaccatcagccccgtgatcaccgccccccccagcagccccgtgctggacaccagcgacatcagaaaggagcccatgaacatctacaacctgaacgccatcatcagagaccagatcaagcacctgcagaaggccgtggacagaagcctgcagctgagcagacagagagccgccgccagagagctggcccccatgatcgacaaggacaaggaggccctgatggaggagatcctgaagctgaagagcctgctgagcaccaagagagagcagatcgccaccctgagagccgtgctgaaggccaacaagcagaccgccgaggtggccctggccaacctgaagaacaagtacgagaacgagaaggccatggtgaccgagaccatgaccaagctgagaaacgagctgaaggccctgaaggaggacgccgccaccttcagcagcctgagagccatgttcgccaccagatgcgacgagtacgtgacccagctggacgagatgcagagacagctggccgccgccgaggacgagaagaagaccctgaacaccctgctgagaatggccatccagcagaagctggccctgacccagagactggaggacctggagttcgaccacgagcagagcagaagaagcaagggcaagctgggcaagagcaagatcggcagccccaagatcgtgagcagcctgctgcccccctacagacacagcgcccacaactag

SEQ ID NO: 19823 - protein, 718 aa, Artificial Sequence
  derived and/or modified sequence
MLMTLEMTELTDPHHTMGDYKVAHPQDPHHPSEKPVIHCHKCGEPCKGEVLRVQTKHFHIKCFTCKVCGCDLAQGGFFIKNGEYLCTLDYQRMYGTRCHGCGEFVEGEVVTALGKTYHPNCFACTICKRPFPPGDRVTFNGRDCLCQLCAQPMSSSPKETTFSSNCAGCGRDIKNGQALLALDKQWHLGCFKCKSCGKVLTGEYISKDGAPYCEKDYQGLFGVKCEACHQFITGKVLEAGDKHYHPSCARCSRCNQMFTEGEEMYLQGSTVWHPDCKQSTKTEEKLRPTRTSSESIYSRPGSSIPGSPGHTIYAKVDNEILDYKDLAAIPKVKAIYDIERPDLITYEPFYTSGYDDKQERQSLGESPRTLSPTPSAEGYQDVRDRMIHRSTSQGSINSPVYSRHSYTPTTSRSPQHFHRPGNEPSSGRNSPLPYRPDSRPLTPTYAQAPKHFHVPDQGINIYRKPPIYKQHAALAAQSKSSEDIIKFSKFPAAQAPDPSETPKIETDHWPGPPSFAVVGPDMKRRSSGREEDDEELLRRRQLQEEQLMKLNSGLGQLILKEEMEKESRERSSLLASRYDSPINSASHIPSSKTASLPGYGRNGLHRPVSTDFAQYNSYGDVSGGVRDYQTLPDGHMPAMRMDRGVSMPNMLEPKIFPYEMLMVTNRGRNKILREVDRTRLERHLAPEVFREIFGMSIQEFDRLPLWRRNDMKKKAKLF

SEQ ID NO: 19824 - protein, 702 aa, Artificial Sequence
  derived and/or modified sequence
MVKEKVAHPQDPHHPSEKPVIHCHKCGEPCKGEVLRVQTKHFHIKCFTCKVCGCDLAQGGFFIKNGEYLCTLDYQRMYGTRCHGCGEFVEGEVVTALGKTYHPNCFACTICKRPFPPGDRVTFNGRDCLCQLCAQPMSSSPKETTFSSNCAGCGRDIKNGQALLALDKQWHLGCFKCKSCGKVLTGEYISKDGAPYCEKDYQGLFGVKCEACHQFITGKVLEAGDKHYHPSCARCSRCNQMFTEGEEMYLQGSTVWHPDCKQSTKTEEKLRPTRTSSESIYSRPGSSIPGSPGHTIYAKVDNEILDYKDLAAIPKVKAIYDIERPDLITYEPFYTSGYDDKQERQSLGESPRTLSPTPSAEGYQDVRDRMIHRSTSQGSINSPVYSRHSYTPTTSRSPQHFHRPGNEPSSGRNSPLPYRPDSRPLTPTYAQAPKHFHVPDQGINIYRKPPIYKQHAALAAQSKSSEDIIKFSKFPAAQAPDPSETPKIETDHWPGPPSFAVVGPDMKRRSSGREEDDEELLRRRQLQEEQLMKLNSGLGQLILKEEMEKESRERSSLLASRYDSPINSASHIPSSKTASLPGYGRNGLHRPVSTDFAQYNSYGDVSGGVRDYQTLPDGHMPAMRMDRGVSMPNMLEPKIFPYEMLMVTNRGRNKILREVDRTRLERHLAPEVFREIFGMSIQEFDRLPLWRRNDMKKKAKLF

SEQ ID NO: 19825 - protein, 718 aa, Artificial Sequence
  derived and/or modified sequence
MLMTLEMTELTDPHHTMGDYKVAHPQDPHHPSEKPVIHCHKCGEPCKGEVLRVQTKHFHIKCFTCKVCGCDLAQGGFFIKNGEYLCTLDYQRMYGTRCHGCGEFVEGEVVTALGKTYHPNCFACTICKRPFPPGDRVTFNGRDCLCQLCAQPMSSSPKETTFSSNCAGCGRDIKNGQALLALDKQWHLGCFKCKSCGKVLTGEYISKDGAPYCEKDYQGLFGVKCEACHQFITGKVLEAGDKHYHPSCARCSRCNQMFTEGEEMYLQGSTVWHPDCKQSTKTEEKLRPTRTSSESIYSRPGSSIPGSPGHTIYAKVDNEILDYKDLAAIPKVKAIYDIERPDLITYEPFYTSGYDDKQERQSLGESPRTLSPTPSAEGYQDVRDRMIHRSTSQGSINSPVYSRHSYTPTTSRSPQHFHRPGNEPSSGRNSPLPYRPDSRPLTPTYAQAPKHFHVPDQGINIYRKPPIYKQHAALAAQSKSSEDIIKFSKFPAAQAPDPSETPKIETDHWPGPPSFAVVGPDMKRRSSGREEDDEELLRRRQLQEEQLMKLNSGLGQLILKEEMEKESRERSSLLASRYDSPINSASHIPSSKTASLPGYGRNGLHRPVSTDFAQYNSYGDVSGGVRDFQTLPDGHMPAMRMDRGVSMPNMLEPKIFPYEMLMVTNRGRNKILREVDRTRLERHLAPEVFREIFGMSIQEFDRLPLWRRNDMKKKAKLF

SEQ ID NO: 19826 - DNA, 2157 bp, Artificial Sequence
  derived and/or modified sequence
atgctgatgaccctggagatgaccgagctgaccgacccccaccacaccatgggcgactacaaggtggcccacccccaggacccccaccaccccagcgagaagcccgtgatccactgccacaagtgcggcgagccctgcaagggcgaggtgctgagagtgcagaccaagcacttccacatcaagtgcttcacctgcaaggtgtgcggctgcgacctggcccagggcggcttcttcatcaagaacggcgagtacctgtgcaccctggactaccagagaatgtacggcaccagatgccacggctgcggcgagttcgtggagggcgaggtggtgaccgccctgggcaagacctaccaccccaactgcttcgcctgcaccatctgcaagagacccttcccccccggcgacagagtgaccttcaacggcagagactgcctgtgccagctgtgcgcccagcccatgagcagcagccccaaggagaccaccttcagcagcaactgcgccggctgcggcagagacatcaagaacggccaggccctgctggccctggacaagcagtggcacctgggctgcttcaagtgcaagagctgcggcaaggtgctgaccggcgagtacatcagcaaggacggcgccccctactgcgagaaggactaccagggcctgttcggcgtgaagtgcgaggcctgccaccagttcatcaccggcaaggtgctggaggccggcgacaagcactaccaccccagctgcgccagatgcagcagatgcaaccagatgttcaccgagggcgaggagatgtacctgcagggcagcaccgtgtggcaccccgactgcaagcagagcaccaagaccgaggagaagctgagacccaccagaaccagcagcgagagcatctacagcagacccggcagcagcatccccggcagccccggccacaccatctacgccaaggtggacaacgagatcctggactacaaggacctggccgccatccccaaggtgaaggccatctacgacatcgagagacccgacctgatcacctacgagcccttctacaccagcggctacgacgacaagcaggagagacagagcctgggcgagagccccagaaccctgagccccacccccagcgccgagggctaccaggacgtgagagacagaatgatccacagaagcaccagccagggcagcatcaacagccccgtgtacagcagacacagctacacccccaccaccagcagaagcccccagcacttccacagacccggcaacgagcccagcagcggcagaaacagccccctgccctacagacccgacagcagacccctgacccccacctacgcccaggcccccaagcacttccacgtgcccgaccagggcatcaacatctacagaaagccccccatctacaagcagcacgccgccctggccgcccagagcaagagcagcgaggacatcatcaagttcagcaagttccccgccgcccaggcccccgaccccagcgagacccccaagatcgagaccgaccactggcccggcccccccagcttcgccgtggtgggccccgacatgaagagaagaagcagcggcagagaggaggacgacgaggagctgctgagaagaagacagctgcaggaggagcagctgatgaagctgaacagcggcctgggccagctgatcctgaaggaggagatggagaaggagagcagagagagaagcagcctgctggccagcagatacgacagccccatcaacagcgccagccacatccccagcagcaagaccgccagcctgcccggctacggcagaaacggcctgcacagacccgtgagcaccgacttcgcccagtacaacagctacggcgacgtgagcggcggcgtgagagactaccagaccctgcccgacggccacatgcccgccatgagaatggacagaggcgtgagcatgcccaacatgctggagcccaagatcttcccctacgagatgctgatggtgaccaacagaggcagaaacaagatcctgagagaggtggacagaaccagactggagagacacctggcccccgaggtgttcagagagatcttcggcatgagcatccaggagttcgacagactgcccctgtggagaagaaacgacatgaagaagaaggccaagctgttctag

SEQ ID NO: 19827 - DNA, 2109 bp, Artificial Sequence
  derived and/or modified sequence
atggtgaaggagaaggtggcccacccccaggacccccaccaccccagcgagaagcccgtgatccactgccacaagtgcggcgagccctgcaagggcgaggtgctgagagtgcagaccaagcacttccacatcaagtgcttcacctgcaaggtgtgcggctgcgacctggcccagggcggcttcttcatcaagaacggcgagtacctgtgcaccctggactaccagagaatgtacggcaccagatgccacggctgcggcgagttcgtggagggcgaggtggtgaccgccctgggcaagacctaccaccccaactgcttcgcctgcaccatctgcaagagacccttcccccccggcgacagagtgaccttcaacggcagagactgcctgtgccagctgtgcgcccagcccatgagcagcagccccaaggagaccaccttcagcagcaactgcgccggctgcggcagagacatcaagaacggccaggccctgctggccctggacaagcagtggcacctgggctgcttcaagtgcaagagctgcggcaaggtgctgaccggcgagtacatcagcaaggacggcgccccctactgcgagaaggactaccagggcctgttcggcgtgaagtgcgaggcctgccaccagttcatcaccggcaaggtgctggaggccggcgacaagcactaccaccccagctgcgccagatgcagcagatgcaaccagatgttcaccgagggcgaggagatgtacctgcagggcagcaccgtgtggcaccccgactgcaagcagagcaccaagaccgaggagaagctgagacccaccagaaccagcagcgagagcatctacagcagacccggcagcagcatccccggcagccccggccacaccatctacgccaaggtggacaacgagatcctggactacaaggacctggccgccatccccaaggtgaaggccatctacgacatcgagagacccgacctgatcacctacgagcccttctacaccagcggctacgacgacaagcaggagagacagagcctgggcgagagccccagaaccctgagccccacccccagcgccgagggctaccaggacgtgagagacagaatgatccacagaagcaccagccagggcagcatcaacagccccgtgtacagcagacacagctacacccccaccaccagcagaagcccccagcacttccacagacccggcaacgagcccagcagcggcagaaacagccccctgccctacagacccgacagcagacccctgacccccacctacgcccaggcccccaagcacttccacgtgcccgaccagggcatcaacatctacagaaagccccccatctacaagcagcacgccgccctggccgcccagagcaagagcagcgaggacatcatcaagttcagcaagttccccgccgcccaggcccccgaccccagcgagacccccaagatcgagaccgaccactggcccggcccccccagcttcgccgtggtgggccccgacatgaagagaagaagcagcggcagagaggaggacgacgaggagctgctgagaagaagacagctgcaggaggagcagctgatgaagctgaacagcggcctgggccagctgatcctgaaggaggagatggagaaggagagcagagagagaagcagcctgctggccagcagatacgacagccccatcaacagcgccagccacatccccagcagcaagaccgccagcctgcccggctacggcagaaacggcctgcacagacccgtgagcaccgacttcgcccagtacaacagctacggcgacgtgagcggcggcgtgagagactaccagaccctgcccgacggccacatgcccgccatgagaatggacagaggcgtgagcatgcccaacatgctggagcccaagatcttcccctacgagatgctgatggtgaccaacagaggcagaaacaagatcctgagagaggtggacagaaccagactggagagacacctggcccccgaggtgttcagagagatcttcggcatgagcatccaggagttcgacagactgcccctgtggagaagaaacgacatgaagaagaaggccaagctgttctag

SEQ ID NO: 19828 - DNA, 2157 bp, Artificial Sequence
  derived and/or modified sequence
atgctgatgaccctggagatgaccgagctgaccgacccccaccacaccatgggcgactacaaggtggcccacccccaggacccccaccaccccagcgagaagcccgtgatccactgccacaagtgcggcgagccctgcaagggcgaggtgctgagagtgcagaccaagcacttccacatcaagtgcttcacctgcaaggtgtgcggctgcgacctggcccagggcggcttcttcatcaagaacggcgagtacctgtgcaccctggactaccagagaatgtacggcaccagatgccacggctgcggcgagttcgtggagggcgaggtggtgaccgccctgggcaagacctaccaccccaactgcttcgcctgcaccatctgcaagagacccttcccccccggcgacagagtgaccttcaacggcagagactgcctgtgccagctgtgcgcccagcccatgagcagcagccccaaggagaccaccttcagcagcaactgcgccggctgcggcagagacatcaagaacggccaggccctgctggccctggacaagcagtggcacctgggctgcttcaagtgcaagagctgcggcaaggtgctgaccggcgagtacatcagcaaggacggcgccccctactgcgagaaggactaccagggcctgttcggcgtgaagtgcgaggcctgccaccagttcatcaccggcaaggtgctggaggccggcgacaagcactaccaccccagctgcgccagatgcagcagatgcaaccagatgttcaccgagggcgaggagatgtacctgcagggcagcaccgtgtggcaccccgactgcaagcagagcaccaagaccgaggagaagctgagacccaccagaaccagcagcgagagcatctacagcagacccggcagcagcatccccggcagccccggccacaccatctacgccaaggtggacaacgagatcctggactacaaggacctggccgccatccccaaggtgaaggccatctacgacatcgagagacccgacctgatcacctacgagcccttctacaccagcggctacgacgacaagcaggagagacagagcctgggcgagagccccagaaccctgagccccacccccagcgccgagggctaccaggacgtgagagacagaatgatccacagaagcaccagccagggcagcatcaacagccccgtgtacagcagacacagctacacccccaccaccagcagaagcccccagcacttccacagacccggcaacgagcccagcagcggcagaaacagccccctgccctacagacccgacagcagacccctgacccccacctacgcccaggcccccaagcacttccacgtgcccgaccagggcatcaacatctacagaaagccccccatctacaagcagcacgccgccctggccgcccagagcaagagcagcgaggacatcatcaagttcagcaagttccccgccgcccaggcccccgaccccagcgagacccccaagatcgagaccgaccactggcccggcccccccagcttcgccgtggtgggccccgacatgaagagaagaagcagcggcagagaggaggacgacgaggagctgctgagaagaagacagctgcaggaggagcagctgatgaagctgaacagcggcctgggccagctgatcctgaaggaggagatggagaaggagagcagagagagaagcagcctgctggccagcagatacgacagccccatcaacagcgccagccacatccccagcagcaagaccgccagcctgcccggctacggcagaaacggcctgcacagacccgtgagcaccgacttcgcccagtacaacagctacggcgacgtgagcggcggcgtgagagacttccagaccctgcccgacggccacatgcccgccatgagaatggacagaggcgtgagcatgcccaacatgctggagcccaagatcttcccctacgagatgctgatggtgaccaacagaggcagaaacaagatcctgagagaggtggacagaaccagactggagagacacctggcccccgaggtgttcagagagatcttcggcatgagcatccaggagttcgacagactgcccctgtggagaagaaacgacatgaagaagaaggccaagctgttctag

SEQ ID NO: 19829 - DNA, 2157 bp, Artificial Sequence
  derived and/or modified sequence
atgctgatgaccctggaaatgaccgagctgacagatccacatcacacaatgggagattacaaagtggcacacccacaggatccccatcacccctcagagaaacctgtcatccattgtcacaaatgtggcgaaccatgtaagggggaggtactcagggtacagaccaaacactttcatatcaagtgcttcacttgtaaggtttgcggctgtgacctcgcccagggcggcttctttataaaaaacggcgagtacctctgcactctcgactatcagcgaatgtacggaaccaggtgtcacggctgtggagagtttgtcgagggcgaggttgtcacagccctcggtaagacgtatcacccgaattgcttcgcttgcacaatttgtaaacggcccttcccacccggagaccgggtcacttttaatgggagagactgtctctgccagctgtgcgcccagccaatgtcttccagcccaaaggagactactttttccagcaattgcgccggatgtgggcgagatatcaaaaacggtcaggcacttctggcgctggacaaacagtggcacttgggttgcttcaaatgcaagtcttgtggtaaggtactcaccggcgagtacatctcaaaggacggggccccatattgcgagaaggattaccagggactgttcggcgtcaaatgcgaggcatgtcaccagttcattactggcaaagtcctcgaggctggagacaaacactaccacccttcatgcgccaggtgttcccggtgtaatcagatgttcaccgagggtgaggagatgtacctccaaggttcaacggtctggcatcctgattgtaaacaatctaccaagaccgaggaaaagctgaggcccaccagaacatcttccgagagcatctactcccggccagggtcctccatccccgggtctcccggccatacgatctacgctaaagtcgacaacgagatactggattacaaagacctggccgcaatacccaaagtaaaagctatatacgacatcgagcgacctgatctgatcacttacgagccattttataccagcgggtatgatgataagcaggagcgccaaagccttggggaaagccctcgaaccctgagtcccacgccaagtgcagaaggttatcaagacgtgcgggataggatgatacatagaagtacatcacaaggatcgatcaattctcctgtgtactccaggcacagttataccccaaccacatcgcgctctccccaacactttcatcgccccgggaatgagccttcttcgggtcgaaactccccccttccttatcgaccagattcccgcccactcacccccacttatgctcaggcgcccaagcactttcacgtccccgatcaggggatcaatatttaccggaaacctccaatatataagcagcatgccgccctggccgctcaatccaaatcctcagaggatatcatcaagttctcaaaatttccagcagctcaggcacccgacccgtcagagactcctaagatcgaaacagaccattggcccggcccgccctcctttgccgttgttgggccggatatgaagcgaagaagctctggacgagaagaagatgatgaggagttattgagaaggcgacagctgcaggaagaacaattgatgaagttgaactcgggcttgggtcagctgattttaaaggaggagatggagaaagagagcagggaaagaagctccttgttagcctctagatatgactctccaatcaatagcgcgagtcacatcccgagcagcaagaccgccagcctcccaggctacggccgcaatgggctccaccggccagtatctacagatttcgctcagtataacagctacggggacgtatctggcggcgtccgggattaccagacgttgcccgatggccatatgcctgcaatgcgaatggaccggggcgtcagtatgccaaacatgttagagcctaagatctttccatatgaaatgttgatggtgaccaatagaggaaggaataaaattcttcgcgaggtggaccggaccaggctggaaaggcacctggcaccagaggttttccgcgagatctttgggatgtctatccaggagttcgatagacttcctctttggcggagaaacgacatgaaaaaaaaggcaaaactgttctag

SEQ ID NO: 19830 - DNA, 2109 bp, Artificial Sequence
  derived and/or modified sequence
atggtcaaagaaaaagtcgctcatccacaagacccccatcatccctcagaaaaacctgtgattcactgtcacaagtgcggggaaccgtgtaagggagaggtcttgagggtccaaacaaaacatttccacatcaagtgtttcacatgtaaggtctgcggttgtgacctggcccagggtggcttctttataaaaaatggagagtatctgtgcacactggactatcagagaatgtacgggactaggtgtcatggatgcggagaattcgttgagggcgaggttgtgactgcactcggcaaaacgtatcacccaaattgtttcgcctgcaccatttgtaaacggccattcccccctggtgatagagtgacatttaatggcagagactgtctgtgccaactttgcgcccagcccatgtcctccagccccaaggagacaaccttcagtagtaactgcgccggctgtggccgagacataaaaaacggccaagcccttctggccctggataagcagtggcacctaggatgtttcaaatgcaagtcatgcggtaaagtgctgacgggggagtacatttcgaaggatggggccccttattgcgagaaagattaccaagggttgtttggtgtgaagtgcgaggcatgtcaccagttcattacaggcaaagtacttgaggccggcgacaaacattaccacccctcctgtgcacgctgtagtcgctgcaaccagatgttcactgagggggaggagatgtacttgcaagggtccaccgtatggcacccagactgcaagcaatcaacgaagaccgaggagaagctgcggcctacccggactagcagcgaatcaatttactcgagaccaggttccagtattcccggcagccctgggcacactatatacgccaaggtcgataacgagattctggactacaaggacttggccgctattcctaaggtgaaggctatatatgacatcgaaaggcccgacctcattacttatgagcccttctatacaagtggctatgacgacaagcaggaacgacagagtctcggagagagtccccgaacactctcccctacaccaagcgccgagggatatcaggatgtcagggaccgaatgatacacaggtccacgtcccagggaagcattaacagtcctgtttatagtcgccattcctataccccaacaacgtccaggtcacctcaacacttccaccgcccgggcaacgaacctagttcgggacggaatagtcctctgccttatcgccctgatagtaggccacttacaccaacctatgcccaagcccccaaacacttccacgtgcccgaccagggtattaacatataccgtaaacctcctatctataaacagcatgccgctcttgcagctcaaagcaaatcaagcgaggatatcatcaaattttctaagttccccgcagcacaggcgcctgatccgtctgaaacacctaaaatagagaccgaccactggcccggccctccctctttcgcagtcgtggggcctgacatgaaacgccgttcgtcgggacgggaggaggacgatgaggaattgttgcggcgccggcagttacaagaggaacagttaatgaagctgaattctgggttaggacagcttatactgaaggaggagatggagaaggaatctcgtgagcggagctcactcttggcatcacgatatgattcccccattaattccgcaagtcacatacccagtagcaaaaccgcaagtctgcccggatatggccggaacgggctccatagacccgtgagtactgattttgctcaatacaattcatacggcgacgtcagcggaggtgtgcgagactaccagacgctgccagacggccacatgccagccatgaggatggatcggggggtaagtatgcccaatatgttggagccgaagattttcccctatgagatgctgatggtcactaatcgcgggcggaacaagattctgagggaggtggatagaaccagactggagcgtcacctcgctcccgaggttttcagagagatctttggtatgagcatccaagaatttgaccggctccccctttggagaaggaacgacatgaagaagaaggcaaagctgttctag

SEQ ID NO: 19831 - DNA, 7606 bp, Artificial Sequence
  derived and/or modified sequence
gtcattgagctgatgtgcttttgcaaggggtctctttagaagtggtaggggcagggtcgagagaagaaggggatgcagaatctgtacatgaggaaggagccagagtcactcaggaaactcctcattcttcctgcgctggctgtggcacacccaccggtggcacacccctccctcgggtccagttcagcccacagactcctgggaggagagccagggccccagcctctcctttgaggagtgttgcagcctttctgtgtgccagatgcctagtgaagaaaagctgaaaccctggagctttgtgcatgttaatgaccttggaaatgactgagctcacggaccctcatcacaccatgggagactacaaagtggcccaccctcaggaccctcaccacccatcagagaagcctgtcattcactgccataaatgtggggagccttgcaagggtgaagtgcttcgggtccagaccaaacatttccacatcaagtgtttcacctgcaaagtgtgtggctgtgacctggcacaagggggcttcttcataaagaacggagagtatctctgcaccctggactaccagcggatgtacgggacacgctgccatggctgtggggagttcgtggagggcgaagtggtgactgctctgggcaagacctaccatcccaattgctttgcttgtactatctgcaagcgcccgtttccacccggagaccgagtcacattcaatgggagagactgcctttgtcaactctgtgcacagccgatgtcgtccagtccgaaagaaaccaccttctccagcaattgtgccggctgcggaagagatatcaagaatgggcaggcgctgctggcgctggataagcagtggcacttggggtgctttaaatgcaagtcctgcgggaaggtcctcaccggggagtacatcagcaaggatggtgctccgtactgtgaaaaggactaccagggactctttggggtgaaatgtgaggcgtgtcaccagtttatcacagggaaagtcctggaggcaggtgacaaacattaccaccccagctgtgcacgatgcagcagatgcaaccagatgttcacagaaggagaggaaatgtatcttcaaggctccaccgtttggcatcccgactgtaagcaatctacgaagaccgaggaaaagctgcggcctaccaggacatcctcggaaagtatttattctaggccaggctccagtattcctggctcaccaggtcatactatctatgcaaaagtagacaatgagatcctggattacaaggatttagcagccattccgaaggtcaaggcaatttatgacattgaacgtccagatcttattacctatgagcctttctacacttcgggctatgatgacaaacaggagagacagagccttggagagtctccgaggactttgtctcctactccatcagcagaagggtaccaggatgttcgggatcggatgatccatcggtccacgagccagggctccatcaactcccctgtgtacagccgccacagctacactccaaccacgtcccgctctccccagcatttccacagacctggcaatgagccgtccagcggccggaactcccctctcccttaccggccagacagccgccctctaactccaacttacgctcaggcccctaaacatttccatgttccagatcaaggaatcaacatttaccgaaagccacccatctacaaacagcatgctgccttggcagcccagagcaagtcctcagaagatatcatcaagttttccaagttcccagcagcccaggcaccagaccccagcgagacaccaaagattgagacggaccactggcctggtcccccctcatttgctgtcgtaggacctgacatgaaacgcagatctagtggcagagaggaagatgatgaggaacttctgagacgtcggcagcttcaagaagagcaattaatgaagcttaactcaggcctgggacagttgatcttgaaagaagagatggagaaagagagccgggaaaggtcatctctgttagccagtcgctacgattctcccatcaactcagcttcacatattccatcatctaaaactgcatctctccctggctatggaagaaatgggcttcaccggcctgtttctaccgacttcgctcagtataacagctatggggatgtcagcgggggagtgcgagattaccagacactcccagatggccacatgcctgcaatgagaatggaccgaggagtgtctatgcccaacatgttggaaccaaagatatttccatatgaaatgctcatggtgaccaacagagggcgaaacaaaatcctcagagaggtggacagaaccaggctggagcgccacttagcccctgaagtgtttcgggaaatctttggaatgtccatacaggagtttgacaggttacctctttggagacgcaacgacatgaagaaaaaagcaaaactcttctaagtcccactcgtgaatggcaattagagaaaggactgacagtggcggtgccccataggatgtcatattgaggcccaaacttgattggagaatttgcaaactaccgtcgctcagcaacaccaaaaagagaaagtctggttaaaacaccatgagtcaaatgtcgggccagccaacagtaacacttgccaagaagcatggcgtagaaatttctatgttccgaaacacagagtagtgtccacatgtgagcttttcacattaccttatgtatacaacaggagctgcgttgttttcttctttttcttttcctttatctgttgtccaacaacagtgctgactgtccggataagagctggcaagtgcccttaggatgccgcatgggaaaaatcggttatcataatttcaaagtataaatatatttattaagtagcgctgcggctaagaaggaagagtgaggggtctgtccatggggtggcagtgatttcacacccgcctttcttgaatggcttcgtgttactcagccgtgccctggcaggaatggaactccatcagggaacagggcagctctgtttgaatggggtgaaaaacagcaaaattaattcttagcaagctccttgttctctactgttcaccgggacctggctggcaaatgacttagctattagtatatttaaaaactgttcaaaagcaaaagagaaggaacaggaatgaaaggaaaccttcccttaactctttctgcttcccatagcaggtctggttcctgctccccgcctaggacaggagctgtctggagctccacctttgcaaagaaaggaaaaacacaaattgcccccagattggcccagtggcatgccattaggtgattttgcataggggccatatcattcatggccaaaaaaaaccaaaaagcaaaaaacaaaaacaagtcccatgtcctactgactctagttcttccagtcgttatcctctgctgtctctctggcatcctatgaatcagatcaagcccatgctgttgttggtttttaaggtttctttcaataataggctaaggaaagacatgtttttctcttttaaatctctgcaactccaaagtagactccttcgaacgtatttaatttggccttttcagctttcttcttgcccagctctgtcgaattcatgggtgtgtgtgcacatgttggtttcactcacccagagtaattttgtgagcatgcatgtgctttttaatttctgcttgaatgtttgtcctgctgtgttgcagcttctaaagacattgtcaccgagtgtgtgtgactcaaagatcaagagtgaggctaaactgcgaccccaacatcacttccttcatggaaaggtgttggcgctgatgtagctcatggaaggatcagactgggaaccacagaggaaggatgaggtgggatgtggaggtcagagcatctcacgagagtccctcaggctctgcaacactagattcgaatatgagcctagggtttccccaacacgtgcgtgcatatgaaaccacatcatgattcccgacgtgagttagatgagggagagtttgtgtaactccacacccaggagggtaagccactttattatcatgctttggggctgtgcttaagaatttaagctctgttttaaagccgaagaagaaaacatttgaatttaccttcatatgccactaagaacaaaagctctgaagttcttcctgctggcaccaaatattaggattacaagctgtctctctgacaccagtggtaaaaaagcaagtagaatagtttctgagtctgtgttgcagcctctgacacgtggctcaccgctgtcatttgggggatggaatgaacagtcactgttctatagcatcctcctgtgctcttacctaaggaatctaaattgtcctagccttccattgctatgcactgaatgaggactactctcgtgtgtgtgtgtgtgtgtgtgtgtgtgtgtgtgtgtgtgtgtgtgtgtgttggatctactaacatgtttagcaaatggctctgacagggtggccatgagcagatgagaccagctcttgcttggttggaagccacactgcagtttgcagtttagcctttggtgtctcagtggcttcttgcttattccatgctttttctatcccatcctctctctgtgccctcctgcaatggcagccttggcacaatgcctgggtgtcctcatccttgctttactctggaaagtgtggggatggagaggatggtgcatttccagtgcttccttacctgtcaataacaatggtggccacctgggtcccagcacttggctggtggagagatttttttcattatggagctaataaagggtccctacgttttacattgattaatgaattatcacccagacatgtgcagatgaaatgtcaatataagaaaaatcaaggtatttgggaaacatgggcataatcaggtagttttgctaaaattcctcttccttggtctacataaagaagacatgggtctgtcatagaatggggacattagactgaaaactgggacaacccccttccttattttatagagactaggagttaaggggcctgcctaagattgcagtgataaagaactgaaccctaaatcagctcccactaatgaaaccctgctttccttgtatcttttaaactcagttctgcatccaacttgagaagaaaaaaagcttctttccatatcaagtaccatatgagttcatttaaactgcaccttgcagaaatgcattgccagaaagcaccagtagcctcctatctgcaagcagagtagtgctctgctctggggaggggtcattggaaaccataatgcagagtgggccccctactccatttcccagcaaaaggctccagctggagggatgggttgtggggcaacctggttcctgctaactgccagattgaatgtgtgggctagaatgcctgcacatttagttaaactgggctcagcatgcttgtcctcaaaatgtccatcctggtcacagcacacaagatggctattggtctgcttttaccctaccctgtactatacatgaaaattccagttattaacacactcaaactggtggagcttgttcaccctaggaaggggattgtatatatggcaggcttccctggtgccgatgtaaagggctacatttgggaacatttgacttccttgggactcttaagtgcataatgatggcatgaagtaaaaggggcctcaatgatgataggaaaatcagttcttttaaaatttcttcaagaaaatccaggctatcacatagtctttctgtgtgacttattaggagataggaagagcattgggaaacttgcacagctagctatgcatctacattttggtttggggttagttatgaaatgttcttaatatgacgtgttcaataacttcacataaacttcctgttctccaaaacctcaaagagatagagttaatgagttgttgtttttttttaaatgggggtagttttctatctgtcatgggctctagcatctactccgctacccaattctgtcatctccaagctgagtttcctcttctgaggcagaggctggagcagttctttttcagttctcatcctctccatcccaatccagtatatcaatcaactctaactcggagacgtctagctggcaatgtttctaaaactttcactggatttctttagacattgaagcaaacatttttttctaagaattgcttctcagatgatgatatcaaatgtatatgcttttgcaagtttgaaaagttcaaattaaccacttttgactaggtaagtctttctaaaaaccatttaaagctaactgggtcttagcatcctcctgtgtatggaagagacaggtgaccgctccaggttgggtgctcacagaacccttttcctgactctcatggaagatggtggaaggaaaatagactgtctcatcaaccctcctgtgtcctctgaagcaatctcagtttttattaaccacctcttctgtgtttctggtagctatttaacctgtatttaatctgtacttcctatgccagcctcaattttatttgatttttacaattattctcttctaaccaatgaagtgtttgtcagtatgccccaaagcttgctcttttgtgctcccttttgaataactttctatccagaaaaagagattatttgggacttgagatttgcagtgataccaacttatagcaatgatgtactttaagggaactacccaactatgttgtgatagaagaaagagaaaccttcactttggcatttttttttaatcactgtttatttttctgtttgcggcccaggaagcagtgggaggtggtggcagatatgctttgcatatggattgttatgtttttatttgggcaagtttaatcatggaaaactcaaaaagaaggggggaaatggtcagtttaagccaaaagaaactttctaaacaatgtataggtacacagcaaaattaaacaaatccaacaatttctgaagcttagtgtaattgagtggtggttgttattcaataaaattattcccaaaagtgtttctcctaagagtgcagttcccatgagtcacttcctgaacccattgaccaaaggtggacagagacaatcctgtagaccttgacattcagaaagatgtgagctgcttactgatcatatatgcatacgtttctttacagcagaggaaaccattgtccacaaaactgatgttcttttggggttttatgtacagacttgtccaatcatgtgtgtggttcctgcgagttgctgatgactccgcattgaagctctctgagttctttgattttaagttgggtttatggaattttttcaaatgttggaaggtgtgtggttcttcctgccctccctccccttttggaaatatgaaagcaaatgtttagaagaattccttttgaaaagctgtgtcgtgttccctgtgaaactgagcaggtgtgtgttggcgcgctaagtgccacatgcttgtgtgtagaggaggaggtggccctgccggctccgcgctgctgtgcctgtgatccctacctgctccccgctcctgttgccagcagcactcactgcactcctttgtcatatactctgcatcactgtcatactcacaacttcgtgaataaagttgtgtgctttattcgt

SEQ ID NO: 19832 - DNA, 2157 bp, Artificial Sequence
  derived and/or modified sequence
atgctgatgacgctagagatgacagaattgacagacccgcatcacaccatgggtgattacaaagtcgcacacccccaggatccacatcatcctagcgagaaacctgtcatccactgtcacaaatgcggcgaaccttgcaagggcgaggtgctgcgcgtgcagactaaacacttccatatcaaatgttttacatgcaaggtttgcgggtgcgacttggcccagggaggattctttatcaagaacggtgaatacctttgcacgctggactatcagcgtatgtatgggacgcgttgccacggctgcggggagtttgtggagggggaggtcgtgaccgccctggggaagacctaccacccaaactgtttcgcgtgcacaatttgcaagcgaccttttcctcctggggacagagtgacatttaatggcagggactgcctgtgccagctgtgtgcacagcctatgagcagctcaccaaaggaaaccaccttttccagcaattgtgctggatgcgggagagacatcaaaaacggccaggctttattggccctggacaagcagtggcatttgggatgttttaagtgtaaatcgtgtggtaaggtcttgaccggtgaatacattagcaaggacggggcaccttattgtgagaaggactaccaaggcttattcggcgttaaatgcgaggcttgtcatcaattcatcacggggaaggtgttggaagctggggacaagcattatcatccaagctgtgctagatgttcacggtgtaaccagatgttcacggaaggggaggagatgtacttgcagggtagtaccgtatggcatcctgactgcaagcagagtacaaaaaccgaagaaaagctgcgtccaacccggacctcatccgaaagcatctactctaggcctggtagctccatccccgggtcacccggccataccatatacgcaaaggtggataatgagattctggactataaagatttagcagctatccctaaggttaaggctatttatgatattgagcgacctgatctgatcacttacgaacctttttatacctccgggtacgatgataaacaagagcgccagtctctcggcgagtcgccaagaactctgagtcctacccctagcgctgaggggtaccaggatgtcagggatcgtatgatccaccggtccactagccagggctccattaactcacccgtttactcacggcactcatatacacctacaacaagcaggtccccccagcatttccacaggccagggaacgagccttcctccggccgcaatagccccctgccctaccgacccgatagcagacccctcacccctacttatgcccaagcaccaaagcatttccacgtccctgaccaggggattaatatctaccgcaagccaccaatttataagcaacatgccgctttggcagcccagtcaaagtcttcggaagacattattaagtttagcaagtttcctgcagcccaggctccagatccttctgagacaccaaaaatcgagacggatcactggccaggacctccttcttttgccgttgtgggacccgacatgaagcggaggtcatccgggagggaggaggacgatgaagaactcctgaggagacgccagctgcaggaggagcagctgatgaagcttaacagcggcctgggccagctgatccttaaggaggaaatggagaaggaaagccgggaaagatcctcgctcttggcctcacgctacgacagtcccatcaactctgccagccatatccctagttctaagacggcctccctcccgggctatggccgcaacggtctgcataggccagtgtctacagactttgcccagtacaactcgtatggcgatgtaagtgggggggttagagactttcagactctccctgatgggcacatgccagccatgcgaatggacagaggcgtgtccatgcccaacatgttggagccaaaaatctttccctatgaaatgctgatggtcacaaatagaggccgaaacaagatacttcgcgaagttgatagaaccagactggaacgccacttggcccccgaagtgttccgcgaaattttcgggatgtccatccaggagtttgaccgactgccgctgtggcgccgaaacgatatgaagaagaaggccaagctcttctag

SEQ ID NO: 19833 - DNA, 2157 bp, Artificial Sequence
  derived and/or modified sequence
atgctgatgaccctggagatgacagagctgacagacccccaccacaccatgggagactacaaggtggcccacccccaggacccccaccaccccagcgagaagcctgtgatccactgccacaagtgtggggagccctgcaagggggaggtgctgcgggtgcagaccaagcacttccacatcaagtgcttcacctgcaaggtgtgtggctgtgacctggcccagggcggcttcttcatcaagaatggagagtacctgtgcaccctggactaccagaggatgtatggcacccgctgccacggctgtggggagtttgtggagggggaggtggtgacagccctgggcaagacctaccaccccaactgctttgcctgcaccatctgcaagaggcccttccccccaggggacagagtgaccttcaacggccgggactgcctgtgccagctgtgtgcccagcccatgagcagcagccccaaggagaccaccttcagcagcaactgtgccggctgcggccgggacatcaagaatggccaggccctgctggccctggacaagcagtggcacctgggctgcttcaagtgcaagagctgtgggaaggtgctgactggagagtacatcagcaaggatggagccccctactgtgagaaggactaccagggcctgtttggagtgaagtgtgaggcctgccaccagttcatcaccgggaaggtgctggaggccggggacaagcactaccaccccagctgtgcccgctgcagccgctgcaaccagatgttcacagaaggagaggagatgtacctgcagggcagcacagtgtggcacccagactgcaagcagagcaccaagacagaggagaagctgcggcccaccaggaccagcagcgagagcatctacagccggcccggcagcagcatccctggcagccctggccacaccatctatgccaaggtggacaatgagatcctggactacaaggacctggccgccatccccaaggtgaaggccatctatgacatcgagaggccagacctgatcacctatgagcccttctacaccagcggctatgatgacaagcaggagcggcagagcctgggggagagccccaggaccctgagccccaccccatctgctgagggctaccaggatgtgcgggacaggatgatccacaggagcaccagccagggcagcatcaacagccctgtgtacagccgccacagctacacccccaccaccagccgcagcccccagcacttccacaggcctggaaatgagcccagcagcggcaggaacagccccctgccctacagaccagacagccggcccctgacccccacctacgcccaggcccccaagcacttccacgtgcctgaccagggcatcaacatctacaggaagccacccatctacaagcagcacgccgccctggccgcccagagcaagagcagcgaggacatcatcaagttcagcaagtttcctgctgcccaggccccagaccccagcgagacccccaagattgaaacagaccactggccaggcccccccagctttgctgtggtgggccctgacatgaagaggaggagcagcggccgggaggaggatgatgaggagctgctgcggcggcggcagctgcaggaggagcagctgatgaagctgaacagcggcctgggccagctgatcctgaaggaggagatggagaaggagagccgggagaggagcagcctgctggccagccgctatgacagccccatcaacagcgccagccacatccccagcagcaagacagccagcctgcccggctatggaagaaatggcctgcacaggcctgtgtccacagactttgcccagtacaacagctatggagatgtgtctgggggcgtgcgggactaccagaccctgcctgatggccacatgcctgccatgaggatggaccggggcgtgtccatgcccaacatgctggagcccaagatcttcccctatgagatgctgatggtgaccaacagaggaagaaacaagatcctgcgggaggtggacaggacccggctggagcggcacctggcccctgaggtgttccgggagatcttcggcatgagcatccaggagtttgaccggctgcccctgtggaggagaaatgacatgaagaagaaggccaagctgttctag

SEQ ID NO: 19834 - DNA, 2109 bp, Artificial Sequence
  derived and/or modified sequence
atggtgaaggagaaggtggcccacccccaggacccccaccaccccagcgagaagcctgtgatccactgccacaagtgtggggagccctgcaagggggaggtgctgcgggtgcagaccaagcacttccacatcaagtgcttcacctgcaaggtgtgtggctgtgacctggcccagggcggcttcttcatcaagaatggagagtacctgtgcaccctggactaccagaggatgtatggcacccgctgccacggctgtggggagtttgtggagggggaggtggtgacagccctgggcaagacctaccaccccaactgctttgcctgcaccatctgcaagaggcccttccccccaggggacagagtgaccttcaacggccgggactgcctgtgccagctgtgtgcccagcccatgagcagcagccccaaggagaccaccttcagcagcaactgtgccggctgcggccgggacatcaagaatggccaggccctgctggccctggacaagcagtggcacctgggctgcttcaagtgcaagagctgtgggaaggtgctgactggagagtacatcagcaaggatggagccccctactgtgagaaggactaccagggcctgtttggagtgaagtgtgaggcctgccaccagttcatcaccgggaaggtgctggaggccggggacaagcactaccaccccagctgtgcccgctgcagccgctgcaaccagatgttcacagaaggagaggagatgtacctgcagggcagcacagtgtggcacccagactgcaagcagagcaccaagacagaggagaagctgcggcccaccaggaccagcagcgagagcatctacagccggcccggcagcagcatccctggcagccctggccacaccatctatgccaaggtggacaatgagatcctggactacaaggacctggccgccatccccaaggtgaaggccatctatgacatcgagaggccagacctgatcacctatgagcccttctacaccagcggctatgatgacaagcaggagcggcagagcctgggggagagccccaggaccctgagccccaccccatctgctgagggctaccaggatgtgcgggacaggatgatccacaggagcaccagccagggcagcatcaacagccctgtgtacagccgccacagctacacccccaccaccagccgcagcccccagcacttccacaggcctggaaatgagcccagcagcggcaggaacagccccctgccctacagaccagacagccggcccctgacccccacctacgcccaggcccccaagcacttccacgtgcctgaccagggcatcaacatctacaggaagccacccatctacaagcagcacgccgccctggccgcccagagcaagagcagcgaggacatcatcaagttcagcaagtttcctgctgcccaggccccagaccccagcgagacccccaagattgaaacagaccactggccaggcccccccagctttgctgtggtgggccctgacatgaagaggaggagcagcggccgggaggaggatgatgaggagctgctgcggcggcggcagctgcaggaggagcagctgatgaagctgaacagcggcctgggccagctgatcctgaaggaggagatggagaaggagagccgggagaggagcagcctgctggccagccgctatgacagccccatcaacagcgccagccacatccccagcagcaagacagccagcctgcccggctatggaagaaatggcctgcacaggcctgtgtccacagactttgcccagtacaacagctatggagatgtgtctgggggcgtgcgggactaccagaccctgcctgatggccacatgcctgccatgaggatggaccggggcgtgtccatgcccaacatgctggagcccaagatcttcccctatgagatgctgatggtgaccaacagaggaagaaacaagatcctgcgggaggtggacaggacccggctggagcggcacctggcccctgaggtgttccgggagatcttcggcatgagcatccaggagtttgaccggctgcccctgtggaggagaaatgacatgaagaagaaggccaagctgttctag

SEQ ID NO: 19835 - DNA, 2157 bp, Artificial Sequence
  derived and/or modified sequence
atgctgatgaccctggagatgacagagctgacagacccccaccacaccatgggagactacaaggtggcccacccccaggacccccaccaccccagcgagaagcctgtgatccactgccacaagtgtggggagccctgcaagggggaggtgctgcgggtgcagaccaagcacttccacatcaagtgcttcacctgcaaggtgtgtggctgtgacctggcccagggcggcttcttcatcaagaatggagagtacctgtgcaccctggactaccagaggatgtatggcacccgctgccacggctgtggggagtttgtggagggggaggtggtgacagccctgggcaagacctaccaccccaactgctttgcctgcaccatctgcaagaggcccttccccccaggggacagagtgaccttcaacggccgggactgcctgtgccagctgtgtgcccagcccatgagcagcagccccaaggagaccaccttcagcagcaactgtgccggctgcggccgggacatcaagaatggccaggccctgctggccctggacaagcagtggcacctgggctgcttcaagtgcaagagctgtgggaaggtgctgactggagagtacatcagcaaggatggagccccctactgtgagaaggactaccagggcctgtttggagtgaagtgtgaggcctgccaccagttcatcaccgggaaggtgctggaggccggggacaagcactaccaccccagctgtgcccgctgcagccgctgcaaccagatgttcacagaaggagaggagatgtacctgcagggcagcacagtgtggcacccagactgcaagcagagcaccaagacagaggagaagctgcggcccaccaggaccagcagcgagagcatctacagccggcccggcagcagcatccctggcagccctggccacaccatctatgccaaggtggacaatgagatcctggactacaaggacctggccgccatccccaaggtgaaggccatctatgacatcgagaggccagacctgatcacctatgagcccttctacaccagcggctatgatgacaagcaggagcggcagagcctgggggagagccccaggaccctgagccccaccccatctgctgagggctaccaggatgtgcgggacaggatgatccacaggagcaccagccagggcagcatcaacagccctgtgtacagccgccacagctacacccccaccaccagccgcagcccccagcacttccacaggcctggaaatgagcccagcagcggcaggaacagccccctgccctacagaccagacagccggcccctgacccccacctacgcccaggcccccaagcacttccacgtgcctgaccagggcatcaacatctacaggaagccacccatctacaagcagcacgccgccctggccgcccagagcaagagcagcgaggacatcatcaagttcagcaagtttcctgctgcccaggccccagaccccagcgagacccccaagattgaaacagaccactggccaggcccccccagctttgctgtggtgggccctgacatgaagaggaggagcagcggccgggaggaggatgatgaggagctgctgcggcggcggcagctgcaggaggagcagctgatgaagctgaacagcggcctgggccagctgatcctgaaggaggagatggagaaggagagccgggagaggagcagcctgctggccagccgctatgacagccccatcaacagcgccagccacatccccagcagcaagacagccagcctgcccggctatggaagaaatggcctgcacaggcctgtgtccacagactttgcccagtacaacagctatggagatgtgtctgggggcgtgcgggacttccagaccctgcctgatggccacatgcctgccatgaggatggaccggggcgtgtccatgcccaacatgctggagcccaagatcttcccctatgagatgctgatggtgaccaacagaggaagaaacaagatcctgcgggaggtggacaggacccggctggagcggcacctggcccctgaggtgttccgggagatcttcggcatgagcatccaggagtttgaccggctgcccctgtggaggagaaatgacatgaagaagaaggccaagctgttctag

SEQ ID NO: 19836 - DNA, 2157 bp, Artificial Sequence
  derived and/or modified sequence
atgctgatgaccctggagatgaccgagctgaccgacccccaccacactatgggggattacaaagtcgcgcatcctcaggacccccaccaccccagtgaaaagcctgtgatacattgccacaaatgtggagaaccatgtaagggtgaggtgcttcgcgtccaaacgaaacacttccatatcaagtgttttacatgcaaggtgtgtggctgtgacctagctcagggcggcttctttatcaagaatggggagtacctttgtacgctggactaccaacggatgtacgggacaagatgtcacgggtgtggcgaattcgtggaaggcgaggtcgtgaccgccttggggaaaacctaccaccccaactgctttgcttgcactatctgtaaacggccttttccacccggggatagagtgactttcaatggtcgcgactgtctgtgccagctctgcgcccagccgatgtctagttcccctaaggaaacaacattttcttccaattgtgcgggttgtggcagagatatcaagaacggccaggctcttttggctctcgataagcagtggcacctgggctgtttcaagtgtaaaagctgcggcaaagttctcaccggcgagtacatttcaaaagacggggccccttactgcgagaaagattaccaaggcttgtttggggtgaagtgcgaggcttgtcatcagtttattaccggaaaagtgctggaggcgggggataaacattatcatcctagctgcgccaggtgcagccggtgcaaccaaatgttcaccgagggagaggaaatgtacctccagggtagcactgtgtggcaccctgactgcaaacagtccactaaaacagaggaaaagttacggccaacacgcacaagctccgagtccatttactctagacctggcagttctattccgggaagtcctggtcacacaatttatgcaaaagtggacaatgagatactcgattataaggacctcgccgcgatccccaaggtgaaggccatttatgatatcgaacggcctgatctaatcacatatgaacctttctacacgagcggctacgacgataaacaggaacgacaatccctgggagagtctccacgcaccctgagcccgactccatcagctgaaggctaccaggacgtccgcgataggatgatccacaggtccacgagccagggcagcattaatagtcctgtttattccaggcattcttatacccctacaacctcccgctctccccaacattttcacagacccggcaatgaacccagctcaggcagaaatagcccactgccatatagacccgatagtagacccctgactcccacctacgcccaggcaccaaaacattttcacgttccagaccagggcattaacatctacaggaagccccctatctataagcagcacgcagcactcgccgcacagtcaaaaagcagtgaggacataatcaaattctcaaagttccccgctgcccaggctcctgatccttcagagacaccaaaaatagaaaccgaccattggccaggaccccctagcttcgctgtggtggggccagacatgaagcgtcgctctagcgggcgggaggaggatgacgaggagctgctgagacgaagacagcttcaggaagagcagctcatgaaattaaacagcggcctggggcagctcatccttaaagaggaaatggagaaggaatctcgggaacggtccagtctgctggccagtcgctacgactctcccattaattccgcgtcgcacattcccagctcgaaaaccgccagtctgccaggatatgggagaaatggcctccaccgccccgtaagcactgactttgcccagtataacagttacggtgatgtcagcggcggggtgagagactatcagacactgcctgatggacatatgccggccatgagaatggacagaggcgtgtccatgcctaatatgcttgaaccaaagatcttcccgtatgagatgctgatggtgactaacagaggcaggaataaaatcctgcgcgaggtcgacagaactcggctggaacggcacctggcacccgaggtctttcgggaaatatttggcatgtctatccaggaattcgatagactgccattgtggcggcggaatgatatgaagaagaaagcaaagctgttctag

SEQ ID NO: 19837 - DNA, 2109 bp, Artificial Sequence
  derived and/or modified sequence
atggtgaaggagaaggtggcccacccccaggacccccaccaccccagcgagaagccggtaatccattgtcacaaatgcggcgagccatgtaagggtgaggtcctgagagtgcagaccaaacacttccacattaagtgtttcacatgtaaagtgtgtgggtgcgacctggcacagggcggcttttttattaaaaatggtgagtacctttgtacacttgactatcagagaatgtacggtacacggtgtcatggatgcggggagtttgttgagggcgaagtggtgaccgctctgggcaagacgtaccatccgaactgttttgcctgtaccatatgcaagcggccgtttcctccgggggatagagtcacatttaacggaagagactgtctttgtcagctgtgtgctcagccaatgagcagcagtcctaaagagacaacattttcatcaaattgtgcaggctgtggaagagacataaaaaacggccaagcccttctcgccttggataaacaatggcatctcgggtgcttcaagtgcaagtcgtgtgggaaagttctgacaggcgagtacatcagcaaggatggcgccccgtactgcgaaaaggactaccagggcctgttcggagtgaagtgtgaagcctgtcaccagttcattactgggaaggtgctggaagcgggggacaaacattaccatcccagctgcgcccggtgctcaagatgcaatcagatgttcacggaaggagaagagatgtacctccagggctctacggtgtggcatcctgactgcaaacagtccacaaaaactgaagaaaaactgcgacccaccaggacgagcagtgagagcatttactccagacccgggtcttccatacccgggtcgccaggccacaccatttacgctaaggtggacaatgaaatcttagattataaggatctcgccgccataccaaaggtgaaggccatatacgacatcgagaggcctgatttaattacttacgaacccttttatacaagcggctacgacgataaacaggagagacagagcttgggggaatcaccccggacacttagccccactccttcagccgaaggctaccaagatgtgagagataggatgatccaccgctcaacctcacagggaagcataaacagccccgtgtacagtcggcacagctatacccccacaacatcccgtagtcctcaacattttcatagacctggcaatgaacccagcagtggccgtaacagccccctcccctatcggccggatagtagacccctgacaccgacatatgcccaggcccccaagcattttcacgtccccgaccaaggcattaatatatacaggaaaccccccatttacaagcagcacgcagctttggcggcccagtcaaaatcaagcgaagatatcataaaattctctaagttcccagccgcacaggcgcctgatccttctgagaccccaaagatagagacggaccattggccagggccaccatctttcgccgtcgtgggccctgatatgaagaggcggagctcaggccgggaagaggacgacgaggagctcttgcgccggcgacaactgcaggaggagcagctgatgaagctgaactcggggctgggccagctgatccttaaggaggagatggagaaagagtctcgcgagaggagcagccttctggcatcccgttatgactcgcctataaattctgcatcccacattccatcttcaaagacagctagcctgcctgggtacggccggaatgggcttcatcgccccgtttctaccgatttcgcacagtacaacagctacggggacgtgtcaggtggcgtgcgggactaccaaactttgcctgatggccatatgccggccatgagaatggatcgcggggtgagcatgcctaatatgctggaaccgaagatctttccatacgagatgttaatggtcacgaacagaggtcgaaacaagatcttaagagaggtagaccggacccggctggagcgacacttagcaccagaagtgtttcgggagattttcggaatgtctatacaggagtttgatcgattacctctctggagacggaatgatatgaagaagaaggcaaagctattctag

SEQ ID NO: 19838 - DNA, 2157 bp, Artificial Sequence
  derived and/or modified sequence
atgctgatgaccctggagatgaccgagctgaccgacccccaccacaccatgggcgactacaaagttgctcacccccaggatccccatcacccatccgaaaagcccgtgatacactgccacaaatgcggggaaccctgtaaaggggaggtgttaagggttcaaaccaagcactttcacatcaaatgctttacctgtaaagtatgtgggtgcgatctggctcaagggggtttctttataaagaacggggaatacctgtgtactctggattatcagaggatgtacggtacacgttgccacggctgcggggaattcgtggagggggaggtggtaacggctctgggcaaaacgtatcacccgaactgcttcgcttgtaccatttgcaaacggcccttcccccctggggatcgggtgacattcaacgggcgcgattgtctgtgccagctgtgtgctcagcccatgagcagcagtcctaaggaaacaaccttctcaagcaactgcgcagggtgtgggcgggacataaaaaatggtcaggccttgctagcacttgataagcaatggcatctgggctgctttaaatgcaaaagttgcggcaaggttctaacgggcgagtatatttccaaagacggggccccatattgcgaaaaggactatcagggcttgttcggtgtcaaatgtgaggcttgtcaccagtttatcactggcaaggtgttggaggctggcgacaaacactaccacccttcatgtgcccggtgttcacgctgcaatcagatgtttaccgagggagaggaaatgtacttgcaaggctccacagtgtggcaccctgactgcaaacaatctacaaagacagaagaaaaactcaggcccacgaggacgtcctcggaaagtatctactctagacctggctcgtcaatcccggggagcccagggcacacaatctatgccaaggtcgacaacgaaatcctcgactacaaagatctggccgctattcctaaggtcaaggcgatttatgatatcgaacggccagatcttattacttatgagccattctacaccagtggctacgacgacaagcaggaacgccagagccttggcgagagccctcggacgctatcccctacaccaagcgcggaaggctaccaggacgtcagggacaggatgattcatcgaagcacttcccaagggtccatcaactcaccagtttactcccgccactcctacacccctactacatcaaggtcacctcagcacttccacagaccgggaaacgaaccctcatctggtcgcaacagtccattaccatacaggcctgacagtcgccccttaacccctacatacgcacaggcacccaaacactttcatgttcccgatcaaggaataaatatctaccgtaagccaccaatctacaaacaacacgctgctctagctgctcagagtaagagttctgaggacattattaaattttctaaattcccagctgcacaggcgcccgatccgtctgaaactcctaaaatcgagaccgatcactggccagggccccccagcttcgctgtggtaggcccagatatgaaacgacggtcatcaggcagagaggaagacgatgaagagcttctgagacggcgacagttacaggaggaacagctgatgaagctgaatagcgggcttggccagctgatcttgaaggaagaaatggagaaagagtctagagaacgctcatccctgctagcaagtcgttatgacagccccattaatagcgcctctcatatccccagtagcaaaaccgccagcctgcctggatacgggcggaatggacttcatcggcctgttagtaccgactttgctcagtacaattcttatggtgatgtttctggtggtgtacgcgattttcagacactgcccgatggccatatgccggccatgcgaatggacaggggagtgtcaatgcctaatatgctggaacctaagattttcccatatgaaatgctgatggtcacgaaccgaggtcggaacaaaatcctacgcgaagtggatcggacgcggctggaaagacatttagcaccagaggtattccgggaaatattcgggatgagcatccaagaatttgataggctaccactttggaggcgcaacgatatgaagaaaaaggctaagctcttttag

SEQ ID NO: 19839 - DNA, 2157 bp, Artificial Sequence
  derived and/or modified sequence
atgttaatgaccctggagatgaccgaactcactgatcctcaccacactatgggtgactataaagtcgcccatcctcaggacccacatcacccatctgaaaaaccagtgatccattgtcacaaatgtggggagccctgtaagggtgaagtgctgagagtacagaccaagcatttccacattaagtgttttacttgtaaagtatgtggttgcgatctggcacaggggggatttttcattaagaacggggagtacctgtgcactctggactatcagcggatgtatgggactcgctgtcatggttgtggggaattcgtggagggtgaggtggttacagccctcgggaagacctaccaccccaattgcttcgcctgtactatctgtaagcgccctttcccacctggtgacagggtaacttttaatggtagggattgcctatgtcaactgtgtgcccagcctatgagcagctctccgaaggagacaactttctcttcaaattgcgcagggtgtgggagggatattaaaaatgggcaggcgctcctagcccttgacaagcagtggcatctgggatgttttaaatgcaaatcttgtggtaaggttttgacaggagagtacatcagcaaggatggggctccatattgtgagaaggactaccagggcctgttcggggtgaaatgcgaggcctgccaccaatttattacgggaaaagtgctggaggccggtgataaacactatcatcccagctgcgcccgatgcagccggtgtaaccagatgtttaccgagggcgaggagatgtacttacagggtagcacggtgtggcacccagactgtaagcaatcgacaaagacagaggagaagctgcggccaacacgtacttcctcggaatccatttacagcagaccgggatcctccataccagggagccctgggcacacgatttatgctaaggttgataacgagattctggattataaagacctggccgcaattcccaaggtgaaggctatttacgacattgagcgtcctgatttgatcacatacgagcctttttatacctccgggtacgatgataagcaggagagacagagcctgggcgagagtcccagaacactgtctcccaccccttccgctgaaggctaccaggatgtgcgagaccggatgattcatcgatctacatcacaaggttctatcaattccccagtgtattcacgccattcctacacaccaacaacatcgcgctcaccacagcatttccaccggccaggtaatgaaccatcttcagggaggaactccccacttccatatcgtcccgactcccgcccactgaccccgacttacgcacaggccccaaagcactttcacgtgcctgaccagggcattaacatatatcgaaagccacccatttataaacagcacgctgctttggcagcccaaagtaagtctagcgaggacattattaagttttctaaatttcccgctgcacaggccccagatccaagcgaaacccccaagatcgagaccgatcactggccaggacccccttctttcgctgtcgtcgggcctgacatgaagcgaagaagcagcggtcgcgaagaggacgacgaggaacttctgcggaggcgccagctacaggaggaacagctcatgaaactgaacagcggcttgggacagctcatcctaaaggaggagatggaaaaggaaagcagggagcggtcttctctgctggcgtccagatacgactccccaataaattcggcctctcatatcccatctagtaaaacggccagcctacccggatacgggagaaacggcctgcacaggccagtcagcactgacttcgcccagtataattcctacggcgacgtgagtggtggcgtaagagattaccagacattgccagacggtcacatgcctgccatgcgcatggaccggggtgtgagcatgcctaatatgctcgagccaaaaatctttccatatgagatgctaatggtgacaaaccggggtcggaataaaattctgagggaagtggacaggacacggcttgaaaggcatctggccccagaagtctttcgagaaattttcggtatgtccatccaggaattcgaccgactgcctctctggaggcgaaacgacatgaagaaaaaggctaagctgttctag

SEQ ID NO: 19840 - DNA, 2109 bp, Artificial Sequence
  derived and/or modified sequence
atggttaaggaaaaggtggctcaccctcaggacccacaccacccatccgaaaaacctgtgatccactgccataagtgcggcgagccttgtaagggagaagtgctgagggtgcagaccaagcacttccacataaagtgcttcacatgcaaggtgtgcgggtgcgatcttgcccagggcggatttttcataaaaaacggcgaatatctgtgtaccctggactaccagaggatgtacgggacgcggtgtcacggatgcggcgagttcgtcgaaggcgaggtggttacagccctgggcaaaacttatcacccaaactgcttcgcgtgcacaatatgtaagagacctttccctcctggagatcgggttacgttcaacggacgcgattgcctgtgccaactttgcgcccagcccatgagcagttcaccaaaggagacaaccttcagcagcaattgtgcagggtgcgggcgagatattaaaaacggccaggccttactggcactggacaagcagtggcaccttggttgttttaagtgcaaaagttgcggtaaagtcctaacaggcgagtacatctctaaggatggggctccctattgcgaaaaagattatcagggcctgttcggggtgaaatgcgaagcttgccaccaattcattacagggaaggtcttagaggccggtgataagcattatcatccctcctgcgctcggtgtagtcggtgcaatcagatgtttaccgaaggcgaagaaatgtatctgcagggctccaccgtttggcacccagattgtaagcagagcacaaagactgaggagaaactgagacctactcgcacatcctctgagtccatttactctagacctggttccagcattcccggttcacctggtcacacaatctatgcgaaagttgacaatgagatcctggactacaaggatctggccgctatccctaaagtgaaggccatctacgatatagaacggcctgaccttatcacctacgagccgttctacaccagcggctacgatgacaagcaagagcgacagagcttgggcgagtcccccaggactctgagtccaactcccagcgcagagggttaccaggacgtgagagaccgaatgatccatcggtctacctctcaagggagtatcaattctcccgtttacagcagacacagttatactcccaccacgagtagaagtccccaacattttcaccgcccaggaaacgaacccagttctggacgtaattcacccctcccctataggcccgactcacgccctctgacacccacgtacgcccaagccccaaagcacttccatgtgcctgaccaagggataaatatctatcgcaagccccctatttataaacagcacgccgcattggccgcacagtctaagtcttcagaagacatcatcaagttctcgaagtttcctgctgcccaggcccctgacccctctgagacccctaaaattgagacggaccactggcccggacccccttcatttgccgtggtgggaccagatatgaaacggaggtcgtctggcagagaggaggacgacgaggagctgttgcgtagaaggcagctgcaagaagagcagttgatgaagctcaattctgggctcggccagctgattcttaaagaagagatggagaaagaatctcgcgaacgcagctcccttcttgcgtctcgttacgatagtcctattaatagcgcaagccacattcccagttctaaaactgcatccctcccagggtatggcaggaacggactgcacaggccagtgagcaccgatttcgcccaatacaacagctacggcgacgtatcaggcggagtgcgcgattaccagaccctgccagatggacatatgcctgcaatgaggatggatcggggagtctccatgccaaacatgttagaaccgaagatcttcccatacgagatgctcatggtgaccaatcgcggacgcaacaagatcctgcgcgaggtggatcgtacccgactcgagagacacttggctcctgaggtctttagggaaatcttcggaatgtcaatacaggagtttgatcgcctcccactgtggcggaggaacgatatgaaaaaaaaagccaagctgttctag

SEQ ID NO: 19841 - DNA, 2157 bp, Artificial Sequence
  derived and/or modified sequence
atgcttatgaccttggagatgacagaattgactgaccctcaccatactatgggagattataaagttgcccaccctcaggatccccaccatccttcagaaaaaccagtgattcattgtcataaatgcggggagccctgcaaaggagaagtgctgagggtgcaaactaagcactttcacattaaatgtttcacatgtaaagtatgcggatgcgacttagcacaaggcggattttttatcaagaacggcgagtatctttgtactctcgactaccaaaggatgtatggaacccggtgccatgggtgtggcgaatttgtggagggagaagtggtcacagccctcggtaagacctaccatccgaattgtttcgcttgtacgatctgtaaaagaccatttccaccaggcgacagagtcacgtttaacggccgagattgtctctgtcagctgtgtgcccagccaatgagctcctccccaaaggagacgaccttttcctctaattgcgccggatgcggcagagacattaaaaacggacaggccttgttagccctggataagcagtggcatctaggctgttttaagtgtaaaagctgtgggaaagtgttgaccggtgagtatatatctaaagatggtgctccctattgtgagaaggactaccaaggcctgtttggagtaaaatgtgaggcttgtcaccaattcatcactggcaaggtgctcgaagctggtgataagcattaccatccatcatgcgctaggtgttctagatgtaatcagatgttcactgagggggaagagatgtatctgcagggttcaaccgtgtggcaccctgactgcaagcagagcaccaagaccgaagagaagctgcggcctactcgaaccagctctgagagcatctattccagaccgggaagttctatcccagggagtccaggacacacaatctatgcgaaggttgataacgagattctggactacaaagacttagcagcgatccccaaggtgaaagcaatctacgatattgaacgaccggatctgatcacgtacgaaccattctatacatcggggtatgatgataagcaggaacggcagagtctgggagaatccccacggactctgtcacctactccctctgccgagggctatcaggatgtccgggaccgtatgattcaccgctcgacaagccagggcagcattaacagtccagtttactcaagacattcttacactccaacgacatcccgctccccccagcactttcatcgacccggtaatgagccgtcatccggtcgtaatagtccactcccctatagaccagatagtcgaccactgacccctacctacgctcaagcacctaagcattttcatgtgcctgatcaagggatcaacatctaccgcaaacccccaatctataagcagcatgctgctctggcggctcagagcaaatcatctgaagatatcattaaattcagcaaattccctgccgctcaggcgccagacccctctgagacccccaagatagaaactgaccactggccagggcctcccagctttgccgtggtggggcctgatatgaagcggcgtagcagtgggagagaagaggacgatgaggagctgctccggaggagacagttgcaggaagagcagcttatgaaactgaattctggactgggccagctcatcctgaaggaagaaatggagaaagagtctcgggaacggtcatctcttctcgcctcaagatacgatagtccgattaactcagccagtcacattccttcaagcaagactgcaagccttcccggttacgggaggaacgggctccatcgacccgtgtcaactgatttcgctcagtacaatagttacggggatgtctctggaggggtgcgcgactttcagaccctgcctgacggtcacatgcccgcaatgcgtatggatcgaggcgtaagcatgccaaacatgctcgagcctaaaattttcccttatgagatgctgatggtaacaaaccgaggcaggaacaaaatcctacgcgaggttgaccgcacccggttggagaggcatctcgctcccgaagtcttccgagaaatttttggtatgagtatccaggagttcgaccgtctgccgttatggagaagaaatgatatgaaaaagaaggccaagcttttttag

SEQ ID NO: 19842 - DNA, 7606 bp, Artificial Sequence
  derived and/or modified sequence
gtcattgagctgatgtgcttttgcaaggggtctctttagaagtggtaggggcagggtcgagagaagaaggggatgcagaatctgtacatgaggaaggagccagagtcactcaggaaactcctcattcttcctgcgctggctgtggcacacccaccggtggcacacccctccctcgggtccagttcagcccacagactcctgggaggagagccagggccccagcctctcctttgaggagtgttgcagcctttctgtgtgccagatgcctagtgaagaaaagctgaaaccctggagctttgtgcatgttaatgaccttggaaatgactgagctcacggaccctcatcacaccatgggagactacaaagtggcccaccctcaggaccctcaccacccatcagagaagcctgtcattcactgccataaatgtggggagccttgcaagggtgaagtgcttcgggtccagaccaaacatttccacatcaagtgtttcacctgcaaagtgtgtggctgtgacctggcacaagggggcttcttcataaagaacggagagtatctctgcaccctggactaccagcggatgtacgggacacgctgccatggctgtggggagttcgtggagggcgaagtggtgactgctctgggcaagacctaccatcccaattgctttgcttgtactatctgcaagcgcccgtttccacccggagaccgagtcacattcaatgggagagactgcctttgtcaactctgtgcacagccgatgtcgtccagtccgaaagaaaccaccttctccagcaattgtgccggctgcggaagagatatcaagaatgggcaggcgctgctggcgctggataagcagtggcacttggggtgctttaaatgcaagtcctgcgggaaggtcctcaccggggagtacatcagcaaggatggtgctccgtactgtgaaaaggactaccagggactctttggggtgaaatgtgaggcgtgtcaccagtttatcacagggaaagtcctggaggcaggtgacaaacattaccaccccagctgtgcacgatgcagcagatgcaaccagatgttcacagaaggagaggaaatgtatcttcaaggctccaccgtttggcatcccgactgtaagcaatctacgaagaccgaggaaaagctgcggcctaccaggacatcctcggaaagtatttattctaggccaggctccagtattcctggctcaccaggtcatactatctatgcaaaagtagacaatgagatcctggattacaaggatttagcagccattccgaaggtcaaggcaatttatgacattgaacgtccagatcttattacctatgagcctttctacacttcgggctatgatgacaaacaggagagacagagccttggagagtctccgaggactttgtctcctactccatcagcagaagggtaccaggatgttcgggatcggatgatccatcggtccacgagccagggctccatcaactcccctgtgtacagccgccacagctacactccaaccacgtcccgctctccccagcatttccacagacctggcaatgagccgtccagcggccggaactcccctctcccttaccggccagacagccgccctctaactccaacttacgctcaggcccctaaacatttccatgttccagatcaaggaatcaacatttaccgaaagccacccatctacaaacagcatgctgccttggcagcccagagcaagtcctcagaagatatcatcaagttttccaagttcccagcagcccaggcaccagaccccagcgagacaccaaagattgagacggaccactggcctggtcccccctcatttgctgtcgtaggacctgacatgaaacgcagatctagtggcagagaggaagatgatgaggaacttctgagacgtcggcagcttcaagaagagcaattaatgaagcttaactcaggcctgggacagttgatcttgaaagaagagatggagaaagagagccgggaaaggtcatctctgttagccagtcgctacgattctcccatcaactcagcttcacatattccatcatctaaaactgcatctctccctggctatggaagaaatgggcttcaccggcctgtttctaccgacttcgctcagtataacagctatggggatgtcagcgggggagtgcgagatttccagacactcccagatggccacatgcctgcaatgagaatggaccgaggagtgtctatgcccaacatgttggaaccaaagatatttccatatgaaatgctcatggtgaccaacagagggcgaaacaaaatcctcagagaggtggacagaaccaggctggagcgccacttagcccctgaagtgtttcgggaaatctttggaatgtccatacaggagtttgacaggttacctctttggagacgcaacgacatgaagaaaaaagcaaaactcttctaagtcccactcgtgaatggcaattagagaaaggactgacagtggcggtgccccataggatgtcatattgaggcccaaacttgattggagaatttgcaaactaccgtcgctcagcaacaccaaaaagagaaagtctggttaaaacaccatgagtcaaatgtcgggccagccaacagtaacacttgccaagaagcatggcgtagaaatttctatgttccgaaacacagagtagtgtccacatgtgagcttttcacattaccttatgtatacaacaggagctgcgttgttttcttctttttcttttcctttatctgttgtccaacaacagtgctgactgtccggataagagctggcaagtgcccttaggatgccgcatgggaaaaatcggttatcataatttcaaagtataaatatatttattaagtagcgctgcggctaagaaggaagagtgaggggtctgtccatggggtggcagtgatttcacacccgcctttcttgaatggcttcgtgttactcagccgtgccctggcaggaatggaactccatcagggaacagggcagctctgtttgaatggggtgaaaaacagcaaaattaattcttagcaagctccttgttctctactgttcaccgggacctggctggcaaatgacttagctattagtatatttaaaaactgttcaaaagcaaaagagaaggaacaggaatgaaaggaaaccttcccttaactctttctgcttcccatagcaggtctggttcctgctccccgcctaggacaggagctgtctggagctccacctttgcaaagaaaggaaaaacacaaattgcccccagattggcccagtggcatgccattaggtgattttgcataggggccatatcattcatggccaaaaaaaaccaaaaagcaaaaaacaaaaacaagtcccatgtcctactgactctagttcttccagtcgttatcctctgctgtctctctggcatcctatgaatcagatcaagcccatgctgttgttggtttttaaggtttctttcaataataggctaaggaaagacatgtttttctcttttaaatctctgcaactccaaagtagactccttcgaacgtatttaatttggccttttcagctttcttcttgcccagctctgtcgaattcatgggtgtgtgtgcacatgttggtttcactcacccagagtaattttgtgagcatgcatgtgctttttaatttctgcttgaatgtttgtcctgctgtgttgcagcttctaaagacattgtcaccgagtgtgtgtgactcaaagatcaagagtgaggctaaactgcgaccccaacatcacttccttcatggaaaggtgttggcgctgatgtagctcatggaaggatcagactgggaaccacagaggaaggatgaggtgggatgtggaggtcagagcatctcacgagagtccctcaggctctgcaacactagattcgaatatgagcctagggtttccccaacacgtgcgtgcatatgaaaccacatcatgattcccgacgtgagttagatgagggagagtttgtgtaactccacacccaggagggtaagccactttattatcatgctttggggctgtgcttaagaatttaagctctgttttaaagccgaagaagaaaacatttgaatttaccttcatatgccactaagaacaaaagctctgaagttcttcctgctggcaccaaatattaggattacaagctgtctctctgacaccagtggtaaaaaagcaagtagaatagtttctgagtctgtgttgcagcctctgacacgtggctcaccgctgtcatttgggggatggaatgaacagtcactgttctatagcatcctcctgtgctcttacctaaggaatctaaattgtcctagccttccattgctatgcactgaatgaggactactctcgtgtgtgtgtgtgtgtgtgtgtgtgtgtgtgtgtgtgtgtgtgtgtgtgttggatctactaacatgtttagcaaatggctctgacagggtggccatgagcagatgagaccagctcttgcttggttggaagccacactgcagtttgcagtttagcctttggtgtctcagtggcttcttgcttattccatgctttttctatcccatcctctctctgtgccctcctgcaatggcagccttggcacaatgcctgggtgtcctcatccttgctttactctggaaagtgtggggatggagaggatggtgcatttccagtgcttccttacctgtcaataacaatggtggccacctgggtcccagcacttggctggtggagagatttttttcattatggagctaataaagggtccctacgttttacattgattaatgaattatcacccagacatgtgcagatgaaatgtcaatataagaaaaatcaaggtatttgggaaacatgggcataatcaggtagttttgctaaaattcctcttccttggtctacataaagaagacatgggtctgtcatagaatggggacattagactgaaaactgggacaacccccttccttattttatagagactaggagttaaggggcctgcctaagattgcagtgataaagaactgaaccctaaatcagctcccactaatgaaaccctgctttccttgtatcttttaaactcagttctgcatccaacttgagaagaaaaaaagcttctttccatatcaagtaccatatgagttcatttaaactgcaccttgcagaaatgcattgccagaaagcaccagtagcctcctatctgcaagcagagtagtgctctgctctggggaggggtcattggaaaccataatgcagagtgggccccctactccatttcccagcaaaaggctccagctggagggatgggttgtggggcaacctggttcctgctaactgccagattgaatgtgtgggctagaatgcctgcacatttagttaaactgggctcagcatgcttgtcctcaaaatgtccatcctggtcacagcacacaagatggctattggtctgcttttaccctaccctgtactatacatgaaaattccagttattaacacactcaaactggtggagcttgttcaccctaggaaggggattgtatatatggcaggcttccctggtgccgatgtaaagggctacatttgggaacatttgacttccttgggactcttaagtgcataatgatggcatgaagtaaaaggggcctcaatgatgataggaaaatcagttcttttaaaatttcttcaagaaaatccaggctatcacatagtctttctgtgtgacttattaggagataggaagagcattgggaaacttgcacagctagctatgcatctacattttggtttggggttagttatgaaatgttcttaatatgacgtgttcaataacttcacataaacttcctgttctccaaaacctcaaagagatagagttaatgagttgttgtttttttttaaatgggggtagttttctatctgtcatgggctctagcatctactccgctacccaattctgtcatctccaagctgagtttcctcttctgaggcagaggctggagcagttctttttcagttctcatcctctccatcccaatccagtatatcaatcaactctaactcggagacgtctagctggcaatgtttctaaaactttcactggatttctttagacattgaagcaaacatttttttctaagaattgcttctcagatgatgatatcaaatgtatatgcttttgcaagtttgaaaagttcaaattaaccacttttgactaggtaagtctttctaaaaaccatttaaagctaactgggtcttagcatcctcctgtgtatggaagagacaggtgaccgctccaggttgggtgctcacagaacccttttcctgactctcatggaagatggtggaaggaaaatagactgtctcatcaaccctcctgtgtcctctgaagcaatctcagtttttattaaccacctcttctgtgtttctggtagctatttaacctgtatttaatctgtacttcctatgccagcctcaattttatttgatttttacaattattctcttctaaccaatgaagtgtttgtcagtatgccccaaagcttgctcttttgtgctcccttttgaataactttctatccagaaaaagagattatttgggacttgagatttgcagtgataccaacttatagcaatgatgtactttaagggaactacccaactatgttgtgatagaagaaagagaaaccttcactttggcatttttttttaatcactgtttatttttctgtttgcggcccaggaagcagtgggaggtggtggcagatatgctttgcatatggattgttatgtttttatttgggcaagtttaatcatggaaaactcaaaaagaaggggggaaatggtcagtttaagccaaaagaaactttctaaacaatgtataggtacacagcaaaattaaacaaatccaacaatttctgaagcttagtgtaattgagtggtggttgttattcaataaaattattcccaaaagtgtttctcctaagagtgcagttcccatgagtcacttcctgaacccattgaccaaaggtggacagagacaatcctgtagaccttgacattcagaaagatgtgagctgcttactgatcatatatgcatacgtttctttacagcagaggaaaccattgtccacaaaactgatgttcttttggggttttatgtacagacttgtccaatcatgtgtgtggttcctgcgagttgctgatgactccgcattgaagctctctgagttctttgattttaagttgggtttatggaattttttcaaatgttggaaggtgtgtggttcttcctgccctccctccccttttggaaatatgaaagcaaatgtttagaagaattccttttgaaaagctgtgtcgtgttccctgtgaaactgagcaggtgtgtgttggcgcgctaagtgccacatgcttgtgtgtagaggaggaggtggccctgccggctccgcgctgctgtgcctgtgatccctacctgctccccgctcctgttgccagcagcactcactgcactcctttgtcatatactctgcatcactgtcatactcacaacttcgtgaataaagttgtgtgctttattcgt

SEQ ID NO: 19843 - protein, 746 aa, Artificial Sequence
  derived and/or modified sequence
MLMTLEMTELTDPHHTMGDYKVAHPQDPHHPSEKPVIHCHKCGEPCKGEVLRVQTKHFHIKCFTCKVCGCDLAQGGFFIKNGEYLCTLDYQRMYGTRCHGCGEFVEGEVVTALGKTYHPNCFACTICKRPFPPGDRVTFNGRDCLCQLCAQPMSSSPKETTFSSNCAGCGRDIKNGQALLALDKQWHLGCFKCKSCGKVLTGEYISKDGAPYCEKDYQGLFGVKCEACHQFITGKVLEAGDKHYHPSCARCSRCNQMFTEGEEMYLQGSTVWHPDCKQSTKTEEKLRLPNIRRSSSDFFYSKSLIRRTGRSPSLQPTRTSSESIYSRPGSSIPGSPGHTIYAKVDNEILDYKDLAAIPKVKAIYDIERPDLITYEPFYTSGYDDKQERQSLGESPRTLSPTPSAEGYQDVRDRMIHRSTSQGSINSPVYSRHSYTPTTSRSPQHFHRPGNEPSSGRNSPLPYRPDSRPLTPTYAQAPKHFHVPDQGINIYRKPPIYKQHAALAAQSKSSEDIIKFSKFPAAQAPDPSETPKIETDHWPGPPSFAVVGPDMKRRSSGREEDDEELLRRRQLQEEQLMKLNSGLGQLILKEEMEKESRERSSLLASRYDSPINSASHIPSSKTASLPGYGRNGLHRPVSTDFAQYNSYGDVSGGVRDFQTLPDGHMPAMRMDRGVSMPNMLEPKIFPYEMLMVTNRGRNKILREVDRTRLERHLAPEVFREIFGMSIQEFDRLPLWRRNDMKKKAKLF

SEQ ID NO: 19844 - DNA, 2241 bp, Artificial Sequence
  derived and/or modified sequence
atgctgatgaccctggagatgaccgagctgaccgacccccaccacaccatgggcgactacaaggtggcccacccccaggacccccaccaccccagcgagaagcccgtgatccactgccacaagtgcggcgagccctgcaagggcgaggtgctgagagtgcagaccaagcacttccacatcaagtgcttcacctgcaaggtgtgcggctgcgacctggcccagggcggcttcttcatcaagaacggcgagtacctgtgcaccctggactaccagagaatgtacggcaccagatgccacggctgcggcgagttcgtggagggcgaggtggtgaccgccctgggcaagacctaccaccccaactgcttcgcctgcaccatctgcaagagacccttcccccccggcgacagagtgaccttcaacggcagagactgcctgtgccagctgtgcgcccagcccatgagcagcagccccaaggagaccaccttcagcagcaactgcgccggctgcggcagagacatcaagaacggccaggccctgctggccctggacaagcagtggcacctgggctgcttcaagtgcaagagctgcggcaaggtgctgaccggcgagtacatcagcaaggacggcgccccctactgcgagaaggactaccagggcctgttcggcgtgaagtgcgaggcctgccaccagttcatcaccggcaaggtgctggaggccggcgacaagcactaccaccccagctgcgccagatgcagcagatgcaaccagatgttcaccgagggcgaggagatgtacctgcagggcagcaccgtgtggcaccccgactgcaagcagagcaccaagaccgaggagaagctgagactgcccaacatcagaagaagcagcagcgacttcttctacagcaagagcctgatcagaagaaccggcagaagccccagcctgcagcccaccagaaccagcagcgagagcatctacagcagacccggcagcagcatccccggcagccccggccacaccatctacgccaaggtggacaacgagatcctggactacaaggacctggccgccatccccaaggtgaaggccatctacgacatcgagagacccgacctgatcacctacgagcccttctacaccagcggctacgacgacaagcaggagagacagagcctgggcgagagccccagaaccctgagccccacccccagcgccgagggctaccaggacgtgagagacagaatgatccacagaagcaccagccagggcagcatcaacagccccgtgtacagcagacacagctacacccccaccaccagcagaagcccccagcacttccacagacccggcaacgagcccagcagcggcagaaacagccccctgccctacagacccgacagcagacccctgacccccacctacgcccaggcccccaagcacttccacgtgcccgaccagggcatcaacatctacagaaagccccccatctacaagcagcacgccgccctggccgcccagagcaagagcagcgaggacatcatcaagttcagcaagttccccgccgcccaggcccccgaccccagcgagacccccaagatcgagaccgaccactggcccggcccccccagcttcgccgtggtgggccccgacatgaagagaagaagcagcggcagagaggaggacgacgaggagctgctgagaagaagacagctgcaggaggagcagctgatgaagctgaacagcggcctgggccagctgatcctgaaggaggagatggagaaggagagcagagagagaagcagcctgctggccagcagatacgacagccccatcaacagcgccagccacatccccagcagcaagaccgccagcctgcccggctacggcagaaacggcctgcacagacccgtgagcaccgacttcgcccagtacaacagctacggcgacgtgagcggcggcgtgagagacttccagaccctgcccgacggccacatgcccgccatgagaatggacagaggcgtgagcatgcccaacatgctggagcccaagatcttcccctacgagatgctgatggtgaccaacagaggcagaaacaagatcctgagagaggtggacagaaccagactggagagacacctggcccccgaggtgttcagagagatcttcggcatgagcatccaggagttcgacagactgcccctgtggagaagaaacgacatgaagaagaaggccaagctgttctag

SEQ ID NO: 19845 - DNA, 2241 bp, Artificial Sequence
  derived and/or modified sequence
atgcttatgaccctcgagatgaccgaactcaccgatcctcatcacaccatgggagattataaagtggcacacccccaagatccgcatcacccttcagagaaacccgtgattcattgccataaatgcggcgagccctgcaagggggaggtcctcagagtgcagactaagcacttccacatcaaatgcttcacttgtaaagtgtgtgggtgtgatctggcacaaggagggttttttatcaaaaacggagagtatctgtgtacattggactaccagcgaatgtatggcactcgctgccatggatgcggggagtttgtagagggtgaagtcgtgaccgccctcggcaagacttaccatccgaattgtttcgcatgcacaatttgtaaacggccctttcctcctggcgaccgcgtgacctttaatggaagggactgtctctgccagctttgcgcgcagcccatgtcaagcagccccaaagagactaccttttccagcaattgcgcagggtgtggccgcgatatcaaaaatggacaggcactgctggctcttgacaagcaatggcacctgggttgtttcaaatgcaagtcatgtggaaaagtgttgactggggagtacatctcaaaagacggagccccgtattgcgagaaagactaccaggggctcttcggagttaagtgtgaagcatgccaccagtttatcaccggtaaagtactcgaggcgggggacaaacattatcatcctagttgtgctcgttgttcccggtgtaatcagatgttcactgagggcgaagaaatgtatttgcaaggttctaccgtctggcatcctgactgtaaacagtccactaaaacggaagagaagttgcgcctgcccaacattcggcgctcctccagcgactttttctattccaaatcactcatccgacggacagggcgatcccccagtctgcagccgacgcggactagtagtgagagcatctacagccgccctggatcctcaatccctggatcccctgggcataccatctatgcaaaggtcgacaatgagattctggactataaggacctggccgcaatcccaaaggtgaaggctatatatgatatcgagcgtccagatttaattacctatgagccattttacacaagtggctatgatgacaagcaagaaagacagtccctgggagagtctccccgaaccctgtctccaaccccctctgccgagggttaccaagacgtgcgtgatagaatgattcacaggagcacttctcagggttctatcaatagccccgtctatagcaggcattcctataccccgactacttcccggagcccacagcactttcacaggccaggcaatgagccctcaagcggccgaaactcccctctaccctacagacccgatagccgcccccttactccgacatacgcccaggcacccaagcactttcacgtccctgatcaggggatcaatatttataggaagccgcctatctacaaacaacacgctgccttagctgctcagtcgaagtcctccgaggacattattaaattctccaagtttcctgccgctcaagcgccggatccctcagagacacctaagatcgaaaccgatcattggccaggcccaccatctttcgcggtggttggtccagatatgaagcggcgcagctcgggccgcgaggaagatgatgaagagctcttgaggcgtcgccagttgcaggaggaacagctcatgaagctgaattcaggcctgggccagctgatcctcaaggaggaaatggagaaagaaagcagggagaggtcttctttactagcttccagatacgattcacctatcaactctgcctctcacatcccttcttccaagacggcatcccttccaggatatggaagaaatggacttcaccgcccggtgtccacggattttgcccagtacaactcctatggggacgtttccggaggcgtcagggacttccagaccttacccgacggtcacatgcccgccatgcgaatggatcggggcgtttcgatgcctaacatgctggagcccaagattttcccctatgaaatgcttatggtaacaaatcggggccgaaacaaaattctccgcgaggttgatcggacacgcttggaaaggcacctggcacccgaggtattcagagagatttttggtatgtctatccaggagtttgaccgcctcccactgtggcgacgcaacgacatgaagaagaaggctaaattgttctag

SEQ ID NO: 19846 - DNA, 6836 bp, Artificial Sequence
  derived and/or modified sequence
gaggagaggaggcgtgagagagcgtgcctgcccgccgcacacggggctggtttccggagtgcgtctctagagggatgcacgttgccttagccgagcttcggagagaagcctgatatgtaacccaggcaggtgggagcctcagtctgtcgggctgaggtctggcatctacaaagcctcttggccgtgttctgaacttgaagcctggaggagttctctgctcagcacagccaaggaacagaattagaagaaaaggaaccctggcctgaggcaggtgacaaacattaccaccccagctgtgcacgatgcagcagatgcaaccagatgttcacagaaggagaggaaatgtatcttcaaggctccaccgtttggcatcccgactgtaagcaatctacgaagaccgaggaaaagctgcggctgccaaacattcggcgttcttcatccgatttcttttattccaaaagtctgattcgacgcacaggacggtctccgtctctgcagcctaccaggacatcctcggaaagtatttattctaggccaggctccagtattcctggctcaccaggtcatactatctatgcaaaagtagacaatgagatcctggattacaaggatttagcagccattccgaaggtcaaggcaatttatgacattgaacgtccagatcttattacctatgagcctttctacacttcgggctatgatgacaaacaggagagacagagccttggagagtctccgaggactttgtctcctactccatcagcagaagggtaccaggatgttcgggatcggatgatccatcggtccacgagccagggctccatcaactcccctgtgtacagccgccacagctacactccaaccacgtcccgctctccccagcatttccacagacctgatcaaggaatcaacatttaccgaaagccacccatctacaaacagcatgctgccttggcagcccagagcaagtcctcagaagatatcatcaagttttccaagttcccagcagcccaggcaccagaccccagcgagacaccaaagattgagacggaccactggcctggtcccccctcatttgctgtcgtaggacctgacatgaaacgcagatctagtggcagagaggaagatgatgaggaacttctgagacgtcggcagcttcaagaagagcaattaatgaagcttaactcaggcctgggacagttgatcttgaaagaagagatggagaaagagagccgggaaaggtcatctctgttagccagtcgctacgattctcccatcaactcagcttcacatattccatcatctaaaactgcatctctccctggctatggaagaaatgggcttcaccggcctgtttctaccgacttcgctcagtataacagctatggggatgtcagcgggggagtgcgagatttccagacactcccagatggccacatgcctgcaatgagaatggaccgaggagtgtctatgcccaacatgttggaaccaaagatatttccatatgaaatgctcatggtgaccaacagagggcgaaacaaaatcctcagagaggtggacagaaccaggctggagcgccacttagcccctgaagtgtttcgggaaatctttggaatgtccatacaggagtttgacaggttacctctttggagacgcaacgacatgaagaaaaaagcaaaactcttctaagtcccactcgtgaatggcaattagagaaaggactgacagtggcggtgccccataggatgtcatattgaggcccaaacttgattggagaatttgcaaactaccgtcgctcagcaacaccaaaaagagaaagtctggttaaaacaccatgagtcaaatgtcgggccagccaacagtaacacttgccaagaagcatggcgtagaaatttctatgttccgaaacacagagtagtgtccacatgtgagcttttcacattaccttatgtatacaacaggagctgcgttgttttcttctttttcttttcctttatctgttgtccaacaacagtgctgactgtccggataagagctggcaagtgcccttaggatgccgcatgggaaaaatcggttatcataatttcaaagtataaatatatttattaagtagcgctgcggctaagaaggaagagtgaggggtctgtccatggggtggcagtgatttcacacccgcctttcttgaatggcttcgtgttactcagccgtgccctggcaggaatggaactccatcagggaacagggcagctctgtttgaatggggtgaaaaacagcaaaattaattcttagcaagctccttgttctctactgttcaccgggacctggctggcaaatgacttagctattagtatatttaaaaactgttcaaaagcaaaagagaaggaacaggaatgaaaggaaaccttcccttaactctttctgcttcccatagcaggtctggttcctgctccccgcctaggacaggagctgtctggagctccacctttgcaaagaaaggaaaaacacaaattgcccccagattggcccagtggcatgccattaggtgattttgcataggggccatatcattcatggccaaaaaaaaccaaaaagcaaaaaacaaaaacaagtcccatgtcctactgactctagttcttccagtcgttatcctctgctgtctctctggcatcctatgaatcagatcaagcccatgctgttgttggtttttaaggtttctttcaataataggctaaggaaagacatgtttttctcttttaaatctctgcaactccaaagtagactccttcgaacgtatttaatttggccttttcagctttcttcttgcccagctctgtcgaattcatgggtgtgtgtgcacatgttggtttcactcacccagagtaattttgtgagcatgcatgtgctttttaatttctgcttgaatgtttgtcctgctgtgttgcagcttctaaagacattgtcaccgagtgtgtgtgactcaaagatcaagagtgaggctaaactgcgaccccaacatcacttccttcatggaaaggtgttggcgctgatgtagctcatggaaggatcagactgggaaccacagaggaaggatgaggtgggatgtggaggtcagagcatctcacgagagtccctcaggctctgcaacactagattcgaatatgagcctagggtttccccaacacgtgcgtgcatatgaaaccacatcatgattcccgacgtgagttagatgagggagagtttgtgtaactccacacccaggagggtaagccactttattatcatgctttggggctgtgcttaagaatttaagctctgttttaaagccgaagaagaaaacatttgaatttaccttcatatgccactaagaacaaaagctctgaagttcttcctgctggcaccaaatattaggattacaagctgtctctctgacaccagtggtaaaaaagcaagtagaatagtttctgagtctgtgttgcagcctctgacacgtggctcaccgctgtcatttgggggatggaatgaacagtcactgttctatagcatcctcctgtgctcttacctaaggaatctaaattgtcctagccttccattgctatgcactgaatgaggactactctcgtgtgtgtgtgtgtgtgtgtgtgtgtgtgtgtgtgtgtgtgtgtgtgtgttggatctactaacatgtttagcaaatggctctgacagggtggccatgagcagatgagaccagctcttgcttggttggaagccacactgcagtttgcagtttagcctttggtgtctcagtggcttcttgcttattccatgctttttctatcccatcctctctctgtgccctcctgcaatggcagccttggcacaatgcctgggtgtcctcatccttgctttactctggaaagtgtggggatggagaggatggtgcatttccagtgcttccttacctgtcaataacaatggtggccacctgggtcccagcacttggctggtggagagatttttttcattatggagctaataaagggtccctacgttttacattgattaatgaattatcacccagacatgtgcagatgaaatgtcaatataagaaaaatcaaggtatttgggaaacatgggcataatcaggtagttttgctaaaattcctcttccttggtctacataaagaagacatgggtctgtcatagaatggggacattagactgaaaactgggacaacccccttccttattttatagagactaggagttaaggggcctgcctaagattgcagtgataaagaactgaaccctaaatcagctcccactaatgaaaccctgctttccttgtatcttttaaactcagttctgcatccaacttgagaagaaaaaaagcttctttccatatcaagtaccatatgagttcatttaaactgcaccttgcagaaatgcattgccagaaagcaccagtagcctcctatctgcaagcagagtagtgctctgctctggggaggggtcattggaaaccataatgcagagtgggccccctactccatttcccagcaaaaggctccagctggagggatgggttgtggggcaacctggttcctgctaactgccagattgaatgtgtgggctagaatgcctgcacatttagttaaactgggctcagcatgcttgtcctcaaaatgtccatcctggtcacagcacacaagatggctattggtctgcttttaccctaccctgtactatacatgaaaattccagttattaacacactcaaactggtggagcttgttcaccctaggaaggggattgtatatatggcaggcttccctggtgccgatgtaaagggctacatttgggaacatttgacttccttgggactcttaagtgcataatgatggcatgaagtaaaaggggcctcaatgatgataggaaaatcagttcttttaaaatttcttcaagaaaatccaggctatcacatagtctttctgtgtgacttattaggagataggaagagcattgggaaacttgcacagctagctatgcatctacattttggtttggggttagttatgaaatgttcttaatatgacgtgttcaataacttcacataaacttcctgttctccaaaacctcaaagagatagagttaatgagttgttgtttttttttaaatgggggtagttttctatctgtcatgggctctagcatctactccgctacccaattctgtcatctccaagctgagtttcctcttctgaggcagaggctggagcagttctttttcagttctcatcctctccatcccaatccagtatatcaatcaactctaactcggagacgtctagctggcaatgtttctaaaactttcactggatttctttagacattgaagcaaacatttttttctaagaattgcttctcagatgatgatatcaaatgtatatgcttttgcaagtttgaaaagttcaaattaaccacttttgactaggtaagtctttctaaaaaccatttaaagctaactgggtcttagcatcctcctgtgtatggaagagacaggtgaccgctccaggttgggtgctcacagaacccttttcctgactctcatggaagatggtggaaggaaaatagactgtctcatcaaccctcctgtgtcctctgaagcaatctcagtttttattaaccacctcttctgtgtttctggtagctatttaacctgtatttaatctgtacttcctatgccagcctcaattttatttgatttttacaattattctcttctaaccaatgaagtgtttgtcagtatgccccaaagcttgctcttttgtgctcccttttgaataactttctatccagaaaaagagattatttgggacttgagatttgcagtgataccaacttatagcaatgatgtactttaagggaactacccaactatgttgtgatagaagaaagagaaaccttcactttggcatttttttttaatcactgtttatttttctgtttgcggcccaggaagcagtgggaggtggtggcagatatgctttgcatatggattgttatgtttttatttgggcaagtttaatcatggaaaactcaaaaagaaggggggaaatggtcagtttaagccaaaagaaactttctaaacaatgtataggtacacagcaaaattaaacaaatccaacaatttctgaagcttagtgtaattgagtggtggttgttattcaataaaattattcccaaaagtgtttctcctaagagtgcagttcccatgagtcacttcctgaacccattgaccaaaggtggacagagacaatcctgtagaccttgacattcagaaagatgtgagctgcttactgatcatatatgcatacgtttctttacagcagaggaaaccattgtccacaaaactgatgttcttttggggttttatgtacagacttgtccaatcatgtgtgtggttcctgcgagttgctgatgactccgcattgaagctctctgagttctttgattttaagttgggtttatggaattttttcaaatgttggaaggtgtgtggttcttcctgccctccctccccttttggaaatatgaaagcaaatgtttagaagaattccttttgaaaagctgtgtcgtgttccctgtgaaactgagcaggtgtgtgttggcgcgctaagtgccacatgcttgtgtgtagaggaggaggtggccctgccggctccgcgctgctgtgcctgtgatccctacctgctccccgctcctgttgccagcagcactcactgcactcctttgtcatatactctgcatcactgtcatactcacaacttcgtgaataaagttgtgtgctttattcgt

SEQ ID NO: 19847 - DNA, 7690 bp, Artificial Sequence
  derived and/or modified sequence
gtcattgagctgatgtgcttttgcaaggggtctctttagaagtggtaggggcagggtcgagagaagaaggggatgcagaatctgtacatgaggaaggagccagagtcactcaggaaactcctcattcttcctgcgctggctgtggcacacccaccggtggcacacccctccctcgggtccagttcagcccacagactcctgggaggagagccagggccccagcctctcctttgaggagtgttgcagcctttctgtgtgccagatgcctagtgaagaaaagctgaaaccctggagctttgtgcatgttaatgaccttggaaatgactgagctcacggaccctcatcacaccatgggagactacaaagtggcccaccctcaggaccctcaccacccatcagagaagcctgtcattcactgccataaatgtggggagccttgcaagggtgaagtgcttcgggtccagaccaaacatttccacatcaagtgtttcacctgcaaagtgtgtggctgtgacctggcacaagggggcttcttcataaagaacggagagtatctctgcaccctggactaccagcggatgtacgggacacgctgccatggctgtggggagttcgtggagggcgaagtggtgactgctctgggcaagacctaccatcccaattgctttgcttgtactatctgcaagcgcccgtttccacccggagaccgagtcacattcaatgggagagactgcctttgtcaactctgtgcacagccgatgtcgtccagtccgaaagaaaccaccttctccagcaattgtgccggctgcggaagagatatcaagaatgggcaggcgctgctggcgctggataagcagtggcacttggggtgctttaaatgcaagtcctgcgggaaggtcctcaccggggagtacatcagcaaggatggtgctccgtactgtgaaaaggactaccagggactctttggggtgaaatgtgaggcgtgtcaccagtttatcacagggaaagtcctggaggcaggtgacaaacattaccaccccagctgtgcacgatgcagcagatgcaaccagatgttcacagaaggagaggaaatgtatcttcaaggctccaccgtttggcatcccgactgtaagcaatctacgaagaccgaggaaaagctgcggctgccaaacattcggcgttcttcatccgatttcttttattccaaaagtctgattcgacgcacaggacggtctccgtctctgcagcctaccaggacatcctcggaaagtatttattctaggccaggctccagtattcctggctcaccaggtcatactatctatgcaaaagtagacaatgagatcctggattacaaggatttagcagccattccgaaggtcaaggcaatttatgacattgaacgtccagatcttattacctatgagcctttctacacttcgggctatgatgacaaacaggagagacagagccttggagagtctccgaggactttgtctcctactccatcagcagaagggtaccaggatgttcgggatcggatgatccatcggtccacgagccagggctccatcaactcccctgtgtacagccgccacagctacactccaaccacgtcccgctctccccagcatttccacagacctggcaatgagccgtccagcggccggaactcccctctcccttaccggccagacagccgccctctaactccaacttacgctcaggcccctaaacatttccatgttccagatcaaggaatcaacatttaccgaaagccacccatctacaaacagcatgctgccttggcagcccagagcaagtcctcagaagatatcatcaagttttccaagttcccagcagcccaggcaccagaccccagcgagacaccaaagattgagacggaccactggcctggtcccccctcatttgctgtcgtaggacctgacatgaaacgcagatctagtggcagagaggaagatgatgaggaacttctgagacgtcggcagcttcaagaagagcaattaatgaagcttaactcaggcctgggacagttgatcttgaaagaagagatggagaaagagagccgggaaaggtcatctctgttagccagtcgctacgattctcccatcaactcagcttcacatattccatcatctaaaactgcatctctccctggctatggaagaaatgggcttcaccggcctgtttctaccgacttcgctcagtataacagctatggggatgtcagcgggggagtgcgagatttccagacactcccagatggccacatgcctgcaatgagaatggaccgaggagtgtctatgcccaacatgttggaaccaaagatatttccatatgaaatgctcatggtgaccaacagagggcgaaacaaaatcctcagagaggtggacagaaccaggctggagcgccacttagcccctgaagtgtttcgggaaatctttggaatgtccatacaggagtttgacaggttacctctttggagacgcaacgacatgaagaaaaaagcaaaactcttctaagtcccactcgtgaatggcaattagagaaaggactgacagtggcggtgccccataggatgtcatattgaggcccaaacttgattggagaatttgcaaactaccgtcgctcagcaacaccaaaaagagaaagtctggttaaaacaccatgagtcaaatgtcgggccagccaacagtaacacttgccaagaagcatggcgtagaaatttctatgttccgaaacacagagtagtgtccacatgtgagcttttcacattaccttatgtatacaacaggagctgcgttgttttcttctttttcttttcctttatctgttgtccaacaacagtgctgactgtccggataagagctggcaagtgcccttaggatgccgcatgggaaaaatcggttatcataatttcaaagtataaatatatttattaagtagcgctgcggctaagaaggaagagtgaggggtctgtccatggggtggcagtgatttcacacccgcctttcttgaatggcttcgtgttactcagccgtgccctggcaggaatggaactccatcagggaacagggcagctctgtttgaatggggtgaaaaacagcaaaattaattcttagcaagctccttgttctctactgttcaccgggacctggctggcaaatgacttagctattagtatatttaaaaactgttcaaaagcaaaagagaaggaacaggaatgaaaggaaaccttcccttaactctttctgcttcccatagcaggtctggttcctgctccccgcctaggacaggagctgtctggagctccacctttgcaaagaaaggaaaaacacaaattgcccccagattggcccagtggcatgccattaggtgattttgcataggggccatatcattcatggccaaaaaaaaccaaaaagcaaaaaacaaaaacaagtcccatgtcctactgactctagttcttccagtcgttatcctctgctgtctctctggcatcctatgaatcagatcaagcccatgctgttgttggtttttaaggtttctttcaataataggctaaggaaagacatgtttttctcttttaaatctctgcaactccaaagtagactccttcgaacgtatttaatttggccttttcagctttcttcttgcccagctctgtcgaattcatgggtgtgtgtgcacatgttggtttcactcacccagagtaattttgtgagcatgcatgtgctttttaatttctgcttgaatgtttgtcctgctgtgttgcagcttctaaagacattgtcaccgagtgtgtgtgactcaaagatcaagagtgaggctaaactgcgaccccaacatcacttccttcatggaaaggtgttggcgctgatgtagctcatggaaggatcagactgggaaccacagaggaaggatgaggtgggatgtggaggtcagagcatctcacgagagtccctcaggctctgcaacactagattcgaatatgagcctagggtttccccaacacgtgcgtgcatatgaaaccacatcatgattcccgacgtgagttagatgagggagagtttgtgtaactccacacccaggagggtaagccactttattatcatgctttggggctgtgcttaagaatttaagctctgttttaaagccgaagaagaaaacatttgaatttaccttcatatgccactaagaacaaaagctctgaagttcttcctgctggcaccaaatattaggattacaagctgtctctctgacaccagtggtaaaaaagcaagtagaatagtttctgagtctgtgttgcagcctctgacacgtggctcaccgctgtcatttgggggatggaatgaacagtcactgttctatagcatcctcctgtgctcttacctaaggaatctaaattgtcctagccttccattgctatgcactgaatgaggactactctcgtgtgtgtgtgtgtgtgtgtgtgtgtgtgtgtgtgtgtgtgtgtgtgtgttggatctactaacatgtttagcaaatggctctgacagggtggccatgagcagatgagaccagctcttgcttggttggaagccacactgcagtttgcagtttagcctttggtgtctcagtggcttcttgcttattccatgctttttctatcccatcctctctctgtgccctcctgcaatggcagccttggcacaatgcctgggtgtcctcatccttgctttactctggaaagtgtggggatggagaggatggtgcatttccagtgcttccttacctgtcaataacaatggtggccacctgggtcccagcacttggctggtggagagatttttttcattatggagctaataaagggtccctacgttttacattgattaatgaattatcacccagacatgtgcagatgaaatgtcaatataagaaaaatcaaggtatttgggaaacatgggcataatcaggtagttttgctaaaattcctcttccttggtctacataaagaagacatgggtctgtcatagaatggggacattagactgaaaactgggacaacccccttccttattttatagagactaggagttaaggggcctgcctaagattgcagtgataaagaactgaaccctaaatcagctcccactaatgaaaccctgctttccttgtatcttttaaactcagttctgcatccaacttgagaagaaaaaaagcttctttccatatcaagtaccatatgagttcatttaaactgcaccttgcagaaatgcattgccagaaagcaccagtagcctcctatctgcaagcagagtagtgctctgctctggggaggggtcattggaaaccataatgcagagtgggccccctactccatttcccagcaaaaggctccagctggagggatgggttgtggggcaacctggttcctgctaactgccagattgaatgtgtgggctagaatgcctgcacatttagttaaactgggctcagcatgcttgtcctcaaaatgtccatcctggtcacagcacacaagatggctattggtctgcttttaccctaccctgtactatacatgaaaattccagttattaacacactcaaactggtggagcttgttcaccctaggaaggggattgtatatatggcaggcttccctggtgccgatgtaaagggctacatttgggaacatttgacttccttgggactcttaagtgcataatgatggcatgaagtaaaaggggcctcaatgatgataggaaaatcagttcttttaaaatttcttcaagaaaatccaggctatcacatagtctttctgtgtgacttattaggagataggaagagcattgggaaacttgcacagctagctatgcatctacattttggtttggggttagttatgaaatgttcttaatatgacgtgttcaataacttcacataaacttcctgttctccaaaacctcaaagagatagagttaatgagttgttgtttttttttaaatgggggtagttttctatctgtcatgggctctagcatctactccgctacccaattctgtcatctccaagctgagtttcctcttctgaggcagaggctggagcagttctttttcagttctcatcctctccatcccaatccagtatatcaatcaactctaactcggagacgtctagctggcaatgtttctaaaactttcactggatttctttagacattgaagcaaacatttttttctaagaattgcttctcagatgatgatatcaaatgtatatgcttttgcaagtttgaaaagttcaaattaaccacttttgactaggtaagtctttctaaaaaccatttaaagctaactgggtcttagcatcctcctgtgtatggaagagacaggtgaccgctccaggttgggtgctcacagaacccttttcctgactctcatggaagatggtggaaggaaaatagactgtctcatcaaccctcctgtgtcctctgaagcaatctcagtttttattaaccacctcttctgtgtttctggtagctatttaacctgtatttaatctgtacttcctatgccagcctcaattttatttgatttttacaattattctcttctaaccaatgaagtgtttgtcagtatgccccaaagcttgctcttttgtgctcccttttgaataactttctatccagaaaaagagattatttgggacttgagatttgcagtgataccaacttatagcaatgatgtactttaagggaactacccaactatgttgtgatagaagaaagagaaaccttcactttggcatttttttttaatcactgtttatttttctgtttgcggcccaggaagcagtgggaggtggtggcagatatgctttgcatatggattgttatgtttttatttgggcaagtttaatcatggaaaactcaaaaagaaggggggaaatggtcagtttaagccaaaagaaactttctaaacaatgtataggtacacagcaaaattaaacaaatccaacaatttctgaagcttagtgtaattgagtggtggttgttattcaataaaattattcccaaaagtgtttctcctaagagtgcagttcccatgagtcacttcctgaacccattgaccaaaggtggacagagacaatcctgtagaccttgacattcagaaagatgtgagctgcttactgatcatatatgcatacgtttctttacagcagaggaaaccattgtccacaaaactgatgttcttttggggttttatgtacagacttgtccaatcatgtgtgtggttcctgcgagttgctgatgactccgcattgaagctctctgagttctttgattttaagttgggtttatggaattttttcaaatgttggaaggtgtgtggttcttcctgccctccctccccttttggaaatatgaaagcaaatgtttagaagaattccttttgaaaagctgtgtcgtgttccctgtgaaactgagcaggtgtgtgttggcgcgctaagtgccacatgcttgtgtgtagaggaggaggtggccctgccggctccgcgctgctgtgcctgtgatccctacctgctccccgctcctgttgccagcagcactcactgcactcctttgtcatatactctgcatcactgtcatactcacaacttcgtgaataaagttgtgtgctttattcgt

SEQ ID NO: 19848 - DNA, 2241 bp, Artificial Sequence
  derived and/or modified sequence
atgctgatgaccctggagatgacagagctgacagacccccaccacaccatgggagactacaaggtggcccacccccaggacccccaccaccccagcgagaagcctgtgatccactgccacaagtgtggggagccctgcaagggggaggtgctgcgggtgcagaccaagcacttccacatcaagtgcttcacctgcaaggtgtgtggctgtgacctggcccagggcggcttcttcatcaagaatggagagtacctgtgcaccctggactaccagaggatgtatggcacccgctgccacggctgtggggagtttgtggagggggaggtggtgacagccctgggcaagacctaccaccccaactgctttgcctgcaccatctgcaagaggcccttccccccaggggacagagtgaccttcaacggccgggactgcctgtgccagctgtgtgcccagcccatgagcagcagccccaaggagaccaccttcagcagcaactgtgccggctgcggccgggacatcaagaatggccaggccctgctggccctggacaagcagtggcacctgggctgcttcaagtgcaagagctgtgggaaggtgctgactggagagtacatcagcaaggatggagccccctactgtgagaaggactaccagggcctgtttggagtgaagtgtgaggcctgccaccagttcatcaccgggaaggtgctggaggccggggacaagcactaccaccccagctgtgcccgctgcagccgctgcaaccagatgttcacagaaggagaggagatgtacctgcagggcagcacagtgtggcacccagactgcaagcagagcaccaagacagaggagaagctgcggctgcccaacatccgccgcagcagcagtgacttcttctacagcaagagcctcatccggaggacaggccgcagccccagcctgcagcccaccaggaccagcagcgagagcatctacagccggcccggcagcagcatccctggcagccctggccacaccatctatgccaaggtggacaatgagatcctggactacaaggacctggccgccatccccaaggtgaaggccatctatgacatcgagaggccagacctgatcacctatgagcccttctacaccagcggctatgatgacaagcaggagcggcagagcctgggggagagccccaggaccctgagccccaccccatctgctgagggctaccaggatgtgcgggacaggatgatccacaggagcaccagccagggcagcatcaacagccctgtgtacagccgccacagctacacccccaccaccagccgcagcccccagcacttccacaggcctggaaatgagcccagcagcggcaggaacagccccctgccctacagaccagacagccggcccctgacccccacctacgcccaggcccccaagcacttccacgtgcctgaccagggcatcaacatctacaggaagccacccatctacaagcagcacgccgccctggccgcccagagcaagagcagcgaggacatcatcaagttcagcaagtttcctgctgcccaggccccagaccccagcgagacccccaagattgaaacagaccactggccaggcccccccagctttgctgtggtgggccctgacatgaagaggaggagcagcggccgggaggaggatgatgaggagctgctgcggcggcggcagctgcaggaggagcagctgatgaagctgaacagcggcctgggccagctgatcctgaaggaggagatggagaaggagagccgggagaggagcagcctgctggccagccgctatgacagccccatcaacagcgccagccacatccccagcagcaagacagccagcctgcccggctatggaagaaatggcctgcacaggcctgtgtccacagactttgcccagtacaacagctatggagatgtgtctgggggcgtgcgggacttccagaccctgcctgatggccacatgcctgccatgaggatggaccggggcgtgtccatgcccaacatgctggagcccaagatcttcccctatgagatgctgatggtgaccaacagaggaagaaacaagatcctgcgggaggtggacaggacccggctggagcggcacctggcccctgaggtgttccgggagatcttcggcatgagcatccaggagtttgaccggctgcccctgtggaggagaaatgacatgaagaagaaggccaagctgttctag

SEQ ID NO: 19849 - DNA, 6841 bp, Artificial Sequence
  derived and/or modified sequence
aaagcgaggagaggaggcgtgagagagcgtgcctgcccgccgcacacggggctggtttccggagtgcgtctctagagggatgcacgttgccttagccgagcttcggagagaagcctgatatgtaacccaggcaggtgggagcctcagtctgtcgggctgaggtctggcatctacaaagcctcttggccgtgttctgaacttgaagcctggaggagttctctgctcagcacagccaaggaacagaattagaagaaaaggaaccctggcctgaggcaggtgacaaacattaccaccccagctgtgcacgatgcagcagatgcaaccagatgttcacagaaggagaggaaatgtatcttcaaggctccaccgtttggcatcccgactgtaagcaatctacgaagaccgaggaaaagctgcggctgccaaacattcggcgttcttcatccgatttcttttattccaaaagtctgattcgacgcacaggacggtctccgtctctgcagcctaccaggacatcctcggaaagtatttattctaggccaggctccagtattcctggctcaccaggtcatactatctatgcaaaagtagacaatgagatcctggattacaaggatttagcagccattccgaaggtcaaggcaatttatgacattgaacgtccagatcttattacctatgagcctttctacacttcgggctatgatgacaaacaggagagacagagccttggagagtctccgaggactttgtctcctactccatcagcagaagggtaccaggatgttcgggatcggatgatccatcggtccacgagccagggctccatcaactcccctgtgtacagccgccacagctacactccaaccacgtcccgctctccccagcatttccacagacctgatcaaggaatcaacatttaccgaaagccacccatctacaaacagcatgctgccttggcagcccagagcaagtcctcagaagatatcatcaagttttccaagttcccagcagcccaggcaccagaccccagcgagacaccaaagattgagacggaccactggcctggtcccccctcatttgctgtcgtaggacctgacatgaaacgcagatctagtggcagagaggaagatgatgaggaacttctgagacgtcggcagcttcaagaagagcaattaatgaagcttaactcaggcctgggacagttgatcttgaaagaagagatggagaaagagagccgggaaaggtcatctctgttagccagtcgctacgattctcccatcaactcagcttcacatattccatcatctaaaactgcatctctccctggctatggaagaaatgggcttcaccggcctgtttctaccgacttcgctcagtataacagctatggggatgtcagcgggggagtgcgagattaccagacactcccagatggccacatgcctgcaatgagaatggaccgaggagtgtctatgcccaacatgttggaaccaaagatatttccatatgaaatgctcatggtgaccaacagagggcgaaacaaaatcctcagagaggtggacagaaccaggctggagcgccacttagcccctgaagtgtttcgggaaatctttggaatgtccatacaggagtttgacaggttacctctttggagacgcaacgacatgaagaaaaaagcaaaactcttctaagtcccactcgtgaatggcaattagagaaaggactgacagtggcggtgccccataggatgtcatattgaggcccaaacttgattggagaatttgcaaactaccgtcgctcagcaacaccaaaaagagaaagtctggttaaaacaccatgagtcaaatgtcgggccagccaacagtaacacttgccaagaagcatggcgtagaaatttctatgttccgaaacacagagtagtgtccacatgtgagcttttcacattaccttatgtatacaacaggagctgcgttgttttcttctttttcttttcctttatctgttgtccaacaacagtgctgactgtccggataagagctggcaagtgcccttaggatgccgcatgggaaaaatcggttatcataatttcaaagtataaatatatttattaagtagcgctgcggctaagaaggaagagtgaggggtctgtccatggggtggcagtgatttcacacccgcctttcttgaatggcttcgtgttactcagccgtgccctggcaggaatggaactccatcagggaacagggcagctctgtttgaatggggtgaaaaacagcaaaattaattcttagcaagctccttgttctctactgttcaccgggacctggctggcaaatgacttagctattagtatatttaaaaactgttcaaaagcaaaagagaaggaacaggaatgaaaggaaaccttcccttaactctttctgcttcccatagcaggtctggttcctgctccccgcctaggacaggagctgtctggagctccacctttgcaaagaaaggaaaaacacaaattgcccccagattggcccagtggcatgccattaggtgattttgcataggggccatatcattcatggccaaaaaaaaccaaaaagcaaaaaacaaaaacaagtcccatgtcctactgactctagttcttccagtcgttatcctctgctgtctctctggcatcctatgaatcagatcaagcccatgctgttgttggtttttaaggtttctttcaataataggctaaggaaagacatgtttttctcttttaaatctctgcaactccaaagtagactccttcgaacgtatttaatttggccttttcagctttcttcttgcccagctctgtcgaattcatgggtgtgtgtgcacatgttggtttcactcacccagagtaattttgtgagcatgcatgtgctttttaatttctgcttgaatgtttgtcctgctgtgttgcagcttctaaagacattgtcaccgagtgtgtgtgactcaaagatcaagagtgaggctaaactgcgaccccaacatcacttccttcatggaaaggtgttggcgctgatgtagctcatggaaggatcagactgggaaccacagaggaaggatgaggtgggatgtggaggtcagagcatctcacgagagtccctcaggctctgcaacactagattcgaatatgagcctagggtttccccaacacgtgcgtgcatatgaaaccacatcatgattcccgacgtgagttagatgagggagagtttgtgtaactccacacccaggagggtaagccactttattatcatgctttggggctgtgcttaagaatttaagctctgttttaaagccgaagaagaaaacatttgaatttaccttcatatgccactaagaacaaaagctctgaagttcttcctgctggcaccaaatattaggattacaagctgtctctctgacaccagtggtaaaaaagcaagtagaatagtttctgagtctgtgttgcagcctctgacacgtggctcaccgctgtcatttgggggatggaatgaacagtcactgttctatagcatcctcctgtgctcttacctaaggaatctaaattgtcctagccttccattgctatgcactgaatgaggactactctcgtgtgtgtgtgtgtgtgtgtgtgtgtgtgtgtgtgtgtgtgtgtgtgtgttggatctactaacatgtttagcaaatggctctgacagggtggccatgagcagatgagaccagctcttgcttggttggaagccacactgcagtttgcagtttagcctttggtgtctcagtggcttcttgcttattccatgctttttctatcccatcctctctctgtgccctcctgcaatggcagccttggcacaatgcctgggtgtcctcatccttgctttactctggaaagtgtggggatggagaggatggtgcatttccagtgcttccttacctgtcaataacaatggtggccacctgggtcccagcacttggctggtggagagatttttttcattatggagctaataaagggtccctacgttttacattgattaatgaattatcacccagacatgtgcagatgaaatgtcaatataagaaaaatcaaggtatttgggaaacatgggcataatcaggtagttttgctaaaattcctcttccttggtctacataaagaagacatgggtctgtcatagaatggggacattagactgaaaactgggacaacccccttccttattttatagagactaggagttaaggggcctgcctaagattgcagtgataaagaactgaaccctaaatcagctcccactaatgaaaccctgctttccttgtatcttttaaactcagttctgcatccaacttgagaagaaaaaaagcttctttccatatcaagtaccatatgagttcatttaaactgcaccttgcagaaatgcattgccagaaagcaccagtagcctcctatctgcaagcagagtagtgctctgctctggggaggggtcattggaaaccataatgcagagtgggccccctactccatttcccagcaaaaggctccagctggagggatgggttgtggggcaacctggttcctgctaactgccagattgaatgtgtgggctagaatgcctgcacatttagttaaactgggctcagcatgcttgtcctcaaaatgtccatcctggtcacagcacacaagatggctattggtctgcttttaccctaccctgtactatacatgaaaattccagttattaacacactcaaactggtggagcttgttcaccctaggaaggggattgtatatatggcaggcttccctggtgccgatgtaaagggctacatttgggaacatttgacttccttgggactcttaagtgcataatgatggcatgaagtaaaaggggcctcaatgatgataggaaaatcagttcttttaaaatttcttcaagaaaatccaggctatcacatagtctttctgtgtgacttattaggagataggaagagcattgggaaacttgcacagctagctatgcatctacattttggtttggggttagttatgaaatgttcttaatatgacgtgttcaataacttcacataaacttcctgttctccaaaacctcaaagagatagagttaatgagttgttgtttttttttaaatgggggtagttttctatctgtcatgggctctagcatctactccgctacccaattctgtcatctccaagctgagtttcctcttctgaggcagaggctggagcagttctttttcagttctcatcctctccatcccaatccagtatatcaatcaactctaactcggagacgtctagctggcaatgtttctaaaactttcactggatttctttagacattgaagcaaacatttttttctaagaattgcttctcagatgatgatatcaaatgtatatgcttttgcaagtttgaaaagttcaaattaaccacttttgactaggtaagtctttctaaaaaccatttaaagctaactgggtcttagcatcctcctgtgtatggaagagacaggtgaccgctccaggttgggtgctcacagaacccttttcctgactctcatggaagatggtggaaggaaaatagactgtctcatcaaccctcctgtgtcctctgaagcaatctcagtttttattaaccacctcttctgtgtttctggtagctatttaacctgtatttaatctgtacttcctatgccagcctcaattttatttgatttttacaattattctcttctaaccaatgaagtgtttgtcagtatgccccaaagcttgctcttttgtgctcccttttgaataactttctatccagaaaaagagattatttgggacttgagatttgcagtgataccaacttatagcaatgatgtactttaagggaactacccaactatgttgtgatagaagaaagagaaaccttcactttggcatttttttttaatcactgtttatttttctgtttgcggcccaggaagcagtgggaggtggtggcagatatgctttgcatatggattgttatgtttttatttgggcaagtttaatcatggaaaactcaaaaagaaggggggaaatggtcagtttaagccaaaagaaactttctaaacaatgtataggtacacagcaaaattaaacaaatccaacaatttctgaagcttagtgtaattgagtggtggttgttattcaataaaattattcccaaaagtgtttctcctaagagtgcagttcccatgagtcacttcctgaacccattgaccaaaggtggacagagacaatcctgtagaccttgacattcagaaagatgtgagctgcttactgatcatatatgcatacgtttctttacagcagaggaaaccattgtccacaaaactgatgttcttttggggttttatgtacagacttgtccaatcatgtgtgtggttcctgcgagttgctgatgactccgcattgaagctctctgagttctttgattttaagttgggtttatggaattttttcaaatgttggaaggtgtgtggttcttcctgccctccctccccttttggaaatatgaaagcaaatgtttagaagaattccttttgaaaagctgtgtcgtgttccctgtgaaactgagcaggtgtgtgttggcgcgctaagtgccacatgcttgtgtgtagaggaggaggtggccctgccggctccgcgctgctgtgcctgtgatccctacctgctccccgctcctgttgccagcagcactcactgcactcctttgtcatatactctgcatcactgtcatactcacaacttcgtgaataaagttgtgtgctttattcgt

SEQ ID NO: 19850 - DNA, 2241 bp, Artificial Sequence
  derived and/or modified sequence
atgctgatgaccctggagatgaccgagctgaccgacccccaccacacgatgggagactacaaggtcgcccacccacaggacccacatcatccctctgaaaaacccgtgattcactgtcataaatgcggagagccgtgtaagggagaggtcctccgagtgcagacaaagcattttcatatcaaatgttttacgtgcaaggtgtgcggttgcgacctcgcccagggaggtttttttattaagaatggcgaatatctctgcacgctcgattatcagagaatgtacggcacaaggtgccatggatgtggggaattcgtagagggagaagttgtgaccgcacttggcaagacataccacccaaattgctttgcctgtaccatatgcaaacgaccctttcccccaggcgatcgagtcacatttaacggccgcgactgcctgtgccaactgtgcgcgcaaccaatgtcatcatccccaaaggaaaccacttttagtagcaattgcgctggctgtggaagggacatcaaaaatggtcaggctctccttgcattggacaagcagtggcacctcggctgtttcaagtgcaaaagttgtgggaaagtattgacaggcgagtacatctccaaggatggagctccctactgtgaaaaggattatcaggggctcttcggtgtgaaatgtgaggcatgtcatcaattcataaccggaaaagtactggaggcaggcgataagcactaccacccatcttgtgccaggtgctcaagatgcaaccaaatgtttacagaaggagaggagatgtatttgcagggatccaccgtctggcatccagattgtaagcagtcaactaaaactgaagaaaagcttcggctccccaacatcaggcgatcaagctcagactttttctactccaaatccttaattcggcgcacaggccgaagccccagtctacaaccaacccggacgagttccgaaagcatctactccaggccagggtcaagtatcccaggaagccctggacacacgatctacgctaaggtcgacaatgagatccttgattataaggatctcgcagcgatccctaaggttaaagctatatacgatatagagagacctgatcttatcacctatgagccattttacacatccggctacgatgataaacaagagagacagtcactgggcgagagtccccgtactctgtcaccaaccccgagcgcagagggctaccaggatgtaagagacaggatgatacaccggtcaacatctcaagggtcaataaattctcccgtgtattcccggcactcgtatacccctaccactagccgctcgccacagcacttccacagacccggaaacgaaccgtcaagcggccgtaactcccctctgccttacaggccggactctaggccacttaccccaacttatgctcaggccccaaaacacttccacgtcccggatcagggcatcaacatctaccgcaaaccgcccatctataaacagcatgctgccctggctgcccagtcaaagtcatccgaggacattattaaattttccaaatttcctgccgcccaggccccggacccctccgagacccccaaaattgagacagatcactggcctggaccaccttcctttgccgttgtggggcccgacatgaaaagacggtctagtgggcgcgaagaggatgacgaggagctcctgcgaaggcggcagctacaagaggaacaactgatgaagctcaattcaggactcggccagctcatcctgaaagaagagatggagaaggagagtagagagagatcatcactgctggcaagccggtatgattcgcccataaacagcgccagtcatatccccagtagcaaaaccgcctccctacctgggtacggacgcaacggcctgcatcggcctgtcagcacagacttcgctcaatacaactcatatggcgacgtaagtggaggggtacgcgattttcaaaccctgcctgacggccacatgcccgcaatgcggatggatcgaggcgtttcaatgccaaacatgctcgagcctaaaattttcccatacgagatgttaatggtgacaaatagaggccggaataagatacttagagaagtcgacagaaccaggctagagagacacttagctccggaggtatttagggaaattttcggtatgtcgatacaggagttcgatcggttacctctgtggcgacgtaacgacatgaagaagaaagcaaagcttttctag

SEQ ID NO: 19851 - DNA, 2241 bp, Artificial Sequence
  derived and/or modified sequence
atgcttatgacgctggaaatgacggagctcaccgacccccaccacacaatgggcgactacaaggtggctcacccacaggacccgcatcatcccagcgaaaagcctgttatacactgtcacaagtgcggcgaaccttgcaagggcgaagttctccgcgtgcagacgaagcacttccacattaaatgctttacgtgtaaagtctgtgggtgcgatctggctcagggaggcttcttcatcaaaaacggggaatatttgtgtactctcgattaccagaggatgtatggcacgcggtgtcacggatgcggagagttcgtggagggggaagtggtgacagccttggggaaaacctaccatccaaattgcttcgcgtgtactatctgcaaaaggcctttccccccaggcgaccgcgtgaccttcaacggaagagactgtctctgccagctctgtgctcagcccatgtccagttcacctaaggaaacaaccttttcaagcaattgtgctggctgcggcagggatattaagaacggccaggccttactggctctagacaagcagtggcacctgggctgctttaaatgtaaaagctgcggcaaagtgttaactggagaatatatatctaaagatggggcaccttattgcgagaaagattatcaaggcctgtttggcgtcaagtgcgaggcatgccatcagtttattaccggcaaagtcctcgaagctggagataaacattatcaccctagttgcgccagatgcagtaggtgcaatcagatgttcactgagggcgaggagatgtacttgcaaggcagcactgtgtggcacccagactgcaagcaatccaccaaaacagaagagaagctcagactgccaaacatccggaggtcctcttcagatttcttttacagtaaatcgctgatccggcgaaccgggcgaagcccctcccttcaaccgactaggacctccagtgaaagcatctactcacgtcctggtagtagtattcccggtagccccggacatactatttacgctaaagtcgacaacgaaatccttgattacaaggatcttgccgcaattccaaaagtaaaggccatctacgatatcgaacgcccagacctgatcacttacgagcccttttacacgtcagggtatgatgacaagcaggagcgacagagtttgggcgagagccctcgcaccctatccccgacaccctctgcagaaggataccaggatgtccgagacaggatgattcatcgaagcacctctcaaggatccatcaatagtcctgtttacagcaggcatagctacactcctacaacttcacggagcccacagcattttcatcgccctggcaatgaaccatctagcggcagaaacagccctctcccttaccgtcccgattccagaccactcacgcccacctatgcccaggctcccaagcatttccatgtaccagatcaggggataaatatttaccgcaaacccccaatctacaagcagcatgccgctttggcggcacagtctaagtcatcagaggacataattaagttcagcaaatttcccgctgcacaggcgccagaccctagcgagactcctaaaattgaaaccgaccactggccaggtcctcctagtttcgctgtcgtcggtcccgacatgaaacgacgatccagtggacgggaggaagatgatgaggaactcctgcgcaggcgtcagctacaggaggaacagctgatgaagctgaactccggcctcggccaactcattctgaaggaggaaatggagaaagaatcacgcgaaagatcctccctgctagcttcccggtacgatagccctataaactctgctagccacatcccttcaagtaagaccgcctcactgcccggttatggtagaaacgggctccatcggccagtaagcactgattttgcacagtacaactcctacggagatgtttccgggggagtccgagacttccagactctaccagatggacacatgcctgctatgcgcatggatcgcggagtgtccatgcctaacatgttagaacccaaaatctttccctacgaaatgctcatggtgacaaaccggggtcgtaacaagattcttcgggaagtcgatcggaccaggctagagcggcatctcgcgcctgaagtgttccgagaaatctttggaatgagcatccaggaattcgataggctccccctttggcgcaggaatgatatgaaaaaaaaggccaaactgttctag

SEQ ID NO: 19852 - protein, 269 aa, Artificial Sequence
  derived and/or modified sequence
MSSDHLNNSTLKEAQFKDLFLKKAELEFAQIIIIVVVVTVMVVVIVCLLNHYKVSTRSFINRPNQSRRREDGLPQEGCLWPSDSAAPRLGASEIMHAPRSRDRFTAPSFIQRDRFSRFQPTYPYVQHEIDLPPTISLSDGEEPPPYQGPCTLQLRDPEQQMELNRESVRAPPNRTIFDSDLIDIAMYSGGPCPPSSNSGISASTCSSNGRMEGPPPTYSEVMGHHPGASFLHHQRSNAHRGSRLQFQQNNAESTIVPIKGKDRKPGNLV

SEQ ID NO: 19853 - protein, 248 aa, Artificial Sequence
  derived and/or modified sequence
MAAELEFAQIIIIVVVVTVMVVVIVCLLNHYKVSTRSFINRPNQSRRREDGLPQEGCLWPSDSAAPRLGASEIMHAPRSRDRFTAPSFIQRDRFSRFQPTYPYVQHEIDLPPTISLSDGEEPPPYQGPCTLQLRDPEQQMELNRESVRAPPNRTIFDSDLIDIAMYSGGPCPPSSNSGISASTCSSNGRMEGPPPTYSEVMGHHPGASFLHHQRSNAHRGSRLQFQQNNAESTIVPIKGKDRKPGNLV

SEQ ID NO: 19854 - DNA, 810 bp, Artificial Sequence
  derived and/or modified sequence
atgtcttctgaccacctaaataacagcacactcaaagaggcccagtttaaagacctgttcctgaagaaggctgagctggaattcgcacagatcattattattgtcgtggttgtcactgtcatggtggttgttattgtgtgcctcctcaaccactacaaggtgagcacaaggtcctttatcaaccgccctaatcagagtaggcgcagggaggatggattgccccaggaagggtgtttatggccttcagatagtgcagctcctcggctcggggcaagcgagattatgcacgctccaaggtcccgcgatcgatttacagctccatccttcatacagcgagatcgcttcagcagattccagccgacgtacccgtacgtgcagcacgaaatcgacctgcctcctaccatttctctgtctgacggggaggaaccacccccctatcaaggtccatgtacactgcagctcagggatccagaacagcagatggagctaaatcgggaatcagtgagggcgcctccaaataggaccatcttcgactccgatcttatcgacatcgccatgtattccggaggcccttgccccccaagctcaaattcaggcatttcagcgagtacttgttctagcaatggtcggatggaagggccccccccaacctactctgaggtgatgggtcaccatccaggagcatctttcctccatcatcagcgcagcaatgcgcacaggggttctcggctgcagtttcagcaaaacaacgcagagtcgaccatcgtgccaattaagggtaaggataggaagcccggcaatctcgtttag

SEQ ID NO: 19855 - DNA, 810 bp, Artificial Sequence
  derived and/or modified sequence
atgtctagcgaccacctcaataacagtacgctaaaagaggcacagtttaaggacctgttcctgaagaaggctgagctcgagtttgcacaaataataatcatcgttgtagtcgtcacagtgatggtcgtagtcatagtttgcttactcaaccattataaagtaagtacgcggtcgttcatcaacaggcctaaccagtctcgccggagggaggacgggctgccccaggagggatgcctttggccatccgattccgccgcaccacggcttggagcttcggaaatcatgcatgcacctcgatccagggacaggttcaccgcaccatcattcatccagagagaccggttctctagatttcagccaacctatccatacgtacagcatgagattgatctgccacccaccatctccctctcagatggcgaggagccccccccttaccaagggccgtgcacattgcagctgcgtgatccggaacaacagatggagctgaatcgggagtccgtgcgtgccccacctaacaggaccatctttgactccgatttaattgacatcgccatgtactccggaggtccttgtcctccgagtagcaactccggtataagcgcttcaacctgtagctccaacggcagaatggaggggcctccacccacatattctgaagtcatggggcaccaccctggagcatcttttctgcatcaccaaagatctaatgcgcaccgaggttccaggctgcagttccaacagaacaacgccgaaagcacgattgtgccaattaaaggcaaggaccgtaagcccggaaatctagtgtag

SEQ ID NO: 19856 - DNA, 810 bp, Artificial Sequence
  derived and/or modified sequence
atgagcagtgaccacctgaacaacagcaccctgaaggaggcccagttcaaggacctcttcctgaagaaggccgagctggagtttgcccagatcatcatcatcgtggtggtggtgacagtgatggtggtggtgattgtgtgcctgctgaaccactacaaggtgtccaccaggagcttcatcaaccggcccaaccagagcagaagaagagaagatggcctgccccaggagggctgcctgtggcccagcgacagcgctgccccccggctgggcgccagcgagatcatgcacgcccccaggagccgggaccgcttcaccgcccccagcttcatccagagggaccgcttcagccgcttccagcccacctacccctacgtgcagcatgaaattgacctgccccccaccatcagcctgagtgatggagaggagcccccaccctaccagggcccctgcaccctgcagctgcgggaccctgagcagcagatggagctgaaccgggagagcgtgcgggccccacccaacagaaccatctttgacagcgacctgattgacatcgccatgtacagcggcggcccctgcccccccagcagcaacagcggcatcagcgccagcacctgcagcagcaatggccgcatggagggccccccacccacctacagcgaggtgatgggccaccaccctggggccagcttcctgcaccaccagaggagcaatgcccaccggggcagccggctgcagttccagcagaacaatgctgagagcaccatcgtgcccatcaagggcaaggacaggaagccaggcaacctggtgtag

SEQ ID NO: 19857 - DNA, 2171 bp, Artificial Sequence
  derived and/or modified sequence
acacagcctgggggcatccgaatgcacgggagatgttttacactcagatgaaacaaactgtttagacctcggggaaaagagactgtgcttgaacaaaatgaaccaggagaaagcgccctcctgagacatgtctctgctttcatgtttgaattgcctgggattctgttctctaatttctgatccttataaactaaaactgcctaggaacattgagcatcctgactttgaaggagtctctgtggtgtttttgtgctaccatacatggggaataatgatgtgaggcagagggagagggaatgaatgggagagccaagagggaagagcgagccggggggaaaggagcgcgcagtgtttcctgctgcggttaggacctcacgccttgccagtacagagctcggtggcaagagccgctgggagctgctcccatcagttagaggatgtggagagggagcaccagaagaggacagcccgcagcctggctcgcagcctgagggacgctgtgggtgctcccagccgggcgagcacgctctgggagcggatctgcaggggagaagcacgcgagcctaacgtgagcgtcccgcctgtcgcgtgtcctgccttggtaagcgccctctccggtccttccacactgaaagcttccagcagagatcaagggaaggagtattgtgtgagacttgcagatttcctcctttctgtctggactggtttgatatttgcctgttgaaaagattactgaacgcagtgtgacaagatgagccgtctagctgcgttctgcttgcctgtgtgtgtgacacgtccaggtgtgaggccaaacctgagaagtgcagactgctcactgatagacgttgctgtaaacagtagtgccctgggtgtacagctggtctcaggatcggagaccccggacttattctctgctcggtgacacggccggcttcctgccgcagagctcctggtttctgttgatggcagttgataattggtagccacagtctgcggtcggagccacagcatttgagtctagcacctggggtgggccctgctgatacagtagagagagagtgaacgaggcagacagaaacacaccccccccccctccacgctcacacactctcccacaccccatgccagctataactgcagctctgagctgcctggagaggagattgccggaagctgaagggatgctttgaacgtgggggggctgcgtcacagttggactcccacttgcagaggacctgattatgtccagtgaccacctgaacaacagcacactgaaggaggctcagttcaaagacctgttcttaaaaaaagcggagctggagttcgcccaaatcatcatcatcgtcgtggtggtcacggtgatggtggtggtcatcgtctgcctgctgaaccactacaaagtctccacgcggtccttcatcaaccgcccgaaccagagccggaggcgggaggacgggctgccgcaggaagggtgcctgtggccttcagacagcgccgcaccgcggctgggcgcctcggagatcatgcatgccccgcggtccagggacaggttcacagcgccgtccttcatccagagggatcgcttcagccgcttccagcccacctacccctatgtgcagcacgagattgatcttcctcccaccatctccctgtccgacggtgaagagccacctccttaccaggggccctgcaccctgcagctccgggaccctgaacagcagatggaactcaaccgagagtccgtgagggccccacccaaccgaaccatatttgacagtgatttaatagacattgctatgtatagcgggggtccatgcccacccagcagcaactcgggcatcagtgcaagcacctgcagcagtaacgggaggatggaggggccaccccccacatacagcgaggtgatgggccaccacccaggcgcctctttcctccatcaccagcgcagcaacgcacacaggggcagcagactgcagtttcagcagaacaatgcagagagcacaatagtacccatcaaaggcaaagataggaagcctgggaacctggtctgattccttccaacgtgcacttcagctggagaaagaaaccaagaagggaagcggccgctgggcccctcctgcgcacagtgttgttcagtttcacatggtacaaataagtaaaaccaaatgagc

SEQ ID NO: 19858 - DNA, 810 bp, Artificial Sequence
  derived and/or modified sequence
atgagcagcgaccacctgaacaacagcaccctgaaggaggcccagttcaaggatctgttcttgaagaaagccgagctcgagtttgctcagatcattattattgtcgtagtagtcacggtaatggtggtggttatagtgtgtctgctgaaccactataaagtatccacccggagcttcatcaaccgccctaaccaatctcgccgacgtgaggacggcctaccccaggagggatgtctctggccctctgattctgccgcccctagattgggagccagtgagattatgcatgcgccgcggagtagagacaggtttaccgccccaagctttatacagagagatcgttttagtcgctttcaacctacctatccatatgtccagcacgaaattgacctgccgcccacaatctccctgagcgatggggaagaaccccccccataccaaggaccctgtactctacagctgagagatccagaacagcagatggagcttaacagggaaagtgttcgagcacctcctaatcggaccatattcgattccgatcttatcgatatcgcaatgtatagcgggggcccttgtccccccagttcaaatagcggcatctcagccagtacctgtagtagcaacggtcggatggagggaccacctcctacatatagcgaagtgatgggacatcaccctggtgcttccttcttacatcatcagagatctaacgctcatcgcgggtctcgactgcagttccagcagaataatgccgagagcacaatcgtgcccatcaagggcaaagacagaaagccaggaaacctcgtgtag

SEQ ID NO: 19859 - DNA, 810 bp, Artificial Sequence
  derived and/or modified sequence
atgagcagcgaccacctgaacaacagcaccctgaaggaggcccagtttaaagacctcttcctgaaaaaggctgaactggagtttgcccagatcattatcatagtggtagttgtaactgtgatggtggtggtcatcgtttgcctattgaatcattacaaggtcagcacgcgctcttttatcaaccgcccaaatcagtctcggaggcgggaggatggactccctcaggaagggtgcctatggcctagcgatagtgcagctccacggttgggtgcgagtgaaatcatgcacgcccctaggagtagagaccggttcactgcgccttccttcatccaaagagacagattcagccgcttccagcccacatacccgtacgtgcagcatgaaatcgatctgccacctacgattagcctgtcagatggagaggagcctcccccatatcagggcccttgtacattacagcttagggacccggagcagcaaatggaactgaatcgtgagtctgtgagagcacctcctaatagaacaattttcgatagcgatttaatcgatatcgcgatgtactctggagggccctgtccgccaagctccaattccggcatctctgcctctacttgttctagcaatgggcgtatggaggggcctccccccacttactcggaagtcatggggcaccacccgggagcctcattcctgcatcatcagcggtcaaacgcccatcgcggttcgcgactgcagtttcagcagaataacgcagagagtacaatcgtgcctattaaagggaaggaccgcaaaccaggaaatctcgtatag

SEQ ID NO: 19860 - DNA, 810 bp, Artificial Sequence
  derived and/or modified sequence
atgtcttctgaccacctgaacaactctactctgaaagaagctcagtttaaggatctgttcctgaagaaagcagaactggaattcgcacaaatcatcattattgtcgtggtggtcacagtcatggtggtggttattgtatgtctgctgaaccactacaaggtctcaaccaggtcattcattaacaggcctaaccaaagccggcgtagagaggacgggcttccacaagaggggtgcctgtggcccagcgactcagcagcgcctagacttggagcgtcagaaatcatgcacgcacccagatctagagaccgcttcaccgctcccagctttattcagcgggatagattcagcaggttccagccgacatacccctacgtgcagcacgaaatcgatctgccacctactatctccctcagcgacggcgaggaaccccctccgtaccaaggaccctgtacactgcagttacgtgatcccgagcaacagatggagcttaacagggaatcagtaagggcgcctccgaaccgtacaatattcgacagtgatctgatcgacatcgctatgtattctggtggaccgtgtccaccaagttccaatagtggaatctctgcctccacgtgtagcagcaacgggaggatggaggggcctccacccacttacagtgaagtgatgggccatcatccaggcgcttcttttctgcatcaccagcgctccaacgctcacagaggcagccggctccaattccagcaaaataacgcagaatctaccatcgtgccaattaaaggcaaggaccggaaacctggaaacctggtgtag

SEQ ID NO: 19861 - DNA, 810 bp, Artificial Sequence
  derived and/or modified sequence
atgtcatctgatcatttaaacaactccaccctgaaagaagcacagttcaaggatttgttcctgaaaaaggccgagcttgagtttgctcagatcattattattgtggtagtggtgacagtcatggtggtggtaattgtatgtttactcaatcactataaagtgtccacacgatctttcatcaatcgccctaaccagtctcgccgtcgcgaggacggacttccccaggagggctgtctctggccgtctgacagcgctgcaccacggctgggcgctagcgagataatgcacgccccacggtccagggaccgttttaccgctcccagctttatccaaagagaccgattcagcaggttccagccaacatacccctatgtacagcacgaaattgacctgccgcctacaattagcctctcggacggcgaggaaccccctccataccaagggccatgtacgctccaattgcgggacccggagcagcagatggagctcaatcgtgaaagcgttagagcccctccaaaccgaaccatattcgactccgatctcattgacatcgctatgtatagtggtggaccctgtccaccctcctcgaattcaggcatctccgccagcacatgctcatcaaatgggagaatggagggaccaccaccaacgtacagcgaggtgatgggccatcaccccggagcatcttttctgcatcatcagcgcagtaacgcacaccgcggatcccgtcttcagttccaacagaataatgcagaatctaccattgtgccaattaagggaaaagatagaaaacctggaaatctcgtgtag

SEQ ID NO: 19862 - DNA, 8946 bp, Artificial Sequence
  derived and/or modified sequence
aggaacattgagcatcctgactttgaaggagtctctgtggtgtttttgtgctaccatacatggggaataatgatgtgaggcagagggagagggaatgaatgggagagccaagagggaagagcgagccggggggaaaggagcgcgcagtgtttcctgctgcggttaggacctcacgccttgccagtacagagctcggtggcaagagccgctgggagctgctcccatcagttagaggatgtggagagggagcaccagaagaggacagcccgcagcctggctcgcagcctgagggacgctgtgggtgctcccagccgggcgagcacgctctgggagcggatctgcaggggagaagcacgcgagcctaacgtgagcgtcccgcctgtcgcgtgtcctgccttggtaagcgccctctccggtccttccacactgaaagcttccagcagagatcaagggaaggagtattgtgtgagacttgcagatttcctcctttctgtctggactggtttgatatttgcctgttgaaaagattactgaacgcagtgtgacaagatgagccgtctagctgcgttctgcttgcctgtgtgtgtgacacgtccaggtgtgaggccaaacctgagaagtgcagactgctcactgatagacgttgctgtaaacagtagtgccctgggtgtacagctggtctcaggatcggagaccccggacttattctctgctcggtgacacggccggcttcctgccgcagagctcctggtttctgttgatggcagttgataattggtagccacagtctgcggtcggagccacagcatttgagtctagcacctggggtgggccctgctgatacagtagagagagagtgaacgaggcagacagaaacacaccccccccccctccacgctcacacactctcccacaccccatgccagctataactgcagctctgagctgcctggagaggagattgccggaagctgaagggatgctttgaacgtgggggggctgcgtcacagttggactcccacttgcagaggacctgattatgtccagtgaccacctgaacaacagcacactgaaggaggctcagttcaaagacctgttcttaaaaaaagcggagctggagttcgcccaaatcatcatcatcgtcgtggtggtcacggtgatggtggtggtcatcgtctgcctgctgaaccactacaaagtctccacgcggtccttcatcaaccgcccgaaccagagccggaggcgggaggacgggctgccgcaggaagggtgcctgtggccttcagacagcgccgcaccgcggctgggcgcctcggagatcatgcatgccccgcggtccagggacaggttcacagcgccgtccttcatccagagggatcgcttcagccgcttccagcccacctacccctatgtgcagcacgagattgatcttcctcccaccatctccctgtccgacggtgaagagccacctccttaccaggggccctgcaccctgcagctccgggaccctgaacagcagatggaactcaaccgagagtccgtgagggccccacccaaccgaaccatatttgacagtgatttaatagacattgctatgtatagcgggggtccatgcccacccagcagcaactcgggcatcagtgcaagcacctgcagcagtaacgggaggatggaggggccaccccccacatacagcgaggtgatgggccaccacccaggcgcctctttcctccatcaccagcgcagcaacgcacacaggggcagcagactgcagtttcagcagaacaatgcagagagcacaatagtacccatcaaaggcaaagataggaagcctgggaacctggtctgattccttccaacgtgcacttcagctggagaaagaaaccaagaagggaagcggccgctgggcccctcctgcgcacagtgttgttcagtttcacatggtacaaataagtaaaaccaaatgagcaaacacggtctttgtttctgattccttttaggggaattgcatgcaaactagactgaaatgatacaaacttccatctggtctgaccgcaaacagtgtttatttggggacaggggttgggatgggggtgtgggcaggggaaaacagagaacgggatgctttgaagataccatgaaataaaacccacagaggtatttgatgtatttaattgtgaaaggagactttgcagataaatgaggccagaatggcatgttttataattaactgaataaagaaggaagcattattatatattattgtggggaagaaccagccagttcgctttttctcctaaggtgtggaacttttattttgttttaaaaatatgaatcaaaattcctgtgttgtgtgccaaggtataaagtggagaagttagatgagtgcaaggagctcctttgtgttgtgatgatgtgttttaaaagttgcactatcttaatgttgaaaatatttacaagggaactgttttacgtgaagttctgtatgttgtcttttcacctgtggattgtaatcaggcccaaggaatatcctggagtggtccccagaagcatccaagaaaagatatttggggacgtagcctaacattttaccaacttacgtaaatcaaaaaagtcattattgttgcaggagtttgcatcaaatagcagtgcatcgctgaagcttttggagacttttggatggaagataagatagggaagattaagttccagcatttctgacttgttattttgagttactctgctactcttaggctgcatagtttatgagaaaatgaacacatgcatttatggatccagtatcatgcagtgctgccctcatcctccagcagtgcaatttcttcagtaatttagatttttttcactatagcatgaaatatattcaaatacataccttattttatgcaataaattgtttaaaatgcaaggtggttattctgcatactgttgaaatatgtgactcctcagtatattcccattgcctctccccctttcctcgacagcttagttcagttctgcagggctgctcagttcacaggaggctcccagcagccaccccacatccagcctacacagaacttcgtgtgggagtggtgtgggtggtggtttcttatgctttggaagcccctagaaataatgacggaagaatgccatgttgctgatcgtggtaataagccattgtgggttattgtatgtcactagtattagcatagcattcttaaaggaatgcagtgctcaaaacctacccaaattcccgcaggattctaccaaacccttccccaggccagcttttgtactgaaggcaagaactggacagtcagagaacagtggagggggcaagtgactgaagagcaccgggtaaaaagcacaacatgcagttaaaatgcaactagaaaactaattttaaatattgttagttttaatattcctgatatttacaaatattcattcttatatacaatgaaaaaaataactttcttctgcagatgtaagcactggcttttataagagcagcagccaacacgtttagcagacactgcgcgtggagaagggcttatctgcagtacactctgccatgtggagggtgggcctctgtggcctcttcacataacaagatgagctggaatgatgattccatgactcccacctatgcagccttaaagccaaatccgcgtgtgtgtgtttgtgtctgtctgtgggtctcgaaggtgatccgtcggtgcggtggctctgtgctgtaactggagagactgttccaaaccccaagagttgtctgatcctagtctgttcccttctgcttcttacctctgtagataggtcactggtttttgtttgtttgttttgaggattggaatttccattacattcatcctttgcacacagtaacatccacagaactagtccaactcttaaaaggagagaggaaaaacacaggcaccagttgtcagctcatgcttacaacctgtgtggaagtatatacagttgagagtcacagtggaggttctgagactggattcagtcttgttccagtgacagttggaaggcctctgctggagagacaccagctctcagggcagagattggcttggggccagaaggaccctccccaaccctggagacaccctgaaggttcactggctctccagattagcctctcttcctctgtcaggcaaagatgaggagcccgtgttcccatcgggccctgctggcagggacttgcagtggattcttggtcaggtgtgcccacagatgcggaggcgaggtgagtgattccatcatttcagttctcacctgcagttttggtgaagcaggagatgcaccccacagctctagctctcaaatggcttcacagtccttacttctctacctgcctcaagaaggggctcagagcagagacttgtgaattccttagtaactgtgagtatatgaatgtgttgcacatgtccacagtattggcgagataattacataattcagatacctttaatcatctttcaagaaagaggctcctcccattcaaccaccctagagaactgcctttgttaaatagttatttaaagactcatacatatcaaaccatgactttgaaaggtcttcgaggctggggctctgtaatgaattagtttaaaagccaaggtcataacatgaattgatggtcaatttcccttcagcagaaggaaaaggtgatttagatcagtagctcttttgaaggttgtggctgacctgttcataccgtgtcgcctcatggctagtgtggcgttgaaagagtagcgactgggaagatacaacttacacagtggggcctattgttctttcaagaaccctttttttagcttatagaacccatgggtccagtttagtaacgagtgatttaggcaatcaatgataggtttataatcttagattattccagcaaagtgtggattgcattgttaggaagaacatttggtgggaatgaacactcctgggcataccgctgacttttgtcccttgttcccggtgtaggagacccaaggcatcttgaatcccatctataagaacacaatcttccagcatacgtttgctttttcagaaactctagcattctctttaaatactgacgcaatccttaatggaaaagagatttcatgaagcaaattatgtatttcaatagttcttctatttttagtgtccaaaatttactaatacagaagcttgacaagcatgtcctcaccctccccaccacataaacacatggacacacacccaagccacaagaaatcccaagagagcagaagcgaatttttaaaagatttatcgtgaggactgcatttccattcactaattttggctcaaacttatgaggcaggaaataggggccaacagtaaatgggggaggcctcctgacaccagcagaggaattttgtacccaggcgaggacttcttgaacttctgcgtatctccgtttgatctctttcacctttatttcatcttcataagaatgagaaaggctcaaaaggaagcacttttagaaatcttctctgacctagaagaatccatccaaatccctgccttcctctctgaaccaacagttcccttctctgacaggggccatcctctatcttccatccagcggctcttctttttaggaaggctctggtgcagagcacttcaaatatgtcctcaggccagatactgattgctagtagagagacacccggcacccagtccgaagccctccctcaaaggaccggctcatggcgttggtcactggcaggctcagagacattctgctgtgggcgcagggagcccggccccccatgcagccatgactggatgcgcccccatctcgggggcttgctgcactgcttgtttattgaattttgctacttagaatggcaacattaactttgtgtaccattcattttttaaaaattttccaaagctcggcagtgtatgaaagaaaaaactgggaaagatacttggtttctgttaacttttgtgttgcttgcttaagtgattaaagccagtgcttggagccaagccttcatgccacgaacatgctccacagcctgccctttgctctcctgctcacactgaccaagaatgccgcgtgcttggcctactgaggtgaaaggacaattgaatgacaggtgggcaaagggagaacttccccttcttggtgcgaggaaagtcacaaatttaaaaatgttgcttccagcccagatcctaaatgctagttctcagcagctgcgtggcttaccgttcgccatttccaccaccgccagctgccagcaccgctacagatcacagagatgtgaacagacaatggaaagcactcttagccttgcagtggtctacattttttaggaaccaatatttcagcattctttattacccggcacgctgtgtcctttgcagagttcaagtttatgttactgccagggtcagacagtcatttgctgctgctgctgctgctgctgcttctcgaactggatgcattaggaagctgctgtctgagtgtaggaatgtcttgctaagaaagcaatgtcttccttcatccttttctttcttccctctgcgtgtccttgtttttgtgtaatgcgggagagggttagagctatagagattatatatacactatccgtgcacattatatatatgtagatatacccctatcatgtcagagatctgcatgtcagtttttcagcaactaaggtgcctcatgttctgagttcagcagatataggaaccaagccgccccctcctgcacttgatgctcccacctttgttgtgcctcacttaaaatggtgcttttttcagttgtctgtcttttcttatgtttttatttgtaaggtgctgtatataagttgaatatattatgcacatatcctacccaatgggtagaacaaaaagttgttaatactgtaatataatgtatagatgataccaattttaacagaaatggcatagaatttgtgaatgcctatgtgctttgtcctcttttgtaaggaaatttgcaaatggatgcatacagattaaagtctatgtagtttattttcctattaaatatcaatattataacacaagagaaagaagtgtgaacaaacaagcaacagtttatgaccagcgtatatatagcaatggaaagttgcatctttgctgtgaaaacactttaaagaaaatactttttaaaaaatcccacagctttttggttgccactagacgcttcttattttaatcattttagtaatgctcagctggaccagtgttagttatatttgagtcagaaaaatgttgtttttcaacttgctttataatctcctgcatctatctcctgctgtagcatcacgaaggtgtcaggcaacagtgaaaagtgcacatttttgttgttgcagaaactgtgtcagaggaataagtaaatcagcctgcagcagaagactttgttcagctccagaggcatctgtgaccgtctgtgtccaagtctctctgtgcctttttcttttacaaactgaagctgtggagccaatgaagtaacagtagagattgtagggaaagaatacctcaggaaaaacaaatacacttacaagaagaccctgttcttagaaaatgtgtttagttatgggttagcactagaagagacttggctgtcagccagccaagtgaaggacctctcatccattcccattcatgtcccatcataatacggacccaaaaagcaaactcggttttgccatcagttagaaattacgttttggattgtatattgttacatctctcttccggcttagtttttagtgtctgattgtgacctctgcatttatcttcaaataccctaattttaaaacaaaagaacaagaaaagtttataacaccatgttcactaaaaccacggttgaatcttgggtgtgggcatcctttcgagtgttgtccataagagcagttcgtggaattttgcccatctgacccatattatcagcttattctgccaccagagtagagtctaataaattccaaagtttttatttgctccatggtgtatgttctgactttgaaaatgtcagattctataatcatacccctaacatccaggaaacaaatgacagattatctttaaactgaaattgactctacaatgcaacccttaatgctgaatggattaaaaaagtcagcccttttagtatctgtttgaaagggccgtaaaaagttgacacttttgttgttgtggatcctgcgtgtctagacccacgtgttgtttccatcgtatactgtagggtgcaccccttgggattcatcattaagaactgaggctcactgttgtcagaaacaaagctcccaccccccaggttcaaccttgtgggagaactgttgagcatgagaatgttctagactcagaggtactaaaatttgttaccacatcattgcttcctttctacaggacgaattgaggcttaaactttactgttaatgatactggttcattttaatgtgcttgttggtatgttgctatttttcatttcatagctttcaaaaatcatgctaattgtatacttgtctagtttaaggctattttaaaatatgtacaatactattcacagcatttagttcgtttaatttttattataaagcaatctactaaaaaagtacaactgtatttgaacttttcaatagttgtttgtgagctatgataatcaaaagtcattaaagtcttttttaacaaacattcgtgcttacttttcaacataattcccagttatatacagaaaaagatttccacctgtcacgtatctgcctcttttacctgagcaatggtgtagttcttagacctaaggtctgtaattgcaatacttttaaagaaagatgttgctctaagtgctgtttgttagttatgaaatcagatttttctgcttgttcttaatgctgtggtcaaaccatagcacaaaatcattaaaaataatcagcggcatac

SEQ ID NO: 19863 - DNA, 810 bp, Artificial Sequence
  derived and/or modified sequence
atgagcagcgaccacctgaacaacagcaccctgaaggaggcccagttcaaggacctgttcctgaagaaggccgagctggagttcgcccagatcatcatcatcgtggtggtggtgaccgtgatggtggtggtgatcgtgtgcctgctgaaccactacaaggtgagcaccagaagcttcatcaacagacccaaccagagcagaagaagagaggacggcctgccccaggagggctgcctgtggcccagcgacagcgccgcccccagactgggcgccagcgagatcatgcacgcccccagaagcagagacagattcaccgcccccagcttcatccagagagacagattcagcagattccagcccacctacccctacgtgcagcacgagatcgacctgccccccaccatcagcctgagcgacggcgaggagccccccccctaccagggcccctgcaccctgcagctgagagaccccgagcagcagatggagctgaacagagagagcgtgagagccccccccaacagaaccatcttcgacagcgacctgatcgacatcgccatgtacagcggcggcccctgcccccccagcagcaacagcggcatcagcgccagcacctgcagcagcaacggcagaatggagggccccccccccacctacagcgaggtgatgggccaccaccccggcgccagcttcctgcaccaccagagaagcaacgcccacagaggcagcagactgcagttccagcagaacaacgccgagagcaccatcgtgcccatcaagggcaaggacagaaagcccggcaacctggtgtag

SEQ ID NO: 19864 - protein, 251 aa, Artificial Sequence
  derived and/or modified sequence
MSSDHLNNSTLKEAQFKDLFLKKAELEFAQIIIIVVVVTVMVVVIVCLLNHYKVSTRSFINRPNQSRRREDGLPQIMHAPRSRDRFTAPSFIQRDRFSRFQPTYPYVQHEIDLPPTISLSDGEEPPPYQGPCTLQLRDPEQQMELNRESVRAPPNRTIFDSDLIDIAMYSGGPCPPSSNSGISASTCSSNGRMEGPPPTYSEVMGHHPGASFLHHQRSNAHRGSRLQFQQNNAESTIVPIKGKDRKPGNLV

SEQ ID NO: 19865 - protein, 230 aa, Artificial Sequence
  derived and/or modified sequence
MAAELEFAQIIIIVVVVTVMVVVIVCLLNHYKVSTRSFINRPNQSRRREDGLPQIMHAPRSRDRFTAPSFIQRDRFSRFQPTYPYVQHEIDLPPTISLSDGEEPPPYQGPCTLQLRDPEQQMELNRESVRAPPNRTIFDSDLIDIAMYSGGPCPPSSNSGISASTCSSNGRMEGPPPTYSEVMGHHPGASFLHHQRSNAHRGSRLQFQQNNAESTIVPIKGKDRKPGNLV

SEQ ID NO: 19866 - DNA, 756 bp, Artificial Sequence
  derived and/or modified sequence
atgagcagcgatcacctaaataactcaaccctgaaagaagctcagttcaaggatctcttccttaagaaagcagagctggaatttgcccagattattatcatcgtggtcgtggtgactgtgatggtggtggtgattgtttgtctgctgaaccattataaagtgagcacccggagttttatcaaccgtccaaaccagagcaggcggagggaggacgggttgcctcagattatgcacgctccacggtccagagatcgcttcacagctccttcttttatccaaagggaccgctttagtcggttccaacccacttatccttacgtacagcacgaaattgacttgcccccaacaatatcgctaagtgatggcgaggagccacccccttatcaggggccctgtactctccagctccgggaccctgagcagcagatggaacttaatagagagtcagtcagagccccaccaaaccgaacaatctttgactcagacttaatcgatatcgcaatgtattcaggcgggccgtgccctcctagttcaaacagcggcatatctgctagcacgtgctcctctaatggtaggatggagggacctccaccgacgtacagtgaggtcatgggacatcatccgggcgcatccttcctgcatcatcagcgttctaatgcacacagaggctcccgcctgcagtttcagcaaaataatgccgagagcacaatcgtccctataaaagggaaggatcgcaaacctgggaacctcgtgtag

SEQ ID NO: 19867 - DNA, 693 bp, Artificial Sequence
  derived and/or modified sequence
atggcagctgagctggagttcgctcagattatcatcattgttgtagtggtgactgtgatggtggtggtgatcgtctgtctgctgaaccactataaggtctcgacaaggtcttttatcaaccgccctaatcagtctcgacgaagagaggatggcctgccacagattatgcacgctccaagaagccgagataggtttaccgccccctctttcattcagcgagatcgcttttcaaggttccagccaacatacccatatgtgcagcacgaaatagaccttcctcccacaatttcattgtcagacggcgaagagcctccaccctatcagggtccctgcacgctgcagcttcgcgacccagaacagcagatggagctgaatcgggagagcgttcgcgccccgccaaatcgcaccatttttgacagcgatctcattgatatcgctatgtactctggagggccatgccctcctagctcaaattctggtataagcgcctcaacctgctcctccaacggacgaatggaggggccacctccaacatattcagaggtcatgggccatcatcctggtgccagcttcctccaccatcaacggtccaacgctcacagaggcagtcgcctacaattccagcagaacaacgccgaatctaccattgtaccaatcaaggggaaggaccggaagccaggcaacctagtctag

SEQ ID NO: 19868 - DNA, 756 bp, Artificial Sequence
  derived and/or modified sequence
atgagcagtgaccacctgaacaacagcaccctgaaggaggcccagttcaaggacctcttcctgaagaaggccgagctggagtttgcccagatcatcatcatcgtggtggtggtgacagtgatggtggtggtgattgtgtgcctgctgaaccactacaaggtgtccaccaggagcttcatcaaccggcccaaccagagcagaagaagagaagatggcctgccccagatcatgcacgcccccaggagccgggaccgcttcaccgcccccagcttcatccagagggaccgcttcagccgcttccagcccacctacccctacgtgcagcatgaaattgacctgccccccaccatcagcctgagtgatggagaggagcccccaccctaccagggcccctgcaccctgcagctgcgggaccctgagcagcagatggagctgaaccgggagagcgtgcgggccccacccaacagaaccatctttgacagcgacctgattgacatcgccatgtacagcggcggcccctgcccccccagcagcaacagcggcatcagcgccagcacctgcagcagcaatggccgcatggagggccccccacccacctacagcgaggtgatgggccaccaccctggggccagcttcctgcaccaccagaggagcaatgcccaccggggcagccggctgcagttccagcagaacaatgctgagagcaccatcgtgcccatcaagggcaaggacaggaagccaggcaacctggtgtag

SEQ ID NO: 19869 - DNA, 693 bp, Artificial Sequence
  derived and/or modified sequence
atggctgctgagctggagtttgcccagatcatcatcatcgtggtggtggtgacagtgatggtggtggtgattgtgtgcctgctgaaccactacaaggtgtccaccaggagcttcatcaaccggcccaaccagagcagaagaagagaagatggcctgccccagatcatgcacgcccccaggagccgggaccgcttcaccgcccccagcttcatccagagggaccgcttcagccgcttccagcccacctacccctacgtgcagcacgagattgacctgccccccaccatcagcctgagtgatggagaggagcccccaccctaccagggcccctgcaccctgcagctgcgggaccctgagcagcagatggagctgaaccgggagagcgtgcgggccccacccaacagaaccatctttgacagcgacctgattgatattgccatgtacagcggcggcccctgcccccccagcagcaacagcggcatcagcgccagcacctgcagcagcaatggaaggatggagggccccccacccacctacagcgaggtgatgggccaccaccctggggccagcttcctgcaccaccagaggagcaatgcccaccggggcagccggctgcagttccagcagaacaatgctgagagcaccatcgtgcccatcaagggcaaggacaggaagccaggcaacctggtgtag

SEQ ID NO: 19870 - DNA, 756 bp, Artificial Sequence
  derived and/or modified sequence
atgagcagcgaccacctgaacaacagcaccctgaaggaggcccagtttaaagacttgttcctgaagaaggcggagcttgagtttgcccagatcatcatcatcgtggttgtggtgaccgttatggtggtcgtaatcgtgtgtctcctgaatcactacaaggtgtccacccgctcattcatcaacagacccaaccaaagtcgccgtagggaggatggtcttccacagatcatgcatgcacctaggtctcgagatcgcttcacagccccgtctttcatccagcgtgacagattcagcagatttcaacctacatatccttacgtgcagcacgaaattgatctgccccccacaatcagcctgagcgacggtgaagaacctccaccttaccagggaccctgcaccctccagcttcgcgatccagagcagcagatggagctaaatcgtgaaagcgtgcgcgctccccctaatagaactatattcgatagtgatttgatagatattgcaatgtatagtggggggccatgtcctccatcaagtaactcagggattagcgctagtacatgctcctccaatgggcgaatggaaggcccgcccccgacatactccgaagttatggggcatcatcctggtgccagtttcttgcaccaccagcggagcaatgcccaccgtggctcaaggttgcagttccaacagaacaatgcagaatccacaattgtgcccataaaaggcaaagatcgtaagccaggcaacctggtctag

SEQ ID NO: 19871 - DNA, 693 bp, Artificial Sequence
  derived and/or modified sequence
atggccgccgagctggagttcgcccagatcatcatcatcgtggtggtggtgaccgtgatggttgtagtgatagtgtgcctgcttaaccactacaaagtctcaacccggagcttcatcaaccggccaaatcagtcacgtcggcgggaggacggccttccccagattatgcacgctcctagaagcagggaccggttcaccgctccatcatttattcaacgagacagattcagccgatttcaaccaacctacccttacgttcagcacgaaatagatttgccaccaactataagcctgtccgatggtgaggaacccccaccgtaccagggcccttgcactctgcagcttagggatcctgagcagcaaatggagttaaacagggagagtgttcgcgcaccccccaataggaccatcttcgacagcgacctgatagacatcgccatgtatagcggtggtccatgccctccgtcatccaatagtggcatttccgcttcgacctgctcaagtaatgggcggatggaagggccccctcccacctatagtgaagtgatggggcaccatcctggggcaagcttcctgcaccatcaacgaagcaacgcacatcgtggcagtcgacttcagttccaacaaaataacgcagagtcaacaatagtccccattaagggcaaagaccggaagccgggaaatcttgtgtag

SEQ ID NO: 19872 - DNA, 756 bp, Artificial Sequence
  derived and/or modified sequence
atgtctagtgaccatctgaataattcaactttgaaggaagcccagtttaaagacttgtttctgaaaaaagctgaactggaatttgcacaaatcattataatcgtggtcgtcgtgacagttatggtggtggtgatcgtttgtctactgaaccactacaaagtgagcacgcgtagttttatcaacagaccgaatcagagtcgtaggcgggaagacggattgcctcagatcatgcacgcgcctcgttctcgagaccggtttacggcaccttcgttcattcaaagagatcgctttagccgctttcagccgacctatccatacgtgcagcacgagatcgacctgccaccaactatctctctctccgacggggaggagccaccaccataccaaggaccatgcaccctccagctcagggatcctgaacagcagatggagctgaacagagagagtgtgcgggcacctccaaacaggaccattttcgacagcgatttgattgacatcgccatgtacagcgggggaccctgccccccatcgagcaactctgggatctccgcctcaacgtgctcgagcaacggtcgaatggaagggcctccccctacctatagtgaagtaatgggacatcaccccggagcaagctttcttcaccaccagagatccaacgcccacaggggctcgagattacagtttcaacaaaacaatgcagagtcaacaattgtgcccattaagggcaaagaccgtaaaccaggtaatttagtctag

SEQ ID NO: 19873 - DNA, 693 bp, Artificial Sequence
  derived and/or modified sequence
atggctgcagaactcgaattcgcacaaatcattatcattgtagtggtggtaacggtgatggtcgtcgttattgtttgtttgttgaatcattataaggtatcaacccgatccttcattaaccggccaaatcagtcgaggaggcgcgaagacggcctgccacaaattatgcacgctcccagatcaagagacagattcaccgctccaagtttcatccagcgcgatcgattttctcgcttccagccaacttacccttacgtccagcacgaaattgatttgcccccaaccatctctctgagcgacggggaggagcccccaccctatcagggaccttgtaccctccagctgcgtgaccccgaacagcaaatggaacttaatcgcgagtccgtgagggcccctcctaacaggactatcttcgactcggatttgattgacattgccatgtacagtgggggtccatgtccccctagttccaacagcggtataagcgcctccacttgttctagcaatggtagaatggagggcccacccccaacctatagcgaggtaatgggacatcatcctggagcaagctttctccatcaccaacgctcaaatgcacatagggggtcgagattgcagtttcaacagaataacgcagagagtacaatcgtcccgataaaggggaaggacaggaagcccggaaacttggtgtag

SEQ ID NO: 19874 - DNA, 8892 bp, Artificial Sequence
  derived and/or modified sequence
aggaacattgagcatcctgactttgaaggagtctctgtggtgtttttgtgctaccatacatggggaataatgatgtgaggcagagggagagggaatgaatgggagagccaagagggaagagcgagccggggggaaaggagcgcgcagtgtttcctgctgcggttaggacctcacgccttgccagtacagagctcggtggcaagagccgctgggagctgctcccatcagttagaggatgtggagagggagcaccagaagaggacagcccgcagcctggctcgcagcctgagggacgctgtgggtgctcccagccgggcgagcacgctctgggagcggatctgcaggggagaagcacgcgagcctaacgtgagcgtcccgcctgtcgcgtgtcctgccttggtaagcgccctctccggtccttccacactgaaagcttccagcagagatcaagggaaggagtattgtgtgagacttgcagatttcctcctttctgtctggactggtttgatatttgcctgttgaaaagattactgaacgcagtgtgacaagatgagccgtctagctgcgttctgcttgcctgtgtgtgtgacacgtccaggtgtgaggccaaacctgagaagtgcagactgctcactgatagacgttgctgtaaacagtagtgccctgggtgtacagctggtctcaggatcggagaccccggacttattctctgctcggtgacacggccggcttcctgccgcagagctcctggtttctgttgatggcagttgataattggtagccacagtctgcggtcggagccacagcatttgagtctagcacctggggtgggccctgctgatacagtagagagagagtgaacgaggcagacagaaacacaccccccccccctccacgctcacacactctcccacaccccatgccagctataactgcagctctgagctgcctggagaggagattgccggaagctgaagggatgctttgaacgtgggggggctgcgtcacagttggactcccacttgcagaggacctgattatgtccagtgaccacctgaacaacagcacactgaaggaggctcagttcaaagacctgttcttaaaaaaagcggagctggagttcgcccaaatcatcatcatcgtcgtggtggtcacggtgatggtggtggtcatcgtctgcctgctgaaccactacaaagtctccacgcggtccttcatcaaccgcccgaaccagagccggaggcgggaggacgggctgccgcagatcatgcatgccccgcggtccagggacaggttcacagcgccgtccttcatccagagggatcgcttcagccgcttccagcccacctacccctatgtgcagcacgagattgatcttcctcccaccatctccctgtccgacggtgaagagccacctccttaccaggggccctgcaccctgcagctccgggaccctgaacagcagatggaactcaaccgagagtccgtgagggccccacccaaccgaaccatatttgacagtgatttaatagacattgctatgtatagcgggggtccatgcccacccagcagcaactcgggcatcagtgcaagcacctgcagcagtaacgggaggatggaggggccaccccccacatacagcgaggtgatgggccaccacccaggcgcctctttcctccatcaccagcgcagcaacgcacacaggggcagcagactgcagtttcagcagaacaatgcagagagcacaatagtacccatcaaaggcaaagataggaagcctgggaacctggtctgattccttccaacgtgcacttcagctggagaaagaaaccaagaagggaagcggccgctgggcccctcctgcgcacagtgttgttcagtttcacatggtacaaataagtaaaaccaaatgagcaaacacggtctttgtttctgattccttttaggggaattgcatgcaaactagactgaaatgatacaaacttccatctggtctgaccgcaaacagtgtttatttggggacaggggttgggatgggggtgtgggcaggggaaaacagagaacgggatgctttgaagataccatgaaataaaacccacagaggtatttgatgtatttaattgtgaaaggagactttgcagataaatgaggccagaatggcatgttttataattaactgaataaagaaggaagcattattatatattattgtggggaagaaccagccagttcgctttttctcctaaggtgtggaacttttattttgttttaaaaatatgaatcaaaattcctgtgttgtgtgccaaggtataaagtggagaagttagatgagtgcaaggagctcctttgtgttgtgatgatgtgttttaaaagttgcactatcttaatgttgaaaatatttacaagggaactgttttacgtgaagttctgtatgttgtcttttcacctgtggattgtaatcaggcccaaggaatatcctggagtggtccccagaagcatccaagaaaagatatttggggacgtagcctaacattttaccaacttacgtaaatcaaaaaagtcattattgttgcaggagtttgcatcaaatagcagtgcatcgctgaagcttttggagacttttggatggaagataagatagggaagattaagttccagcatttctgacttgttattttgagttactctgctactcttaggctgcatagtttatgagaaaatgaacacatgcatttatggatccagtatcatgcagtgctgccctcatcctccagcagtgcaatttcttcagtaatttagatttttttcactatagcatgaaatatattcaaatacataccttattttatgcaataaattgtttaaaatgcaaggtggttattctgcatactgttgaaatatgtgactcctcagtatattcccattgcctctccccctttcctcgacagcttagttcagttctgcagggctgctcagttcacaggaggctcccagcagccaccccacatccagcctacacagaacttcgtgtgggagtggtgtgggtggtggtttcttatgctttggaagcccctagaaataatgacggaagaatgccatgttgctgatcgtggtaataagccattgtgggttattgtatgtcactagtattagcatagcattcttaaaggaatgcagtgctcaaaacctacccaaattcccgcaggattctaccaaacccttccccaggccagcttttgtactgaaggcaagaactggacagtcagagaacagtggagggggcaagtgactgaagagcaccgggtaaaaagcacaacatgcagttaaaatgcaactagaaaactaattttaaatattgttagttttaatattcctgatatttacaaatattcattcttatatacaatgaaaaaaataactttcttctgcagatgtaagcactggcttttataagagcagcagccaacacgtttagcagacactgcgcgtggagaagggcttatctgcagtacactctgccatgtggagggtgggcctctgtggcctcttcacataacaagatgagctggaatgatgattccatgactcccacctatgcagccttaaagccaaatccgcgtgtgtgtgtttgtgtctgtctgtgggtctcgaaggtgatccgtcggtgcggtggctctgtgctgtaactggagagactgttccaaaccccaagagttgtctgatcctagtctgttcccttctgcttcttacctctgtagataggtcactggtttttgtttgtttgttttgaggattggaatttccattacattcatcctttgcacacagtaacatccacagaactagtccaactcttaaaaggagagaggaaaaacacaggcaccagttgtcagctcatgcttacaacctgtgtggaagtatatacagttgagagtcacagtggaggttctgagactggattcagtcttgttccagtgacagttggaaggcctctgctggagagacaccagctctcagggcagagattggcttggggccagaaggaccctccccaaccctggagacaccctgaaggttcactggctctccagattagcctctcttcctctgtcaggcaaagatgaggagcccgtgttcccatcgggccctgctggcagggacttgcagtggattcttggtcaggtgtgcccacagatgcggaggcgaggtgagtgattccatcatttcagttctcacctgcagttttggtgaagcaggagatgcaccccacagctctagctctcaaatggcttcacagtccttacttctctacctgcctcaagaaggggctcagagcagagacttgtgaattccttagtaactgtgagtatatgaatgtgttgcacatgtccacagtattggcgagataattacataattcagatacctttaatcatctttcaagaaagaggctcctcccattcaaccaccctagagaactgcctttgttaaatagttatttaaagactcatacatatcaaaccatgactttgaaaggtcttcgaggctggggctctgtaatgaattagtttaaaagccaaggtcataacatgaattgatggtcaatttcccttcagcagaaggaaaaggtgatttagatcagtagctcttttgaaggttgtggctgacctgttcataccgtgtcgcctcatggctagtgtggcgttgaaagagtagcgactgggaagatacaacttacacagtggggcctattgttctttcaagaaccctttttttagcttatagaacccatgggtccagtttagtaacgagtgatttaggcaatcaatgataggtttataatcttagattattccagcaaagtgtggattgcattgttaggaagaacatttggtgggaatgaacactcctgggcataccgctgacttttgtcccttgttcccggtgtaggagacccaaggcatcttgaatcccatctataagaacacaatcttccagcatacgtttgctttttcagaaactctagcattctctttaaatactgacgcaatccttaatggaaaagagatttcatgaagcaaattatgtatttcaatagttcttctatttttagtgtccaaaatttactaatacagaagcttgacaagcatgtcctcaccctccccaccacataaacacatggacacacacccaagccacaagaaatcccaagagagcagaagcgaatttttaaaagatttatcgtgaggactgcatttccattcactaattttggctcaaacttatgaggcaggaaataggggccaacagtaaatgggggaggcctcctgacaccagcagaggaattttgtacccaggcgaggacttcttgaacttctgcgtatctccgtttgatctctttcacctttatttcatcttcataagaatgagaaaggctcaaaaggaagcacttttagaaatcttctctgacctagaagaatccatccaaatccctgccttcctctctgaaccaacagttcccttctctgacaggggccatcctctatcttccatccagcggctcttctttttaggaaggctctggtgcagagcacttcaaatatgtcctcaggccagatactgattgctagtagagagacacccggcacccagtccgaagccctccctcaaaggaccggctcatggcgttggtcactggcaggctcagagacattctgctgtgggcgcagggagcccggccccccatgcagccatgactggatgcgcccccatctcgggggcttgctgcactgcttgtttattgaattttgctacttagaatggcaacattaactttgtgtaccattcattttttaaaaattttccaaagctcggcagtgtatgaaagaaaaaactgggaaagatacttggtttctgttaacttttgtgttgcttgcttaagtgattaaagccagtgcttggagccaagccttcatgccacgaacatgctccacagcctgccctttgctctcctgctcacactgaccaagaatgccgcgtgcttggcctactgaggtgaaaggacaattgaatgacaggtgggcaaagggagaacttccccttcttggtgcgaggaaagtcacaaatttaaaaatgttgcttccagcccagatcctaaatgctagttctcagcagctgcgtggcttaccgttcgccatttccaccaccgccagctgccagcaccgctacagatcacagagatgtgaacagacaatggaaagcactcttagccttgcagtggtctacattttttaggaaccaatatttcagcattctttattacccggcacgctgtgtcctttgcagagttcaagtttatgttactgccagggtcagacagtcatttgctgctgctgctgctgctgctgcttctcgaactggatgcattaggaagctgctgtctgagtgtaggaatgtcttgctaagaaagcaatgtcttccttcatccttttctttcttccctctgcgtgtccttgtttttgtgtaatgcgggagagggttagagctatagagattatatatacactatccgtgcacattatatatatgtagatatacccctatcatgtcagagatctgcatgtcagtttttcagcaactaaggtgcctcatgttctgagttcagcagatataggaaccaagccgccccctcctgcacttgatgctcccacctttgttgtgcctcacttaaaatggtgcttttttcagttgtctgtcttttcttatgtttttatttgtaaggtgctgtatataagttgaatatattatgcacatatcctacccaatgggtagaacaaaaagttgttaatactgtaatataatgtatagatgataccaattttaacagaaatggcatagaatttgtgaatgcctatgtgctttgtcctcttttgtaaggaaatttgcaaatggatgcatacagattaaagtctatgtagtttattttcctattaaatatcaatattataacacaagagaaagaagtgtgaacaaacaagcaacagtttatgaccagcgtatatatagcaatggaaagttgcatctttgctgtgaaaacactttaaagaaaatactttttaaaaaatcccacagctttttggttgccactagacgcttcttattttaatcattttagtaatgctcagctggaccagtgttagttatatttgagtcagaaaaatgttgtttttcaacttgctttataatctcctgcatctatctcctgctgtagcatcacgaaggtgtcaggcaacagtgaaaagtgcacatttttgttgttgcagaaactgtgtcagaggaataagtaaatcagcctgcagcagaagactttgttcagctccagaggcatctgtgaccgtctgtgtccaagtctctctgtgcctttttcttttacaaactgaagctgtggagccaatgaagtaacagtagagattgtagggaaagaatacctcaggaaaaacaaatacacttacaagaagaccctgttcttagaaaatgtgtttagttatgggttagcactagaagagacttggctgtcagccagccaagtgaaggacctctcatccattcccattcatgtcccatcataatacggacccaaaaagcaaactcggttttgccatcagttagaaattacgttttggattgtatattgttacatctctcttccggcttagtttttagtgtctgattgtgacctctgcatttatcttcaaataccctaattttaaaacaaaagaacaagaaaagtttataacaccatgttcactaaaaccacggttgaatcttgggtgtgggcatcctttcgagtgttgtccataagagcagttcgtggaattttgcccatctgacccatattatcagcttattctgccaccagagtagagtctaataaattccaaagtttttatttgctccatggtgtatgttctgactttgaaaatgtcagattctataatcatacccctaacatccaggaaacaaatgacagattatctttaaactgaaattgactctacaatgcaacccttaatgctgaatggattaaaaaagtcagcccttttagtatctgtttgaaagggccgtaaaaagttgacacttttgttgttgtggatcctgcgtgtctagacccacgtgttgtttccatcgtatactgtagggtgcaccccttgggattcatcattaagaactgaggctcactgttgtcagaaacaaagctcccaccccccaggttcaaccttgtgggagaactgttgagcatgagaatgttctagactcagaggtactaaaatttgttaccacatcattgcttcctttctacaggacgaattgaggcttaaactttactgttaatgatactggttcattttaatgtgcttgttggtatgttgctatttttcatttcatagctttcaaaaatcatgctaattgtatacttgtctagtttaaggctattttaaaatatgtacaatactattcacagcatttagttcgtttaatttttattataaagcaatctactaaaaaagtacaactgtatttgaacttttcaatagttgtttgtgagctatgataatcaaaagtcattaaagtcttttttaacaaacattcgtgcttacttttcaacataattcccagttatatacagaaaaagatttccacctgtcacgtatctgcctcttttacctgagcaatggtgtagttcttagacctaaggtctgtaattgcaatacttttaaagaaagatgttgctctaagtgctgtttgttagttatgaaatcagatttttctgcttgttcttaatgctgtggtcaaaccatagcacaaaatcattaaaaataatcagcggcatac

SEQ ID NO: 19875 - DNA, 8032 bp, Artificial Sequence
  derived and/or modified sequence
ctcagctccctgtggtgggggatggcagaggcttcccgctccccgcagctggtttgcacagcctcccgactgtgccgtggtgtctccttccctaaagtgggacagtcgtttctgtgtcctgctggcctctgaggaacagacgtgtgtgagaggccttcagggcctgatggctggggtggtgacagtgcctggagaatgggtggggactggaggggccaggtggctaaccactctcctcttccatggcagcggagctggagttcgcccaaatcatcatcatcgtcgtggtggtcacggtgatggtggtggtcatcgtctgcctgctgaaccactacaaagtctccacgcggtccttcatcaaccgcccgaaccagagccggaggcgggaggacgggctgccgcagatcatgcatgccccgcggtccagggacaggttcacagcgccgtccttcatccagagggatcgcttcagccgcttccagcccacctacccctatgtgcagcacgagattgatcttcctcccaccatctccctgtccgacggtgaagagccacctccttaccaggggccctgcaccctgcagctccgggaccctgaacagcagatggaactcaaccgagagtccgtgagggccccacccaaccgaaccatatttgacagtgatttaatagacattgctatgtatagcgggggtccatgcccacccagcagcaactcgggcatcagtgcaagcacctgcagcagtaacgggaggatggaggggccaccccccacatacagcgaggtgatgggccaccacccaggcgcctctttcctccatcaccagcgcagcaacgcacacaggggcagcagactgcagtttcagcagaacaatgcagagagcacaatagtacccatcaaaggcaaagataggaagcctgggaacctggtctgattccttccaacgtgcacttcagctggagaaagaaaccaagaagggaagcggccgctgggcccctcctgcgcacagtgttgttcagtttcacatggtacaaataagtaaaaccaaatgagcaaacacggtctttgtttctgattccttttaggggaattgcatgcaaactagactgaaatgatacaaacttccatctggtctgaccgcaaacagtgtttatttggggacaggggttgggatgggggtgtgggcaggggaaaacagagaacgggatgctttgaagataccatgaaataaaacccacagaggtatttgatgtatttaattgtgaaaggagactttgcagataaatgaggccagaatggcatgttttataattaactgaataaagaaggaagcattattatatattattgtggggaagaaccagccagttcgctttttctcctaaggtgtggaacttttattttgttttaaaaatatgaatcaaaattcctgtgttgtgtgccaaggtataaagtggagaagttagatgagtgcaaggagctcctttgtgttgtgatgatgtgttttaaaagttgcactatcttaatgttgaaaatatttacaagggaactgttttacgtgaagttctgtatgttgtcttttcacctgtggattgtaatcaggcccaaggaatatcctggagtggtccccagaagcatccaagaaaagatatttggggacgtagcctaacattttaccaacttacgtaaatcaaaaaagtcattattgttgcaggagtttgcatcaaatagcagtgcatcgctgaagcttttggagacttttggatggaagataagatagggaagattaagttccagcatttctgacttgttattttgagttactctgctactcttaggctgcatagtttatgagaaaatgaacacatgcatttatggatccagtatcatgcagtgctgccctcatcctccagcagtgcaatttcttcagtaatttagatttttttcactatagcatgaaatatattcaaatacataccttattttatgcaataaattgtttaaaatgcaaggtggttattctgcatactgttgaaatatgtgactcctcagtatattcccattgcctctccccctttcctcgacagcttagttcagttctgcagggctgctcagttcacaggaggctcccagcagccaccccacatccagcctacacagaacttcgtgtgggagtggtgtgggtggtggtttcttatgctttggaagcccctagaaataatgacggaagaatgccatgttgctgatcgtggtaataagccattgtgggttattgtatgtcactagtattagcatagcattcttaaaggaatgcagtgctcaaaacctacccaaattcccgcaggattctaccaaacccttccccaggccagcttttgtactgaaggcaagaactggacagtcagagaacagtggagggggcaagtgactgaagagcaccgggtaaaaagcacaacatgcagttaaaatgcaactagaaaactaattttaaatattgttagttttaatattcctgatatttacaaatattcattcttatatacaatgaaaaaaataactttcttctgcagatgtaagcactggcttttataagagcagcagccaacacgtttagcagacactgcgcgtggagaagggcttatctgcagtacactctgccatgtggagggtgggcctctgtggcctcttcacataacaagatgagctggaatgatgattccatgactcccacctatgcagccttaaagccaaatccgcgtgtgtgtgtttgtgtctgtctgtgggtctcgaaggtgatccgtcggtgcggtggctctgtgctgtaactggagagactgttccaaaccccaagagttgtctgatcctagtctgttcccttctgcttcttacctctgtagataggtcactggtttttgtttgtttgttttgaggattggaatttccattacattcatcctttgcacacagtaacatccacagaactagtccaactcttaaaaggagagaggaaaaacacaggcaccagttgtcagctcatgcttacaacctgtgtggaagtatatacagttgagagtcacagtggaggttctgagactggattcagtcttgttccagtgacagttggaaggcctctgctggagagacaccagctctcagggcagagattggcttggggccagaaggaccctccccaaccctggagacaccctgaaggttcactggctctccagattagcctctcttcctctgtcaggcaaagatgaggagcccgtgttcccatcgggccctgctggcagggacttgcagtggattcttggtcaggtgtgcccacagatgcggaggcgaggtgagtgattccatcatttcagttctcacctgcagttttggtgaagcaggagatgcaccccacagctctagctctcaaatggcttcacagtccttacttctctacctgcctcaagaaggggctcagagcagagacttgtgaattccttagtaactgtgagtatatgaatgtgttgcacatgtccacagtattggcgagataattacataattcagatacctttaatcatctttcaagaaagaggctcctcccattcaaccaccctagagaactgcctttgttaaatagttatttaaagactcatacatatcaaaccatgactttgaaaggtcttcgaggctggggctctgtaatgaattagtttaaaagccaaggtcataacatgaattgatggtcaatttcccttcagcagaaggaaaaggtgatttagatcagtagctcttttgaaggttgtggctgacctgttcataccgtgtcgcctcatggctagtgtggcgttgaaagagtagcgactgggaagatacaacttacacagtggggcctattgttctttcaagaaccctttttttagcttatagaacccatgggtccagtttagtaacgagtgatttaggcaatcaatgataggtttataatcttagattattccagcaaagtgtggattgcattgttaggaagaacatttggtgggaatgaacactcctgggcataccgctgacttttgtcccttgttcccggtgtaggagacccaaggcatcttgaatcccatctataagaacacaatcttccagcatacgtttgctttttcagaaactctagcattctctttaaatactgacgcaatccttaatggaaaagagatttcatgaagcaaattatgtatttcaatagttcttctatttttagtgtccaaaatttactaatacagaagcttgacaagcatgtcctcaccctccccaccacataaacacatggacacacacccaagccacaagaaatcccaagagagcagaagcgaatttttaaaagatttatcgtgaggactgcatttccattcactaattttggctcaaacttatgaggcaggaaataggggccaacagtaaatgggggaggcctcctgacaccagcagaggaattttgtacccaggcgaggacttcttgaacttctgcgtatctccgtttgatctctttcacctttatttcatcttcataagaatgagaaaggctcaaaaggaagcacttttagaaatcttctctgacctagaagaatccatccaaatccctgccttcctctctgaaccaacagttcccttctctgacaggggccatcctctatcttccatccagcggctcttctttttaggaaggctctggtgcagagcacttcaaatatgtcctcaggccagatactgattgctagtagagagacacccggcacccagtccgaagccctccctcaaaggaccggctcatggcgttggtcactggcaggctcagagacattctgctgtgggcgcagggagcccggccccccatgcagccatgactggatgcgcccccatctcgggggcttgctgcactgcttgtttattgaattttgctacttagaatggcaacattaactttgtgtaccattcattttttaaaaattttccaaagctcggcagtgtatgaaagaaaaaactgggaaagatacttggtttctgttaacttttgtgttgcttgcttaagtgattaaagccagtgcttggagccaagccttcatgccacgaacatgctccacagcctgccctttgctctcctgctcacactgaccaagaatgccgcgtgcttggcctactgaggtgaaaggacaattgaatgacaggtgggcaaagggagaacttccccttcttggtgcgaggaaagtcacaaatttaaaaatgttgcttccagcccagatcctaaatgctagttctcagcagctgcgtggcttaccgttcgccatttccaccaccgccagctgccagcaccgctacagatcacagagatgtgaacagacaatggaaagcactcttagccttgcagtggtctacattttttaggaaccaatatttcagcattctttattacccggcacgctgtgtcctttgcagagttcaagtttatgttactgccagggtcagacagtcatttgctgctgctgctgctgctgctgcttctcgaactggatgcattaggaagctgctgtctgagtgtaggaatgtcttgctaagaaagcaatgtcttccttcatccttttctttcttccctctgcgtgtccttgtttttgtgtaatgcgggagagggttagagctatagagattatatatacactatccgtgcacattatatatatgtagatatacccctatcatgtcagagatctgcatgtcagtttttcagcaactaaggtgcctcatgttctgagttcagcagatataggaaccaagccgccccctcctgcacttgatgctcccacctttgttgtgcctcacttaaaatggtgcttttttcagttgtctgtcttttcttatgtttttatttgtaaggtgctgtatataagttgaatatattatgcacatatcctacccaatgggtagaacaaaaagttgttaatactgtaatataatgtatagatgataccaattttaacagaaatggcatagaatttgtgaatgcctatgtgctttgtcctcttttgtaaggaaatttgcaaatggatgcatacagattaaagtctatgtagtttattttcctattaaatatcaatattataacacaagagaaagaagtgtgaacaaacaagcaacagtttatgaccagcgtatatatagcaatggaaagttgcatctttgctgtgaaaacactttaaagaaaatactttttaaaaaatcccacagctttttggttgccactagacgcttcttattttaatcattttagtaatgctcagctggaccagtgttagttatatttgagtcagaaaaatgttgtttttcaacttgctttataatctcctgcatctatctcctgctgtagcatcacgaaggtgtcaggcaacagtgaaaagtgcacatttttgttgttgcagaaactgtgtcagaggaataagtaaatcagcctgcagcagaagactttgttcagctccagaggcatctgtgaccgtctgtgtccaagtctctctgtgcctttttcttttacaaactgaagctgtggagccaatgaagtaacagtagagattgtagggaaagaatacctcaggaaaaacaaatacacttacaagaagaccctgttcttagaaaatgtgtttagttatgggttagcactagaagagacttggctgtcagccagccaagtgaaggacctctcatccattcccattcatgtcccatcataatacggacccaaaaagcaaactcggttttgccatcagttagaaattacgttttggattgtatattgttacatctctcttccggcttagtttttagtgtctgattgtgacctctgcatttatcttcaaataccctaattttaaaacaaaagaacaagaaaagtttataacaccatgttcactaaaaccacggttgaatcttgggtgtgggcatcctttcgagtgttgtccataagagcagttcgtggaattttgcccatctgacccatattatcagcttattctgccaccagagtagagtctaataaattccaaagtttttatttgctccatggtgtatgttctgactttgaaaatgtcagattctataatcatacccctaacatccaggaaacaaatgacagattatctttaaactgaaattgactctacaatgcaacccttaatgctgaatggattaaaaaagtcagcccttttagtatctgtttgaaagggccgtaaaaagttgacacttttgttgttgtggatcctgcgtgtctagacccacgtgttgtttccatcgtatactgtagggtgcaccccttgggattcatcattaagaactgaggctcactgttgtcagaaacaaagctcccaccccccaggttcaaccttgtgggagaactgttgagcatgagaatgttctagactcagaggtactaaaatttgttaccacatcattgcttcctttctacaggacgaattgaggcttaaactttactgttaatgatactggttcattttaatgtgcttgttggtatgttgctatttttcatttcatagctttcaaaaatcatgctaattgtatacttgtctagtttaaggctattttaaaatatgtacaatactattcacagcatttagttcgtttaatttttattataaagcaatctactaaaaaagtacaactgtatttgaacttttcaatagttgtttgtgagctatgataatcaaaagtcattaaagtcttttttaacaaacattcgtgcttacttttcaacataattcccagttatatacagaaaaagatttccacctgtcacgtatctgcctcttttacctgagcaatggtgtagttcttagacctaaggtctgtaattgcaatacttttaaagaaagatgttgctctaagtgctgtttgttagttatgaaatcagatttttctgcttgttcttaatgctgtggtcaaaccatagcacaaaatcattaaaaataatcagcggcatac

SEQ ID NO: 19876 - DNA, 756 bp, Artificial Sequence
  derived and/or modified sequence
atgagcagcgaccacctgaacaacagcaccctgaaggaggcccagttcaaggacctgttcctgaagaaggccgagctggagttcgcccagatcatcatcatcgtggtggtggtgaccgtgatggtggtggtgatcgtgtgcctgctgaaccactacaaggtgagcaccagaagcttcatcaacagacccaaccagagcagaagaagagaggacggcctgccccagatcatgcacgcccccagaagcagagacagattcaccgcccccagcttcatccagagagacagattcagcagattccagcccacctacccctacgtgcagcacgagatcgacctgccccccaccatcagcctgagcgacggcgaggagccccccccctaccagggcccctgcaccctgcagctgagagaccccgagcagcagatggagctgaacagagagagcgtgagagccccccccaacagaaccatcttcgacagcgacctgatcgacatcgccatgtacagcggcggcccctgcccccccagcagcaacagcggcatcagcgccagcacctgcagcagcaacggcagaatggagggccccccccccacctacagcgaggtgatgggccaccaccccggcgccagcttcctgcaccaccagagaagcaacgcccacagaggcagcagactgcagttccagcagaacaacgccgagagcaccatcgtgcccatcaagggcaaggacagaaagcccggcaacctggtgtag

SEQ ID NO: 19877 - DNA, 693 bp, Artificial Sequence
  derived and/or modified sequence
atggccgccgagctggagttcgcccagatcatcatcatcgtggtggtggtgaccgtgatggtggtggtgatcgtgtgcctgctgaaccactacaaggtgagcaccagaagcttcatcaacagacccaaccagagcagaagaagagaggacggcctgccccagatcatgcacgcccccagaagcagagacagattcaccgcccccagcttcatccagagagacagattcagcagattccagcccacctacccctacgtgcagcacgagatcgacctgccccccaccatcagcctgagcgacggcgaggagccccccccctaccagggcccctgcaccctgcagctgagagaccccgagcagcagatggagctgaacagagagagcgtgagagccccccccaacagaaccatcttcgacagcgacctgatcgacatcgccatgtacagcggcggcccctgcccccccagcagcaacagcggcatcagcgccagcacctgcagcagcaacggcagaatggagggccccccccccacctacagcgaggtgatgggccaccaccccggcgccagcttcctgcaccaccagagaagcaacgcccacagaggcagcagactgcagttccagcagaacaacgccgagagcaccatcgtgcccatcaagggcaaggacagaaagcccggcaacctggtgtag

SEQ ID NO: 19878 - protein, 601 aa, Artificial Sequence
  derived and/or modified sequence
MAYDDSVKKEDCFDGDHTFEDIGLAAGRSQREKKRSYKDFLREEEEIAAQVRNSSKKKLKDSELYFLGTDTHKKKRKHSSDDYYYGDISSLESSQKKKKKSSPQSTDTAMDLLKAITSPLAAGSKPSKKTGEKSSGSSSHSESKKEHHRKKVSGSSGELPLEDGGSHKSKKMKPLYVNTETLTLREPDGLKMKLILSPKEKGSSSVDEESFQYPSQQATVKKSSKKSARDEQGALLLGHELQSFLKTARKKHKSSSDAHSSPGPEGCGSDASQFAESHSANLDLSGLEPILVESDSSSGGELEAGELVIDDSYREIKKKKKSKKSKKKKDKEKHKEKRHSKSKRSLGLSAVPVGEVTVTSGPPPSIPYAGAAAPPLPLPGLHTDGHSEKKKKKEEKDKERERGEKPKKKNMSAYQVFCKEYRVTIVADHPGIDFGELSKKLAEVWKQLPEKDKLIWKQKAQYLQHKQNKAEATTVKRKASSSEGSMKVKASSVGVLSPQKKSPPTTMLLPASPAKAPETEPIDVAAHLQLLGESLSLIGHRLQETEGMVAVSGSLSVLLDSIICALGPLACLTTQLPELNGCPKQVLSNTLDNIAYIMPGL

SEQ ID NO: 19879 - protein, 492 aa, Artificial Sequence
  derived and/or modified sequence
MDLLKAITSPLAAGSKPSKKTGEKSSGSSSHSESKKEHHRKKVSGSSGELPLEDGGSHKSKKMKPLYVNTETLTLREPDGLKMKLILSPKEKGSSSVDEESFQYPSQQATVKKSSKKSARDEQGALLLGHELQSFLKTARKKHKSSSDAHSSPGPEGCGSDASQFAESHSANLDLSGLEPILVESDSSSGGELEAGELVIDDSYREIKKKKKSKKSKKKKDKEKHKEKRHSKSKRSLGLSAVPVGEVTVTSGPPPSIPYAGAAAPPLPLPGLHTDGHSEKKKKKEEKDKERERGEKPKKKNMSAYQVFCKEYRVTIVADHPGIDFGELSKKLAEVWKQLPEKDKLIWKQKAQYLQHKQNKAEATTVKRKASSSEGSMKVKASSVGVLSPQKKSPPTTMLLPASPAKAPETEPIDVAAHLQLLGESLSLIGHRLQETEGMVAVSGSLSVLLDSIICALGPLACLTTQLPELNGCPKQVLSNTLDNIAYIMPGL

SEQ ID NO: 19880 - DNA, 1806 bp, Artificial Sequence
  derived and/or modified sequence
atggcatacgacgattctgtaaagaaagaggactgttttgacggggatcacactttcgaggacatagggctggccgcaggacgaagtcagagggaaaagaaaagaagctataaggactttctgagggaggaggaagagatagccgcacaagtcagaaacagtagtaaaaaaaagttgaaagacagtgaactgtacttcctgggcactgacacacataagaagaagcgcaaacacagctctgacgattactattatggagacatctcatccctggaatcctctcagaagaaaaagaagaaaagctccccccagtctacggacaccgccatggatcttctcaaggctattacaagcccactggccgcaggcagtaagccctccaaaaaaactggggagaagtcttcagggtctagctcacatagtgagtctaaaaaagagcatcaccggaagaaagttagcggctcatcaggcgagctgccactcgaagacggggggagccataaatctaaaaagatgaaacctctatacgttaacacagagactctcactctgcgtgagccagatggcctcaaaatgaaattgattctctctcctaaagaaaagggatcttcaagcgtcgacgaagagtctttccagtacccgtcccaacaggccaccgtgaagaaatccagcaagaaatctgctcgcgatgagcagggagcactcctgctgggtcacgagcttcaatcttttctcaagacagcgcgtaaaaaacacaaaagcagctccgatgcccatagttcccccggacccgaggggtgtggttcagacgctagccagtttgctgaatctcattcagctaatcttgacctgtctggactcgaacccattttagtcgaaagcgattcctccagcggtggtgaactagaagccggcgagctggtgatcgatgactcatacagagagatcaaaaagaaaaaaaaaagcaaaaaatctaagaagaagaaggacaaagagaagcacaaggagaagaggcattccaaatcaaagcggtccctgggactctccgccgtcccggtgggcgaggtgacggtgacaagcggccctcctccatctatcccttatgcaggtgctgccgcgccgccattgcccttacctggcctccataccgacggacactctgaaaagaaaaagaaaaaagaggaaaaagacaaggaaagagagagaggtgagaaacccaagaagaaaaatatgtcggcttaccaggtgttttgtaaagaatacagagtgactatagtagcggatcacccaggaattgattttggcgaactgagtaagaagctggctgaagtgtggaagcagctgcccgagaaagacaagcttatctggaagcagaaggcccagtatttgcagcacaagcaaaacaaggccgaggctaccacagtaaaacggaaagcaagcagctcggaggggtccatgaaggtcaaagcttccagcgttggtgtcctgtctccacagaagaaatcacccccgaccactatgctcctgccagccagccccgcgaaggctccggaaacagagcctatcgacgtcgctgcacatctccagttactgggcgaatcactgtcactgattggtcaccgactccaggaaacagagggaatggttgccgtgagtggatccctgtccgtgctgcttgattcaatcatctgcgcacttggtcctttggcatgccttactacacagctgccagaactgaatgggtgtcctaaacaggtgttgagcaataccttggacaacattgcttatatcatgccaggcctctag

SEQ ID NO: 19881 - DNA, 1806 bp, Artificial Sequence
  derived and/or modified sequence
atggcctatgatgacagcgtgaagaaggaggactgctttgatggagaccacacctttgaggacatcggcctggccgccggccgcagccagcgggagaagaagaggagctacaaggacttcctgcgggaggaggaggagattgctgcccaggtgaggaacagcagcaagaagaagctgaaggacagcgagctgtacttcctgggcacagacacccacaagaagaagaggaagcacagcagtgatgactactactatggagacatcagcagcctggagagcagccagaagaagaagaagaagagcagcccccagagcacagacacagccatggacctgctgaaggccatcaccagccccctggccgccggcagcaagcccagcaagaagacaggagagaagagcagcggcagcagcagccacagcgagagcaagaaggagcaccacaggaagaaggtgtctggcagcagcggggagctgcccctggaggatggcggcagccacaagagcaagaagatgaagcccctgtatgtgaacacagagaccctgaccctgcgggagccagatggcctgaagatgaagctgatcctgagccccaaggagaagggcagcagctctgtggatgaggagagcttccagtaccccagccagcaggccaccgtgaagaagagcagcaagaagagcgccagagatgagcagggcgccctgctgctgggccacgagctgcagagcttcctgaagacagccaggaagaagcacaagagcagcagtgatgcccacagcagccctggccctgagggctgcggcagtgatgccagccagtttgctgagagccacagcgccaacctggacctgagcggcctggagcccatcctggtggagagtgacagcagcagcggcggggagctggaggccggggagctggtgattgatgacagctaccgggagatcaagaagaagaagaagagcaagaagagcaagaagaagaaggacaaggagaagcacaaggagaagaggcacagcaagagcaagaggagcctgggcctgtctgctgtgcctgtgggggaggtgacagtgaccagcggccccccacccagcatcccctatgctggggccgccgccccacccctgcccctgcccggcctgcacacagatggccacagcgagaagaagaagaagaaggaggagaaggacaaggagcgggagcggggggagaagcccaagaagaagaacatgtctgcctaccaggtgttctgcaaggagtacagagtgaccatcgtggccgaccaccctggcatcgactttggagagctgagcaagaagctggccgaggtgtggaagcagctgcctgagaaggacaagctgatctggaagcagaaggcccagtacctgcagcacaagcagaacaaggccgaggccaccaccgtgaagaggaaggccagcagcagcgagggctccatgaaggtgaaggccagctctgtgggcgtgctgagcccccagaagaagagcccccccaccaccatgctgctgcctgccagccctgccaaggcccctgagacagagcccattgatgtggccgcccacctgcagctgctgggggagagcctgagcctcatcggccaccggctgcaggagacagagggcatggtggccgtgtctggcagcctgtctgtgctgctggacagcatcatctgtgccctgggccccctggcctgcctgaccacccagctgcctgagctgaatggctgccccaagcaggtgctgagcaacaccctggacaacatcgcctacatcatgcctggcctgtag

SEQ ID NO: 19882 - DNA, 1806 bp, Artificial Sequence
  derived and/or modified sequence
atggcctacgacgacagcgtgaagaaggaggactgcttcgacggcgatcacaccttcgaggacatcggccttgcagcaggaagatcgcaaagggagaaaaagaggtcttacaaggacttcttgagggaggaggaggagattgccgcccaggtgagaaattcatccaaaaagaagttgaaggatagcgagctgtatttcctgggtaccgatacccataaaaagaagagaaagcattcctccgacgactattattatggtgacatttcgagcctagaatcgtcacagaaaaaaaaaaagaaatcaagtcctcagtccacagacacagccatggacctcctcaaagctatcacctctccacttgcggccggtagcaagccatctaagaaaacgggagagaaatccagcggcagcagttctcatagcgaatcgaagaaggagcatcaccgtaagaaggtgtcaggaagttctggagagctgccccttgaggacggtggatctcacaaatccaaaaaaatgaaacccctgtacgtgaataccgaaacgctgactctaagggagccagacggccttaaaatgaagctcattctatcccctaaggaaaaagggtcgtcttccgtagatgaggaaagtttccaatatcccagccaacaggccacagttaagaaaagttctaagaagagcgcccgcgatgaacagggggcgctgttgcttggacatgagctccagtccttcctcaagacggccagaaagaagcacaaatcctcctctgatgcccattctagtccaggaccagagggctgcggttccgacgcgtcacagttcgccgagtcgcatagcgctaacctggacttgtccggactggaacctatccttgtcgagtccgactcaagctccggaggtgaactggaggcaggcgagctagtgatcgacgatagttatagggagataaaaaaaaagaaaaagtctaaaaaatcgaagaagaagaaggacaaggagaaacataaagagaagcgacacagcaagagtaaaaggagtctcgggttgtctgccgtgcccgtgggtgaagttactgtgacgtcaggccctcctccctccataccatacgcgggagccgcagcccctccattaccattacccggtctccacacagacggccattccgagaaaaagaaaaagaaagaggagaaggataaagagcgcgaacgtggcgagaagcccaaaaaaaagaacatgtctgcttaccaggtattttgtaaagagtacagggtgaccatcgtcgcagaccatccgggcatcgatttcggtgagttaagcaagaaactggcggaggtgtggaaacagctcccagaaaaagacaagttgatctggaaacagaaagcacaatatttgcagcacaaacagaacaaggccgaagcaactactgttaaacggaaagcgtcttcttccgaagggtctatgaaggtgaaagcaagcagtgtcggagtgctgtcacctcaaaaaaaatcgcctcctacaacgatgctgctcccagcctcgcccgccaaagcccccgagactgaacccatcgatgtggcagctcatttgcagctcttgggagagtcactgagtcttataggccatcgattgcaggagacagaaggcatggtggccgtctccggctccctgtccgtactcctcgattctataatttgtgcactcgggcccctggcctgtctgactacccagttaccagaattaaatggctgcccgaagcaggtgctcagtaataccttggataatatcgcctatattatgccaggcctttag

SEQ ID NO: 19883 - DNA, 1806 bp, Artificial Sequence
  derived and/or modified sequence
atggcttacgatgatagtgtgaagaaagaggattgcttcgacggggaccacactttcgaagatattgggctggccgctggcaggagccaaagggaaaagaaaaggtcttacaaggacttcctgcgggaggaggaagaaattgctgctcaagtgcgtaattcttcaaaaaaaaaactaaaggattccgaactgtacttcctcgggactgatacacacaagaagaaacgcaagcatagcagtgacgactactactatggagatatctcctccctggagtcaagccagaagaagaagaagaagtctagccctcagtccaccgataccgccatggatctgcttaaggctatcacttccccgcttgccgcagggagcaagccaagtaaaaagactggtgagaagtcctccggttcaagctctcattcagagtcgaagaaggaacaccaccgtaaaaaagtaagtgggagttcaggcgagctcccattggaggatggcggaagccacaagtccaaaaagatgaagccattatatgtgaacacagagaccctgacactgcgcgaaccagatggcctcaaaatgaagctgattctcagtccaaaggagaaaggcagcagcagtgtagacgaggaatcattccagtatccgagccagcaggcgaccgtgaaaaagtcatcaaaaaaatctgcaagggatgaacagggcgctctcctgcttggtcacgagctccagagctttctgaaaaccgctagaaaaaagcataagtcttcctcggacgcacactcctctcccggacccgagggttgcgggagtgacgcatcccaatttgctgagtcacacagtgccaaccttgacctgagcgggctcgagccaatcctggtggagtccgattctagtagcggcggagaactagaggcaggtgaattggtgatcgacgattcttatagggaaataaaaaaaaagaagaaatccaagaagagcaagaagaagaaagacaaggagaagcataaagagaaacgacatagtaaaagtaaaagaagcttgggcctgtcggctgtgcccgtaggcgaagtgacggtgacctccggaccacccccttctataccgtatgccggagcagctgcccctcccttgcccctgccaggactccatactgacggtcactcggaaaagaaaaagaaaaaggaggagaaggacaaagagcgtgaacggggtgaaaagcccaagaaaaagaatatgtctgcttaccaggtattctgtaaagaatatcgcgtgactatcgtggctgaccaccctgggattgactttggcgaacttagcaagaagctcgcggaggtatggaaacaactgccagagaaggacaagctcatttggaagcagaaagcgcagtacctccaacacaaacagaataaggccgaggcaacaaccgtgaagcgcaaggcttcctcatcggaaggttcgatgaaagtcaaagcatcctccgtgggagtgctgtcaccacaaaagaaatctccccctaccacgatgcttctgcctgcttcacccgcaaaagccccagagactgagcctatagacgtcgccgcacacctgcaattgctgggtgagtcgctgtccctgatcggccaccggctacaggaaaccgaaggaatggtggccgtatccgggagtctcagcgtgctcttagactccataatttgtgcactcggaccattggcgtgccttactacccagctccctgaactgaatgggtgtccaaagcaggtcctctccaatacactagacaacatagcttacatcatgccaggtctctag

SEQ ID NO: 19884 - DNA, 1806 bp, Artificial Sequence
  derived and/or modified sequence
atggcctacgacgacagcgtgaagaaggaggactgcttcgacggcgaccacaccttcgaggacatcggcctggccgccggcagaagccagagagagaagaagagaagctacaaggacttcctgagagaggaggaggagatcgccgcccaggtgagaaacagcagcaagaagaagctgaaggacagcgagctgtacttcctgggcaccgacacccacaagaagaagagaaagcacagcagcgacgactactactacggcgacatcagcagcctggagagcagccagaagaagaagaagaagagcagcccccagagcaccgacaccgccatggacctgctgaaggccatcaccagccccctggccgccggcagcaagcccagcaagaagaccggcgagaagagcagcggcagcagcagccacagcgagagcaagaaggagcaccacagaaagaaggtgagcggcagcagcggcgagctgcccctggaggacggcggcagccacaagagcaagaagatgaagcccctgtacgtgaacaccgagaccctgaccctgagagagcccgacggcctgaagatgaagctgatcctgagccccaaggagaagggcagcagcagcgtggacgaggagagcttccagtaccccagccagcaggccaccgtgaagaagagcagcaagaagagcgccagagacgagcagggcgccctgctgctgggccacgagctgcagagcttcctgaagaccgccagaaagaagcacaagagcagcagcgacgcccacagcagccccggccccgagggctgcggcagcgacgccagccagttcgccgagagccacagcgccaacctggacctgagcggcctggagcccatcctggtggagagcgacagcagcagcggcggcgagctggaggccggcgagctggtgatcgacgacagctacagagagatcaagaagaagaagaagagcaagaagagcaagaagaagaaggacaaggagaagcacaaggagaagagacacagcaagagcaagagaagcctgggcctgagcgccgtgcccgtgggcgaggtgaccgtgaccagcggccccccccccagcatcccctacgccggcgccgccgccccccccctgcccctgcccggcctgcacaccgacggccacagcgagaagaagaagaagaaggaggagaaggacaaggagagagagagaggcgagaagcccaagaagaagaacatgagcgcctaccaggtgttctgcaaggagtacagagtgaccatcgtggccgaccaccccggcatcgacttcggcgagctgagcaagaagctggccgaggtgtggaagcagctgcccgagaaggacaagctgatctggaagcagaaggcccagtacctgcagcacaagcagaacaaggccgaggccaccaccgtgaagagaaaggccagcagcagcgagggcagcatgaaggtgaaggccagcagcgtgggcgtgctgagcccccagaagaagagcccccccaccaccatgctgctgcccgccagccccgccaaggcccccgagaccgagcccatcgacgtggccgcccacctgcagctgctgggcgagagcctgagcctgatcggccacagactgcaggagaccgagggcatggtggccgtgagcggcagcctgagcgtgctgctggacagcatcatctgcgccctgggccccctggcctgcctgaccacccagctgcccgagctgaacggctgccccaagcaggtgctgagcaacaccctggacaacatcgcctacatcatgcccggcctgtag

SEQ ID NO: 19885 - DNA, 2178 bp, Artificial Sequence
  derived and/or modified sequence
gcttttctctccttctccaagatggcggcgatcggcggcgttgaggcgggatccgggcgagccgagtgaagacctggtcctgtagacgggaaggagcctggacacagtgacacattctcaaaggccctgcaggaccaccatggcttatgatgactccgtgaagaaagaagattgttttgatggtgatcatacctttgaggacataggacttgcagctggccgaagccaacgagagaaaaaacgttcttacaaagattttttaagggaagaggaagaaattgctgctcaggtcaggaattcttccaagaagaagttgaaggatagtgaactttacttcttggggacggacacacacaagaagaagaggaagcactcctctgatgattactactatggaggacagtggttcttgttctgagtgccgataaaccagtgtgaaggaggagagaggtggagggctggtattttggaggattcagcatagaagaacagtctgcatttgtgatacaccagatatttcgtctttggaatcgtcacagaagaaaaagaaaaagtccagcccacagtctactgatacagctatggacctgttgaaagctatcacttccccactggcagcaggctccaagccctccaaaaagactggggagaaatcctctggctcttcaagccattcggagagtaaaaaggagcaccacaggaagaaagtcagtggaagcagtggggaactacccctagaggatggtggctcccacaaatcgaaaaaaatgaaacctctctatgtgaacacagagacactgacccttcgggagcctgatggtttaaaaatgaaacttattctgtcaccaaaggagaagggaagcagctctgttgatgaggagtcttttcaatatccctcccaacaagcgactgtgaaaaaatcctcaaagaaatcagctcgggatgagcagggtgctttactcctaggacatgagttacagagctttctgaaaacagcccggaaaaagcacaagtcatcctcagacgcacattcatctcctggccctgaaggctgtgggtctgacgcctcccagttcgcagagtcccacagtgctaaccttgatctttcagggcttgaacctattctggtagaatcagactcatcctctggtggggaactagaggctggggagttagtgatagatgattcttaccgagaaatcaagaagaaaaagaagtcaaagaagagcaaaaagaagaaagacaaggagaagcataaagagaagcgacactccaagtccaagagaagtttaggactttctgccgtgccagtgggagaggtcacagtgacatctggccctcctcccagcatcccatacgctggagcagcagcacctcccctgccacttcctggcctccacacagatgggcatagtgaaaaaaaaaagaaaaaagaagagaaggacaaagagagagagagaggagaaaagccaaaaaagaagaacatgtcggcctaccaggtgttctgtaaagagtatcgcgtgaccattgtggctgaccatccaggtatagattttggggaacttagtaaaaaactggctgaggtgtggaagcaattaccagaaaaagacaaactgatttggaagcaaaaagctcagtatctgcagcacaaacagaacaaagcagaagccacaactgtgaaaaggaaagcatccagctcagaaggttccatgaaagtcaaagcctcttctgtaggagtactgtcaccccagaagaagtccccacccaccaccatgctgttaccagcctcaccagccaaagcccctgagacagagcccattgatgttgctgctcatcttcagctgttgggagagtccctaagcctcattggacaccgtctgcaggaaactgagggtatggtggctgtgtctggcagtttgtcagtgcttctggattccattatctgtgcccttggccccttggcatgtctcaccacacaactacctgaattgaatggctgtcccaaacaggtcttgtcaaacacattagacaacattgcttacatcatgccgggactgtgacagcaaagaatcctgggacagaaaccttatcctacaccattgctggtttgtgtatatatgactgttgcagattccttcagtggcctctggctgtaggttttaaatttttatatctata

SEQ ID NO: 19886 - protein, 535 aa, Artificial Sequence
  derived and/or modified sequence
MGSSATEIEELENTTFKYLTGEQTEKMWQRLKGILRCLVKQLERGDVNVVDLKKNIEYAASVLEAVYIDETRRLLDTEDELSDIQTDSVPSEVRDWLASTFTRKMGMTKKKPEEKPKFRSIVHAVQAGIFVERMYRKTYHMVGLAYPAAVIVTLKDVDKWSFDVFALNEASGEHSLKFMIYELFTRYDLINRFKIPVSCLITFAEALEVGYSKYKNPYHNLIHAADVTQTVHYIMLHTGIMHWLTELEILAMVFAAAIHDYEHTGTTNNFHIQTRSDVAILYNDRSVLENHHVSAAYRLMQEEEMNILINLSKDDWRDLRNLVIEMVLSTDMSGHFQQIKNIRNSLQQPEGIDRAKTMSLILHAADISHPAKSWKLHYRWTMALMEEFFLQGDKEAELGLPFSPLCDRKSTMVAQSQIGFIDFIVEPTFSLLTDSTEKIVIPLIEEASKAETSSYVASSSTTIVGLHIADALRRSNTKGSMSDGSYSPDYSLAAVDLKSFKNNLVDIIQQNKERWKELAAQEARTSSQKCEFIHQ

SEQ ID NO: 19887 - DNA, 1608 bp, Artificial Sequence
  derived and/or modified sequence
atgggctcgagcgcgacagaaatagaagaactcgagaataccacgttcaagtatttaaccggtgagcagactgaaaagatgtggcagagattgaaaggcatcctgcgctgcctggtgaagcagctagagcgcggcgatgtgaacgtggtggacttgaaaaaaaatatcgaatatgcggcttcggtcctggaggctgtatatatcgatgaaacccgcagactcttagataccgaggacgaactgagtgacatccagacagactctgtgccatcagaagtccgcgactggttggctagcacattcaccaggaagatgggcatgaccaagaagaaacctgaggaaaagcccaaatttcgaagcatcgttcatgctgtccaagctggcatctttgtggaacgcatgtaccgcaaaacttaccacatggtcggccttgcttaccccgctgcagtgatcgtaaccctgaaagatgtggataagtggtcatttgatgtctttgcactgaacgaggcttccggcgagcactccttaaaattcatgatttatgaactgttcacccgctacgatttgatcaaccggttcaagattccggtcagctgtcttatcacctttgcagaggctttggaagtgggctatagcaagtacaagaacccctaccataacctcatccatgccgctgacgtcactcagacggtccactacatcatgctgcacactggtatcatgcactggctgaccgagctcgagatcctggctatggtgttcgcagccgcgattcacgactatgagcataccggcacaactaataacttccatattcagaccagatccgatgtggcaatcctctataatgaccgcagtgtactcgagaaccaccatgtatcggccgcatatcggctgatgcaggaagaggaaatgaatattcttatcaatctgagcaaggacgattggagagacctccgcaaccttgtgatcgagatggttttgagtactgatatgtctggacatttccagcagattaagaatatccgaaatagcctgcagcagccggagggtattgatcgcgcaaaaacgatgtctctgatactgcacgctgcagacatctctcacccagcaaagagctggaaactacattacaggtggactatggcccttatggaggagttttttctccagggcgacaaagaggccgaactgggccttcctttctcgccgctgtgtgatcgtaagagcactatggtggcacagtcacagattgggttcattgatttcatcgtggaaccaacgttttctcttctgaccgatagcactgaaaagatcgtcattccattaattgaggaggcatcaaaagcagagacgagttcgtatgtggcgtcaagttccactactatcgtggggctgcatatcgcagatgccctgcgccggtccaatactaaggggtccatgtctgacggctcctattctcccgactattctcttgccgccgttgatctgaagagttttaagaataatctggtggacatcattcaacaaaacaaggagcgatggaaggaactggccgcccaagaagcgcgtacaagctctcagaagtgcgaattcatccaccaatag

SEQ ID NO: 19888 - DNA, 1608 bp, Artificial Sequence
  derived and/or modified sequence
atggggtcttccgctaccgagatagaggagctggagaacaccacatttaaatacctgactggggagcaaaccgagaagatgtggcagaggctgaagggaatcttacgatgtctggtgaagcagctcgagcgtggggacgtcaatgtagtcgatctgaaaaagaacatcgagtacgccgctagcgtgctagaagccgtatacatcgacgagacaaggcgactgctggacaccgaagatgagctcagtgatattcagaccgattctgttccaagcgaggtcagagactggctggcctccaccttcacccgtaagatgggcatgaccaagaaaaagccagaggagaagcctaagtttcgaagtattgtccacgctgttcaggctggcatctttgtggagagaatgtatcgtaaaacttaccacatggtaggtctggcttaccccgcggccgttattgtgactctcaaagacgtggacaagtggagttttgatgtcttcgccctcaacgaggctagcggtgaacattcactaaagtttatgatttacgagctattcacaaggtacgacctgataaatagattcaagataccggtttcttgcctgattaccttcgccgaagccctggaggtaggctactctaaatacaaaaatccataccacaacttaatacacgctgccgacgtcactcagacggtacactacataatgctccacactggcatcatgcattggctgacagaattggaaatcctggctatggttttcgcagctgcgatccacgattacgagcacacagggactaccaacaactttcacatacagacgcgttccgatgtggcaatactctacaacgaccgatcagtcctggaaaaccaccacgtatccgcagcgtacagactcatgcaggaagaggagatgaacatcctaatcaatctgagcaaggacgattggcgggacctgcggaaccttgtgatcgagatggtgcttagtaccgatatgtctggccactttcagcagatcaaaaacataagaaattcactgcaacagccagaaggcatcgaccgggctaagaccatgtccctcattttacacgctgcagatatctcccatccggcaaagtcttggaaactacactatcgctggaccatggcactgatggaagaatttttcttacagggcgataaagaagcagaattgggattgcctttcagtcccctgtgtgacaggaagtcaacaatggtggcccaatcgcagattggttttatagacttcattgtagagccaacattctccctgctcaccgattctactgagaagatcgtgataccactcatcgaagaggccagcaaagcggagacaagttcctatgtcgcttcaagcagcactactattgtgggtcttcacatcgctgatgctctccggcgctcgaacacaaaaggctcaatgagcgatgggtcttatagcccagactattctctagctgccgtggacctgaaatccttcaagaataacctcgtggatatcattcaacagaacaaagagcgctggaaagagcttgcggcacaggaagctcggacttcatcacagaagtgtgagttcattcatcagtag

SEQ ID NO: 19889 - DNA, 1608 bp, Artificial Sequence
  derived and/or modified sequence
atgggcagcagcgccacagaaattgaggagctggagaacaccaccttcaagtacctgaccggggagcagacagagaagatgtggcagaggctgaagggcatcctgcgctgcctggtgaagcagctggagagaggagatgtgaatgtggtggacctgaagaagaacatcgagtatgctgcctctgtgctggaggccgtgtacattgatgagacccggcggctgctggacacagaagatgagctgagtgacatccagacagacagcgtgcccagcgaggtgcgggactggctggccagcaccttcaccaggaagatgggcatgaccaagaagaagccagaggagaagcccaagttccgcagcatcgtgcatgctgtgcaggccggcatctttgtggagaggatgtacaggaagacctaccacatggtgggcctggcctacccagctgctgtgattgtgaccctgaaggatgtggacaagtggagctttgatgtgtttgccctgaatgaggccagcggggagcacagcctgaagttcatgatctatgagctgttcaccaggtatgacctgatcaaccgcttcaagatccctgtgtcctgcctgatcacctttgctgaggccctggaggtgggctacagcaagtacaagaacccctaccacaacctgattcatgctgctgatgtgacccagacagtgcactacatcatgctgcacacaggcatcatgcactggctgacagagctggagatcctggccatggtgtttgctgctgccatccatgactatgagcacacaggcaccaccaacaacttccacatccagaccaggagtgatgtggccatcctgtacaatgacagatctgtgctggagaaccaccacgtgtctgctgcctaccgcctgatgcaggaggaggagatgaacatcctgatcaacctgagcaaggatgactggagggacctgaggaacctggtgattgagatggtgctgagcacagacatgagcggccacttccagcagatcaagaacatccggaacagcctgcagcagcctgagggcatcgaccgggccaagaccatgagcctcatcctgcacgccgctgacatcagccacccagccaagtcctggaagctgcactaccgctggaccatggccctgatggaggagttcttcctgcagggcgacaaggaggccgagctgggcctgcccttcagccccctgtgtgacaggaagagcaccatggtggcccagagccagatcggcttcatcgacttcatcgtggagcccaccttcagcctgctgacagacagcacagagaagatcgtcatccccctcatcgaggaggccagcaaggccgagaccagcagctatgtggccagcagcagcaccaccatcgtgggcctgcacatcgcagatgccctgcggcgcagcaacaccaagggctccatgtctgatggcagctacagcccagactacagcctggccgctgtggacctgaagagcttcaagaacaacctggtggacatcatccagcagaacaaggagcgctggaaggagctggccgcccaggaggcccggaccagcagccagaagtgtgagttcatccaccagtag

SEQ ID NO: 19890 - DNA, 1608 bp, Artificial Sequence
  derived and/or modified sequence
atgggcagcagcgccaccgagatcgaggagctggagaacaccacctttaagtacttgacaggcgaacagacagagaaaatgtggcaacgactcaaaggaatcctgcgctgcctggttaagcagttagaacgtggggacgtgaatgttgtagatttaaagaaaaatatcgagtacgccgctagcgttcttgaggccgtgtacatcgatgagacacgacgcctcctcgacaccgaagacgaattgtcagacatacagactgatagcgttccctccgaggtacgagactggctcgcttcaactttcactcggaaaatgggcatgaccaagaaaaaaccagaggagaaaccgaaattccgcagcatcgtccacgccgtccaggctggtatcttcgttgagaggatgtatagaaaaacttatcacatggtaggattagcctaccctgcggctgtcattgtgacgctgaaggatgtcgacaagtggtcatttgatgtattcgctctgaacgaagcgagcggcgaacacagtcttaaatttatgatatacgagctcttcacccgctacgacctgattaaccggttcaaaattcctgtgagctgcctgattacattcgctgaagctctggaggttggttattccaaatataagaacccttatcacaacctgattcacgccgccgatgtcacacagaccgtacattatatcatgctccacacaggcatcatgcattggcttactgaactcgagattctggctatggtttttgccgctgccatccacgactacgagcatacagggacgacaaacaacttccatatccaaacacgatcagacgtcgcaatcttatacaatgacaggtccgtgcttgagaatcatcacgtgagcgcagcctaccgcttgatgcaagaggaagagatgaacattctcattaatctgtccaaggacgactggcgggacctacgaaatttagtgatcgaaatggtattgagcaccgacatgagtggccactttcagcagatcaagaacattcggaattcgttgcagcagcctgagggcatcgatagagctaagactatgtccttaatcctacacgcggcagacattagccaccccgcgaagtcctggaagctccattatcgatggactatggcccttatggaggagttttttctgcagggagacaaggaggccgagctcggattgcctttcagcccactctgtgacaggaagagtacgatggtcgcacaatcacagattggcttcatagattttattgtcgagccaacattctccctgctgactgactcaaccgaaaaaattgtgatacctcttattgaagaggcctcgaaggccgagaccagcagctacgttgctagttctagcacaaccatcgtgggactgcatattgctgatgctttacgaagaagcaataccaaagggtctatgagtgatggctcatatagtccggattactccctggcagcagtcgaccttaagagcttcaaaaacaacctggtggatatcattcagcagaacaaagagcgttggaaggaactggcagcccaggaggcccggaccagctcacagaagtgtgaatttatacatcaatag

SEQ ID NO: 19891 - DNA, 1608 bp, Artificial Sequence
  derived and/or modified sequence
atgggcagcagcgccaccgagatcgaggagctggagaacaccaccttcaaatatctcactggcgaacagactgagaaaatgtggcagcgtctaaagggcattttgagatgcctggtgaagcagctcgaacgcggggacgtgaatgtcgttgatttaaaaaagaatatcgaatacgcagctagcgtgctcgaggcagtgtacatagacgaaacaaggcgactgctcgacaccgaggatgagctgtccgacatccaaacagacagcgtgcccagtgaagtccgcgattggctcgctagcacctttactaggaagatgggcatgacaaagaagaagcccgaagaaaagccgaagttcagatcgattgttcatgccgtgcaggcggggatctttgtggaacggatgtataggaaaacttatcacatggttggcttggcctatcccgcagccgtgattgtgacactgaaggacgtggacaaatggtcttttgatgtcttcgcactgaacgaggcaagtggcgagcattctctcaagtttatgatttacgagctgtttacaagatacgacctaatcaatagatttaagattcccgtcagctgcctgattacatttgccgaagcactggaggtgggatacagtaagtataagaatccatatcataaccttattcatgccgctgatgtgacccagaccgtgcactatatcatgctacacactgggataatgcactggctcacagagctggaaatcttggctatggtttttgccgccgcgattcacgattatgaacacacaggtacaacaaataatttccacatccagaccaggagtgacgtggcaattctctataacgatcggagcgtgttagaaaatcaccatgtgtcagccgcttatcggctgatgcaggaagaggaaatgaatatcttaatcaatcttagcaaggatgactggagggatttgaggaatttggtcatcgagatggtcctttcgacagatatgagtgggcactttcagcagatcaagaatataagaaattcactccagcaacctgagggtatagaccgcgccaagaccatgtccctaatcctgcatgccgccgacatctcccatccagccaagtcctggaaattgcattatcggtggacaatggccctaatggaggagtttttccttcaaggggacaaggaagccgaactgggacttcctttcagcccattgtgtgacaggaagtctaccatggttgctcagagccagatcgggttcatcgatttcatcgtagagccgacctttagtcttctgacagactccacggagaaaattgttatacctttaatcgaggaggcatctaaagcagagactagctcttatgtcgccagttcctcaacaactattgtcggccttcacatcgccgacgctctgcgtcgatcaaatactaaggggtctatgagcgacggctcgtatagtcctgactactctctcgccgctgtcgacctgaaaagcttcaagaacaacctggtggacattattcaacaaaataaggaacggtggaaagagctggctgcccaggaagctcggacaagctcccagaagtgtgaattcatccatcaatag

SEQ ID NO: 19892 - DNA, 1608 bp, Artificial Sequence
  derived and/or modified sequence
atggggtctagtgccacagagattgaagaattggaaaacaccacttttaagtatcttacaggagaacagactgaaaaaatgtggcagcgcctgaaaggaatactaagatgcttggtgaagcagctggaaagaggtgatgttaacgtcgtcgacttaaagaagaatattgaatatgcggcatctgtgctggaagcagtttatatcgatgaaacaagaagacttctggatactgaagatgagctcagtgacattcagactgactcagtcccatctgaagtccgggactggttggcttctacctttacacggaaaatggggatgacaaaaaagaaacctgaggaaaaaccaaaatttcggagcattgtgcatgctgttcaagctggaatttttgtggaaagaatgtaccgaaaaacatatcatatggttggtttggcatatccagcagctgtcatcgtaacattaaaggatgttgataaatggtctttcgatgtatttgccctaaatgaagcaagtggagagcatagtctgaagtttatgatttatgaactgtttaccagatatgatcttatcaaccgtttcaagattcctgtttcttgcctaatcacctttgcagaagctttagaagttggttacagcaagtacaaaaatccatatcacaatttgattcatgcagctgatgtcactcaaactgtgcattacataatgcttcatacaggtatcatgcactggctcactgaactggaaattttagcaatggtctttgctgctgccattcatgattatgagcatacagggacaacaaacaactttcacattcagacaaggtcagatgttgccattttgtataatgatcgctctgtccttgagaatcaccacgtgagtgcagcttatcgacttatgcaagaagaagaaatgaatatcttgataaatttatccaaagatgactggagggatcttcggaacctagtgattgaaatggttttatctacagacatgtcaggtcacttccagcaaattaaaaatataagaaacagtttgcagcagcctgaagggattgacagagccaaaaccatgtccctgattctccacgcagcagacatcagccacccagccaaatcctggaagctgcattatcggtggaccatggccctaatggaggagtttttcctgcagggagataaagaagctgaattagggcttccattttccccactttgtgatcggaagtcaaccatggtggcccagtcacaaataggtttcatcgatttcatagtagagccaacattttctcttctgacagactcaacagagaaaattgttattcctcttatagaggaagcctcaaaagccgaaacttcttcctatgtggcaagcagctcaaccaccattgtggggttacacattgctgatgcactaagacgatcaaatacaaaaggctccatgagtgatgggtcctattccccagactactcccttgcagcagtggacctgaagagtttcaagaacaacctggtggacatcattcagcagaacaaagagaggtggaaagagttagctgcacaagaagcaagaaccagttcacagaagtgtgagtttattcatcagtaa

SEQ ID NO: 19893 - DNA, 2000 bp, Artificial Sequence
  derived and/or modified sequence
gaattctgatgtgcttcagtgcacagaacagtaacagatgagctgcttttggggagagcttgagtactcagtcggagcatcatcatggggtctagtgccacagagattgaagaattggaaaacaccacttttaagtatcttacaggagaacagactgaaaaaatgtggcagcgcctgaaaggaatactaagatgcttggtgaagcagctggaaagaggtgatgttaacgtcgtcgacttaaagaagaatattgaatatgcggcatctgtgctggaagcagtttatatcgatgaaacaagaagacttctggatactgaagatgagctcagtgacattcagactgactcagtcccatctgaagtccgggactggttggcttctacctttacacggaaaatggggatgacaaaaaagaaacctgaggaaaaaccaaaatttcggagcattgtgcatgctgttcaagctggaatttttgtggaaagaatgtaccgaaaaacatatcatatggttggtttggcatatccagcagctgtcatcgtaacattaaaggatgttgataaatggtctttcgatgtatttgccctaaatgaagcaagtggagagcatagtctgaagtttatgatttatgaactgtttaccagatatgatcttatcaaccgtttcaagattcctgtttcttgcctaatcacctttgcagaagctttagaagttggttacagcaagtacaaaaatccatatcacaatttgattcatgcagctgatgtcactcaaactgtgcattacataatgcttcatacaggtatcatgcactggctcactgaactggaaattttagcaatggtctttgctgctgccattcatgattatgagcatacagggacaacaaacaactttcacattcagacaaggtcagatgttgccattttgtataatgatcgctctgtccttgagaatcaccacgtgagtgcagcttatcgacttatgcaagaagaagaaatgaatatcttgataaatttatccaaagatgactggagggatcttcggaacctagtgattgaaatggttttatctacagacatgtcaggtcacttccagcaaattaaaaatataagaaacagtttgcagcagcctgaagggattgacagagccaaaaccatgtccctgattctccacgcagcagacatcagccacccagccaaatcctggaagctgcattatcggtggaccatggccctaatggaggagtttttcctgcagggagataaagaagctgaattagggcttccattttccccactttgtgatcggaagtcaaccatggtggcccagtcacaaataggtttcatcgatttcatagtagagccaacattttctcttctgacagactcaacagagaaaattgttattcctcttatagaggaagcctcaaaagccgaaacttcttcctatgtggcaagcagctcaaccaccattgtggggttacacattgctgatgcactaagacgatcaaatacaaaaggctccatgagtgatgggtcctattccccagactactcccttgcagcagtggacctgaagagtttcaagaacaacctggtggacatcattcagcagaacaaagagaggtggaaagagttagctgcacaagaagcaagaaccagttcacagaagtgtgagtttattcatcagtaaacacctttaagtaaaacctcgtgcatggtggcagctctaatttgaccaaaagacttggagattttgattatgcttgctggaaatctaccctgtcctgtgtgagacaggaaatctatttttgcagattgctcaataagcatcatgagccacataaataacagctgtaaactccttaattcaccgggctcaactgctaccgaacagattcatctagtggctacatcagcaccttgtgctttcagatatctgtttcaatggcattttgtggcatttgtctttaccgagtgccaataaattttctttgagca

SEQ ID NO: 19894 - DNA, 1608 bp, Artificial Sequence
  derived and/or modified sequence
atgggttcgagtgctactgaaatcgaagagctggaaaataccaccttcaagtacctcaccggggagcaaactgaaaagatgtggcagaggctgaagggcatccttcgatgtttggtaaagcagctagaaaggggggatgtcaacgtcgttgacctaaaaaagaacatcgagtatgcggcttctgtcttggaggcggtatatatagacgagaccaggagattgttagacactgaggatgaactgtccgatattcagacagattccgtcccctccgaggtgcgcgactggctggcaagtacgtttacaaggaagatggggatgactaaaaaaaagccagaagagaagcctaagtttaggagtattgttcacgcagtacaggctggcatcttcgttgaaaggatgtaccggaagacctaccatatggtaggattggcctaccccgctgctgtaatcgtgacattaaaagacgtcgacaagtggtcgtttgatgtatttgccttaaatgaagctagcggagagcatagcctcaagtttatgatttatgaattgtttacccggtacgatctcattaatcgattcaaaattccggttagctgtctgattacgttcgccgaggccctggaggtcggttacagcaaatacaaaaacccctaccacaacttaattcacgcagctgacgtgacacagacagtccattatatcatgctgcataccgggattatgcactggctgactgaactggaaatcctggccatggtgttcgcagccgctatccacgactatgagcatactggtaccacgaacaatttccatattcagactaggagcgatgtcgccatcctgtacaatgacagaagtgtacttgagaatcatcatgttagtgcagcctatcgtctgatgcaagaagaggagatgaatattctgattaacctgtcaaaagatgactggcgggatctgagaaatctggtgattgagatggttctgagcactgatatgtcaggccattttcaacagatcaagaatatccggaactcactgcaacagccagagggtatcgacagggcgaagactatgtcgctaattctgcacgctgcggatatctctcacccggcaaagagttggaaactccattacaggtggacgatggctctgatggaagaattcttcttgcagggtgataaagaggccgaattaggtcttccattctctcctttgtgcgatcgaaagagtaccatggttgcccagtcccagatcggattcattgactttatagtagaaccaaccttcagcctgttgaccgattctaccgaaaaaatagtgatcccgctcattgaggaagctagcaaagctgagacttcaagctacgtggctagctcgagtaccactatcgtaggcctccacattgcggacgcgttgcgacgttcaaatacgaaagggtcaatgtccgacgggagctactcaccagactactctctagctgccgtggatctaaagagttttaagaacaacctggtggacattattcagcagaataaagaacgctggaaggagcttgctgcccaagaggccagaactagctcacagaaatgtgaattcatacatcagtag

SEQ ID NO: 19895 - DNA, 1608 bp, Artificial Sequence
  derived and/or modified sequence
atgggttcaagcgccacagagatcgaagaactcgagaacactacttttaagtacttaactggcgagcagacagagaaaatgtggcagcggctcaagggtatcttacggtgcctggtgaagcagctggaaaggggggatgtgaatgtggtcgatttgaaaaaaaacatagagtacgccgctagcgttctcgaagccgtgtatattgatgagactcggcgtttgctggacacagaggacgaactcagtgacattcaaactgattctgtgccaagcgaggtgagagattggctcgcttcaacctttacgcggaagatgggcatgacaaagaaaaagcctgaggaaaagcccaaattcagatctatagtacacgccgttcaagccggaatttttgtggaaaggatgtacaggaaaacctatcacatggtggggttggcgtatcccgctgctgtaatcgttacactcaaggatgttgataaatggagcttcgacgtgttcgcacttaatgaggcttccggggagcacagcctgaagtttatgatttacgaactgttcactagatacgacctgattaaccgctttaaaatcccagtgagttgtctgatcacttttgctgaggccctcgaagtggggtactctaagtataaaaacccatatcacaatttgatccatgccgcagacgtgacacagaccgttcactacataatgctacacaccgggattatgcactggctgaccgagctcgagattctggccatggtatttgccgcagctatccacgattacgaacacactggcacaacaaacaactttcatatccagacacggagtgacgtggccatcttgtataatgatcgctcagttctggagaaccaccacgtgtcagccgcataccgactaatgcaggaagaagagatgaacatcctcattaacttgtccaaggacgactggcgcgatcttcggaacctggtcatcgagatggtgctgagtaccgatatgtctggacatttccagcagattaaaaatatcaggaactccctccagcaacctgagggtatagatagggctaaaactatgtcactgatccttcatgcagcagacatctcccatccagcaaaatcgtggaagctgcactatcgctggacaatggctctcatggaggagtttttcctgcagggagacaaagaggccgagctcggcctgccattttctccgctgtgtgaccggaagtccacgatggtggcacagagccagattggtttcatcgactttatcgttgagccgactttctccctcctaacagattccacggagaagatcgtgatacctctgattgaggaagcaagtaaagcggagacatctagctatgtcgctagttctagcaccacaattgtcgggctacacattgcagacgcattaaggcgatctaatactaaagggagtatgtctgatggaagctactcaccagattactctctggctgctgttgatctgaagtctttcaaaaataatttagtcgacatcattcagcagaacaaagaaagatggaaggagctggccgctcaggaagctcgaacaagctcccagaagtgtgagttcatacaccagtag

SEQ ID NO: 19896 - DNA, 1608 bp, Artificial Sequence
  derived and/or modified sequence
atgggcagcagcgccaccgagatcgaggagctggagaacaccaccttcaagtacctgaccggcgagcagaccgagaagatgtggcagagactgaagggcatcctgagatgcctggtgaagcagctggagagaggcgacgtgaacgtggtggacctgaagaagaacatcgagtacgccgccagcgtgctggaggccgtgtacatcgacgagaccagaagactgctggacaccgaggacgagctgagcgacatccagaccgacagcgtgcccagcgaggtgagagactggctggccagcaccttcaccagaaagatgggcatgaccaagaagaagcccgaggagaagcccaagttcagaagcatcgtgcacgccgtgcaggccggcatcttcgtggagagaatgtacagaaagacctaccacatggtgggcctggcctaccccgccgccgtgatcgtgaccctgaaggacgtggacaagtggagcttcgacgtgttcgccctgaacgaggccagcggcgagcacagcctgaagttcatgatctacgagctgttcaccagatacgacctgatcaacagattcaagatccccgtgagctgcctgatcaccttcgccgaggccctggaggtgggctacagcaagtacaagaacccctaccacaacctgatccacgccgccgacgtgacccagaccgtgcactacatcatgctgcacaccggcatcatgcactggctgaccgagctggagatcctggccatggtgttcgccgccgccatccacgactacgagcacaccggcaccaccaacaacttccacatccagaccagaagcgacgtggccatcctgtacaacgacagaagcgtgctggagaaccaccacgtgagcgccgcctacagactgatgcaggaggaggagatgaacatcctgatcaacctgagcaaggacgactggagagacctgagaaacctggtgatcgagatggtgctgagcaccgacatgagcggccacttccagcagatcaagaacatcagaaacagcctgcagcagcccgagggcatcgacagagccaagaccatgagcctgatcctgcacgccgccgacatcagccaccccgccaagagctggaagctgcactacagatggaccatggccctgatggaggagttcttcctgcagggcgacaaggaggccgagctgggcctgcccttcagccccctgtgcgacagaaagagcaccatggtggcccagagccagatcggcttcatcgacttcatcgtggagcccaccttcagcctgctgaccgacagcaccgagaagatcgtgatccccctgatcgaggaggccagcaaggccgagaccagcagctacgtggccagcagcagcaccaccatcgtgggcctgcacatcgccgacgccctgagaagaagcaacaccaagggcagcatgagcgacggcagctacagccccgactacagcctggccgccgtggacctgaagagcttcaagaacaacctggtggacatcatccagcagaacaaggagagatggaaggagctggccgcccaggaggccagaaccagcagccagaagtgcgagttcatccaccagtag

SEQ ID NO: 19897 - protein, 306 aa, Artificial Sequence
  derived and/or modified sequence
MARVPLGRSLTLSPRLEHNGMTSAHHNFRLPGSRDSPASASQVAEIIDLEWYEKSEETHASQIELLETSSTQEPLNASEAFCPRDCMVPVVFPGPVSQEGCCQFTCELLKHIMYQRQQLPLPYEQLKHFYRKPSPQAEEMLKKKPRATTEVSSRKCQQALAELESVLSHLEDFFARTLVPRVLILLGGNALSPKEFYELDLSLLAPYSVDQSLSTAACLRRLFRAIFMADAFSELQAPPLMGTVVMAQGHRNCGEDWFRPKLNYRVPSRGHKLTVTLSCGRPSIRTTAWEDYIWFQAPVTFKGFRE

SEQ ID NO: 19898 - DNA, 921 bp, Artificial Sequence
  derived and/or modified sequence
atggccagagtgcccctgggcagaagcctgaccctgagccccagactggagcacaacggcatgaccagcgcccaccacaacttcagactgcccggcagcagagacagccccgccagcgccagccaggtggccgagatcatcgacctggagtggtacgagaagagcgaggagacccacgccagccagatcgagctgctggagaccagcagcacccaggagcccctgaacgccagcgaggccttctgccccagagactgcatggtgcccgtggtgttccccggccccgtgagccaggagggctgctgccagttcacctgcgagctgctgaagcacatcatgtaccagagacagcagctgcccctgccctacgagcagctgaagcacttctacagaaagcccagcccccaggccgaggagatgctgaagaagaagcccagagccaccaccgaggtgagcagcagaaagtgccagcaggccctggccgagctggagagcgtgctgagccacctggaggacttcttcgccagaaccctggtgcccagagtgctgatcctgctgggcggcaacgccctgagccccaaggagttctacgagctggacctgagcctgctggccccctacagcgtggaccagagcctgagcaccgccgcctgcctgagaagactgttcagagccatcttcatggccgacgccttcagcgagctgcaggccccccccctgatgggcaccgtggtgatggcccagggccacagaaactgcggcgaggactggttcagacccaagctgaactacagagtgcccagcagaggccacaagctgaccgtgaccctgagctgcggcagacccagcatcagaaccaccgcctgggaggactacatctggttccaggcccccgtgaccttcaagggcttcagagagtag

SEQ ID NO: 19899 - DNA, 921 bp, Artificial Sequence
  derived and/or modified sequence
atggctagggtgccattgggacgcagcctgaccctcagtccacgattggaacacaatggcatgacgagtgcgcatcataacttccgcctgccaggcagccgcgattcccccgcttcagcctctcaggttgcggaaatcatcgatttagaatggtacgaaaaatccgaagagactcatgccagccagatcgagctactcgagacttcaagcacccaggaacctcttaacgcgtctgaggccttttgtccacgcgattgcatggtgcccgtggtatttcccggacctgtttcgcaagagggttgctgccagttcacctgtgagctccttaagcacatcatgtatcagcgacagcaactgcctctcccctatgagcagctcaagcacttctatagaaagccaagtccacaggctgaggaaatgctcaaaaaaaaaccccgtgcgaccacggaggtgagttctaggaaatgccagcaagcccttgctgagctcgaaagcgtcctgtctcatttggaggactttttcgcaaggactctcgttccccgggtgctcatcctgttaggtggcaacgctctgtctcccaaagaattttatgagctcgatcttagcctcctggccccatatagtgtggaccagtctttatccaccgccgcctgcctgcggcgcctgttcagagcgatttttatggcagacgcctttagcgagctacaagcaccacctttgatgggaaccgttgtcatggcacaggggcacagaaactgcggcgaggactggttcagaccaaagctgaattaccgcgtgccgagtaggggacacaagcttaccgtgactctgtcttgcggcaggccctcaattcgcactaccgcttgggaggattacatttggttccaggcaccagtgacgtttaagggtttcagagagtag

SEQ ID NO: 19900 - DNA, 921 bp, Artificial Sequence
  derived and/or modified sequence
atggcccgggtgcccctgggccgcagcctgaccctgagcccccggctggagcacaacggcatgaccagcgcccaccacaacttccggctgcccggcagccgggacagccctgccagcgccagccaggtggccgagatcatcgacctggagtggtatgagaagtctgaggagacccacgccagccagatcgagctgctggagaccagcagcacccaggagcccctgaatgccagcgaggccttctgcccccgggactgcatggtgcctgtggtgtttcctggccctgtgtcccaggagggctgctgccagttcacctgtgagctgctgaagcacatcatgtaccagaggcagcagctgcccctgccctatgagcagctgaagcacttctacaggaagcccagcccccaggccgaggagatgctgaagaagaagccccgggccaccacagaggtgagcagcaggaagtgccagcaggccctggccgagctggagagcgtgctgagccacctggaggacttctttgcccggaccctggtgccccgggtgctgatcctgctgggcggcaatgccctgagccccaaggagttctatgagctggacctgagcctgctggccccctacagcgtggaccagagcctgagcacagctgcctgcctgcggcggctcttccgggccatcttcatggctgatgccttcagcgagctgcaggccccacccctgatgggcaccgtggtgatggcccagggccacaggaactgtggggaggactggttccggcccaagctgaactacagagtgcccagccggggccacaagctgactgtgaccctgagctgtggccggcccagcatccgcaccacagcctgggaggactacatctggttccaggcccctgtgaccttcaagggcttccgggagtag

SEQ ID NO: 19901 - DNA, 921 bp, Artificial Sequence
  derived and/or modified sequence
atggcccgggtgcccctgggccggagcctgaccctgagcccccggctcgaacataacgggatgacctccgcgcatcacaattttcgccttcccggctcccgagactcaccggctagtgccagccaggtggctgaaatcatagacctcgaatggtacgagaaatccgaggagacccatgcatctcagatagaactgctggaaactagctcaactcaggaaccattaaacgcctcagaagcattttgccccagagactgcatggttccagtagtcttccctggccccgttagccaggagggatgttgtcagtttacatgcgaacttctaaagcacatcatgtaccagcgtcagcagctccctttaccctacgagcaactgaagcatttctacaggaagccctcaccccaagctgaggagatgctgaaaaagaaaccgcgggctactaccgaggtgtcatcgcggaagtgccagcaggccctggccgaattggaatccgtactgtcccacctggaagatttctttgcaaggacccttgtgccacgtgtactcattctcctgggtggtaatgccctttcacctaaggagttttatgagctggacttatcactactggccccatatagcgtggaccagtctctctctaccgcggcctgtcttagacggctttttagagccatctttatggccgacgccttttcagagctgcaagctccaccacttatgggcaccgtcgttatggcccaaggtcacagaaactgcggggaggattggttcagaccaaaattgaactatcgggtcccctcccgaggtcacaagttgaccgtgactctgtcatgtgggcgccccagtatcaggaccacagcatgggaagattacatctggttccaggctcctgtcaccttcaaaggctttcgggagtag

SEQ ID NO: 19902 - DNA, 921 bp, Artificial Sequence
  derived and/or modified sequence
atggctcgtgtgccccttggcaggtcactcaccctgagtcctcgcttggagcacaacggcatgacaagcgcgcatcataactttaggctgccagggagccgggacagtccggcttctgcatctcaggtggcggagatcatcgacctggagtggtacgaaaaaagcgaagagactcatgcctcgcagatcgagctccttgagacgtccagcactcaagaacctctgaacgcatccgaggcattttgccccagggactgtatggttcctgtggtgttcccaggccctgtaagccaggaggggtgctgccagtttacatgtgagttgttgaagcacatcatgtaccagagacagcagctgcctttgccctacgagcagcttaagcacttctataggaagccttctcctcaagccgaggagatgttaaagaaaaaaccacgagctaccactgaggtgagtagccgcaagtgccagcaagcgctggccgaattggaatccgttctgtcacacctcgaagatttttttgccagaacattggttccaagagttcttatcctgctgggaggcaatgcgctgagccccaaggaattttacgagctcgatctgtccttgctggccccatactccgtggaccagagcctttctacggcagcttgtctccgacggctgtttagagctatttttatggcagatgctttctcagaattgcaggctccgccactaatgggaaccgtggttatggcccagggccatagaaattgtggtgaggactggtttagaccaaagcttaattacagagttccctctaggggccacaaacttactgttactctgtcctgtgggagaccttccatcaggacaacagcttgggaagactatatctggttccaggcccctgttacctttaaggggttccgcgagtag

SEQ ID NO: 19903 - DNA, 1517 bp, Artificial Sequence
  derived and/or modified sequence
gggggaatttagagcctcgaggcctggggtggggacgcgaggacaccagcgtagaagagcttacatcagaatcgagctttgtgggcgctccgggatttggccctttagcgcggatcctagacaacaggttttggacctcgagagctgcagaactgaggctactggtgccgccagcctgctggctccgcctctgcctcagtttcttcccctatggcccgcgtgccgctggggcggagtctcactctgtcacccaggctggagcacaatggcatgacctcagctcaccacaacttccgcctcccaggttcaagggattctcctgcctcagcctcccaagtagctgagattatagatttggagtggtatgagaagtccgaagaaactcacgcctcccagatagaactacttgagacaagctctacgcaggaacctctcaacgcttcggaggccttttgcccaagagactgcatggtaccagtggtgtttcctgggcctgtgagccaggaaggctgctgtcagtttacttgtgaacttctaaagcatatcatgtatcaacgccagcagctccctctgccctatgaacagcttaagcacttttaccgaaaaccttctccccaggcagaggagatgctgaagaagaaacctcgggccaccactgaggtgagcagcaggaaatgccaacaagccctggcagaactggagagtgtcctcagccacctggaggacttctttgcacggacactagtaccgcgagtgctgattctccttgggggcaatgccctaagccccaaggagttctatgaactcgacttgtctctgctggccccctacagcgtggaccagagcctgagcacagcagcttgtttgcgccgtctcttccgagccatattcatggctgatgcctttagcgagcttcaggctcctccactcatgggcaccgtcgtcatggcacagggacaccgcaactgtggagaagattggtttcgacccaagctcaactatcgagtgcccagccggggccataaactgactgtgaccctgtcatgtggcagaccttccatccgaaccacggcttgggaagactacatttggttccaggcaccagtgacatttaaaggcttccgcgagtgaatgagtgcttcttaatcctaaaaacacaatggctgaattatctttctccatgtggcgctgaatcacccatctggtttggagctagagttgcttcctggtgagagaggaagcaactctccttctggttgtctgcctcccctcagatttcctgataggctgatggcatgtggctgtgactgtgactgtaatcattgctgaacaacatctctttgaatcaaaggttgattttcccagagggtgctgggtcaggcatttctattaggagttggaaagcaaaaatgggtccatagacactctatggaggtgtccctttctgctctttgctgtgtcctttcagaatttttaccaggaacataatgtggatgtgacttatgaacttaaatata

SEQ ID NO: 19904 - protein, 297 aa, Artificial Sequence
  derived and/or modified sequence
MAVLFLLLFLCGTPQAADNMQAIYVALGEAVELPCPSPPTLHGDEHLSWFCSPAAGSFTTLVAQVQVGRPAPDPGKPGRESRLRLLGNYSLWLEGSKEEDAGRYWCAVLGQHHNYQNWRVYDVLVLKGSQLSARAADGSPCNVLLCSVVPSRRMDSVTWQEGKGPVRGRVQSFWGSEAALLLVCPGEGLSEPRSRRPRIIRCLMTHNKGVSFSLAASIDASPALCAPSTGWDMPWILMLLLTMGQGVVILALSIVLWRQRVRGAPGRDASIPQFKPEIQVYENIHLARLGPPAHKPR

SEQ ID NO: 19905 - protein, 382 aa, Artificial Sequence
  derived and/or modified sequence
MAVLFLLLFLCGTPQAADNMQAIYVALGEAVELPCPSPPTLHGDEHLSWFCSPAAGSFTTLVAQVQVGRPAPDPGKPGRESRLRLLGNYSLWLEGSKEEDAGRYWCAVLGQHHNYQNWRVYDVLVLKGSQLSARAADGSPCNVLLCSVVPSRRMDSVTWQEGKGPVRGRVQSFWGSEAALLLVCPGEGLSEPRSRRPRIIRCLMTHNKGVSFSLAASIDASPALCAPSTGWDMPWILMLLLTMGQGVVILALSIVLWRQRVRGAPGRGNRMRCYNCGGSPSSSCKEAVTTCGEGRPQPGLEQIKLPGNPPVTLIHQHPACVAAHHCNQVETESVGDVTYPAHRDCYLGDLCNSAVASHVAPAGILAAAATALTCLLPGLWSG

SEQ ID NO: 19906 - protein, 297 aa, Artificial Sequence [sequence omitted]

SEQ ID NO: 19907 - protein, 382 aa, Artificial Sequence
  derived and/or modified sequence
MAVLFLLLFLCGTPQAADNMQAIYVALGEAVELPCPSPPTLHGDEHLSWFCSPAAGSFTTLVAQVQVGRPAPDPGKPGRESRLRLLGNYSLWLEGSKEEDAGRYWCTVLGQHHNYQNWRVYDVLVLKGSQLSARAADGSPCNVLLCSVVPSRRMDSVTWQEGKGPVRGRVQSFWGSEAALLLVCPGEGLSEPRSRRPRIIRCLMTHNKGVSFSLAASIDASPALCAPSTGWDMPWILMLLLTMGQGVVILALSIVLWRQRVRGAPGRGNRMRCYNCGGSPSSTCKEAVTTCGEGRPQPGLEQIKLPGNPPVTLIHQHPACVAAHHCNQVETESVGDVTYPAHRDCYLGDLCNSAVASHVAPAGILAAAATALTCLLPGLWSG

SEQ ID NO: 19908 - protein, 382 aa, Artificial Sequence
  derived and/or modified sequence
MAVLFLLLFLCGTPQAADNMQAIYVALGEAVELPCPSPPTLHGDEHLSWFCSPAAGSFTTLVAQVQVGRPAPDPGKPGRESRLRLLGNYSLWLEGSKEEDAGRYWCTVLGQHHNYQNWRVYDVLVLKGSQLSARAADGSPCNVLLCSVVPSRRMDSVTWQEGKGPVRGRVQSFWGSEAALLLVCPGEGLSEPRSRRPRIIRCLMTHNKGVSFSLAASIDASPALCAPSTGWDMPWILMLLLTMGQGVVILALSIVLWRQRVRGAPGRGNRMRCYNCGGSPSSSCKEAVTTCGEGRPQPGLEQIKLPGNPPVTLIHQHPACVAAHHCNQVETESVGDVTYPAHRDCYLGDLCNSAVASHVAPAGILAAAATALTCLLPGLWSG

SEQ ID NO: 19909 - DNA, 894 bp, Artificial Sequence
  derived and/or modified sequence
atggccgtgctgttcctgctgctgttcctgtgcggcaccccccaggccgccgacaacatgcaggccatctacgtggccctgggcgaggccgtggagctgccctgccccagcccccccaccctgcacggcgacgagcacctgagctggttctgcagccccgccgccggcagcttcaccaccctggtggcccaggtgcaggtgggcagacccgcccccgaccccggcaagcccggcagagagagcagactgagactgctgggcaactacagcctgtggctggagggcagcaaggaggaggacgccggcagatactggtgcgccgtgctgggccagcaccacaactaccagaactggagagtgtacgacgtgctggtgctgaagggcagccagctgagcgccagagccgccgacggcagcccctgcaacgtgctgctgtgcagcgtggtgcccagcagaagaatggacagcgtgacctggcaggagggcaagggccccgtgagaggcagagtgcagagcttctggggcagcgaggccgccctgctgctggtgtgccccggcgagggcctgagcgagcccagaagcagaagacccagaatcatcagatgcctgatgacccacaacaagggcgtgagcttcagcctggccgccagcatcgacgccagccccgccctgtgcgcccccagcaccggctgggacatgccctggatcctgatgctgctgctgaccatgggccagggcgtggtgatcctggccctgagcatcgtgctgtggagacagagagtgagaggcgcccccggcagagacgccagcatcccccagttcaagcccgagatccaggtgtacgagaacatccacctggccagactgggcccccccgcccacaagcccagatag

SEQ ID NO: 19910 - DNA, 1149 bp, Artificial Sequence
  derived and/or modified sequence
atggccgtgctgttcctgctgctgttcctgtgcggcaccccccaggccgccgacaacatgcaggccatctacgtggccctgggcgaggccgtggagctgccctgccccagcccccccaccctgcacggcgacgagcacctgagctggttctgcagccccgccgccggcagcttcaccaccctggtggcccaggtgcaggtgggcagacccgcccccgaccccggcaagcccggcagagagagcagactgagactgctgggcaactacagcctgtggctggagggcagcaaggaggaggacgccggcagatactggtgcgccgtgctgggccagcaccacaactaccagaactggagagtgtacgacgtgctggtgctgaagggcagccagctgagcgccagagccgccgacggcagcccctgcaacgtgctgctgtgcagcgtggtgcccagcagaagaatggacagcgtgacctggcaggagggcaagggccccgtgagaggcagagtgcagagcttctggggcagcgaggccgccctgctgctggtgtgccccggcgagggcctgagcgagcccagaagcagaagacccagaatcatcagatgcctgatgacccacaacaagggcgtgagcttcagcctggccgccagcatcgacgccagccccgccctgtgcgcccccagcaccggctgggacatgccctggatcctgatgctgctgctgaccatgggccagggcgtggtgatcctggccctgagcatcgtgctgtggagacagagagtgagaggcgcccccggcagaggcaacagaatgagatgctacaactgcggcggcagccccagcagcagctgcaaggaggccgtgaccacctgcggcgagggcagaccccagcccggcctggagcagatcaagctgcccggcaacccccccgtgaccctgatccaccagcaccccgcctgcgtggccgcccaccactgcaaccaggtggagaccgagagcgtgggcgacgtgacctaccccgcccacagagactgctacctgggcgacctgtgcaacagcgccgtggccagccacgtggcccccgccggcatcctggccgccgccgccaccgccctgacctgcctgctgcccggcctgtggagcggctag

SEQ ID NO: 19911 - DNA, 894 bp, Artificial Sequence
  derived and/or modified sequence
atggcggtgctgtttcttctgttgtttctttgcggaacccctcaagccgctgataatatgcaggccatctacgtcgctctgggcgaagctgtggagctgccgtgcccaagcccacctactctgcacggcgacgagcatttgagctggttctgttcccctgctgccggttcatttacgacattggttgcccaggtacaggtgggcaggcccgctcccgatccaggaaaacctggtcgcgagagcagacttcggttactgggcaattacagcctgtggttggagggtagcaaggaggaggatgccggtagatactggtgcgccgtgttggggcagcatcacaattaccagaactggagggtatacgacgtgctcgtcttgaaggggtcccagttgagtgccagggccgccgatggaagcccctgtaatgtcctgctgtgctctgtcgtgcccagccgaaggatggacagtgtcacatggcaggagggaaagggaccggtcagaggcagagtccaatctttctggggcagcgaagccgccctgttattggtgtgccccggagagggtcttagcgagccacgaagtcgtaggcccaggattatccgttgcctcatgacccacaataaaggcgtctcattcagtcttgccgccagcattgacgcttctcctgccctctgtgcaccgagtactgggtgggatatgccctggatactgatgctgttgctcaccatgggacagggcgtcgttattttagccctctcaatcgttctgtggcgccagagagtcaggggagcacctggtcgggacgcttcaataccccaattcaagcccgaaatccaagtttacgagaacatacatctcgccaggctcgggccacccgcgcacaaacccaggtag

SEQ ID NO: 19912 - DNA, 894 bp, Artificial Sequence
  derived and/or modified sequence
atggccgtgcttttcctcttacttttcctgtgtgggacaccacaagcagcagacaacatgcaggccatctacgtcgccctcggcgaggccgtcgagttgccttgcccctcgcctcccaccttacacggagacgaacacctgtcctggttttgttcccccgccgcgggctccttcaccacccttgttgcacaggttcaagtagggcgccccgcaccagatcccggtaaaccgggaagggagtcaaggctccgtttactgggcaattacagtttgtggttagagggcagtaaggaggaggatgccggaagatattggtgtgcagtactgggtcagcatcataactaccagaactggagggtgtatgacgttctggtgctcaaggggagccagctctctgccagggcagccgatggatctccatgcaatgtcctcctttgcagcgttgtgccctcccgaaggatggattcagtgacatggcaggaaggcaaaggcccagtgagaggacgggtacagtcgttttggggaagcgaggcagctctcctgttggtgtgcccgggggaaggtctttctgagccccggtctcggaggccgagaatcattcgctgcctgatgactcataacaaaggagtgagttttagtctcgcggcatctatcgacgcatcaccagcgttgtgcgcaccctccactgggtgggatatgccatggatactgatgctccttctgactatggggcagggcgtggtcatcctggcactgtcaatagtattgtggaggcaacgggtaagaggagctccaggacgagatgcatctattccccagtttaagccagagatacaggtatatgagaatatccatcttgcccgacttggccccccagctcacaagccccggtag

SEQ ID NO: 19913 - DNA, 894 bp, Artificial Sequence
  derived and/or modified sequence
atggcggtactgtttctcctcctctttctgtgtggaaccccacaggccgctgacaatatgcaggcaatctacgtggccctgggggaggccgtggaactcccatgtccatcccctccgacattacatggggacgagcacctctcatggttctgcagccccgctgccggctcctttaccacactggtggcccaggtgcaggtgggcaggcctgctcccgacccagggaaaccaggaagggagtctcgattgcgtctcctggggaattactcgctctggctggaaggatctaaagaggaagatgcgggtaggtactggtgcgctgtactggggcaacatcacaattaccaaaattggagggtgtatgacgttctcgttctcaagggctctcagctcagtgcgagagctgctgatggtagcccatgcaatgttcttctgtgctctgtggtgccttcccggcgtatggattcagttacttggcaagagggcaagggaccagtgcgtgggcgcgttcagtcgttttggggatccgaggccgctctcttgttggtatgcccgggtgagggactctccgagccccgatctaggcgtccacggattatccgctgtctgatgacccacaacaagggagtctctttctctctggcggcatcaatcgatgcaagccccgccctgtgtgcacccagcaccggatgggacatgccgtggatcctgatgcttctgctgacgatggggcaaggggtcgtcattctggctctaagtattgtcctctggcggcagcgcgtgagaggcgctccggggcgggacgcaagtatcccgcagtttaaacccgagatccaggtgtatgaaaacatccatctcgcaagactgggacctccagcccacaaaccgcggtag

SEQ ID NO: 19914 - DNA, 894 bp, Artificial Sequence
  derived and/or modified sequence
atggcagtattgtttctgctgctgttcctgtgcggaacgccccaggccgccgataatatgcaggcaatctatgtggcattgggtgaggcggtggaacttccatgtccgtccccaccaaccctccacggtgacgagcacttgtcatggttctgcagtcctgccgccgggagcttcacgactctagtggcgcaggttcaggttggacgcccagcccccgatcctggtaaaccgggtagggagtcgcggctccggttgctgggcaactacagcctatggctggaagggagtaaggaggaggatgccgggcgctactggtgtgcggtgcttgggcaacaccataactaccagaattggagagtttacgatgtgctggtactaaaaggctctcagctctccgcacgtgcagcggatggcagcccctgcaacgtcttgctgtgttcagtggtgccttcccggagaatggattcagtcacgtggcaggaaggcaaaggccccgtgcggggtagagtccagtcattttggggaagcgaggcagccttactgctggtctgtcccggcgagggactgagtgaaccccgctcccgaagaccaaggataattcgttgcctaatgacccataataagggagtgtctttttcactggcagcctccatcgacgctagtccggcgttgtgtgctccttctaccggctgggatatgccatggatattgatgctgctgctgactatggggcagggagtggtaatcctggcgctgagtattgtgttgtggagacaacgcgttcggggtgcgcctggaagggatgcttccatccctcaatttaaacccgagatccaggtgtacgagaacattcaccttgcccggctaggtccccctgcacacaagccccgatag

SEQ ID NO: 19915 - DNA, 894 bp, Artificial Sequence
  derived and/or modified sequence
atggcagttctatttctgctcctgttcctgtgtggaactccacaagcagccgacaatatgcaggctatttacgtggccctcggagaggcagtggagttaccttgtccaagtccaccaacacttcacggagacgagcacctctcctggttctgtagcccagctgccggatcattcactactcttgtggcgcaggtgcaggtcggtagacctgcgcctgatcctggaaagcctggacgcgagtcgcggctcaggctgctaggtaactattccctgtggctcgagggcagcaaggaagaagacgctggaaggtattggtgcgcagtcctcgggcagcaccacaattaccaaaattggcgggtgtacgatgtcctcgttctcaagggatctcaactgtccgctcgcgcagctgatggctctccgtgcaacgttctgttgtgttccgttgtgccaagccgtcgcatggacagcgtcacctggcaagaagggaagggtccagttagggggagagtccagagtttttggggatcagaagccgcactgctcctggtttgccccggggaaggattgagcgagcccaggtctagaaggccaaggataattagatgcctgatgactcataacaaaggagtgagcttttctctggctgctagcattgacgcttcccccgctttatgcgccccatccaccggatgggacatgccatggatattaatgcttttgcttaccatggggcaaggagtggttatcttggccctgtccatagtcctctggcgtcagcgcgttaggggggcaccaggacgtgacgctagtattccccaatttaagcccgaaattcaggtctacgagaacattcacctggccaggctggggccgcccgcccacaaaccaagatag

SEQ ID NO: 19916 - DNA, 1149 bp, Artificial Sequence
  derived and/or modified sequence
atggccgtgctcttccttttattattcctgtgtggtacacctcaggccgccgacaacatgcaggccatctacgtggccctaggtgaggctgtggagttgccttgtccaagtccacccacacttcatggagacgagcacctcagttggttctgttcacctgcagcgggctcctttaccacattggttgctcaagtgcaagtggggcgcccagcgcctgatccagggaaacccggcagagagtcaagattgagactgctgggcaactactctctgtggctagaggggtcaaaggaagaagatgccgggaggtattggtgtgccgtcttgggacaacaccataactaccagaactggagggtctacgatgtcctcgttttgaaggggtcccagctgtccgcacgagccgcggacggctctccctgcaacgtcctgctgtgcagtgttgtcccctcaaggcgcatggactctgttacgtggcaggaaggcaaagggcctgtcaggggtagagttcagtccttttggggaagtgaagcagccctgttgctggtgtgccctggcgagggcctttccgagcccagaagcagacgtcccaggataatccggtgtcttatgacccacaacaaaggagtctcattctccctcgccgcttccattgacgcctcccccgctctctgcgccccttccaccggctgggacatgccatggatccttatgttgttgctcacaatgggacaaggagtcgtgatcctcgcactttcaatcgtgctctggaggcagcgcgtccgcggagcacccggtaggggcaacaggatgaggtgttataactgcggaggctctcctagcagctcctgcaaggaagctgtaaccacgtgcggcgaaggacgaccacagccaggactggagcagatcaagctgcctggcaatccgcccgttacactcatccaccagcatcccgcttgcgtagccgcacatcactgcaatcaagtggaaactgaatcggttggcgatgtgacttatcctgcacatcgggattgttaccttggagatctgtgtaactccgcagtggccagccatgtggccccagcaggaatcctcgccgccgccgcgaccgcgttgacctgtctcctccctgggttgtggtctgggtag

SEQ ID NO: 19917 - DNA, 1149 bp, Artificial Sequence
  derived and/or modified sequence
atggccgtcctgttcctcctgctattcttgtgtggaaccccgcaggctgctgacaatatgcaggccatctatgtcgctctcggcgaggccgtggagctgccatgcccctctccccccaccctgcatggtgatgagcacctgagctggttttgctcccctgccgcagggtccttcaccaccctagtagctcaggtgcaggttggtagacctgcaccagacccggggaaaccgggtagggagagtaggctcagactgctcggaaattattccttgtggctggaggggtcaaaagaagaggacgccggcagatactggtgtgccgtgctaggtcaacaccataattaccagaactggcgtgtgtatgacgtgcttgtgctgaaaggctcccagctctctgcaagggccgccgatgggagtccatgcaatgtcctactgtgctccgttgtacctagcagaagaatggattccgttacgtggcaagaagggaaagggccagtaagaggtcgggtacagtctttctggggctctgaagctgctttactgctagtgtgtcctggagagggtctgagcgagcctcggtcccgtcgtccaaggatcattaggtgcctgatgacacacaataagggagtttctttttcattggcagcttctatagacgcatcacccgcgctgtgtgccccgtcaacaggctgggatatgccgtggattttgatgctcctactgaccatggggcaaggtgtcgtgattctagccctgagtatagtcctttggcggcagagggttagaggggcccccggtcgcggcaatcggatgagatgctataactgcggagggtcgcccagctcctcatgtaaagaagctgtcaccacgtgcggggagggaaggccacaacctgggcttgagcaaataaagctgccaggaaatcctcccgtgacacttatccatcaacacccagcgtgcgttgcagctcatcattgtaatcaggtcgagactgaatctgtcggcgatgtgacataccccgcacacagggactgctatcttggggatttgtgtaactccgccgtcgccagtcacgtggcccctgcggggatcctggctgccgccgcaactgcgctgacctgcctgctgcctgggctttggtctgggtag

SEQ ID NO: 19918 - DNA, 1149 bp, Artificial Sequence
  derived and/or modified sequence
atggccgtattgtttctgcttctctttctctgtggaactcctcaggcagctgataatatgcaggcaatatacgtcgcactcggggaggcagtggagttgccttgcccctctccccccacgctgcacggagacgagcatctgagttggttctgctctcctgccgccggcagctttacaacattggttgctcaagtccaggttgggcgacctgcccctgaccccggcaaaccggggcgcgaatcccgactgaggcttctcggcaactatagcctgtggttggagggtagcaaggaggaagatgcaggacgatattggtgcgccgttctgggccagcaccacaattatcagaattggcgcgtctacgatgtgttagtgctgaagggttcccaactgagcgcccgagctgcagatggaagcccgtgtaacgtgctgctgtgttccgtggtacccagccggcgtatggactccgttacttggcaggaaggcaaggggcccgtgaggggccgggtgcagtctttttgggggtcagaagctgctctccttcttgtgtgtcccggcgagggcttgagcgagccacgctcccggagaccaagaataatcaggtgcctcatgacacataataagggggtgagtttttctttggcagctagtattgatgctagccctgccctatgcgctccgtccaccggctgggatatgccctggatactcatgctgttgcttactatgggacagggggtcgtaatccttgccctatcaatcgtgctctggcgtcaacgcgtacggggggcgcctggaagggggaatcgcatgcgatgttataactgtgggggctccccgagttcaagttgtaaggaggccgtgacgacatgtggcgagggccgtccacaacccggcctagagcagattaaattgccaggaaatcctcccgtgacgctgattcaccaacacccagcgtgtgtcgcagcacatcattgcaatcaggtggaaacggaatccgtgggggatgttacctatccggcccacagggactgttaccttggagacttgtgcaactcagcagttgcgtcccatgtggctcctgccggaatcctcgccgccgctgccacagccctgacttgtctactccctggactctggtctggttag

SEQ ID NO: 19919 - DNA, 920 bp, Artificial Sequence
  derived and/or modified sequence
gagaacttggcaggctctccccatggcagtcttattcctcctcctgttcctatgtggaactccccaggctgcagacaacatgcaggccatctatgtggccttgggggaggcagtagagctgccatgtccctcaccacctactctacatggggacgaacacctgtcatggttctgcagccctgcagcaggctccttcaccaccctggtagcccaagtccaagtgggcaggccagccccagaccctggaaaaccaggaagggaatccaggctcagactgctggggaactattctttgtggttggagggatccaaagaggaagatgccgggcggtactggtgcgctgtgctaggtcagcaccacaactaccagaactggagggtgtacgacgtcttggtgctcaaaggatcccagttatctgcaagggctgcagatggatccccctgcaatgtcctcctgtgctctgtggtccccagcagacgcatggactctgtgacctggcaggaagggaagggtcccgtgaggggccgtgttcagtccttctggggcagtgaggctgccctgctcttggtgtgtcctggggaggggctttctgagcccaggagccgaagaccaagaatcatccgctgcctcatgactcacaacaaaggggtcagctttagcctggcagcctccatcgatgcttctcctgccctctgtgccccttccacgggctgggacatgccttggattctgatgctgctgctcacaatgggccagggagttgtcatcctggccctcagcatcgtgctctggaggcagagggtccgtggggctccaggcagagatgcctcgattcctcagttcaaacccgaaatccaggtctatgagaacatccatttggcccgtcttggcccacctgcccacaagcccaggtgatttt

SEQ ID NO: 19920 - DNA, 1193 bp, Artificial Sequence
  derived and/or modified sequence
gggacaccaggtcttggagcaagagaacttggcaggctctccccatggcagtcttattcctcctcctgttcctatgtggaactccccaggctgcagacaacatgcaggccatctatgtggccttgggggaggcagtagagctgccatgtccctcaccacctactctacatggggacgaacacctgtcatggttctgcagccctgcagcaggctccttcaccaccctggtagcccaagtccaagtgggcaggccagccccagaccctggaaaaccaggaagggaatccaggctcagactgctggggaactattctttgtggttggagggatccaaagaggaagatgccgggcggtactggtgcgctgtgctaggtcagcaccacaactaccagaactggagggtgtacgacgtcttggtgctcaaaggatcccagttatctgcaagggctgcagatggatccccctgcaatgtcctcctgtgctctgtggtccccagcagacgcatggactctgtgacctggcaggaagggaagggtcccgtgaggggccgtgttcagtccttctggggcagtgaggctgccctgctcttggtgtgtcctggggaggggctttctgagcccaggagccgaagaccaagaatcatccgctgcctcatgactcacaacaaaggggtcagctttagcctggcagcctccatcgatgcttctcctgccctctgtgccccttccacgggctgggacatgccttggattctgatgctgctgctcacaatgggccagggagttgtcatcctggccctcagcatcgtgctctggaggcagagggtccgtggggctccaggcagaggaaaccgaatgcggtgctacaactgtggtggaagccccagcagttcttgcaaagaggccgtgaccacctgtggcgagggcagaccccagccaggcctggaacagatcaagctacctggaaaccccccagtgaccttgattcaccaacatccagcctgcgtcgcagcccatcattgcaatcaagtggagacagagtcggtgggagacgtgacttatccagcccacagggactgctacctgggagacctgtgcaacagcgccgtggcaagccatgtggcccctgcaggcattttggctgcagcagctaccgccctgacctgtctcttgccaggactgtggagcggatag

SEQ ID NO: 19921 - DNA, 894 bp, Artificial Sequence
  derived and/or modified sequence
atggctgtgctcttcctgctgctcttcctgtgtggcaccccccaggccgctgacaacatgcaggccatctacgtggccctgggggaggccgtggagctgccctgccccagcccccccaccctgcatggagatgagcacctgtcctggttctgcagccctgctgctggcagcttcaccaccctggtggcccaggtgcaggtgggccggcctgccccagaccccgggaagccaggccgggagagccggctgcggctgctgggcaactacagcctgtggctggagggcagcaaggaggaggatgctggccgctactggtgtgctgtgctgggccagcaccacaactaccagaactggagggtgtatgatgtgctggtgctgaagggcagccagctgagcgcccgggcagcagatggcagcccctgcaatgtgctgctgtgcagcgtggtgcccagcaggaggatggacagcgtgacctggcaggagggcaaaggacctgtgcggggccgggtgcagagcttctggggcagcgaggccgccctgctgctggtgtgccctggagagggcctgtctgagcccaggagcagaagaccccgcatcatccgctgcctgatgacccacaacaagggcgtgtccttcagcctggccgccagcattgatgccagccctgccctgtgtgcccccagcacaggctgggacatgccctggatcctgatgctgctgctgaccatgggccagggcgtggtgatcctggccctgagcatcgtgctgtggaggcagagggtgcggggggcccctggaagagatgccagcatcccccagttcaagccagagatccaggtgtatgagaacatccacctggcccggctgggccccccagcccacaagcccaggtag

SEQ ID NO: 19922 - DNA, 1149 bp, Artificial Sequence
  derived and/or modified sequence
atggctgtgctcttcctgctgctcttcctgtgtggcaccccccaggccgctgacaacatgcaggccatctacgtggccctgggggaggccgtggagctgccctgccccagcccccccaccctgcatggagatgagcacctgtcctggttctgcagccctgctgctggcagcttcaccaccctggtggcccaggtgcaggtgggccggcctgccccagaccccgggaagccaggccgggagagccggctgcggctgctgggcaactacagcctgtggctggagggcagcaaggaggaggatgctggccgctactggtgtgctgtgctgggccagcaccacaactaccagaactggagggtgtatgatgtgctggtgctgaagggcagccagctgagcgcccgggcagcagatggcagcccctgcaatgtgctgctgtgcagcgtggtgcccagcaggaggatggacagcgtgacctggcaggagggcaaaggacctgtgcggggccgggtgcagagcttctggggcagcgaggccgccctgctgctggtgtgccctggagagggcctgtctgagcccaggagcagaagaccccgcatcatccgctgcctgatgacccacaacaagggcgtgtccttcagcctggccgccagcattgatgccagccctgccctgtgtgcccccagcacaggctgggacatgccctggatcctgatgctgctgctgaccatgggccagggcgtggtgatcctggccctgagcatcgtgctgtggaggcagagggtgcggggggcccctggccggggcaacaggatgcgctgctacaactgtggcggcagccccagcagcagctgcaaggaggccgtgaccacctgtggggagggccggccccagcccggcctggagcagatcaagctgcccggcaacccccctgtgaccctcatccaccagcacccagcctgtgtggccgcccaccactgcaaccaggtggagacagaatctgtgggagatgtgacctacccagcccaccgggactgctacctgggggacctgtgcaacagcgctgtggccagccacgtggccccagctggcatcctggccgccgccgccacagccctgacctgcctgctgcccggcctgtggagcggctag

SEQ ID NO: 19923 - DNA, 894 bp, Artificial Sequence
  derived and/or modified sequence
atggccgtgctgttcctgctgctgttcctgtgcggcaccccccaggccgccgacaatatgcaggccatatatgtggccctgggcgaagccgtggaacttccctgtccctcccccccaacgctgcacggcgatgaacatctctcgtggttttgcagtccagccgcaggttcattcaccactctggttgcccaggtgcaggtgggccgccccgcgcccgacccagggaaaccagggcgcgaatcccgtctgaggctgctgggaaattatagtctgtggctggagggcagcaaggaagaggacgctggtaggtactggtgcgccgtcctgggacaacatcacaattaccagaactggagggtgtatgatgtgttagtcctgaaaggctcccagctctctgcgcgggcagcagatggatcaccatgtaacgtgctgttatgctctgtggtgcccagtcggcgcatggactcagttacatggcaggagggtaagggccctgtgcgcggtagagtgcagagcttctggggttctgaggccgccctgctgctcgtctgcccaggggagggtttgagcgagccaagatcccggaggccacggattattaggtgtctgatgacccataacaagggggtgtcattcagcctggccgctagtatcgacgcctcacccgcactctgtgcacctagtacaggctgggatatgccgtggattctgatgctgctgctcacaatggggcaaggagtggtcatacttgctctcagtatcgtgctctggcgccagagggtgaggggagcaccaggcagagacgcatccattcctcagttcaaacccgagatacaggtgtatgaaaatattcaccttgcacgtctgggccccccggctcacaaacccaggtag

SEQ ID NO: 19924 - DNA, 894 bp, Artificial Sequence
  derived and/or modified sequence
atggccgtgctgttcctgctgctgttcctgtgcggcaccccccaggccgctgataatatgcaggccatttacgttgccctcggagaagcagtcgaactgccctgtcccagcccacctacacttcacggggatgagcatttgtcgtggttttgttctcccgctgctgggtctttcacaaccctggtggcgcaggtgcaagttggccgccccgcccccgacccagggaaacccggccgggagagccgtttgcgcctacttggcaattatagcctttggttagaagggtctaaagaagaggatgcgggaaggtactggtgcgccgtgctgggacagcaccacaactaccagaattggcgcgtgtacgacgtgctcgtgctcaagggcagccagctgtcagctcgcgccgcagacggatcaccatgtaatgtgttgctgtgctccgtggtgccaagccgccgtatggattcagtgacctggcaggaaggcaaaggccctgtgcgcgggagggtgcagagcttctggggctcggaagccgctttgctactggtgtgccctggcgagggattgtcagagccgcgctcccggcgtccacggatcatccggtgcttaatgacgcacaataagggtgtatctttcagcttagccgcctccatcgatgctagtccagccctctgcgctccttctaccggttgggacatgccatggatccttatgctcctcctcacaatggggcagggagtcgtgattttggcgctctcaatagttctgtggcgacagcgagtacgcggggcccccggcagggacgcctccattccccagtttaagcctgagatccaagtatacgaaaatatccacctagctagactgggacctccagctcataagccgcgatag

SEQ ID NO: 19925 - DNA, 894 bp, Artificial Sequence
  derived and/or modified sequence
atggccgtgctgttcctgctgctgttcctgtgcggcaccccccaggctgcagacaacatgcaggccatctatgtggcccttggggaggccgtggagctgccatgtccatctccacctaccctccatggcgacgagcatctgagttggttctgttctcctgccgccggcagtttcactactctagtcgctcaggtgcaagtaggtaggccggccccagaccccggcaaacctggtcgcgaaagccgtctaagattactgggcaactactccctttggttagagggttcgaaggaggaggatgccggcaggtactggtgcgcagtcttgggacagcatcacaattaccagaattggagagtgtacgatgtgttggtcctgaagggctcacagctctcagccagagctgccgatggttctccatgtaatgtattgttatgctcagttgtgcctagccgcaggatggatagtgtcacctggcaggaagggaagggccctgttcgaggcagagtgcagagcttttggggaagcgaggcagccttgctcttggtttgcccaggcgagggcctcagcgaaccaagaagcagacgacctcgtattattcgatgtctgatgacgcacaacaagggggtctctttctcactagcagcctctatagacgcgagcccggcattatgcgccccttctactggctgggatatgccctggatcctgatgctgctgctgacaatggggcagggggttgtcattcttgctttgtcgattgtgttatggcggcagcgggtgcgcggtgccccaggccgtgacgcatcaattccccagtttaagcccgagattcaggtctacgagaacatccaccttgctcggctaggccccccagcacacaagccacgctag

SEQ ID NO: 19926 - DNA, 894 bp, Artificial Sequence
  derived and/or modified sequence
atggccgtgctgttcctgctgctgttcctgtgcggcaccccccaggccgctgacaatatgcaggccatttatgtcgctcttggagaagctgtggaacttccctgcccttcacctccaactctgcatggggatgaacacttgtcttggttctgctccccggccgccggcagttttaccacgctcgtggctcaggtccaggtaggccggccagcccctgatccagggaaacccggtagagagagccgcctccgcctcttggggaactactccctgtggctggaagggtccaaggaggaggacgccggacgctactggtgtgcagtgctcgggcaacatcacaactaccagaattggagagtgtacgacgtcctcgtattaaagggatcacaacttagtgctcgcgccgcagatggttcgccgtgtaacgtgttgctttgttcagtagtgcccagccggagaatggattccgtaacttggcaagaaggcaaaggacctgtacgcggccgtgttcagtctttttggggatctgaagccgcgctgctgcttgtgtgcccaggagagggcttgagcgagccacgatctcgccgtccacggatcatccgatgcctgatgacgcacaacaagggcgtatcattctccctggctgcaagtattgacgcctctcccgcattgtgtgcaccatcaactggctgggacatgccctggatcctcatgttactgctgactatgggacaaggagtagtgatcctggccctgagcatcgtgctgtggcgccaaagggtgaggggcgccccgggcagggacgctagtattccacaattcaagcctgaaattcaggtgtatgagaacatccacctcgccaggttggggcctcccgctcacaaaccacgatag

SEQ ID NO: 19927 - DNA, 894 bp, Artificial Sequence
  derived and/or modified sequence
atggccgtgctgttcctgctgctgttcctgtgcggcaccccccaggctgccgacaatatgcaggctatttacgtcgcacttggcgaggctgtcgagctaccatgtccttcaccacctaccctccacggcgacgagcacctttcttggttttgctctcccgcggcaggaagcttcacaaccttagtagcccaggtccaagttggacgccccgccccagacccagggaaacccgggcgcgagagtaggctccggctgttgggcaattacagcctatggctcgagggaagtaaggaggaggatgcaggtaggtactggtgcgctgtgttggggcagcaccacaactatcaaaactggcgggtgtacgatgttctggtcttaaaagggtctcagctgtcagcccgtgccgctgatggatcaccatgcaatgtccttctctgcagtgtagtacctagcagacgcatggactccgtgacatggcaagaaggaaagggtcccgtacgtggtcgtgtgcaaagcttttggggatcagaagctgccctccttctggtgtgcccaggcgagggcctgagtgagcccagaagtagacgcccccgcatcatacggtgcttaatgacacataataaaggcgttagcttcagcctcgctgcctccatagatgcatcacctgccctgtgtgcccctagcaccgggtgggacatgccctggatcttgatgctccttttgacaatggggcagggagtcgtaatcctagcactcagcatagtcttatggaggcaacgggtccgcggcgcgccggggagggatgcctcaatcccccagtttaaacccgagatccaggtttacgagaatatccacttagcacggttgggacctccagctcacaaaccacgatag

SEQ ID NO: 19928 - DNA, 1149 bp, Artificial Sequence
  derived and/or modified sequence
atggccgtgctgttcctgctgctgttcctgtgcggcaccccccaggccgcggacaacatgcaggcaatctatgtggcccttggggaggccgtggagctgccgtgtccttccccccctaccctgcatggcgacgagcacctcagttggttttgcagtcccgctgccggatcttttactactttagtggcccaggtgcaggtgggccgcccagcccccgaccctggcaaacctggccgcgagtctagactgcgtttgttgggtaactactcactctggttggaagggtcaaaagaagaggacgccgggcggtactggtgcgcggttttgggtcagcatcataactatcagaattggagggtgtacgatgttctggtgttgaagggctctcagctaagcgctagagcagcggacggctctccctgcaacgtcctactctgctccgtcgttccaagcagacgtatggattccgttacctggcaggagggaaaaggacccgtcagaggtcgcgtgcagagtttttggggatctgaggccgcgctgctcctggtgtgcccgggtgagggcctctctgagccacgctcacggaggccaaggatcattcgctgcttgatgacacacaataagggagtgagtttttcacttgccgcctcgatagatgctagccccgcactgtgcgccccatcgaccggctgggacatgccatggatacttatgctcctgctgactatgggccaaggagtagtcatattagccctttcaatcgtcttgtggcgtcagagggttcgcggggctcctgggcgaggaaataggatgcgctgttacaattgtgggggcagtccaagctcctcctgtaaggaggctgtcactacctgtggcgagggacggccacaaccaggccttgagcagattaagctgcccggaaacccaccagttactctcatccatcaacaccctgcttgcgtggccgctcaccactgcaatcaggtggagaccgagtccgtgggggatgtgacataccccgcacatcgtgactgttatcttggcgacctgtgtaacagtgctgtcgcttcccatgttgcgcccgccggcatactggcagccgcagccaccgccctgacttgtcttcttcctgggctctggtcgggctag

SEQ ID NO: 19929 - DNA, 1149 bp, Artificial Sequence
  derived and/or modified sequence
atggccgtgctgttcctgctgctgttcctgtgcggcaccccccaggcggcagacaacatgcaggctatctacgtggcactcggagaggcggttgagttaccctgtccatctccaccaactctgcacggcgacgaacacctgagctggttttgtagccctgccgcaggcagttttactaccctcgtcgcccaggtgcaggtaggacgccccgcacccgacccaggaaagcccggcagagagagccggctccggttgctaggcaattattccctttggttggagggcagcaaagaggaagatgcgggccggtactggtgtgcagttctgggccaacatcataactaccagaactggcgagtttatgatgtgctggtgctcaagggtagccagctttcggctagagcagctgatggctccccttgcaatgtcctcctgtgctctgtcgttccatcacggagaatggattccgtgacttggcaggaaggcaagggacctgttagaggcagggtccagtcattttggggaagtgaagctgcgctcctgctcgtctgtcctggggagggcttgtctgagccgcgctctcggagacccagaattataaggtgtctaatgacccacaataagggcgtgagttttagccttgcagccagcattgatgcctctccagccctctgcgctccttctacaggctgggacatgccatggatattgatgctgctactgaccatgggccagggcgtggtgattctagccctgagcattgttctgtggcgccaacgagtgagaggagctcctggacgagggaacagaatgaggtgttacaactgcgggggatctccatcttccagctgcaaggaggcggtgaccacctgtggagaaggacgccctcagcccggactggaacagattaagctcccaggcaatcccccagtgacgctgatccatcaacacccggcatgtgtggccgctcaccactgcaaccaggttgaaacagaaagtgtgggggacgtgacataccctgcacatagggactgttatttgggtgatttgtgcaattccgctgtcgccagccacgtggccccagctggaatcctggcagcggctgccaccgctcttacatgtttgctcccgggtctatggagcggttag

SEQ ID NO: 19930 - DNA, 1149 bp, Artificial Sequence
  derived and/or modified sequence
atggccgtgctgttcctgctgctgttcctgtgcggcaccccccaggcggccgacaacatgcaggctatctacgttgcccttggcgaagccgtggaattgccctgtccctctcctcctactttgcatggagatgaacatctctcctggttttgttcccctgcagcaggctctttcacaactttggttgcccaagtgcaggtgggacgaccagctcctgacccaggtaaaccgggccgtgaatcccgccttcggctcctcgggaactatagcctgtggctggaagggagcaaggaggaggacgctggaaggtattggtgtgctgtgctgggccagcaccacaattatcagaattggagagtctacgacgtgctcgtgctgaaggggtctcagttatccgctcgtgccgctgatggaagtccttgcaacgtactcctgtgctccgtcgtcccaagtagaaggatggatagcgtgacctggcaggaaggcaagggacctgtccggggcagggtacagtcgttttggggctccgaagccgctcttttgcttgtgtgtcctggagagggtctgagtgaaccccgttcgaggagaccacgtattatcagatgcctgatgacgcacaataaaggggtctcttttagtctggccgcatcaatcgacgcaagccctgccctgtgtgcaccttccaccggctgggacatgccttggatcctaatgcttttactgacgatgggccagggcgttgttatcctggcattgagcatcgtgttgtggcggcagcgcgtgagaggtgcccctggcagaggcaaccgcatgaggtgttataactgcggggggagcccatcttcatcttgcaaggaggccgttaccacctgcggggaggggagaccacaaccgggtttggagcagatcaaactgcctggcaacccccctgtaaccctcattcatcagcaccccgcttgcgtagcagcacatcactgtaaccaagtggaaactgagagtgtgggcgatgtgacctacccagcacaccgtgactgctacctgggtgatttgtgtaattcagcggtggcaagccatgttgcgccggcaggcattctggcagctgcagccactgccctcacctgtctgcttccaggcctgtggtccggatag

SEQ ID NO: 19931 - DNA, 894 bp, Artificial Sequence
  derived and/or modified sequence
atggccgtactcttcctgctcctattcttatgtggcaccccccaggcagccgataacatgcaagcaatttatgtggccctgggagaggccgtcgaactgccatgcccttcccctcccacactccatggagacgagcacctgtcatggttttgtagccccgcagctggttccttcacaacgcttgtcgctcaggtgcaggtcgggaggcccgcacccgaccccggaaagcctggacgggagtctaggctgcgactcttgggcaattacagtttatggctcgaaggcagtaaggaggaagatgccggtcggtattggtgtgccgtgttagggcaacaccacaactaccagaattggcgcgtgtacgatgtgctggtcttgaaaggttcccaactaagcgctagagcagcagacggcagcccatgcaacgtgttactttgctctgtagtcccatccaggcggatggattcagtgacctggcaggaggggaagggaccggtgcgagggagagtgcagagcttctggggcagcgaggccgctctgctgctggtctgtcccggagagggcctgagtgaaccacgtagtcggagacccagaattattcggtgtctgatgacgcacaacaaaggggtttcctttagcttggcagcctctatcgacgcttctccagctctgtgtgctcctagcacaggctgggacatgccctggattctgatgttgctccttactatgggccaaggggtagttatcctcgccttatcaattgtcctttggcgacaaagggtgcgcggtgcccctggccgagatgcttcaattccccaattcaaacctgagattcaggtgtatgagaacatccacttggcccgattagggccaccggcacataagcctcgatag

SEQ ID NO: 19932 - DNA, 894 bp, Artificial Sequence
  derived and/or modified sequence
atggccgtgttgttcttgctcctgttcctgtgcggtaccccccaagcagccgataacatgcaggccatctacgtggccctgggagaggccgtggaactgccttgcccatcaccccctactttacatggtgacgagcacctatcctggttctgtagcccagctgccggttcattcaccaccctggttgcccaggtgcaggtgggaagacccgctccggaccccggaaaacctgggcgtgagagcaggcttaggcttttagggaattactcgctctggctggagggatccaaagaagaagacgcagggcgttactggtgtgcagtactcgggcagcaccataattaccagaattggagggtatatgacgtactggtgctgaagggatcccagcttagcgcgagggcagctgatggttccccttgcaacgtactcctgtgcagcgtggtaccttctcgcagaatggattccgtcacttggcaagaggggaaagggccagtgcggggtagggttcagtccttctggggctcagaggcggctctgcttctggtatgccctggagaagggttgagcgagccgagatctcgccgtccaagaattatcaggtgcctgatgacacacaataaaggtgttagcttcagcttggcagcctctatagacgcctcaccggctctgtgtgccccttcaaccggctgggacatgccctggatcctcatgttactgctgacaatgggccagggcgttgtgatcctggccctgtccattgtgctgtggcgccagagggtcaggggcgctcccggaagggatgcttcgattcctcagtttaaacccgagattcaggtctacgagaatatacacctagctaggctgggccctcccgcacataagcctcgttag

SEQ ID NO: 19933 - DNA, 894 bp, Artificial Sequence
  derived and/or modified sequence
atggccgtcctcttcttgttgttgttcctctgtggcaccccacaagccgcagataacatgcaggctatatacgttgccctgggagaggcggttgaactgccatgcccaagtccccctaccctccatggtgatgagcacctgtcttggttctgcagtccagccgctggcagctttaccaccttagttgctcaggtgcaggtcggacgaccagcgcctgaccccggtaagccaggcagagagagcagactccggcttctgggaaattattcgctttggttagaaggtagcaaagaggaggatgcagggaggtattggtgtgcagtccttggccagcaccacaactaccagaattggcgtgtctacgatgtgctcgtgctaaagggctctcaactgagtgcacgcgcagctgacggatcaccctgtaatgttctgttgtgtagcgtcgtcccttctagacgtatggattccgtcacctggcaggagggaaaaggccctgtcagaggcagggtgcagtcattttggggctccgaggcggcactgctgctggtctgtcccggagaaggacttagcgaaccaaggtcacgcagaccaaggattatccgctgcctgatgacccacaacaaaggtgtgagcttctcactggcagcgtccattgatgccagcccagcactttgtgccccatctaccggatgggacatgccctggatccttatgctgttgttgacaatgggacagggggtcgtcattctggcgctgagtatagtcttgtggcgtcagcgtgtgcgaggcgctcccggtagggatgcctctataccgcagtttaaaccagagatccaggtgtacgaaaatatccatctggccagattgggcccaccggcacacaagcccagatag

SEQ ID NO: 19934 - DNA, 894 bp, Artificial Sequence
  derived and/or modified sequence
atggctgtgctgttcctcttgctattcctctgcgggaccccacaggcggcagataacatgcaggctatttacgtggcgctaggagaagctgtggaattgccgtgtcccagtccccctaccctccatggcgacgagcacctttcctggttttgttcacctgcagccggttccttcaccaccttggtggcacaggtgcaggtgggacgtccagcgcctgaccccggaaaacccggtagggagagcagactgcgccttttaggtaactactccctctggctggaaggcagcaaggaagaggatgctggcaggtattggtgtgctgttttggggcaacaccataattatcagaattggagagtgtacgacgtcctcgtgctcaaaggtagtcaactgtccgccagagccgctgacggctcaccttgcaacgttctactgtgttctgtggtcccgtcaagaagaatggacagtgtgacttggcaggaaggcaaaggtcctgtccgtgggagggtacagagtttctggggttctgaggctgcactgctgctggtttgtccaggcgaaggcttatccgaaccacggagtcggcgaccaaggatcattagatgcctgatgacacataacaaaggtgtaagcttctcactggccgcatccatcgatgctagccccgcactgtgtgcgccttccactgggtgggacatgccatggatacttatgttactcttaaccatgggtcagggggtagttatcctggctctcagcatcgtgctgtggcggcagcgagtgcgaggcgctcctgggagagacgccagtatcccacagttcaagcctgaaatccaggtgtacgagaacatccatttagcacggctcgggccaccagctcacaaaccacggtag

SEQ ID NO: 19935 - DNA, 894 bp, Artificial Sequence
  derived and/or modified sequence
atggccgtgctgttccttctgcttttcttgtgtggtacccctcaagcggcagacaatatgcaagccatttacgtcgctctaggtgaggccgtggaactgccctgtccatcccccccaacactgcacggtgacgagcacctgagctggttttgcagccccgctgctggaagcttcactaccctagtggctcaagttcaggtggggaggcccgctccagaccccggtaagccaggtcgagagtcccgcttgagactactggggaactactctttgtggttagagggctctaaggaggaggatgccggaagatactggtgcgcagtcctgggccaacatcataactaccagaactggagggtttacgatgtcctcgtgcttaagggttcacaactgagcgccagggcggcagatgggtccccttgtaatgttctgctctgtagcgtggtccccagtcggagaatggactcagtcacttggcaggaaggtaagggccctgtgcggggtagagtgcagagtttctggggaagcgaggccgctctgctgctggtgtgtccaggcgagggcctgtctgaaccgagatcccgcaggccgcgaatcataaggtgtctgatgacacataataagggagtctccttttctctcgccgcaagcatagatgccagcccggcactgtgtgcgccaagtacaggatgggatatgccttggatattgatgctgttattaacaatgggacagggagtggtgatcctcgctctttcgattgtgttgtggcgtcaacgtgtcagaggcgcacccggtcgggacgccagtattccacagttcaagcccgaaattcaggtgtatgagaacattcacctggcccgtttagggcctccagcccacaagccgaggtag

SEQ ID NO: 19936 - DNA, 1149 bp, Artificial Sequence
  derived and/or modified sequence
atggccgtcctgttcctgctactgtttctatgtggtactccccaggctgcagacaacatgcaggcaatctatgtcgccctgggtgaggccgtcgagttgccctgcccatctccaccaacactgcacggagatgaacatctcagttggttttgctcccctgcagcaggctcattcacgacactggtcgctcaagttcaagtggggagaccggcacctgaccccggtaaaccgggacgcgaatctcgcctgcggttattaggaaattacagcctctggttggagggctccaaggaagaggacgccggtaggtattggtgcgcagtgctggggcagcaccacaattatcagaactggcgcgtgtacgacgtcctggtgcttaaggggagccagctgagcgcaagggcagcagacggcagcccgtgcaacgtgctgctgtgcagcgtcgtaccatcgcgacggatggacagcgttacctggcaggagggaaagggccctgtgcgtggccgagtccagtctttctggggatcggaggccgcactcctccttgtctgccccggtgagggactcagcgaaccgaggagtcggaggcctcgaattatcaggtgtttaatgacacacaataaaggggttagcttcagcctcgcagccagtatcgatgcctctcctgccctgtgtgccccttcaacaggctgggacatgccctggatccttatgctgctgctcaccatgggacaaggtgtcgtgattctggcattatccatagtcctctggcggcagagagtccgtggggctccaggtcgcggaaatcgcatgaggtgctataactgtggagggagccccagcagcagctgcaaggaggccgtgacgacgtgtggagaagggagaccccagcctggactcgagcagataaaacttcctggaaacccgcctgtaaccctgattcaccaacatcctgcctgtgtcgcagctcaccattgcaaccaggtggagaccgaaagcgtcggagacgtcacataccccgctcatcgtgactgttatctgggcgatttatgcaactccgcagtcgccagtcatgttgcacccgctggtattttggcagccgcagccacagcgctaacctgcctcctccctggcctgtggtctggctag

SEQ ID NO: 19937 - DNA, 1149 bp, Artificial Sequence
  derived and/or modified sequence
atggccgtactcttcctgctgttgttcctctgcggcacacctcaggctgccgacaatatgcaagcaatatatgtggccctcggggaggcagtggaactgccctgtcctagtcctccgaccttgcacggtgacgaacatctgagctggttttgctctcctgctgccggatcctttaccacgctggtggcgcaggtccaggtggggagacccgctcccgatcccggtaagccaggcagggagtccaggcttagactcttggggaactacagcctgtggctggaaggaagtaaagaagaagacgccggacggtactggtgcgccgtgttaggccagcaccataactaccagaattggagagtgtatgacgtcttggtgctgaaaggttcccaattatccgccagagcagccgatggaagcccctgtaatgtgctgctgtgtagcgtcgtgccttcccgaaggatggattccgtcacatggcaggagggtaagggccctgtaagggggagggtgcagagtttttgggggtcagaagcagctctgctcctcgtttgccctggcgagggcctgtcagaacccaggtcaaggagaccacggatcattcgctgtctcatgactcataataagggagttagcttttcactcgccgcttccatcgatgctagtcccgcactttgtgctcctagcacaggctgggatatgccatggatcctaatgctcttgctaacgatggggcagggcgtagttatccttgccctgtcaatcgtcctgtggcgccagagagtgcggggagcccctggacgaggcaacagaatgcgttgttataactgcggtgggagcccaagcagtagctgcaaagaagcagtgaccacatgcggagagggcagacctcagcccggactcgagcaaattaaactgcctggcaacccgcctgtaacactgatccatcaacatcctgcctgtgtagccgctcaccactgcaatcaggtagagactgagagtgtgggtgatgtgacctatccagcccatcgtgattgctacctgggagatttatgcaacagcgcagtagcctcgcacgtagctccagctggtattctagcagctgccgcaacagctctgacctgtttgctcccaggactttggtcgggctag

SEQ ID NO: 19938 - DNA, 1149 bp, Artificial Sequence
  derived and/or modified sequence
atggcggttctctttttgcttctgtttctatgcggcacgcctcaggcagcagataacatgcaggccatatatgtggcccttggggaggccgttgagcttccctgccctagccccccaacgctgcacggagacgaacacctgtcttggttttgcagccctgcggctggaagttttactaccctcgtcgcgcaagtgcaggtgggtcggcctgccccagatcctggtaaaccaggtcgggagtctagactccgtctcctggggaattactctctgtggctggaaggatcaaaagaggaggatgcaggaaggtattggtgcgctgtgctgggacaacatcacaactaccagaactggcgagtctatgatgttctggttcttaaaggatctcaattgtccgcacgagcagcggacgggtctccgtgtaacgtccttctatgctcagtcgtccccagtaggcgcatggatagtgtcacttggcaggagggaaagggtcctgttcgcggtcgagtgcaatctttttgggggtccgaagccgctttactgctggtatgtccaggagagggtttgtctgagccaagatctaggagaccgaggatcatccgttgtttaatgacccacaataaaggggtttccttctcccttgccgcttccatcgacgctagccccgcactgtgcgcccctagcactggctgggacatgccttggattctaatgctgttgttgacgatggggcaaggggtcgtcatccttgctctgtcgatcgtgctctggcgacagagagtgcggggagctcccggtcgaggaaaccgcatgcgatgctacaactgcgggggttctcctagctcatcctgtaaggaagctgtgaccacgtgcggagagggacgcccacagccaggattagagcagatcaagctacccggaaacccccctgtaaccctgatccatcaacatcctgcctgcgttgccgcacaccactgcaaccaggtggagactgaaagcgttggtgatgtgacttatcccgcacatcgcgactgttacctcggggacctgtgtaacagcgccgtcgcaagtcacgtcgcccctgctgggatcttagcagccgcagcaaccgcactgacctgtctgctgccagggctttggagtgggtag

SEQ ID NO: 19939 - DNA, 894 bp, Artificial Sequence
  derived and/or modified sequence
atggccgtgctgttcctgctgctgttcctgtgcggcaccccccaggccgccgacaacatgcaggccatctacgtggccctgggcgaggccgtggagctgccctgccccagcccccccaccctgcacggcgacgagcacctgagctggttctgcagccccgccgccggcagcttcaccaccctggtggcccaggtgcaggtgggcagacccgcccccgaccccggcaagcccggcagagagagcagactgagactgctgggcaactacagcctgtggctggagggcagcaaggaggaggacgccggcagatactggtgcaccgtgctgggccagcaccacaactaccagaactggagagtgtacgacgtgctggtgctgaagggcagccagctgagcgccagagccgccgacggcagcccctgcaacgtgctgctgtgcagcgtggtgcccagcagaagaatggacagcgtgacctggcaggagggcaagggccccgtgagaggcagagtgcagagcttctggggcagcgaggccgccctgctgctggtgtgccccggcgagggcctgagcgagcccagaagcagaagacccagaatcatcagatgcctgatgacccacaacaagggcgtgagcttcagcctggccgccagcatcgacgccagccccgccctgtgcgcccccagcaccggctgggacatgccctggatcctgatgctgctgctgaccatgggccagggcgtggtgatcctggccctgagcatcgtgctgtggagacagagagtgagaggcgcccccggcagagacgccagcatcccccagttcaagcccgagatccaggtgtacgagaacatccacctggccagactgggcccccccgcccacaagcccagatag

SEQ ID NO: 19940 - DNA, 1149 bp, Artificial Sequence
  derived and/or modified sequence
atggccgtgctgttcctgctgctgttcctgtgcggcaccccccaggccgccgacaacatgcaggccatctacgtggccctgggcgaggccgtggagctgccctgccccagcccccccaccctgcacggcgacgagcacctgagctggttctgcagccccgccgccggcagcttcaccaccctggtggcccaggtgcaggtgggcagacccgcccccgaccccggcaagcccggcagagagagcagactgagactgctgggcaactacagcctgtggctggagggcagcaaggaggaggacgccggcagatactggtgcaccgtgctgggccagcaccacaactaccagaactggagagtgtacgacgtgctggtgctgaagggcagccagctgagcgccagagccgccgacggcagcccctgcaacgtgctgctgtgcagcgtggtgcccagcagaagaatggacagcgtgacctggcaggagggcaagggccccgtgagaggcagagtgcagagcttctggggcagcgaggccgccctgctgctggtgtgccccggcgagggcctgagcgagcccagaagcagaagacccagaatcatcagatgcctgatgacccacaacaagggcgtgagcttcagcctggccgccagcatcgacgccagccccgccctgtgcgcccccagcaccggctgggacatgccctggatcctgatgctgctgctgaccatgggccagggcgtggtgatcctggccctgagcatcgtgctgtggagacagagagtgagaggcgcccccggcagaggcaacagaatgagatgctacaactgcggcggcagccccagcagcacctgcaaggaggccgtgaccacctgcggcgagggcagaccccagcccggcctggagcagatcaagctgcccggcaacccccccgtgaccctgatccaccagcaccccgcctgcgtggccgcccaccactgcaaccaggtggagaccgagagcgtgggcgacgtgacctaccccgcccacagagactgctacctgggcgacctgtgcaacagcgccgtggccagccacgtggcccccgccggcatcctggccgccgccgccaccgccctgacctgcctgctgcccggcctgtggagcggctag

SEQ ID NO: 19941 - DNA, 894 bp, Artificial Sequence
  derived and/or modified sequence
atggccgtgctgtttctgctcctgttcttgtgtggtactccccaggcggctgacaatatgcaggccatatatgtagctttgggtgaagcagtggaattgccctgcccatctccacctacacttcatggcgacgagcatttatcctggttctgctccccggccgcaggatcgtttacaacgttagtagcacaggtacaggtgggccgccccgctcctgaccctggtaagcctgggcgagagtcacggctgaggctacttggaaactactccttatggctcgaggggagcaaggaggaagacgctggcaggtactggtgtacggtgttgggacagcaccacaactatcagaattggagggtctatgatgtattggtcctgaagggttctcagctgtccgctcgggccgcggatgggtcaccttgcaatgtattgctgtgtagcgtcgtgccttcaagacgcatggactcagtgacctggcaggagggcaaaggacccgtgagaggcagagtgcaaagcttctggggctctgaagcggccctgctgctggtctgcccaggagaaggactgtcggaacccagatccagaagacccaggattattcgttgccttatgacccacaataaaggtgtgtcctttagtttggctgccagcatagatgcctcccctgccctttgcgccccatctacgggctgggacatgccttggatcctaatgctgttgctcaccatgggccagggcgtcgtgattttggcccttagcattgtcttgtggcgacaacgagtgcgcggcgcacccggccgggatgccagtattcctcagttcaagcctgaaatacaagtttacgagaacatacacttggcacggttggggccccctgcacataaaccacgatag

SEQ ID NO: 19942 - DNA, 894 bp, Artificial Sequence
  derived and/or modified sequence
atggcagtgctgtttttgctgctgtttctctgcggcacaccgcaggcagcagacaacatgcaggctatctatgtggccttgggcgaagcggtggagctgccctgccccagtcctccaacactacacggagacgagcatttgtcatggttttgctcgcctgccgcgggcagcttcacaacactggtggcacaggtgcaggtggggcgccccgcgcccgaccctggcaaaccaggaagggagtctcggctgcgcctgcttggaaactatagtctgtggctggagggaagcaaagaggaggacgcgggaagatattggtgtactgtactaggccagcaccataattaccaaaactggagagtgtatgacgtactcgtcttaaagggctcacagctctccgctagagccgctgacgggagcccttgtaacgtgctgctgtgctctgttgtccctagccggcggatggacagtgtgacatggcaggagggcaaggggcctgtcagaggccgtgtgcaatccttttggggatcagaggccgcactgctgctggtctgccccggggaggggttaagtgaacccagaagtaggaggcctcggatcataagatgtttaatgacgcacaacaagggcgtgtcattcagtctcgctgcttctatcgatgcgagtccagctctgtgcgccccctccaccggatgggacatgccttggatcttgatgttactgttgacaatgggacaaggtgtggttattctggctctctcgatcgtactgtggcggcaacgggttaggggcgctcccggaagagatgcgagcattccgcagttcaagccggagatccaagtctatgagaatattcatttagctcggctggggcctcctgcccacaagcccagatag

SEQ ID NO: 19943 - DNA, 1149 bp, Artificial Sequence
  derived and/or modified sequence
atggcagtgttgtttctgctcttgttcctctgcggcacccctcaggcagccgataacatgcaggcaatttacgtggcactcggcgaagccgtggagctgccttgtccttcccctcccactttgcacggtgatgaacacctgagttggttctgtagtcccgccgccggctccttcacgactctcgtggcccaggttcaggtgggccggccagcccctgatcctggaaaacccggtcgtgaaagcagactgcgcctgctcggcaattatagtctgtggttggaaggctccaaagaggaagatgcgggtcggtactggtgtacagtcctgggccaacatcacaactaccaaaactggcgggtctacgatgtgctcgttctgaagggatcccagctttccgctagagctgcagacggaagcccttgtaatgttcttctttgctcagtcgttcccagtcgccgtatggatagtgttacatggcaggagggcaagggccctgtgagaggaagagtccagtcattctgggggtctgaagcggccctgctcctggtctgcccaggagaggggctatctgaaccccggtctcgacgtccccggattatccgatgtctaatgacacacaacaaaggtgtgagcttcagcttggcagcgagcatagatgcttctcccgccttatgcgccccctcgaccgggtgggacatgccctggatccttatgctgcttttaacgatgggccagggagtcgtcattctcgccctcagcattgtcctgtggaggcagcgggtccggggggcccctggaagaggaaatcgaatgaggtgctacaactgcggtggtagccccagctcaacttgtaaagaagcagtgacgacgtgcggtgagggccggcctcagccaggcctcgagcagattaaattacctggtaatccccctgtgactctaatacaccagcacccagcctgcgtcgctgcgcaccactgtaaccaagttgagacagagtctgtgggggacgtgacttatcctgcgcaccgtgattgctacctcggcgacctgtgcaatagcgctgtcgcctctcatgtggcaccagccggcatcctggctgctgccgccactgccctcacctgcttgctccccggcctatggtcgggatag

SEQ ID NO: 19944 - DNA, 894 bp, Artificial Sequence
  derived and/or modified sequence
atggctgtgctcttcctgctgctcttcctgtgtggcaccccccaggccgctgacaacatgcaggccatctacgtggccctgggggaggccgtggagctgccctgccccagcccccccaccctgcatggagatgagcacctgtcctggttctgcagccctgctgctggcagcttcaccaccctggtggcccaggtgcaggtgggccggcctgccccagaccccgggaagccaggccgggagagccggctgcggctgctgggcaactacagcctgtggctggagggcagcaaggaggaggatgctggccgctactggtgcaccgtgctgggccagcaccacaactaccagaactggagggtgtatgatgtgctggtgctgaagggcagccagctgagcgcccgggcagcagatggcagcccctgcaatgtgctgctgtgcagcgtggtgcccagcaggaggatggacagcgtgacctggcaggagggcaaaggacctgtgcggggccgggtgcagagcttctggggcagcgaggccgccctgctgctggtgtgccctggagagggcctgtctgagcccaggagcagaagaccccgcatcatccgctgcctgatgacccacaacaagggcgtgtccttcagcctggccgccagcattgatgccagccctgccctgtgtgcccccagcacaggctgggacatgccctggatcctgatgctgctgctgaccatgggccagggcgtggtgatcctggccctgagcatcgtgctgtggaggcagagggtgcggggggcccctggaagagatgccagcatcccccagttcaagccagagatccaggtgtatgagaacatccacctggcccggctgggccccccagcccacaagcccaggtag

SEQ ID NO: 19945 - DNA, 1149 bp, Artificial Sequence
  derived and/or modified sequence
atggctgtgctcttcctgctgctcttcctgtgtggcaccccccaggccgctgacaacatgcaggccatctacgtggccctgggggaggccgtggagctgccctgccccagcccccccaccctgcatggagatgagcacctgtcctggttctgcagccctgctgctggcagcttcaccaccctggtggcccaggtgcaggtgggccggcctgccccagaccccgggaagccaggccgggagagccggctgcggctgctgggcaactacagcctgtggctggagggcagcaaggaggaggatgctggccgctactggtgcaccgtgctgggccagcaccacaactaccagaactggagggtgtatgatgtgctggtgctgaagggcagccagctgagcgcccgggcagcagatggcagcccctgcaatgtgctgctgtgcagcgtggtgcccagcaggaggatggacagcgtgacctggcaggagggcaaaggacctgtgcggggccgggtgcagagcttctggggcagcgaggccgccctgctgctggtgtgccctggagagggcctgtctgagcccaggagcagaagaccccgcatcatccgctgcctgatgacccacaacaagggcgtgtccttcagcctggccgccagcattgatgccagccctgccctgtgtgcccccagcacaggctgggacatgccctggatcctgatgctgctgctgaccatgggccagggcgtggtgatcctggccctgagcatcgtgctgtggaggcagagggtgcggggggcccctggccggggcaacaggatgcgctgctacaactgtggcggcagccccagcagcacctgcaaggaggccgtgaccacctgtggggagggccggccccagcccggcctggagcagatcaagctgcccggcaacccccctgtgaccctcatccaccagcacccagcctgtgtggccgcccaccactgcaaccaggtggagacagaatctgtgggagatgtgacctacccagcccaccgggactgctacctgggggacctgtgcaacagcgctgtggccagccacgtggccccagctggcatcctggccgccgccgccacagccctgacctgcctgctgcccggcctgtggagcggctag

SEQ ID NO: 19946 - DNA, 920 bp, Artificial Sequence
  derived and/or modified sequence
gagaacttggcaggctctccccatggcagtcttattcctcctcctgttcctatgtggaactccccaggctgcagacaacatgcaggccatctatgtggccttgggggaggcagtagagctgccatgtccctcaccacctactctacatggggacgaacacctgtcatggttctgcagccctgcagcaggctccttcaccaccctggtagcccaagtccaagtgggcaggccagccccagaccctggaaaaccaggaagggaatccaggctcagactgctggggaactattctttgtggttggagggatccaaagaggaagatgccgggcggtactggtgcactgtgctaggtcagcaccacaactaccagaactggagggtgtacgacgtcttggtgctcaaaggatcccagttatctgcaagggctgcagatggatccccctgcaatgtcctcctgtgctctgtggtccccagcagacgcatggactctgtgacctggcaggaagggaagggtcccgtgaggggccgtgttcagtccttctggggcagtgaggctgccctgctcttggtgtgtcctggggaggggctttctgagcccaggagccgaagaccaagaatcatccgctgcctcatgactcacaacaaaggggtcagctttagcctggcagcctccatcgatgcttctcctgccctctgtgccccttccacgggctgggacatgccttggattctgatgctgctgctcacaatgggccagggagttgtcatcctggccctcagcatcgtgctctggaggcagagggtccgtggggctccaggcagagatgcctcgattcctcagttcaaacccgaaatccaggtctatgagaacatccatttggcccgtcttggcccacctgcccacaagcccaggtgatttt

SEQ ID NO: 19947 - DNA, 1193 bp, Artificial Sequence
  derived and/or modified sequence
gggacaccaggtcttggagcaagagaacttggcaggctctccccatggcagtcttattcctcctcctgttcctatgtggaactccccaggctgcagacaacatgcaggccatctatgtggccttgggggaggcagtagagctgccatgtccctcaccacctactctacatggggacgaacacctgtcatggttctgcagccctgcagcaggctccttcaccaccctggtagcccaagtccaagtgggcaggccagccccagaccctggaaaaccaggaagggaatccaggctcagactgctggggaactattctttgtggttggagggatccaaagaggaagatgccgggcggtactggtgcactgtgctaggtcagcaccacaactaccagaactggagggtgtacgacgtcttggtgctcaaaggatcccagttatctgcaagggctgcagatggatccccctgcaatgtcctcctgtgctctgtggtccccagcagacgcatggactctgtgacctggcaggaagggaagggtcccgtgaggggccgtgttcagtccttctggggcagtgaggctgccctgctcttggtgtgtcctggggaggggctttctgagcccaggagccgaagaccaagaatcatccgctgcctcatgactcacaacaaaggggtcagctttagcctggcagcctccatcgatgcttctcctgccctctgtgccccttccacgggctgggacatgccttggattctgatgctgctgctcacaatgggccagggagttgtcatcctggccctcagcatcgtgctctggaggcagagggtccgtggggctccaggcagaggaaaccgaatgcggtgctacaactgtggtggaagccccagcagtacttgcaaagaggccgtgaccacctgtggcgagggcagaccccagccaggcctggaacagatcaagctacctggaaaccccccagtgaccttgattcaccaacatccagcctgcgtcgcagcccatcattgcaatcaagtggagacagagtcggtgggagacgtgacttatccagcccacagggactgctacctgggagacctgtgcaacagcgccgtggcaagccatgtggcccctgcaggcattttggctgcagcagctaccgccctgacctgtctcttgccaggactgtggagcggatag

SEQ ID NO: 19948 - DNA, 894 bp, Artificial Sequence
  derived and/or modified sequence
atggccgtgctgttcctgctgctgttcctgtgcggcaccccccaggcggcggacaacatgcaggcaatctacgttgctctaggcgaagcagtggagctgccttgcccaagcccgccaactctgcatggcgatgaacacctgtcatggttctgctctcctgcagcgggctcattcaccactcttgtggctcaagtgcaggttgggaggcctgcacccgatcccgggaaacccgggcgggaatccaggctgcggctgctagggaattactccctctggttggagggctcgaaagaagaggacgctggacggtattggtgtactgtcctgggccagcaccataattaccagaactggagagtctatgacgtccttgtgctcaaaggctcacagctgtccgcccgcgcggccgacggctccccttgtaatgtcctgttgtgttctgtagttcccagtcgcagaatggattcggttacgtggcaagaggggaaaggcccagtcagaggaagggtccagtccttttggggctccgaggccgctctgcttctagtttgcccaggggagggcttgtctgaaccccgcagtaggagacctagaatcattagatgcctgatgacccataacaagggagtcagtttctctttagcggcttccatagacgcatcacctgcactatgcgcaccttcgacgggttgggatatgccctggatactgatgcttttgctgacaatgggccagggcgtggtgatcttggccctgtctatcgtgctctggcggcagagagtccggggcgccccaggtagggatgctagcattcctcagttcaagcctgaaatccaggtctatgagaacatccatctcgcccgcctcggcccacccgcccataagcccagatag

SEQ ID NO: 19949 - DNA, 894 bp, Artificial Sequence
  derived and/or modified sequence
atggccgtgctgttcctgctgctgttcctgtgcggcaccccccaggcagctgacaatatgcaggccatctatgttgccctgggagaggccgtagaactgccttgtccctcccctcctactctgcatggggacgaacatttaagttggttctgcagtcccgccgcgggatcctttaccaccctggtagcgcaggtgcaggtgggccgacccgcccctgaccccggcaaacccggccgggagtctcgattgcgtctgttgggaaattactccctgtggttggaggggagcaaggaagaggatgccggtaggtattggtgcacagtcctagggcagcaccacaactaccagaactggagagtgtacgacgtgttggtcctgaagggtagtcagttgtctgcccgcgcagctgacggctctccatgtaacgttctcctctgctcggtggtacccagcaggagaatggatagcgtaacatggcaggaaggtaaagggcctgtgaggggaagggtccagagcttttgggggtccgaagccgcactgctgctagtctgtcccggcgagggtctttcagagccccgttcacggaggcccaggattatccgttgtcttatgacacataacaagggagtgtcgttcagtctggctgcaagcattgacgcttctcctgcattgtgcgctccttccactggctgggatatgccctggatcttaatgttgctcctaacgatggggcagggcgttgtcatcctagcgcttagcatcgtcctgtggcgccaacgcgtcagaggcgctcctgggagggacgcaagcatcccccagttcaagcccgagatccaggtctacgaaaacatacatctcgccaggttagggcctccagcacacaagcctcgatag

SEQ ID NO: 19950 - DNA, 1149 bp, Artificial Sequence
  derived and/or modified sequence
atggccgtgctgttcctgctgctgttcctgtgcggcaccccccaggccgctgacaacatgcaagccatctatgtggccctcggagaagctgtggagcttccttgtccatcccccccaaccttgcacggcgatgaacatttatcctggttctgctcacccgctgctgggtccttcacgacattggtcgcccaggtacaggtaggccgaccagctcctgatcctggtaaacccggcagggaaagtcggcttcgactgttgggaaattacagcctctggttggagggatcgaaagaagaggacgcgggaaggtactggtgtacagttctgggtcagcaccacaattaccagaattggcgggtctacgatgtcctggtgctgaaaggttcacagctgtcagcaagagctgctgacggtagtccgtgcaatgtattgctgtgctctgttgtgcctagtcgcagaatggacagcgtcacatggcaggagggaaagggtccagtaagaggacgcgttcagtccttctggggatccgaggcagctctgctgttagtgtgtcccggcgaaggcctctctgagcccagaagtaggaggccacggatcattcggtgcctgatgacgcataacaagggcgtgagcttctcccttgctgcatccatcgatgccagcccagctttgtgtgccccaagcaccggctgggacatgccttggattctaatgctgctgcttacgatgggtcaaggtgtggtaattctcgcgttaagcatcgtcctgtggagacagagggtgcggggcgcccctggtagaggaaatcgaatgcgctgctataactgcggtggtagtccatcatctacctgcaaggaggcagtgaccacatgcggggaggggaggccccagccagggctcgagcagattaagcttccagggaatcctcctgtgacactgatccaccagcaccccgcttgcgtcgccgcccaccactgcaaccaggtcgaaacagagtccgtgggagacgtcacctatccagcccatagggattgctatctgggggacctgtgtaactccgcagtggccagtcatgttgccccggctggcatcttggccgccgcagccacggcactaacatgtttactgcctggcctatggtcggggtag

SEQ ID NO: 19951 - DNA, 894 bp, Artificial Sequence
  derived and/or modified sequence
atggcagtgttgttcctgcttctattcctttgtggcacgccacaggctgccgacaacatgcaggccatctatgtggccctcggagaagccgtggaactgccctgtcccagccctcccacgctgcacggagatgaacacctatcatggttttgcagccccgctgccggatcatttaccactttggtggcccaggtgcaggtgggcaggcccgctccagaccctggaaagccgggaagggaatctcggttacggctgctgggtaattactcactgtggctggaaggtagtaaggaggaagacgccggacgttactggtgcaccgtgttggggcagcaccataattatcagaactggcgggtttacgatgtcctggtcctgaaaggtagccagctgtcggccagggcagccgacggctctccatgtaacgttctcctgtgttccgtggtgccatctcgccgtatggactcggtgacctggcaggagggcaaagggccagtcaggggccgtgtgcagagcttctggggtagcgaggccgctctgctgcttgtgtgtcccggtgaaggccttagtgaaccccgttcccggcgtcctcgaataatacggtgtctcatgactcacaataagggagtgtcattttcattggccgcaagcattgatgcatccccagcgctgtgcgccccaagcacagggtgggacatgccttggatactgatgctgctgctcacaatggggcaaggcgtggtaattctggcactgtctatcgtcttatggaggcagagagtacgcggtgcccctgggcgagacgcctcgatcccacagttcaagcctgagatccaggtatacgagaatatccacctggctagattaggacccccagctcacaagcctcgatag

SEQ ID NO: 19952 - DNA, 894 bp, Artificial Sequence
  derived and/or modified sequence
atggcagtgttgtttctgctcctgtttctgtgcggcacgcctcaggccgctgacaacatgcaagctatctatgtcgccctgggggaggccgtagagctcccatgtcccagccccccaacgcttcatggggacgagcatctttcctggttttgcagcccagccgcaggctctttcacgacgctggtggcccaggtgcaggtaggtcgtcctgccccagaccccggaaaacccggtagggaaagcagactcaggcttctcgggaattacagtctttggcttgaggggtcaaaggaagaagatgccggacggtattggtgtactgttctcgggcagcatcacaactatcagaattggcgggtgtacgacgtccttgtgctgaaaggttcgcagttatccgccagggccgcagatgggtccccctgcaatgtgttgctctgttccgtagtgccgtccaggcgcatggactctgttacctggcaggaggggaaaggccctgtaagagggcgagtgcagtcattttgggggagtgaagccgctttactgctcgtgtgcccaggggaaggcctgagcgaacctcgatcgagacggccaaggattattcggtgcctgatgacacacaacaaaggggtgagcttttccctggcagcctccatcgatgcctctccggctctgtgcgccccttctacaggttgggatatgccttggatactgatgttactgctgacaatgggacagggtgtggtgatactcgctctgagtattgttctgtggcgacagagagtccgtggggcacctgggagggatgcctccataccccaatttaagccggaaatccaggtttatgaaaatatacatcttgcaaggctggggccacccgcacacaaaccacggtag

SEQ ID NO: 19953 - DNA, 1149 bp, Artificial Sequence
  derived and/or modified sequence
atggccgtgctgttcctattactgttcttatgtggcacccctcaggccgctgacaacatgcaggcaatctacgtagccttgggggaggccgtcgaactcccctgcccatctccaccgaccctgcacggagacgagcatttaagctggttctgctccccagctgcgggtagctttactacccttgtagcccaggtacaggtggggaggccggctcctgaccccggaaagccgggtcgcgaatctagactacggctcctcgggaattattctttgtggctggaggggagtaaggaggaagacgccggtaggtactggtgcaccgtcctcggccagcaccataactaccagaactggcgggtgtacgacgtgttggtgcttaaaggcagccagctgtccgcaagagccgctgatggatccccctgcaacgttctcttatgcagtgttgtgccttcgcggaggatggattctgtgacttggcaggagggtaaggggccagttagaggtagagtccagagcttctgggggtctgaggcggcactgctgcttgtgtgcccaggggaaggcctgtcggagcctagatccagaaggccacgcatcataagatgtctgatgacccacaacaagggtgtgagcttttcgttggcggcatccatcgacgcatcccctgctctttgtgccccatcgacagggtgggatatgccgtggatactgatgctgctgctaactatgggccaaggcgtcgtgatactggctttgtcaatcgtcttatggcggcaacgcgttcggggtgcacccggtcgcggtaataggatgaggtgttataattgcggcggttccccctcttcaacgtgcaaggaagccgtcacgacatgtggggagggccgaccccagcccggtctggaacaaattaaactgccaggaaacccacccgtgactctgatccatcagcatcctgcgtgtgttgcagcacatcactgtaatcaggtggagaccgaatccgtaggagacgtcacctaccccgcacaccgcgattgctacctgggggacctgtgcaattctgccgtggcaagtcacgtggccccagccggtatccttgccgcagccgcaaccgctttgacctgtcttcttcccggactgtggagcgggtag

SEQ ID NO: 19954 - DNA, 1149 bp, Artificial Sequence
  derived and/or modified sequence
atggctgtgctgttccttctcctcttcctctgtggaactccgcaggcggctgataatatgcaggccatctacgttgccctaggggaggccgtcgagctcccgtgccctagtccgcctacattgcacggggacgaacacctgtcttggttctgtagtcctgctgctggtagctttacaacgctggtggctcaggtacaggtggggagacccgccccggatcccggtaagccaggacgggagtcacgcttaagactgctggggaattattcattgtggttggaggggagcaaagaagaagacgccggacgctactggtgcacggtactgggccagcatcataattaccagaactggcgcgtgtacgacgtgctggtgctgaagggctctcagctcagtgctcgggccgccgatggaagcccatgcaacgttctgctgtgctcggtggtgcccagcagacgcatggattcagtgacgtggcaagagggcaagggacctgtgcgcggccgggtccagagcttctggggatccgaggcagcgcttctgctagtgtgccccggagaaggcctatctgaaccacgaagccgcaggcccaggattattaggtgtctcatgactcacaataaaggtgttagtttctcgctagcagccagtatcgacgccagccccgctctttgcgccccttccaccggatgggacatgccctggatactgatgctgctgctgactatggggcagggagtcgtcatcctcgcgctgtcaattgtcttgtggcgtcagagggtgcgcggagctcctggccgaggcaaccgcatgcggtgctacaactgcggcggttcccctagcagcagttgtaaggaggccgtgacgacttgtggagaaggaaggcctcagcccggcttagagcaaattaaactgcctgggaacccccccgtgacactgattcatcagcatcccgcttgcgtggctgcccaccattgtaatcaggtagagactgagagtgtcggtgatgtcacttatcccgcgcacagagattgctatctgggcgatttatgtaactccgccgtagccagtcatgttgccccagcagggatcctggctgccgccgccacagcgcttacctgtctgctccctggcctgtggtcgggctag

SEQ ID NO: 19955 - DNA, 1149 bp, Artificial Sequence
  derived and/or modified sequence
atggctgtgctgttcctgctgctttttttgtgcgggacgccacaggccgccgacaacatgcaggcgatttacgttgcactgggtgaggcagtggaactgccctgccctagcccacccacccttcacggtgacgagcacctcagctggttctgctcccctgccgccggttctttcacaactttggttgcccaggttcaggttggccgaccagcacctgacccggggaagcccgggcgcgagtctcggcttaggctgctgggcaattatagtctttggctggagggatcaaaagaagaggacgcaggacgctactggtgcgcggtgctggggcagcatcataactatcagaattggcgggtgtacgatgtcttggttctcaaaggatcccagctgagtgccagggccgctgacggctccccatgtaacgtgttactatgttccgttgtgccgagccgcaggatggactcggtcacgtggcaggaagggaaaggtccagttaggggacgggtccagtctttctggggctcagaagccgctttactcttggtgtgccctggcgaggggttgtcagaacctagatctaggagacctcgcattatccggtgtttgatgacccataataagggagtgtcattctccctggctgcatcaattgatgcatcaccagctctgtgcgccccgtcgaccgggtgggacatgccatggatactgatgctgttgcttacaatgggacagggcgtggtgatacttgctctctccatcgttctatggcgccagagggtgcgtggcgcccccggacgcgggaataggatgcggtgctacaactgtgggggaagcccctcctctagctgcaaggaggcagtgaccacatgcggggaaggaaggcctcagcccggactggagcagattaaactacccggcaatcctccggtgactttgatccatcagcacccggcctgcgtggcagcacaccactgcaaccaggttgagaccgaatccgtgggggatgtcacttaccccgcgcaccgggactgctacttaggtgatctctgcaactcggccgtggcctcccacgtggcccccgccggaattctggccgccgccgcaacggccctgacatgtctcttgcctggcctctggagcggctag

SEQ ID NO: 19956 - DNA, 1149 bp, Artificial Sequence
  derived and/or modified sequence
atggctgtgctcttcctgctgctcttcctgtgtggcaccccccaggccgctgacaacatgcaggccatctacgtggccctgggggaggccgtggagctgccctgccccagcccccccaccctgcatggagatgagcacctgtcctggttctgcagccctgctgctggcagcttcaccaccctggtggcccaggtgcaggtgggccggcctgccccagaccccgggaagccaggccgggagagccggctgcggctgctgggcaactacagcctgtggctggagggcagcaaggaggaggatgctggccgctactggtgcaccgtgctgggccagcaccacaactaccagaactggagggtgtatgatgtgctggtgctgaagggcagccagctgagcgcccgggcagcagatggcagcccctgcaatgtgctgctgtgcagcgtggtgcccagcaggaggatggacagcgtgacctggcaggagggcaaaggacctgtgcggggccgggtgcagagcttctggggcagcgaggccgccctgctgctggtgtgccctggagagggcctgtctgagcccaggagcagaagaccccgcatcatccgctgcctgatgacccacaacaagggcgtgtccttcagcctggccgccagcattgatgccagccctgccctgtgtgcccccagcacaggctgggacatgccctggatcctgatgctgctgctgaccatgggccagggcgtggtgatcctggccctgagcatcgtgctgtggaggcagagggtgcggggggcccctggccggggcaacaggatgcgctgctacaactgtggcggcagccccagcagcagctgcaaggaggccgtgaccacctgtggggagggccggccccagcccggcctggagcagatcaagctgcccggcaacccccctgtgaccctcatccaccagcacccagcctgtgtggccgcccaccactgcaaccaggtggagacagaatctgtgggagatgtgacctacccagcccaccgggactgctacctgggggacctgtgcaacagcgctgtggccagccacgtggccccagctggcatcctggccgccgccgccacagccctgacctgcctgctgcccggcctgtggagcggctag

SEQ ID NO: 19957 - DNA, 1266 bp, Artificial Sequence
  derived and/or modified sequence
cccatggcagtcttattcctcctcctgttcctatgtggaactccccaggctgcagacaacatgcaggccatctatgtggccttgggggaggcagtagagctgccatgtccctcaccacctactctacatggggacgaacacctgtcatggttctgcagccctgcagcaggctccttcaccaccctggtagcccaagtccaagtgggcaggccagccccagaccctggaaaaccaggaagggaatccaggctcagactgctggggaactattctttgtggttggagggatccaaagaggaagatgccgggcggtactggtgcactgtgctaggtcagcaccacaactaccagaactggagggtgtacgacgtcttggtgctcaaaggatcccagttatctgcaagggctgcagatggatccccctgcaatgtcctcctgtgctctgtggtccccagcagacgcatggactctgtgacctggcaggaagggaagggtcccgtgaggggccgtgttcagtccttctggggcagtgaggctgccctgctcttggtgtgtcctggggaggggctttctgagcccaggagccgaagaccaagaatcatccgctgcctcatgactcacaacaaaggggtcagctttagcctggcagcctccatcgatgcttctcctgccctctgtgccccttccacgggctgggacatgccttggattctgatgctgctgctcacaatgggccagggagttgtcatcctggccctcagcatcgtgctctggaggcagagggtccgtggggctccaggcagaggaaaccgaatgcggtgctacaactgtggtggaagccccagcagttcttgcaaagaggccgtgaccacctgtggcgagggcagaccccagccaggcctggaacagatcaagctacctggaaaccccccagtgaccttgattcaccaacatccagcctgcgtcgcagcccatcattgcaatcaagtggagacagagtcggtgggagacgtgacttatccagcccacagggactgctacctgggagacctgtgcaacagcgccgtggcaagccatgtggcccctgcaggcattttggctgcagcagctaccgccctgacctgtctcttgccaggactgtggagcggatagggggagtaggagtagagaagggaacaagggagcaagggaacaagggacatctgaacatctaatgtgagaagacaaacatccttctgtgagtcattaaaatctatgaaccactct

SEQ ID NO: 19958 - DNA, 1266 bp, Artificial Sequence
  derived and/or modified sequence
cccatggcagtcttattcctcctcctgttcctatgtggaactccccaggctgcagacaacatgcaggccatctatgtggccttgggggaggcagtagagctgccatgtccctcaccacctactctacatggggacgaacacctgtcatggttctgcagccctgcagcaggctccttcaccaccctggtagcccaagtccaagtgggcaggccagccccagaccctggaaaaccaggaagggaatccaggctcagactgctggggaactattctttgtggttggagggatccaaagaggaagatgccgggcggtactggtgcgctgtgctaggtcagcaccacaactaccagaactggagggtgtacgacgtcttggtgctcaaaggatcccagttatctgcaagggctgcagatggatccccctgcaatgtcctcctgtgctctgtggtccccagcagacgcatggactctgtgacctggcaggaagggaagggtcccgtgaggggccgtgttcagtccttctggggcagtgaggctgccctgctcttggtgtgtcctggggaggggctttctgagcccaggagccgaagaccaagaatcatccgctgcctcatgactcacaacaaaggggtcagctttagcctggcagcctccatcgatgcttctcctgccctctgtgccccttccacgggctgggacatgccttggattctgatgctgctgctcacaatgggccagggagttgtcatcctggccctcagcatcgtgctctggaggcagagggtccgtggggctccaggcagaggaaaccgaatgcggtgctacaactgtggtggaagccccagcagttcttgcaaagaggccgtgaccacctgtggcgagggcagaccccagccaggcctggaacagatcaagctacctggaaaccccccagtgaccttgattcaccaacatccagcctgcgtcgcagcccatcattgcaatcaagtggagacagagtcggtgggagacgtgacttatccagcccacagggactgctacctgggagacctgtgcaacagcgccgtggcaagccatgtggcccctgcaggcattttggctgcagcagctaccgccctgacctgtctcttgccaggactgtggagcggatagggggagtaggagtagagaagggaacaagggagcaagggaacaagggacatctgaacatctaatgtgagaagacaaacatccttctgtgagtcattaaaatctatgaaccactct

SEQ ID NO: 19959 - DNA, 1149 bp, Artificial Sequence
  derived and/or modified sequence
atggccgtgctgttcctgctgctgttcctgtgcggcaccccccaggcagctgacaacatgcaggctatttatgtcgccctgggcgaagctgtagagctcccttgcccatcgccaccaacccttcatggtgacgaacatctgtcttggttctgctctcctgctgccggctcctttaccacattggtggcccaggtgcaggtcggtaggcccgcccccgaccctggaaaacccggcagggagagcagattgcgactactggggaattattccctttggctggaaggctctaaggaggaggacgctggccgttactggtgcaccgtgcttggtcagcaccacaactaccagaactggcgggtttacgacgttttggtgctcaaggggagccagctttccgccagggccgccgatgggagtccttgtaatgtgctcctgtgcagcgttgtgccatctagaagaatggacagcgtgacatggcaagagggtaaaggacccgtgagaggtagagtgcagagcttctggggaagcgaggccgctctcttgctcgtgtgtcctggggagggcctcagcgagccccgctctaggcggccgcgcatcatacgatgtttgatgactcataataaaggtgtgtccttttcgctagcagcctctattgacgccagcccagctctttgcgccccctctaccggatgggacatgccatggattttgatgttgctgctgacgatgggccagggcgtagtaatcctggcactaagcatagtcctgtggcgccagcgagtgcggggtgcgcccggccggggcaaccggatgcgatgctacaactgtggtggctccccctcaagctcgtgcaaggaagctgtgactacttgcggagagggacgtccacagccgggactggaacagatcaaactgcccggaaatccacctgtgactctgattcaccaacatcccgcctgtgtggccgctcaccattgcaaccaggttgaaaccgaatcagtcggcgacgtgacctaccctgcgcatcgcgattgctacctgggggatctgtgtaattctgctgtggccagccacgtggcacctgctggtatcctggctgctgcagcaacggctctcacgtgtttgctgcctggtctatggtctggctag

SEQ ID NO: 19960 - DNA, 1149 bp, Artificial Sequence
  derived and/or modified sequence
atggccgtgctgttcctgctgctgttcctgtgcggcaccccccaggctgccgacaacatgcaggctatctatgtcgccctgggcgaagccgtggaactgccatgccctagccctcctacactacacggcgacgaacatttgtcctggttctgctcccccgccgcaggcagcttcacaactctggttgctcaggtacaggtggggcggccagcccccgaccctgggaagccaggcagggagagtcgcctgaggctgcttggtaactattccctttggctggaggggtccaaggaggaagatgcgggaagatattggtgtgcagtcttagggcagcatcataactatcaaaattggagggtttatgacgttctggtcttgaaggggtctcagctgtcagctcgggccgctgatggatcaccctgtaatgtgctcctgtgcagtgtcgtccccagccgtcggatggattctgtcacatggcaggagggaaaggggcctgttaggggtcgcgtgcagtcattttggggctcagaggcggctctgttgctggtatgcccaggtgaggggttgtccgaaccgcgcagtagacgtccccgcataatcagatgcttaatgacgcacaacaaaggtgtgtctttctcactagccgcctcgattgatgcgtctccagccctctgtgccccatccacaggatgggatatgccttggattctgatgctgttgctgacaatggggcagggtgtggtgatcctcgcgctcagcatagttttgtggaggcagcgtgtgcgcggggctcctgggcgaggtaatagaatgcgttgttacaattgcggggggtccccctcctctagctgcaaggaggccgtgactacatgcggtgaagggaggccgcaaccggggcttgagcagattaagctgccgggcaaccctcctgtgacattgatccaccagcatcccgcctgcgtggcggctcaccactgtaaccaggtggagaccgagtccgtaggagacgtgacttaccctgcccatcgggattgctacctaggagatctgtgtaatagtgccgttgcttcccacgttgctccagcgggcattcttgccgcggcagctactgctctgacctgtctgcttcctggcctttggtccggctag

SEQ ID NO: 19961 - DNA, 1149 bp, Artificial Sequence
  derived and/or modified sequence
atggcagtgcttttcctgcttctgttcttatgcggcactccccaggcggcagacaatatgcaggcaatttacgtggccctcggggaggccgtagaacttccttgcccttcaccccctactctgcatggagacgaacatctctcatggttctgcagcccagctgctggatcctttaccacactggtggctcaagtacaggtgggcaggcctgcccctgatcccggaaaacctggaagagagtcacgtcttcgcctgctgggaaactactcactttggctggaaggctccaaagaagaggacgccggtcgctattggtgtactgtgctcggtcagcatcacaactatcagaattggcgagtatatgacgtgctggtcctgaaaggctcccaacttagtgccagagccgctgacggctctccatgcaatgtgctgctctgttcagtggtcccgtcccgtaggatggacagcgtgacttggcaagaaggaaaagggcctgtgagaggtagagtccagtctttctggggctcagaggcggcattgctgttggtctgtcccggtgaaggcttaagtgagcctcggtcccggaggccaaggatcattcgctgcttgatgacccataataaaggtgtgtcttttagtttagcagcttccatcgatgcaagtcctgccctttgcgcacccagtacaggatgggacatgccctggattctcatgctgctgttgaccatgggtcaaggggtggttatactggcactatcaatagtgctttggcgtcagcgggttcgcggagcccctggacgagggaatcgcatgagatgttataattgtggtgggtctcctagtagttcgtgcaaggaggccgtcactacttgtggcgaggggcgaccgcaaccagggttagaacagatcaagttaccaggcaatccgcctgtgacactgatacatcagcaccctgcctgcgtggcggcacatcattgcaatcaggtagagactgagtccgtgggagatgtaacttacccagcccatcgggattgttacctgggcgatctgtgtaactccgccgtggcctcccatgttgcacccgctggcattctggctgccgctgcaaccgcactgacatgcctgctgccaggcttgtggagtggctag

SEQ ID NO: 19962 - DNA, 1149 bp, Artificial Sequence
  derived and/or modified sequence
atggccgtgctcttcctcttactcttcttgtgcggcaccccccaggctgccgacaatatgcaggctatatacgttgctctaggagaagccgtagagctaccttgcccatcgccgccaacactacatggcgacgagcacttatcttggttctgttccccggctgcaggctcattcacaactctcgtcgctcaagtacaggtgggccgaccagcgccagatcccggtaaacctggacgcgagtccaggttgcgcttacttggtaactatagcctctggctggaggggagcaaagaagaggatgctggaaggtattggtgcgcagtcctcggacaacaccacaactaccagaactggagggtgtacgacgtactggttctcaagggctcccagctctctgctcgcgcagctgacgggagcccatgtaacgtgctgttgtgtagcgtggtgccaagcagacgaatggacagcgtaacatggcaggaaggcaaaggcccagtccgaggacgggtgcagagcttttggggctctgaagctgcccttctccttgtgtgccccggtgaagggctgtctgagcccaggtcaagaagaccgagaattataaggtgcctgatgacacacaacaaaggagtgtcattctccctggcagcctctatcgatgcaagccccgcactttgtgctccatcaaccggctgggacatgccgtggatactgatgctgttgttaacaatgggacagggtgtagttatcctggcgctgtccatcgtcctgtggaggcaaagggtgaggggagcgccaggacggggaaatcggatgcgctgctataattgtggcggatcaccaagcagctcttgtaaagaggctgtcacaacctgcggggagggacgtccacagccgggtcttgaacagattaagctgccaggaaacccacccgtcaccctgattcaccaacatcctgcgtgtgttgccgctcatcactgtaatcaagtggagaccgaatctgtgggggatgtgacttaccctgcccatagagactgctacctgggggatctgtgcaacagcgccgtggcctcccacgtcgctcccgctgggatcctggcagcagctgcaactgctctaacctgcctcctgccgggattgtggtcaggatag

SEQ ID NO: 19963 - DNA, 1149 bp, Artificial Sequence
  derived and/or modified sequence
atggccgtgctgttcctgctgctgttcctgtgcggcaccccccaggccgccgacaacatgcaggccatctacgtggccctgggcgaggccgtggagctgccctgccccagcccccccaccctgcacggcgacgagcacctgagctggttctgcagccccgccgccggcagcttcaccaccctggtggcccaggtgcaggtgggcagacccgcccccgaccccggcaagcccggcagagagagcagactgagactgctgggcaactacagcctgtggctggagggcagcaaggaggaggacgccggcagatactggtgcaccgtgctgggccagcaccacaactaccagaactggagagtgtacgacgtgctggtgctgaagggcagccagctgagcgccagagccgccgacggcagcccctgcaacgtgctgctgtgcagcgtggtgcccagcagaagaatggacagcgtgacctggcaggagggcaagggccccgtgagaggcagagtgcagagcttctggggcagcgaggccgccctgctgctggtgtgccccggcgagggcctgagcgagcccagaagcagaagacccagaatcatcagatgcctgatgacccacaacaagggcgtgagcttcagcctggccgccagcatcgacgccagccccgccctgtgcgcccccagcaccggctgggacatgccctggatcctgatgctgctgctgaccatgggccagggcgtggtgatcctggccctgagcatcgtgctgtggagacagagagtgagaggcgcccccggcagaggcaacagaatgagatgctacaactgcggcggcagccccagcagcagctgcaaggaggccgtgaccacctgcggcgagggcagaccccagcccggcctggagcagatcaagctgcccggcaacccccccgtgaccctgatccaccagcaccccgcctgcgtggccgcccaccactgcaaccaggtggagaccgagagcgtgggcgacgtgacctaccccgcccacagagactgctacctgggcgacctgtgcaacagcgccgtggccagccacgtggcccccgccggcatcctggccgccgccgccaccgccctgacctgcctgctgcccggcctgtggagcggctag

SEQ ID NO: 19964 - protein, 108 aa, Artificial Sequence
  derived and/or modified sequence
MILQRLFRFSSVIRSAVSVHLRRNIGVTAVAFNKELDPIQKLFVDKIREYKSKRQTSGGPVDASSEYQQELERELFKLKQMFGNADMNTFPTFKFEDPKFEVIEKPQA

SEQ ID NO: 19965 - DNA, 327 bp, Artificial Sequence
  derived and/or modified sequence
atgattctccagcgtctgttccgctttagtagcgtcatcagatcagcggtgtccgtgcatctgcgcaggaacatcggagtgaccgccgtcgcgttcaacaaagagttagatccaattcagaaactgtttgtcgataaaataagggagtataagagcaagagacagacctccggggggccagtcgatgcctcatccgagtaccagcaagaactagagcgcgagctttttaaattgaaacagatgtttggcaacgccgatatgaacacgttccctaccttcaagtttgaggacccaaaattcgaggtgattgagaagccacaggcatag

SEQ ID NO: 19966 - DNA, 327 bp, Artificial Sequence
  derived and/or modified sequence
atgatccttcaacggctcttcagattctcgtctgttattaggtccgctgtctccgtgcatcttcgcaggaatattggggtcacagccgtggcttttaacaaggagctggaccccatccagaagctgtttgtggataagatccgcgaatataagtccaagagacagacctccggcggacccgtagacgcatcaagcgaataccagcaggagcttgaacgcgagctgtttaagttgaagcaaatgttcggtaatgccgacatgaacaccttccccacatttaagttcgaggaccctaaatttgaggtcatcgaaaagccccaggcttag

SEQ ID NO: 19967 - DNA, 327 bp, Artificial Sequence
  derived and/or modified sequence
atgattctgcagaggctgttccggttctccagtgttattaggtccgccgtttccgttcatctcagacgcaatatcggcgtcactgctgtggcttttaataaggagctggatccgatccaaaaactcttcgtcgataagattagagagtacaaatcaaaacgccagacctctggtggacctgtcgatgcctcctcggaatatcagcaggagctggagcgcgagctgttcaagttaaagcaaatgttcggaaatgcggatatgaacacatttcctacatttaagtttgaggatcctaaatttgaagttatcgaaaaaccccaggcctag

SEQ ID NO: 19968 - DNA, 327 bp, Artificial Sequence
  derived and/or modified sequence
atgatcctgcagcgactgtttcggttctcaagcgtgatcagaagcgccgtcagtgttcacctccgccggaacataggcgtgacagccgtagcctttaacaaggaacttgaccccatccagaaactgttcgttgataagattcgcgaatacaagtcaaaacgccagacgagcgggggccccgtcgatgcttcatcagagtaccaacaggagttggaacgtgagctgttcaaattgaagcaaatgttcggcaacgccgatatgaacactttcccaaccttcaaattcgaggaccccaagtttgaggttattgaaaagccccaggcttag

SEQ ID NO: 19969 - DNA, 327 bp, Artificial Sequence
  derived and/or modified sequence
atgatactgcaaagattgttcaggtttagttccgtaatccgaagcgctgtctctgtccacctgcgccgcaacattggtgtgaccgccgttgcttttaacaaggaacttgatccaatccagaaactgttcgtggacaaaatcagggagtacaaatctaagcggcagacctctggcggtccagttgatgcatcgtccgagtaccagcaggaactggaaagagagctgtttaagctgaaacagatgtttggcaatgcagatatgaacacgttcccaacattcaaattcgaggaccctaaatttgaggttatcgagaaaccccaagcctag

SEQ ID NO: 19970 - DNA, 327 bp, Artificial Sequence
  derived and/or modified sequence
atgatcctgcagaggctcttccgcttcagcagcgtcatccgctctgctgtgtctgtgcacctgcggagaaatattggagtgacagctgtggccttcaacaaggagctggaccccatccagaagctgtttgtggacaagatccgggagtacaagagcaagaggcagaccagcggcggccctgtggatgccagcagcgagtaccagcaggagctggagcgggagctgttcaagctgaagcagatgtttggaaatgctgacatgaacaccttccccaccttcaagtttgaggaccccaagtttgaggtgattgagaagccccaggcctag

SEQ ID NO: 19971 - DNA, 327 bp, Artificial Sequence
  derived and/or modified sequence
atgatcctgcagcggctgttccggttcagcagcgtgatccggagcgcagtctcagtgcatttaaggagaaatattggtgtgaccgccgtggccttcaacaaggagcttgaccctatccagaaactttttgttgataagattagagaatataaaagcaagagacaaacatcaggcggccccgtcgatgcttcttctgagtatcaacaggagctcgaacgcgagctgtttaaactgaagcaaatgtttggcaatgccgatatgaatacctttccgactttcaaattcgaggatcccaaattcgaagttatcgagaagcctcaagcctag

SEQ ID NO: 19972 - DNA, 327 bp, Artificial Sequence
  derived and/or modified sequence
atgatcctgcagcggctgttccggttcagcagcgtgatccggagcgctgtctctgtccacctgaggagaaatatcggtgtgacggccgttgcctttaataaagaactggatcctattcagaagctgttcgtggataaaattcgcgagtacaaatcaaagagacagacttctggtggacctgtggatgcatccagtgagtaccagcaagagctggagcgggaactgtttaagctgaagcagatgttcgggaatgctgacatgaacacattccccacctttaaatttgaggacccaaagttcgaggtgattgagaaaccgcaggcctag

SEQ ID NO: 19973 - DNA, 327 bp, Artificial Sequence
  derived and/or modified sequence
atgatcctgcagcggctgttccggttcagcagcgtgatccggagcgctgtctccgttcacctgaggcggaacattggcgtgaccgcggtggcatttaataaggagctggacccaatacaaaaactgttcgtcgacaaaatccgcgagtataagtctaagcggcagacaagcggcgggcctgttgatgcctcctcggagtatcagcaggagctggaaagggagctcttcaagttaaaacagatgttcggcaacgctgatatgaacacttttcctacatttaagtttgaagaccctaagtttgaggtgattgagaaacctcaagcctag

SEQ ID NO: 19974 - DNA, 327 bp, Artificial Sequence
  derived and/or modified sequence
atgatcctgcagcggctgttccggttcagcagcgtgatccggagcgcagtgtccgtgcacctgcgcagaaatatcggggtgaccgctgtagcattcaacaaggagctggatcctatccagaagctctttgtggataagatcagagagtataaatccaagaggcagacatcaggcgggccagtcgatgccagttctgaataccagcaagagctggaacgggagctgttcaaacttaagcaaatgtttggcaacgctgatatgaacacttttcccacgttcaagttcgaagaccctaagtttgaagtgatagagaaacctcaggcctag

SEQ ID NO: 19975 - DNA, 327 bp, Artificial Sequence
  derived and/or modified sequence
atgatcctgcagcggctgttccggttcagcagcgtgatccggagcgccgtaagtgtgcatctcagacgtaacatcggggtgacagccgttgcctttaacaaagagctggatcctatacagaagctctttgttgacaagatccgcgagtataagtcaaagaggcaaaccagtggggggcctgtagacgcttcctctgaatatcaacaggagttagaaagagagctgttcaaactgaagcagatgtttggaaacgctgacatgaacactttccccactttcaaatttgaggatcctaaattcgaggtcatcgagaagccccaggcttag

SEQ ID NO: 19976 - DNA, 327 bp, Artificial Sequence
  derived and/or modified sequence
atgattctgcagcgactgttccgattttcttctgtgatacggtccgctgtcagtgtgcacttacggcgaaacataggcgtcactgccgttgcttttaataaagagctggaccctatccaaaaactcttcgttgataagatcagagaatacaagtccaagcggcagacgtctggcggaccggttgacgcttcaagtgagtatcagcaggaactcgaaagggaactgtttaagctaaaacaaatgtttggtaacgccgacatgaacacattcccaacttttaaattcgaggatccaaagttcgaagtgattgagaaaccacaagcatag

SEQ ID NO: 19977 - DNA, 327 bp, Artificial Sequence
  derived and/or modified sequence
atgatcttacagagactctttagattttctagtgtgattcggtcagcagtgtccgtccatcttcggcgaaacatcggggttaccgcggtcgcattcaataaggaattagatcctatacagaagttgtttgttgataaaattagggagtataaaagtaaacggcagactagtgggggtcccgttgatgcgtccagtgagtatcagcaggagttggaaagggagctcttcaagctaaagcagatgtttggcaatgcagacatgaataccttcccaacgttcaagttcgaggacccaaagtttgaagtaatagagaagcctcaagcttag

SEQ ID NO: 19978 - DNA, 327 bp, Artificial Sequence
  derived and/or modified sequence
atgatactgcaacgcctattcagattctccagcgttatccgcagtgccgttagcgtccacctgaggcgaaacattggagttaccgccgtggcttttaacaaggaacttgatcctattcagaagctctttgtcgacaaaatccgggaatataagtccaaaagacagacaagcggaggaccagtcgatgccagctctgagtatcaacaggaactggagcgagaactgttcaaactcaagcagatgttcggcaatgcggacatgaatacatttcctacattcaaattcgaagatcctaagtttgaagtaatcgagaagccgcaggcttag

SEQ ID NO: 19979 - DNA, 327 bp, Artificial Sequence
  derived and/or modified sequence
atgatcttgcaaagattgtttcgattttcttctgtaatccgttctgcggtgagcgtgcacctgagaaggaatatcggggttactgctgtggcttttaacaaggaactcgaccctatccagaagctcttcgtggacaagattcgggagtacaaatctaaacggcagacttccggagggcctgttgacgccagctcggagtaccaacaggagctggagcgggaactgtttaaactaaaacagatgtttggcaacgccgatatgaataccttccctacttttaaattcgaggatcccaaattcgaggtcatcgagaaaccccaggcatag

SEQ ID NO: 19980 - DNA, 327 bp, Artificial Sequence
  derived and/or modified sequence
atgatactacagcgcttgtttcgcttttcaagtgtaatccgatcagcagtttccgttcatttgcgtcgtaacattggggtcaccgctgtagccttcaataaagagctggatccgatccaaaagctgtttgtcgataaaatccgtgaatacaagagcaaacgccagacgtccggaggtcccgtcgacgcatcaagtgagtatcagcaagaactggagcgtgaattatttaagctgaaacagatgttcggaaatgccgacatgaatacttttcccaccttcaaattcgaggaccccaagttcgaagtgatcgagaagccccaggcctag

SEQ ID NO: 19981 - DNA, 327 bp, Artificial Sequence
  derived and/or modified sequence
atgatcctgcagagactgttcagattcagcagcgtgatcagaagcgccgtgagcgtgcacctgagaagaaacatcggcgtgaccgccgtggccttcaacaaggagctggaccccatccagaagctgttcgtggacaagatcagagagtacaagagcaagagacagaccagcggcggccccgtggacgccagcagcgagtaccagcaggagctggagagagagctgttcaagctgaagcagatgttcggcaacgccgacatgaacaccttccccaccttcaagttcgaggaccccaagttcgaggtgatcgagaagccccaggcctag

SEQ ID NO: 19982 - protein, 1476 aa, Artificial Sequence
  derived and/or modified sequence
MTSSSPAGLEGSDLSSINTMMSAVMSVGKVTENGGSPQGIKSPSKPPGPNRIGRRNQETKEEKSSYNCPLCEKICTTQHQLTMHIRQHNTDTGGADHSCSICGKSLSSASSLDRHMLVHSGERPYKCTVCGQSFTTNGNMHRHMKIHEKDPNSATATAPPSPLKRRRLSSKRKLSHDAESEREDPAPAKKMVEDGQSGDLEKKADEVFHCPVCFKEFVCKYGLETHMETHSDNPLRCDICCVTFRTHRGLLRHNALVHKQLPRDAMGRPFIQNNPSIPAGFHDLGFTDFSCRKFPRISQAWCETNLRRCISEQHRFVCDTCDKAFPMLCSLALHKQTHVAADQGQEKPQATPLPGDALDQKGFLALLGLQHTKDVRPAPAEEPLPDDNQAIQLQTLKCQLPQDPGCTNLLSLSPFEAASLGGSLTVLPATKDSIKHLSLQPFQKGFIIQPDSSIVVKPISGESAIELADIQQILKMAASAPPQISLPPFSKAPAAPLQAIFKHMPPLKPKPLVTPRTVVATSTPPPLINAQQASPGCISPSLPPPPLKLLKGSVEAASNAHLLQSKSGTQPHAATRLSLQQPRAELPGQPEMKTQLEQDSIIEALLPLSMEAKIKQEITEGELKAFMTAPGGKKTPAMRKVLYPCRFCNQVFAFSGVLRAHVRSHLGISPYQCNICDYIAADKAALIRHLRTHSGERPYICKICHYPFTVKANCERHLRKKHLKATRKDIEKNIEYVSSSAAELVDAFCAPDTVCRLCGEDLKHYRALRIHMRTHCGRGLGGGHKGRKPFECKECSAAFAAKRNCIHHILKQHLHVPEQDIESYVLAADGLGPAEAPAAEASGRGEDSGCAALGDCKPLTAFLEPQNGFLHRGPTQPPPPHVSIKLEPASSFAVDFNEPLDFSQKGLALVQVKQENISFLSPSSLVPYDCSMEPIDLSIPKNFRKGDKDLATPSEAKKPEEEAGSSEQPSPCPAPGPSLPVTLGPSGILESPMAPAPAATPEPPAQPLQGPVQLAVPIYSSALVSSPPLVGSSALLSGTALLRPLRPKPPLLLPKPPVTEELPPLASIAQIISSVSSAPTLLKTKVADPGPASTGSNTTASDSLGGSVPKAATTATPAATTSPKESSEPPAPASSPEAASPTEQGPAGTSKKRGRKRGMRSRPRANSGGVDLDSSGEFASIEKMLATTDTNKFSPFLQTAEDNTQDEVAGAPADHHGPSDEEQGSPPEDKLLRAKRNSYTNCLQKITCPHCPRVFPWASSLQRHMLTHTGQKPFPCQKCDAFFSTKSNCERHQLRKHGVTTCSLRRNGLIPQSKESDVGSHDSTGERPYKCQTCERTFTLKHSLVRHQRIHQKARHAKHHGKDSDKEERGEEDSENESTHSGNNAVSENEAELAPNASNHMAVTRSRKEGLASATKDCSHREEKVTAGWPSEPGQGDLNPESPAALGQDLLEPRSKRPAHPILATADGASQLVGME

SEQ ID NO: 19983 - DNA, 4431 bp, Artificial Sequence
  derived and/or modified sequence
atgacgtcaagcagtcctgcaggtctcgaaggctcagacctgtccagcataaacaccatgatgtccgctgttatgtccgtggggaaagtcacggagaatggcgggtcccctcaaggtattaaaagcccttcaaaacctccggggccgaaccgaattggcagaaggaaccaggaaaccaaagaagagaagagtagttacaactgtcctttgtgcgagaaaatctgcacaactcagcaccagctgaccatgcatattagacagcacaatacagacactgggggagcggaccattcctgtagcatatgcggaaagagcttgagcagcgcctctagcctggaccgacatatgctcgtacactccggagagaggccttataagtgtaccgtatgcgggcagtccttcaccacaaatggtaatatgcacaggcacatgaaaatccacgagaaggatccaaactctgcaacagctacagcacctccatcgccactgaaacggcggagactgagttcaaagcggaaactttcccatgacgcggaaagtgagcgggaagatcccgccccggctaaaaagatggtggaagatggccagtctggcgatcttgagaaaaaagctgacgaagtgtttcactgccccgtttgctttaaagaattcgtttgtaaatacggattagaaacacacatggagacacactcggacaatccactgcgatgtgatatctgctgcgtgacttttcgtacacatcggggtttattgagacacaacgccctcgtgcacaaacagttaccgcgggacgctatgggtcggcctttcattcagaacaatcctagcatccccgccggctttcatgatctggggtttacagattttagctgcagaaagtttccacggataagtcaggcctggtgcgaaacaaatttaagacggtgtatttctgaacagcaccgctttgtctgtgatacgtgcgacaaagcttttcctatgctctgtagtctcgcacttcacaagcagacccacgtggcggccgaccaaggtcaggaaaagccacaggccacacccctgccaggtgatgccctcgatcagaaaggattcctggcactcctgggcctccagcacaccaaggatgtcaggccagcccccgccgaggaacctctcccggacgacaaccaggcaatacaactgcaaacgctgaagtgtcagctcccccaggatccaggatgcacaaacctgctgtctctgagcccattcgaagcagcatccctgggcggtagcttgaccgtgttgccggctacaaaagatagtattaagcacttgtcactgcagcccttccagaagggttttattattcagcctgatagttctatcgtagtgaagcccatttctggagaatccgccatagagcttgctgatatccagcagatcctcaaaatggctgcctctgcccctccccagatcagcctgcctcccttctccaaggcccccgccgcgcctctacaggccatcttcaagcatatgcctcccttgaagcccaaaccccttgtcacgcctcgaacagtggtagctactagcacacctcccccgcttatcaacgctcagcaagctagtcctggatgcatctccccctcccttccccccccgcctctgaaattgctcaagggcagtgttgaagctgccagcaatgcacatctgctccagtctaaatcaggtacgcaaccccacgctgcgacccggctatcccttcagcagccaagagctgagctccccgggcagcccgaaatgaagacacagctggaacaggattcaatcatcgaggccctgctgccattgtctatggaagccaagatcaagcaggaaatcaccgagggagaattaaaagccttcatgactgctccgggtggcaaaaagactccggcgatgagaaaagtgctgtacccctgccgattttgcaaccaggtctttgctttttctggggtgctacgtgcacacgttcgcagtcatctggggatttcaccttaccagtgcaacatctgtgattacatcgctgcagacaaagctgccctgattcgtcatctgaggacacattcgggtgagaggccttacatctgcaaaatttgtcactacccttttactgttaaagctaactgcgagcgccatttacgcaaaaagcatctgaaagcaaccagaaaagacattgaaaagaatatcgaatatgtttcctcctctgctgccgagcttgttgacgcattctgtgctccagacacagtctgtcggttatgcggggaggatctcaagcattaccgggccctcagaatccatatgcggacacactgtggacgaggcctgggcggcggtcataaaggccgaaagcctttcgaatgcaaggagtgtagcgcagccttcgccgctaagagaaactgtattcaccatattctgaaacagcatcttcatgtgcccgagcaggatatcgagagttacgtgctggcagcagatgggctaggcccagccgaggcacccgccgccgaggcttcgggacgtggtgaagattccggatgtgctgccctgggggattgcaagcctctaaccgcctttcttgagccacagaatggcttcctccaccgggggcctacccaaccacctccaccgcatgtgagcattaagctggagccagcctcttcctttgccgtggatttcaacgaacctttggacttctcacagaagggtctcgccctggtgcaagtgaaacaggagaatatctcttttctaagccctagcagtctcgttccgtacgactgttccatggagcccattgatctgtcgattccaaaaaatttcagaaagggcgacaaggaccttgctaccccttctgaggcgaaaaaacccgaggaagaagctggctcatcggagcaacccagcccctgtcctgcccctggcccatctttacctgttaccttggggcctagtgggattctcgagtctcccatggccccagcccccgctgccacccccgaaccaccagcccaacctctacagggtccggtccaactagctgttcccatctactcctcggcactggtttctagtccgccgttggtcggctcatctgctcttttaagtggaacagcccttctgaggccattgcggcccaagccccctttactcctgcccaaaccccctgtcaccgaggagctgccgcctctggcctccatagcccaaatcatttcctcagtttcctctgctcccacattgcttaagacaaaggtagcggatccaggaccagccagcactgggagtaatactactgcatctgacagcttaggcggatctgttccaaaggcagcaactacagctacaccagccgctacaaccagcccaaaggaatcctccgaaccacccgccccagcttcaagcccggaagctgcatcaccaaccgagcagggtcccgctggcaccagcaaaaagcgcggcagaaaacgcgggatgcgctctaggcctcgggcaaatagcggaggagtggaccttgactcctctggggagtttgcctcaatagaaaagatgttggctactacagatactaataagttcagccccttcctacagaccgctgaggacaacacccaggacgaagtggctggagctccggctgatcaccatggtccttccgatgaagaacaaggatccccacccgaggacaagctgttgagggcaaagcgcaactcctacactaactgtctccagaaaattacttgtccccactgccctagggttttcccatgggcctctagcttacaacgccacatgctgacacacaccggacagaaacctttcccatgccagaaatgtgatgctttcttttctacgaagtcaaattgcgagagacatcagcttcgaaagcacggagttacaacctgcagcctgaggaggaatggacttattccgcagtcaaaggagagcgacgtgggctcccatgattctacgggagaaaggccttataagtgtcagacatgcgagcgtacctttaccctcaagcattcactagtcagacatcagcgaatccaccaaaaggcacggcatgccaagcaccacggcaaggattcagacaaggaggagagaggcgaggaagactcagagaatgagtccacacactccggaaacaatgccgtcagcgagaacgaggccgagctggctccaaacgcctccaaccacatggctgtgactaggtctcgaaaggaagggctggcctctgccaccaaagattgtagccatagagaggagaaggtgacagctgggtggccctctgaacccggacagggagatttgaaccctgaatctcctgcagcattaggtcaggacctgctggaaccgcggtccaaacggcctgcgcatccgatcctcgctacagccgatggcgcgtctcagttggtgggtatggagtag

SEQ ID NO: 19984 - DNA, 4431 bp, Artificial Sequence
  derived and/or modified sequence
atgaccagcagcagccctgctggcctggagggcagtgacctgagcagcatcaacaccatgatgtctgctgtgatgtctgtgggcaaggtgacagaaaatggaggcagcccccagggcatcaagagccccagcaagcccccaggccccaaccgcatcggcagaagaaaccaggagaccaaggaggagaagagcagctacaactgccccctgtgtgagaagatctgcaccacccagcaccagctgaccatgcacatccggcagcacaacacagacaccggcggcgctgaccacagctgcagcatctgtgggaagagcctgagcagcgccagcagcctggacagacacatgctggtgcacagcggggagcggccctacaagtgcaccgtgtgtggccagagcttcaccaccaatggaaacatgcaccgccacatgaagatccacgagaaggaccccaacagcgccacagccacagccccacccagccccctgaagagaagaaggctgagcagcaagaggaagctgagccatgatgctgagagcgagagagaagatcctgccccagccaagaagatggtggaggatggccagagcggggacctggagaagaaggcagatgaggtgttccactgccctgtgtgcttcaaggagtttgtgtgcaagtatggcctggagacccacatggagacccacagcgacaaccccctgcgctgtgacatctgctgcgtgaccttccgcacccaccggggcctgctgcggcacaatgccctggtgcacaagcagctgcccagagatgccatgggccggcccttcatccagaacaaccccagcatcccagctggcttccatgacctgggcttcacagacttcagctgcaggaagttcccccgcatcagccaggcctggtgtgagaccaacctgcggcgctgcatcagcgagcagcacagatttgtgtgtgacacctgtgacaaggccttccccatgctgtgcagcctggccctgcacaagcagacccacgtggccgctgaccagggccaggagaagccccaggccacccccctgcctggagatgccctggaccagaagggcttcctggccctgctgggcctgcagcacaccaaggatgtgcggcctgccccagctgaggagcccctgcctgatgacaaccaggccatccagctgcagaccctgaagtgccagctgccccaggaccccggctgcaccaacctgctgagcctgagcccctttgaagctgccagcctgggcggcagcctgactgtgctgcctgccaccaaggacagcatcaagcacctgagcctgcagcccttccagaagggcttcatcatccagcctgacagcagcatcgtggtgaagcccatcagcggggagagcgccatcgagctggccgacatccagcagatcctgaagatggccgccagcgccccaccccagatcagcctgccccccttcagcaaggccccagctgcccccctgcaggccatcttcaagcacatgccacccctgaagcccaagcccctggtgacccccaggacagtggtggccaccagcaccccacctcctctcatcaatgcccagcaggccagccctggctgcatcagccccagcctgcccccaccacccctgaagctgctgaagggctctgtggaggccgccagcaatgcccacctgctgcagagcaagagcggcacccagccccatgctgccacccggctgagcctgcagcagcccagggctgagctgcccggccagcctgagatgaagacccagctggagcaggacagcatcatcgaggccctgctgcccctgtccatggaggccaagatcaagcaggagatcacagaaggagagctgaaggccttcatgacagcccctgggggcaagaagaccccagccatgaggaaggtgctgtacccctgccgcttctgcaaccaggtgtttgccttctctggagtgctgcgggcccacgtgcgcagccacctgggcatcagcccctaccagtgcaacatctgtgactacatcgctgctgacaaggccgccctgatccgccacctgcggacccacagcggggagcggccctacatctgcaagatctgccactaccccttcaccgtgaaggccaactgtgagcggcacctgaggaagaagcacctgaaggccaccaggaaggacatcgagaagaacatcgagtatgtgagcagcagcgctgctgagctggtggatgccttctgtgccccagacacagtgtgccgcctgtgtggggaggacctgaagcactaccgggccctgcgcatccacatgaggacccactgcggccggggcctgggcggcggccacaagggcaggaagccctttgagtgcaaggagtgcagcgctgcctttgctgccaagaggaactgcatccaccacatcctgaagcagcacctgcacgtgcctgagcaggacatcgagagctatgtgctggccgcagatggcctgggccctgctgaggccccagctgctgaggccagcggccgcggggaggacagcggctgtgccgccctgggggactgcaagcccctgacagccttcctggagccccagaatggcttcctgcaccggggccccacccagcccccacctcctcatgtgtccatcaagctggagcccgccagcagctttgctgtggacttcaatgagcccctggacttcagccagaagggcctggccctggtgcaggtgaagcaggagaacatctccttcctgagccccagcagcctggtgccctatgactgcagcatggagcccatcgacctgagcatccccaagaacttcagaaaaggagacaaggacctggccacccccagcgaggccaagaagccagaggaggaggccggcagcagcgagcagcccagcccctgcccagcccctggccccagcctgcctgtgaccctgggccccagcggcatcctggagagccccatggccccagccccagctgccaccccagagcccccagcccagcccctgcagggccctgtgcagctggccgtgcccatctacagcagcgccctggtgagcagcccccccctggtgggcagcagcgccctgctgtctggaacagccctgctgcggcccctgcggcccaagccacccctgctgctgcccaagccccctgtgacagaggagctgccccccctggccagcatcgcccagatcatcagctctgtgtcctctgcccccaccctgctgaagaccaaggtggccgaccccggccctgccagcacaggcagcaacaccacagccagtgacagcctgggcggctctgtgcccaaggccgccaccacagccaccccagctgccaccaccagccccaaggagagcagcgagcccccagccccagccagcagccctgaggccgccagccccacagagcagggccctgctggcaccagcaagaagaggggcaggaagaggggcatgaggagccggccccgggccaacagcggaggagtggacctggacagcagtggagaatttgccagcattgagaagatgctggccaccacagacaccaacaagttcagccccttcctgcagacagctgaggacaacacccaggatgaggtggccggggccccagctgaccaccacggccccagtgatgaggagcagggcagccccccagaggacaagctgctgcgggccaagaggaacagctacaccaactgcctgcagaagatcacctgcccccactgccccagggtcttcccctgggccagcagcctgcagaggcacatgctgacccacacaggccagaagcccttcccctgccagaagtgtgatgccttcttcagcaccaagagcaactgtgagcggcaccagctgaggaagcatggagtgaccacctgcagcctgcggagaaatggcctcatcccccagagcaaggagagtgatgtgggcagccatgacagcactggagagcggccctacaagtgccagacctgtgagaggaccttcaccctgaagcacagcctggtgcgccaccagaggatccaccagaaggcccggcatgccaagcaccacggcaaggacagcgacaaggaggagcggggggaggaggacagtgaaaatgaaagcacccacagcggcaacaatgctgtgtctgaaaatgaagctgagctggccccaaatgccagcaaccacatggctgtgaccaggagcaggaaggagggcctggccagcgccaccaaggactgcagccaccgggaggagaaggtgacagctggctggcccagcgagcccggccagggcgacctgaaccctgagagccctgctgccctgggccaggacctgctggagcccaggagcaagaggcctgcccaccccatcctggccacagcagatggagccagccagctggtgggcatggagtag

SEQ ID NO: 19985 - DNA, 4431 bp, Artificial Sequence
  derived and/or modified sequence
atgaccagcagcagccccgccggcctggagggcagcgacctgagctccattaacactatgatgtccgcggtgatgagcgtgggaaaagtgacggagaacggcggatcgccccagggtatcaaatcgccaagcaaacctccgggtcctaaccggatcggccgtcggaaccaggaaactaaagaggaaaagtcaagctataactgcccactctgtgaaaagatttgcactacccagcaccagctcacaatgcacatcagacagcacaacaccgatactggcggggccgatcactcttgttcaatctgcggcaaatcgttatcctccgcaagcagtctggacaggcatatgctagttcactccggcgaaagaccttacaagtgcactgtctgcggacagtcctttactaccaatggcaacatgcacagacacatgaagatacacgagaaggacccaaatagtgctaccgccacagcacctccaagccctctcaagcggcgcaggttgagctcaaagcgaaaattgtctcacgacgcagagagcgagagagaggatccggctccagccaaaaaaatggttgaagacgggcagtctggggacctggagaagaaggcggacgaggtgtttcactgccctgtgtgtttcaaggaatttgtgtgtaagtatggactggagacccacatggaaacccattcagataatcccttgagatgcgacatttgctgcgtgacgtttcggacacatagaggcctgctccgacacaacgcgttggttcacaagcagctgcctagagatgccatgggaaggccgtttatccagaacaacccttccattcctgccgggtttcatgacctcggatttaccgatttctcttgtaggaaatttccacgtatctcacaagcctggtgcgagactaatctaagaaggtgcatttcagagcagcatcgatttgtgtgcgacacttgcgacaaagcatttcctatgctgtgctccctggccctgcacaaacagacacacgtcgctgctgaccagggacaagagaagccccaggccactccactgccgggagacgctctggaccagaagggattcctcgctctgctcggccttcagcatactaaggacgtcaggccagcgccggctgaggagccactgcctgatgacaaccaagccattcaacttcagaccctgaaatgccagttgccccaggatccaggatgcacaaacctcctatccttatccccgtttgaagccgcatccttgggggggagcctgactgtgctccccgctacgaaagacagcatcaagcacctcagccttcaaccctttcagaaggggtttatcatccaaccagactcaagcattgtggtcaagcctatatccggtgaaagtgccatagaacttgccgacatccagcagatcttgaagatggcagcatcagcacccccacagatatcactcccccctttttccaaagcgcctgccgctcctctgcaggccatatttaagcacatgcctccattaaaacctaagcctctggtcactcctaggaccgtcgttgcaacctcgactccacctcctcttatcaatgcgcaacaggctagcccaggttgcatctccccatctcttccgcctccccctctgaagctgctaaaaggcagcgtggaagctgcctccaatgcccacctgctgcagtctaagagcggaactcagccacacgcagcaacgaggctttcactgcaacagcctcgcgccgagctgcccggtcagccagagatgaagactcagcttgaacaggatagtattatagaagcactgctacctctgagcatggaagccaaaattaaacaggagataacagagggggaactcaaggccttcatgactgccccggggggaaaaaagacccccgcaatgaggaaagtgctctacccctgtcgcttctgcaatcaggtgtttgccttttccggcgtcctgagagcccatgtgaggtcccacctgggcatatccccgtatcagtgtaacatctgcgattatatcgccgccgataaggcagctctgataaggcaccttcggacacattccggggaaagaccgtacatctgcaaaatatgtcattaccctttcacggtgaaggctaattgcgagaggcatttgaggaaaaaacacttaaaagctacacgaaaggatatcgaaaagaatatagaatacgtgagctccagtgctgcggagctcgtcgacgctttctgcgcacccgatacagtgtgccgcctttgcggagaggatctcaagcattatcgggccctcaggatccacatgagaacccactgtggtaggggactgggcggcgggcacaagggcaggaagccgtttgaatgtaaagagtgcagtgccgctttcgctgctaagcgtaattgtatccatcatatcctgaaacaacacctgcacgtgcctgagcaggacattgagagttacgtgttagctgctgacggactcggtccagccgaggcccccgcggctgaggcaagtggtcggggcgaagactccggctgcgcagcactcggggattgcaaaccactgaccgcatttctggagcctcagaatggattccttcaccgaggtccaacccagcctccaccaccccatgtctccattaagctcgaaccagcctcctcatttgccgtggatttcaatgagccactcgatttttcccagaagggcttagcactggttcaggtgaagcaggagaatatcagctttctttcaccttccagtctggtaccttatgattgttccatggagcccatcgacctctcaatccctaaaaatttccggaagggtgacaaggatctggcaacaccatctgaagcaaagaagcctgaagaggaagctggctcaagtgagcaaccctccccgtgcccagctcccgggccgtccctcccagtcactctcgggccatctggcatactcgagtcacccatggcacccgcgccggctgctactcccgagcccccggcccagcccctgcaaggaccagtgcagctggccgtgcccatttattcttcagcgttagtctcgtctccaccactcgtcggcagctccgcactcctgtccggcacagcactgctgaggccactgagacccaaaccccccttgctgctccctaaacctcctgtgaccgaggaattgccacccctggcatccatcgctcagattatttcgagcgtgtccagcgcacccaccttgcttaagacaaaggtcgctgacccaggccccgcttccacaggctctaataccacggctagtgactcactgggcggatccgttcctaaagccgcaacaacagcgaccccagctgctaccaccagtcccaaggaatcttcagagccgccagcgcctgcatctagtcctgaagctgcttcacccaccgaacaggggcccgctgggactagcaaaaaaagaggtcggaaaagaggaatgagatcgaggcccagagccaattcaggcggcgtagacctagactcaagcggagagtttgccagcatagagaagatgcttgctaccaccgatacgaacaagttctccccttttttgcagactgccgaagacaatacacaggatgaagtggctggggcccctgccgatcatcacgggccatctgacgaggagcagggaagcccccccgaggataaattactcagagcaaaaaggaattcctatacaaattgcctccagaaaattacttgcccgcattgtcctagagtcttcccatgggcgagctccctgcagcgtcacatgctaacccacaccggccagaaacccttcccctgccagaaatgtgatgcttttttcagtactaagagcaattgtgaacggcaccaacttcgaaagcacggcgttacaacatgtagcctccgccgtaatggtcttatcccacagagcaaggagtctgacgtgggatcacatgattctacgggcgagagaccttacaagtgtcagacatgcgaacgcaccttcaccctgaaacattctctggtgcgtcatcagaggatccaccaaaaggctaggcatgctaagcaccatggaaaagacagtgataaggaggaacgaggcgaggaagacagcgaaaatgagtctacccacagcgggaacaacgccgtgagcgagaatgaggccgagttggcaccgaacgcgagtaaccacatggccgttacccggtctaggaaggaaggcctggctagcgccaccaaggactgcagtcatcgcgaggagaaggtgaccgctggttggccttctgaacctggtcagggtgaccttaaccctgagagcccagctgccctcggacaggacctccttgaacctcgcagtaaaaggcctgcccacccaatccttgccacagctgatggagcttcccagctggtcggaatggagtag

SEQ ID NO: 19986 - DNA, 4431 bp, Artificial Sequence
  derived and/or modified sequence
atgacaagcagtagccctgccggtctcgaagggagcgatttgtctagcatcaatactatgatgtccgccgtgatgtcagtaggtaaagtcaccgaaaacggtggatccccacagggcatcaagtcccccagtaaaccccctggccctaatcgcatcggcaggcgcaatcaagagactaaagaagagaagagtagctataattgcccactatgtgagaaaatttgcacgacgcagcaccagcttactatgcacattagacagcataacactgacacaggtggagccgatcactcgtgtagcatctgcgggaaatcactgtcctccgcctctagccttgaccggcatatgcttgttcattccggcgagagaccctacaaatgcaccgtgtgtggtcagtctttcactaccaatggtaacatgcacagacacatgaaaatccacgaaaaagacccgaactctgccacagcaacggccccaccttctcctctcaaaagacgaaggctttcttctaagagaaaactgagccatgatgctgaaagtgagagagaggatccagcaccagcaaaaaagatggtagaggacggtcagtctggtgatctcgagaagaaggcagacgaggtcttccactgccctgtgtgcttcaaggagttcgtgtgtaagtacggactggagactcacatggagacacactcggacaatcccttgcgctgtgacatatgctgcgttaccttccggacacaccgcggactgctgcggcacaatgctctggtgcataagcagctgccacgagacgctatgggacgtcccttcatccagaataatccatcaataccagctgggtttcatgatctgggatttaccgacttttcatgcaggaagtttcctaggatcagtcaggcatggtgtgaaaccaaccttagaaggtgtatcagcgagcaacacaggttcgtgtgcgatacatgcgacaaggcctttcctatgctgtgcagcctggccctgcacaagcaaacccacgttgctgctgaccaggggcaagaaaagccccaggctacccccttacctggcgatgccctggatcaaaaaggcttcctggccctcctgggcctgcagcacacaaaagacgtgcgcccagctccagctgaagagcctctgcctgatgataaccaggcgattcagctgcaaactctgaaatgtcagttaccacaggacccagggtgtacaaacttgctgtccttatctcccttcgaggccgcttccttaggcggatctctgaccgtcctccccgctacaaaggactccattaaacacctcagcctccagccgtttcagaagggcttcatcatccagcccgattcatccatcgtagtgaagcccatctcaggcgaatccgctatcgagctggctgacatccagcaaatcctaaaaatggcagccagtgcgcctcctcagatctccctgccacctttttctaaggcacctgctgccccactacaagcgatcttcaagcacatgcctcctctgaagcctaaacccctggtcactccacgtactgtcgtcgctacctccacccctccacctttgattaacgctcaacaggcttcccccggttgtatatcccctagtttgccacctccccctctgaagctgctcaagggtagtgtggaggccgcaagcaatgcccacctcctgcagtcaaagtccggaacccaacctcacgcggctaccagactgagtctacaacagccccgtgcagagcttccgggtcagccggaaatgaaaactcagctggaacaggactctattatcgaggcgctactgcccctcagcatggaggcaaagattaagcaagaaattacagaaggggaactgaaggcattcatgactgcccctgggggtaagaaaacgccagccatgagaaaggtcctctatccctgtcgcttttgcaaccaagtgtttgccttctctggagtgctcagggctcatgtgagatcacacctcggaatctcaccgtatcagtgcaatatttgtgattatatcgccgctgacaaggccgctttgattaggcaccttcgaacacattcaggagagcggccatatatctgcaaaatttgccattaccccttcaccgtgaaagcaaattgcgagcgacacctgcgcaagaagcacctgaaggcgactagaaaagacattgaaaagaatatcgagtatgtttcttctagtgccgctgagctggttgacgcattttgtgctccggataccgtgtgtcggctgtgcggcgaggatctgaaacattacagggcactccgcattcacatgagaacccactgtggccgtggtctgggcggtggccacaagggcaggaagcctttcgagtgtaaggagtgttcagctgcattcgctgctaaaagaaattgcattcatcatatcttgaagcaacatctgcacgtgcccgagcaggatatagagtcctacgttttggcggcagacggcctaggaccggctgaagccccagccgcagaggcctccgggcgaggggaggacagtggatgtgccgctcttggagactgcaagcccctgacagctttcctggaaccacagaacggttttttgcatagagggccaacacagcccccaccccctcatgtgagcattaagctagagcctgctagcagtttcgccgtggacttcaacgagccactagatttctcccagaagggtttagccctggtccaagtcaagcaggagaacatcagtttcctatctcctagcagcctcgtgccctatgactgttcaatggagcctatagacttgagcataccaaagaattttcggaagggggataaagacctggccacaccttcggaggctaagaagccagaggaggaagctggtagcagcgaacaacctagtccttgcccagcgcctgggccttctcttccagtgacattaggtccttccggtatcctagagtccccgatggctcccgcacctgctgccacaccggaacctccagcgcaaccacttcagggacctgtgcagctcgctgtgcctatttacagctccgctctcgtgtcttcaccgccactggttggatcctccgcgctgctctcaggaaccgccctgctgcgcccactccggcctaagcctcctctactgctgcctaaaccgcctgtcacagaggagcttccaccattagccagcattgcgcagataatcagcagtgtatcctccgcacctaccctgcttaaaacaaaagtggccgatcccggacccgcatcaactggttctaatactacagcctcagatagcttggggggtagcgtcccgaaagcagctaccactgcaactcctgccgcaacaacctcccctaaggaaagttctgaacctccagcgcctgcctccagtccagaggctgcctcccccaccgaacaggggcctgcaggaacatcaaagaaaagaggcaggaagcgcggtatgcggtctcgcccaagggcaaactctggcggagtggatctcgatagcagcggcgagttcgcgtccatagaaaagatgctggctactacagacacaaacaagtttagtccttttttgcagacagcggaggacaacacgcaggatgaggtggccggtgcacctgccgaccatcatgggccaagcgacgaggagcagggttcccccccagaagacaagttgttgagggctaagaggaattcctataccaactgccttcagaaaatcacatgtcctcattgccccagagtgttcccatgggcctctagcctgcagcgtcatatgttaacacacactggccagaagcccttcccttgtcagaagtgtgatgctttcttcagcacaaagtcgaattgcgaaagacatcagcttcgaaagcatggggtcaccacatgctctttgaggaggaacggactaattccccagtccaaggaatctgatgtaggctcccacgattctaccggcgagcgcccttataagtgccaaacctgtgaacggacgttcacactcaagcattcgctggttagacaccaaaggatacaccagaaggccagacacgccaagcatcacggaaaggactcagataaggaggagcgcggtgaagaggactcagaaaatgagtccacacactcaggaaacaatgccgtcagtgaaaacgaggctgagctggcacctaacgctagcaatcatatggcagttacgaggtcacgaaaagaaggccttgcctcagcaaccaaggattgctctcacagggaggagaaggtgacggcgggttggccatctgagccgggacagggggacctgaacccggagtcaccggcagctctgggccaagatctacttgagccaaggtccaaacggccagctcacccgattctggctaccgctgatggagcctcccagcttgtggggatggagtag

SEQ ID NO: 19987 - DNA, 5789 bp, Artificial Sequence
  derived and/or modified sequence
atgccagggagccaagcgtcctgcccggccgttgctccgactgtgtgttccaggagtggtggctctgaggtgtgaccctgcccacgtttgggcccagccaggttcagccccccaataaggagggcagcttgataacacaaagaaaacagtgtcaacgagtactaccaagagaagaagacaagaggtcaacacagactcattttctactccgtgtgaatgatagctacagcaggggaaagtttcatagtctatcagtgggtcagaaaatggagttttatagcagaggcttcttagaagcttaaacccctgtcccaatgacgtcaagttcgcccgctggcttggaaggttcagacctatcttccatcaacaccatgatgtcggcggtcatgagtgtagggaaggtcacagagaatggcgggagcccccaggggatcaagtccccctcgaagcctccaggaccaaatcggattggcagaaggaaccaggaaacgaaagaggagaagtcttcctataactgccccctgtgtgagaagatttgcactacccagcaccagctgaccatgcacattcgccagcacaacacagacactggaggagccgaccactcatgcagcatctgcggaaagtcactgagctcggccagctccctcgatcgccacatgctggtgcactctggcgagaggccttacaagtgcactgtgtgtggccagtcatttaccaccaatgggaacatgcacagacatatgaagatccatgagaaggaccctaacagtgccacagccacagcccctccatctcctctgaaacgtaggcgattgtcctccaagaggaaactgagtcacgatgccgagtcagagagagaagacccagcaccagctaaaaagatggtagaagacgggcagtcaggtgacttggagaagaaagctgatgaagtctttcactgcccagtatgtttcaaggagtttgtttgcaagtatggactggagacccacatggagacccattcagataacccactaagatgtgacatttgttgtgtcacctttcgaacacatcgaggactgctgcgtcacaacgcgcttgtccacaaacaacttcccagggatgcaatgggcagacctttcatacagaacaacccttcaattcctgctggcttccacgacttaggattcacggacttctcctgtaggaagtttcctcgcatttctcaggcctggtgcgaaacaaacctgcggaggtgcatcagcgagcaacaccgttttgtctgcgacacctgtgacaaggcgttccccatgctctgctcactggctctgcacaagcagacccatgtggcggcagaccagggtcaagaaaagccgcaggccacgcccctgcctggtgacgccctggaccagaagggcttcctggccttgcttggcctgcagcacaccaaagacgtcaggcctgcccccgccgaggagcccctgccggatgacaaccaggcaattcagctccagacactcaagtgtcagctacctcaggaccccggctgcaccaacctgctgagcctgtcacctttcgaagctgcttccctaggcggttctctcacagttctccccgcgaccaaggacagcataaagcacctgtccctgcagcccttccagaagggcttcatcatccagcctgacagcagcattgtggtcaagcccatctctggcgagtcggccatcgagctggcagacatccagcaaattctgaagatggcagcctcggctccccctcagatcagtcttccgcccttctccaaggcccctgccgccccactgcaggcgatcttcaagcacatgccccctctgaagccaaagcccctggtcacaccacggacggtggtggccacctccacgcccccgcctctcatcaacgcccagcaggcttccccgggctgtatcagccccagcctgccgccaccgcccctgaagctcctcaaaggctcagtggaggcggcctccaacgcccacctgctgcagtccaagtccgggacccagccccacgcggccacgcggctctccctgcagcagccgcgggcggagctgccgggccagcctgagatgaagacgcagctggagcaggacagcatcatcgaggccctgctgccgctgagcatggaggccaagatcaagcaggagatcacagagggggaactcaaggccttcatgacagcgcccggcggcaagaagacgcccgccatgcgcaaggtgctctacccctgccgcttctgcaaccaggtgtttgccttctcgggggtcttgcgtgcccacgtgcgctcccacctgggcatctcgccataccagtgcaacatctgcgactacatcgccgccgacaaggccgcgctcatccgccacctgcgcacgcacagtggggagcggccctacatttgcaagatctgccactaccccttcactgtcaaagccaactgcgagcggcacctgcgcaagaagcacctcaaggccacccgcaaggatatcgagaagaacatcgagtatgtgagtagcagcgcggccgagctggtggacgccttctgcgccccggacaccgtgtgccggctgtgcggcgaggacctcaagcactatcgtgccctgcgcatccacatgcgcacgcactgcggccgcggcctgggcgggggccacaagggccgcaagcccttcgagtgcaaggagtgcagcgccgcgttcgcggccaagcgcaactgcatccaccacatcctcaagcagcacctgcacgtgcccgagcaggacatcgagagctacgtgctggccgccgacggcctgggccccgcagaggcgccggccgctgaggcgtcggggcgcggggaggacagtggctgcgctgcccttggtgactgcaagcccctcactgccttcctggaaccccagaacggctttcttcacaggggccccacccagcctccacctccccatgtctcgatcaagttggagcccgccagtagctttgcggtggacttcaatgagcccctggacttctcgcagaagggcctggccctggtccaagtgaagcaggaaaacatctcctttctgagcccttcttccctggtcccctatgactgctccatggagcccatcgacctgtccatccccaagaacttcaggaaaggggacaaggatttggccactcccagcgaagccaagaagcctgaggaggaggcggggagcagcgagcagccctctccctgcccagcacccggcccttctcttcctgtaactttggggcccagcggaatcctggaaagccccatggcccctgctccggcggccaccccggaacccccagcacagcccctgcagggccctgttcagctggcggtcccaatctactcctcagccctggtcagcagccctccactcgtgggcagctcagccctcctgagtggcacagccttgctgcgtccactgcggcccaagcccccgctgcttttgccaaagccccccgtgacagaagagctgcccccgctggcctccattgcccagatcatctcatctgtatcctcggcccccaccctgctgaaaaccaaggtggcggacccagggcccgcaagcactggcagtaacaccacggcttcagacagcttaggaggttctgtccccaaagccgccaccaccgccacccccgctgccaccaccagcccaaaagagtctagtgagcctcccgctccagccagcagcccagaggctgcctctcccaccgagcagggcccagcgggcacgtcgaagaagaggggccggaaaagggggatgaggagccgaccccgcgccaacagcggcggggtggacctggactccagcggggagtttgccagcatcgagaagatgctggccaccacagacaccaacaagttcagtccgtttctgcagacagcggaggacaacactcaggatgaggtggccggagcccctgccgaccaccatgggcccagtgatgaagagcagggcagtcccccagaagacaagctgctgagggccaagcggaactcgtacaccaactgcctgcagaagatcacctgtccccactgtccccgggttttcccttgggccagctccctacagaggcacatgctcacacacactggtcagaaacccttcccttgtcaaaaatgcgatgccttcttttctaccaaatctaactgtgaacgccaccagttgcgcaaacacggagttaccacctgttccctgagaagaaacgggcttatcccccagtcaaaagagagtgatgttggatcccatgatagcacaggggaaaggccatacaaatgtcagacctgcgagcgaaccttcaccttgaagcacagcctggttcgccaccagcggatccaccagaaagccaggcatgccaaacaccacgggaaggacagcgacaaggaagagcggggtgaggaggacagcgagaatgagtccacccacagcggcaacaacgccgtctcagagaacgaggctgagctggctcccaatgccagcaaccacatggctgtcacccggagccggaaggagggcttggccagtgccaccaaggactgcagccacagggaggagaaggtcacggcagggtggccgtctgagcctggccagggtgaccttaacccagagagcccggcggccctggggcaggacctgctggagccgcgcagcaagaggcctgcccacccaatcctggccacagctgatggcgcctcccagctcgtggggatggagtgacagcctcagtccccctcagcacagacaaaagccagcagagcaaagcgtctatacttcatggggtttcctcagtgccctttggctgttgaggagtgagagagagagagagagagagagagagagagagagagagagacaagcaggagcgtggctgctcgctcagtgccatagccttaccgcagcctgcgcgggaggccacagcccgtgccgattccagtgccttaactacttaccggatccctccatattatcatgggtgttgtatttttccaaaatgacttcttaaacaaaacaaatattataatgaattgtctggagaggacctcttcatttgagcattagcgttattttgtattggtgtgtgtgagcttgttcttgtgaatctgtgatagcaccgtttgttctgtgagctggaaacagaaggaaaaaacatacccttgggtacccatagccaataactggaagaaaatgatgtgaatttcatgtaaatgaccagaggaaagatggataagatgataatttcttaaatagacattttccttttttctttgtgcttcatggtggagctgtcatctggtccttggtattacaggatgtggttgatgaaggtttccaatatggtttcaggccaaaaccagggaagattctagcttcagcctcatgtccatttccagtctgtcagcattagacatggtcactgttcaagtttcaagacatccattcttaactatagagaagagttactcccctggcgtcttaacctatggaaaacatgcacggataggatatatttgattgcctcctcttccctttcagtatatgtattattaatattattattattattattattattagttcatcagtttgctgttctctgcagtgagcagaatcaaatgggcaatatttgtcctgggagacctgtgccgcacccaggtccccgtgttaacgtgtgcctgcggttgtggttggcaccctcgggtggtagctcttctactgtaatgagacaagcctttcttctgtcactgcagaatttagaagggg

SEQ ID NO: 19988 - DNA, 4431 bp, Artificial Sequence
  derived and/or modified sequence
atgaccagcagcagccccgccggcctggagggcagcgacctgagcagcatcaacaccatgatgagcgccgtgatgagcgtgggcaaggtgaccgagaacggcggcagcccccagggcatcaagagccccagcaagccccccggccccaacagaatcggcagaagaaaccaggagaccaaggaggagaagagcagctacaactgccccctgtgcgagaagatctgcaccacccagcaccagctgaccatgcacatcagacagcacaacaccgacaccggcggcgccgaccacagctgcagcatctgcggcaagagcctgagcagcgccagcagcctggacagacacatgctggtgcacagcggcgagagaccctacaagtgcaccgtgtgcggccagagcttcaccaccaacggcaacatgcacagacacatgaagatccacgagaaggaccccaacagcgccaccgccaccgccccccccagccccctgaagagaagaagactgagcagcaagagaaagctgagccacgacgccgagagcgagagagaggaccccgcccccgccaagaagatggtggaggacggccagagcggcgacctggagaagaaggccgacgaggtgttccactgccccgtgtgcttcaaggagttcgtgtgcaagtacggcctggagacccacatggagacccacagcgacaaccccctgagatgcgacatctgctgcgtgaccttcagaacccacagaggcctgctgagacacaacgccctggtgcacaagcagctgcccagagacgccatgggcagacccttcatccagaacaaccccagcatccccgccggcttccacgacctgggcttcaccgacttcagctgcagaaagttccccagaatcagccaggcctggtgcgagaccaacctgagaagatgcatcagcgagcagcacagattcgtgtgcgacacctgcgacaaggccttccccatgctgtgcagcctggccctgcacaagcagacccacgtggccgccgaccagggccaggagaagccccaggccacccccctgcccggcgacgccctggaccagaagggcttcctggccctgctgggcctgcagcacaccaaggacgtgagacccgcccccgccgaggagcccctgcccgacgacaaccaggccatccagctgcagaccctgaagtgccagctgccccaggaccccggctgcaccaacctgctgagcctgagccccttcgaggccgccagcctgggcggcagcctgaccgtgctgcccgccaccaaggacagcatcaagcacctgagcctgcagcccttccagaagggcttcatcatccagcccgacagcagcatcgtggtgaagcccatcagcggcgagagcgccatcgagctggccgacatccagcagatcctgaagatggccgccagcgcccccccccagatcagcctgccccccttcagcaaggcccccgccgcccccctgcaggccatcttcaagcacatgccccccctgaagcccaagcccctggtgacccccagaaccgtggtggccaccagcacccccccccccctgatcaacgcccagcaggccagccccggctgcatcagccccagcctgccccccccccccctgaagctgctgaagggcagcgtggaggccgccagcaacgcccacctgctgcagagcaagagcggcacccagccccacgccgccaccagactgagcctgcagcagcccagagccgagctgcccggccagcccgagatgaagacccagctggagcaggacagcatcatcgaggccctgctgcccctgagcatggaggccaagatcaagcaggagatcaccgagggcgagctgaaggccttcatgaccgcccccggcggcaagaagacccccgccatgagaaaggtgctgtacccctgcagattctgcaaccaggtgttcgccttcagcggcgtgctgagagcccacgtgagaagccacctgggcatcagcccctaccagtgcaacatctgcgactacatcgccgccgacaaggccgccctgatcagacacctgagaacccacagcggcgagagaccctacatctgcaagatctgccactaccccttcaccgtgaaggccaactgcgagagacacctgagaaagaagcacctgaaggccaccagaaaggacatcgagaagaacatcgagtacgtgagcagcagcgccgccgagctggtggacgccttctgcgcccccgacaccgtgtgcagactgtgcggcgaggacctgaagcactacagagccctgagaatccacatgagaacccactgcggcagaggcctgggcggcggccacaagggcagaaagcccttcgagtgcaaggagtgcagcgccgccttcgccgccaagagaaactgcatccaccacatcctgaagcagcacctgcacgtgcccgagcaggacatcgagagctacgtgctggccgccgacggcctgggccccgccgaggcccccgccgccgaggccagcggcagaggcgaggacagcggctgcgccgccctgggcgactgcaagcccctgaccgccttcctggagccccagaacggcttcctgcacagaggccccacccagcccccccccccccacgtgagcatcaagctggagcccgccagcagcttcgccgtggacttcaacgagcccctggacttcagccagaagggcctggccctggtgcaggtgaagcaggagaacatcagcttcctgagccccagcagcctggtgccctacgactgcagcatggagcccatcgacctgagcatccccaagaacttcagaaagggcgacaaggacctggccacccccagcgaggccaagaagcccgaggaggaggccggcagcagcgagcagcccagcccctgccccgcccccggccccagcctgcccgtgaccctgggccccagcggcatcctggagagccccatggcccccgcccccgccgccacccccgagccccccgcccagcccctgcagggccccgtgcagctggccgtgcccatctacagcagcgccctggtgagcagcccccccctggtgggcagcagcgccctgctgagcggcaccgccctgctgagacccctgagacccaagccccccctgctgctgcccaagccccccgtgaccgaggagctgccccccctggccagcatcgcccagatcatcagcagcgtgagcagcgcccccaccctgctgaagaccaaggtggccgaccccggccccgccagcaccggcagcaacaccaccgccagcgacagcctgggcggcagcgtgcccaaggccgccaccaccgccacccccgccgccaccaccagccccaaggagagcagcgagccccccgcccccgccagcagccccgaggccgccagccccaccgagcagggccccgccggcaccagcaagaagagaggcagaaagagaggcatgagaagcagacccagagccaacagcggcggcgtggacctggacagcagcggcgagttcgccagcatcgagaagatgctggccaccaccgacaccaacaagttcagccccttcctgcagaccgccgaggacaacacccaggacgaggtggccggcgcccccgccgaccaccacggccccagcgacgaggagcagggcagcccccccgaggacaagctgctgagagccaagagaaacagctacaccaactgcctgcagaagatcacctgcccccactgccccagagtgttcccctgggccagcagcctgcagagacacatgctgacccacaccggccagaagcccttcccctgccagaagtgcgacgccttcttcagcaccaagagcaactgcgagagacaccagctgagaaagcacggcgtgaccacctgcagcctgagaagaaacggcctgatcccccagagcaaggagagcgacgtgggcagccacgacagcaccggcgagagaccctacaagtgccagacctgcgagagaaccttcaccctgaagcacagcctggtgagacaccagagaatccaccagaaggccagacacgccaagcaccacggcaaggacagcgacaaggaggagagaggcgaggaggacagcgagaacgagagcacccacagcggcaacaacgccgtgagcgagaacgaggccgagctggcccccaacgccagcaaccacatggccgtgaccagaagcagaaaggagggcctggccagcgccaccaaggactgcagccacagagaggagaaggtgaccgccggctggcccagcgagcccggccagggcgacctgaaccccgagagccccgccgccctgggccaggacctgctggagcccagaagcaagagacccgcccaccccatcctggccaccgccgacggcgccagccagctggtgggcatggagtag

SEQ ID NO: 19989 - protein, 116 aa, Artificial Sequence
  derived and/or modified sequence
MHCDGGISMILQRLFRFSSVIRSAVSVHLRRNIGVTAVAFNKELDPIQKLFVDKIREYKSKRQTSGGPVDASSEYQQELERELFKLKQMFGNADMNTFPTFKFEDPKFEVIEKPQA

SEQ ID NO: 19990 - DNA, 351 bp, Artificial Sequence
  derived and/or modified sequence
atgcactgtgatggtggcatctccatgatcctccagcggctctttcgcttttcatctgtgatcaggagcgctgtctcggtacatctccggagaaacattggggtgactgctgtggcatttaacaaggagctggaccccatccagaaactgttcgttgacaaaataagagagtacaagtctaaaaggcagacgagtgggggcccggttgatgcctccagtgagtaccaacaggagttggagagagaactgtttaagctcaaacagatgtttggaaatgcggatatgaatacttttcctacgtttaagttcgaggacccgaagttcgaggtgatcgagaagcctcaggcgtag

SEQ ID NO: 19991 - DNA, 351 bp, Artificial Sequence
  derived and/or modified sequence
atgcactgtgatggcggcatctccatgatcctgcagaggctcttccgcttcagcagcgtcatccgctctgctgtgtctgtgcacctgcggagaaatattggagtgacagctgtggccttcaacaaggagctggaccccatccagaagctgtttgtggacaagatccgggagtacaagagcaagaggcagaccagcggcggccctgtggatgccagcagcgagtaccagcaggagctggagcgggagctgttcaagctgaagcagatgtttggaaatgctgacatgaacaccttccccaccttcaagtttgaggaccccaagtttgaggtgattgagaagccccaggcctag

SEQ ID NO: 19992 - DNA, 351 bp, Artificial Sequence
  derived and/or modified sequence
atgcactgcgacggcggcatcagcatgatcctgcagcggctgttcaggttctcaagtgtgattcgcagcgctgtgagcgtacatctacgtaggaacataggggtaactgcagtggcttttaacaaggaactggacccaatccagaagttgtttgttgacaagatccgcgaatataaatcgaagaggcaaacctctggtggccccgtggatgccagcagcgagtaccagcaggagctcgaacgcgagctgttcaagctgaaacagatgttcgggaatgccgatatgaacacctttccaacatttaagtttgaagacccaaaattcgaagtcatcgagaaaccccaggcctag

SEQ ID NO: 19993 - DNA, 351 bp, Artificial Sequence
  derived and/or modified sequence
atgcattgcgacggtgggataagcatgattctgcaacgcttgttccgttttagcagcgtgattagatccgccgtgtccgtgcacctacggcgaaatatcggggttaccgccgtggcattcaacaaagagctggacccaatacagaaactttttgttgacaagattcgagaatacaaaagcaaacgccaaacaagcggcggtcccgtggacgcttcctccgagtatcagcaggagctagaaagagaacttttcaagctgaaacagatgttcggaaacgctgatatgaacacgttccccacttttaagtttgaggatcccaagttcgaggtaattgaaaagccccaggcctag

SEQ ID NO: 19994 - DNA, 614 bp, Artificial Sequence
  derived and/or modified sequence
tgaaacggcggcccataatgcattgcgatggcgggtaggcgtgtgggggcggagccagggccggaagtagagcggaggtggtggcggcggaggctttggcagctcgggactgagtgcaagaatcagcatgattcttcagaggctcttcaggttctcctctgtcattcggtcagccgtctcagtccatttgcggaggaacattggtgttacagcagtggcatttaataaggaacttgatcctatacagaaactctttgtggacaagattagagaatacaaatctaagcgacagacatctggaggacctgttgatgctagttcagagtatcagcaagagctggagagggagctttttaagctcaagcaaatgtttggtaatgcagacatgaatacatttcccaccttcaaatttgaagatcccaaatttgaagtcatcgaaaaaccccaggcctgaagaaataaagtaaaattaatctggtaatttgtcacggattagttgtacaactagttagaagtttcagaataaacatgcatttcataactgtcaaatgttcttttaattctgagtccaaataaattatttggtgatgttgagtgtgttcttgatgaattga

SEQ ID NO: 19995 - DNA, 826 bp, Artificial Sequence
  derived and/or modified sequence
aaaaggccccggaacgaggccggcccgcgagggcccgcgctcccctcctccccggcggccgcactcacccactccggaatcggccctgtcgcccccgcccgcactccagagccggctgagaacggcagcggcgagggctccacgtgcagcgtctctccgggtaagacctgcagctcccgcgactagaagtgtgaggtcccagggcccttcccgcggaatcggcgctgagaagccccaacccccctcccgcctcccaggcaccttcgggtccaggactacaactcccggcagggtgcgcaaaacgaccgcccaaggcaacggaggctcacgagaatcagcatgattcttcagaggctcttcaggttctcctctgtcattcggtcagccgtctcagtccatttgcggaggaacattggtgttacagcagtggcatttaataaggaacttgatcctatacagaaactctttgtggacaagattagagaatacaaatctaagcgacagacatctggaggacctgttgatgctagttcagagtatcagcaagagctggagagggagctttttaagctcaagcaaatgtttggtaatgcagacatgaatacatttcccaccttcaaatttgaagatcccaaatttgaagtcatcgaaaaaccccaggcctgaagaaataaagtaaaattaatctggtaatttgtcacggattagttgtacaactagttagaagtttcagaataaacatgcatttcataactgtcaaatgttcttttaattctgagtccaaataaattatttggtgatgttgagtgtgttcttgatgaattga

SEQ ID NO: 19996 - DNA, 647 bp, Artificial Sequence
  derived and/or modified sequence
cccggaacgaggccggcccgcgagggcccgcgctcccctcctccccggcggccgcactcacccactccggaatcggccctgtcgcccccgcccgcactccagagccggctgagaacggcagcggcgagggctccacgtgcagcgtctctccggaatcagcatgattcttcagaggctcttcaggttctcctctgtcattcggtcagccgtctcagtccatttgcggaggaacattggtgttacagcagtggcatttaataaggaacttgatcctatacagaaactctttgtggacaagattagagaatacaaatctaagcgacagacatctggaggacctgttgatgctagttcagagtatcagcaagagctggagagggagctttttaagctcaagcaaatgtttggtaatgcagacatgaatacatttcccaccttcaaatttgaagatcccaaatttgaagtcatcgaaaaaccccaggcctgaagaaataaagtaaaattaatctggtaatttgtcacggattagttgtacaactagttagaagtttcagaataaacatgcatttcataactgtcaaatgttcttttaattctgagtccaaataaattatttggtgatgttgagtgtgttcttgatgaattga

SEQ ID NO: 19997 - DNA, 1179 bp, Artificial Sequence
  derived and/or modified sequence
gcggccgcgggggggcccttgtgggggaaaaggccccggaacgaggccggcccgcgagggcccgcgctcccctcctccccggcggccgcactcacccactccggaatcggccctgtcgcccccgcccgcactccagagccggctgagaacggcagcggcgagggctccacgtgcagcgtctctccgggtaagacctgcagctcccgcgactagaagtgtgaggtcccagggcccttcccgcggaatcggcgctgagaagccccaacccccctcccgcctcccaggcaccttcgggtccaggactacaactcccggcagggtgcgcaaaacgaccgcccaaggcaacggaggctcacgaggtacaaggaagcacaacgccccaatccgctttgttttacacagtctcactttccctgcacctttatacacttcgataaccctaacgaacaggacgctgactcggaggggagcttgaactaggggaaaggccactcaaagagcgcatgcgtacagagcaaggtttcaaggaggggaaaaagaacgggtcaaattaggcgaagaaaagatggcggaggctgtgccaggggacccggaagcacttaccctccacttcctcctcctgtttggcttctgtctcacctagacccgtccggtcgcagactgtctccgagacgcttcctgtccgaatcagcatgattcttcagaggctcttcaggttctcctctgtcattcggtcagccgtctcagtccatttgcggaggaacattggtgttacagcagtggcatttaataaggaacttgatcctatacagaaactctttgtggacaagattagagaatacaaatctaagcgacagacatctggaggacctgttgatgctagttcagagtatcagcaagagctggagagggagctttttaagctcaagcaaatgtttggtaatgcagacatgaatacatttcccaccttcaaatttgaagatcccaaatttgaagtcatcgaaaaaccccaggcctgaagaaataaagtaaaattaatctggtaatttgtcacggattagttgtacaactagttagaagtttcagaataaacatgcatttcataactgtcaaatgttcttttaattctgagtccaaataaattatttggtgatgttgagtgtgttcttgatgaattga

SEQ ID NO: 19998 - DNA, 589 bp, Artificial Sequence
  derived and/or modified sequence
agagcggaggtggtggcggcggaggctttggcagctcgggactgagtgcaaggaatatgcactgaagaggcagcgaacctactaacctttggccgaatcagcatgattcttcagaggctcttcaggttctcctctgtcattcggtcagccgtctcagtccatttgcggaggaacattggtgttacagcagtggcatttaataaggaacttgatcctatacagaaactctttgtggacaagattagagaatacaaatctaagcgacagacatctggaggacctgttgatgctagttcagagtatcagcaagagctggagagggagctttttaagctcaagcaaatgtttggtaatgcagacatgaatacatttcccaccttcaaatttgaagatcccaaatttgaagtcatcgaaaaaccccaggcctgaagaaataaagtaaaattaatctggtaatttgtcacggattagttgtacaactagttagaagtttcagaataaacatgcatttcataactgtcaaatgttcttttaattctgagtccaaataaattatttggtgatgttgagtgtgttcttgatgaattga

SEQ ID NO: 19999 - DNA, 589 bp, Artificial Sequence
  derived and/or modified sequence
tagacccgtccggtcgcagactgtctccgagacgcttcctgtccggtgagcgtcgaccgactgaaacggcggcccataatgcattgcgatggcggaatcagcatgattcttcagaggctcttcaggttctcctctgtcattcggtcagccgtctcagtccatttgcggaggaacattggtgttacagcagtggcatttaataaggaacttgatcctatacagaaactctttgtggacaagattagagaatacaaatctaagcgacagacatctggaggacctgttgatgctagttcagagtatcagcaagagctggagagggagctttttaagctcaagcaaatgtttggtaatgcagacatgaatacatttcccaccttcaaatttgaagatcccaaatttgaagtcatcgaaaaaccccaggcctgaagaaataaagtaaaattaatctggtaatttgtcacggattagttgtacaactagttagaagtttcagaataaacatgcatttcataactgtcaaatgttcttttaattctgagtccaaataaattatttggtgatgttgagtgtgttcttgatgaattga

SEQ ID NO: 20000 - DNA, 351 bp, Artificial Sequence
  derived and/or modified sequence
atgcactgcgacggcggcatcagcatgatcctgcagagactgttcagattcagcagcgtgatcagaagcgccgtgagcgtgcacctgagaagaaacatcggcgtgaccgccgtggccttcaacaaggagctggaccccatccagaagctgttcgtggacaagatcagagagtacaagagcaagagacagaccagcggcggccccgtggacgccagcagcgagtaccagcaggagctggagagagagctgttcaagctgaagcagatgttcggcaacgccgacatgaacaccttccccaccttcaagttcgaggaccccaagttcgaggtgatcgagaagccccaggcctag

SEQ ID NO: 20001 - protein, 135 aa, Artificial Sequence
  derived and/or modified sequence
MSEPQPRGAERDLYRDTWVRYLGYANEVGEAFRSLVPAAVVWLSYGVASSYVLADAIDKGKKAGEVGGFPPGLQPAQALPNSGEAQLLLIILWYLACASASCFMSTSYSCQGMWTPGSLVSKDPGTWVGLSWTEA

SEQ ID NO: 20002 - DNA, 408 bp, Artificial Sequence
  derived and/or modified sequence
atgagcgagccccagcccagaggcgccgagagagacctgtacagagacacctgggtgagatacctgggctacgccaacgaggtgggcgaggccttcagaagcctggtgcccgccgccgtggtgtggctgagctacggcgtggccagcagctacgtgctggccgacgccatcgacaagggcaagaaggccggcgaggtgggcggcttcccccccggcctgcagcccgcccaggccctgcccaacagcggcgaggcccagctgctgctgatcatcctgtggtacctggcctgcgccagcgccagctgcttcatgagcaccagctacagctgccagggcatgtggacccccggcagcctggtgagcaaggaccccggcacctgggtgggcctgagctggaccgaggcctag

SEQ ID NO: 20003 - DNA, 408 bp, Artificial Sequence
  derived and/or modified sequence
atgagcgagccccaaccaagaggggctgaaagggacctgtatcgggatacatgggtgcgctatttgggctatgctaatgaagtgggtgaagcttttaggtccctcgtgcccgccgccgtggtgtggctgtcttatggtgttgcatcttcctacgttctagccgacgccatcgataaaggtaagaaagcgggtgaggtgggagggttcccaccaggcctgcaaccagcgcaggccctccccaacagcggtgaggcccaattgctcctcataatcctttggtacctggcttgcgctagcgcctcttgcttcatgtctacttcgtatagttgccagggtatgtggacaccaggaagtttagtgagcaaggacccagggacatgggtcggcctctcatggacggaagcctag

SEQ ID NO: 20004 - DNA, 408 bp, Artificial Sequence
  derived and/or modified sequence
atgtctgagccccagcccagaggagctgagcgggacctgtacagagacacctgggtgcgctacctgggctacgccaatgaggtgggggaggccttccgcagcctggtgcctgctgctgtggtgtggctgtcctatggagtggccagcagctatgtgctggctgatgccatcgacaagggcaagaaggccggggaggtgggcggcttccccccaggcctgcagcctgcccaggccctgcccaacagcggggaggcccagctgctgctgatcatcctgtggtacctggcctgtgccagcgccagctgcttcatgagcaccagctacagctgccagggcatgtggaccccaggcagcctggtgtccaaggaccccggcacctgggtgggcctgtcctggacagaggcctag

SEQ ID NO: 20005 - DNA, 891 bp, Artificial Sequence
  derived and/or modified sequence
cgggactttcggcgggtcccggccgggcagacccaagtgccggcggcggagactgcagtggagccagtaccggctgtagtggccggggccgtggcgggagagtcatgtcagagccgcagccgcggggcgcagagcgcgatctctaccgggacacgtgggtgcgatacctgggctatgccaatgaggtgggcgaggctttccgctctcttgtgccagcggcggtggtgtggctgagctatggcgtggccagctcctacgtgctggcggatgccattgacaaaggcaagaaggctggagaggtcggtggatttcctcctggactccagcctgcgcaagctctacccaacagtggggaagcccagctcctcctgatcatactctggtacctggcctgtgcatcggcctcctgcttcatgtcaacctcctactcctgccagggaatgtggacacctggctccctggtgtccaaagaccctggcacctgggtgggtttgagctggacagaagcttagagacaaaggcttcaagaagcagtggctgcagggagtcacagaagggcaggacctgaacgctgtctgcttccctggaatccaagatgctgagtggaagtggaccctgggtgggcccggccctgtctttttcaggaaaattacatcctcccatggaggatgagagactgaggctcagggagggcaaggaataggcccaagatcacttggcaagctgggcacccaggacccccaggtgcttgacagagtcaccccatggtggtatggctgaacaaggagcggcagacaactcagggagaaactcaggagtgcagtaccagggacacctcaggacagattctctggccaggcccttccctgacccaataaatcctgaagaggt

SEQ ID NO: 20006 - DNA, 408 bp, Artificial Sequence
  derived and/or modified sequence
atgagcgagccccagccccggggcgccgagcgggacctgtaccgggatacctgggtgagatatctgggttatgccaacgaggttggcgaagcattcagatccctggtgcccgcagcggtggtttggctgtcatatggcgtggctagtagctatgtgcttgctgatgccatcgataagggaaaaaaggccggggaggttgggggatttccgccgggcctgcagcctgcgcaggcactgcctaattctggcgaggcccagcttttgttgataatcctttggtacctggcctgcgcctccgcatcatgtttcatgagtacctcctactcttgccagggcatgtggacgccgggatccctggtgtccaaggatcccggcacgtgggttggcctctcatggacagaagcctag

SEQ ID NO: 20007 - DNA, 408 bp, Artificial Sequence
  derived and/or modified sequence
atgtccgagcctcaaccacgaggggctgagcgggatctttatagagatacctgggtgcgttacctgggctacgccaacgaggttggcgaagcattccgctcactggttcccgcagctgttgtatggctctcttatggcgtagccagtagctatgtgctggccgatgctatcgataaagggaagaaagccggagaggtgggtgggttccctcctggactgcagcccgcacaggctctgcctaattctggggaggctcaattacttcttatcatcctgtggtacctagcatgcgcctcagcatcatgctttatgtcgactagctactcgtgccaaggcatgtggacccccggatccctggtgtcaaaagatcctggaacatgggtcggcctgagttggacggaagcctag

SEQ ID NO: 20008 - protein, 111 aa, Artificial Sequence
  derived and/or modified sequence
MSQRQGKEAYPTPTKDLHQPSLSPASPHSQGFERGKEDISQNKDESSLSMSKSKSESKLYNGSEKDSSTSSKLTKKESLKVQKKNYREEKKRATKELLSTITDPSVIVMAD

SEQ ID NO: 20009 - DNA, 2544 bp, Artificial Sequence
  derived and/or modified sequence
atgtcgcagaggcaaggaaaagaggcctaccctacacccaccaaagatctccatcagccatctctgtctcccgccagcccacactcccaaggattcgaacgaggcaaagaagacatttcccagaataaggatgagtcttcgttatctatgagtaagagcaagagcgagagcaaattgtataatggcagcgagaaggacagttcaacatcgtccaagctgaccaagaaagagtctctcaaagtacagaagaagaattaccgggaagaaaaaaagcgagccaccaaggagcttctgtccactattaccgatccttccgtaatcgtgatggcagattggctcaaaatacgaggcaccctgaaaagttggactaagttgtggtgcgtgctcaagcccggcgtgttgctgatctacaaaacccagaagaatggtcagtgggttggaacggttcttctgaacgcttgcgagattattgagcgcccctctaaaaaagacgggttctgtttcaaactcttccatcccctggagcagagcatttgggcagtgaaggggccgaagggggaagccgttgggagtatcacacagccccttccttccagttacctcattatcagagccacctctgaatcggatggtcgctgttggatggatgctctggagctggctctgaaatgcagcagcctgcttaaaagaactatgattagagaaggaaaggaacatgatttgtctgtgtcctcagactccactcacgtaacattctacggcttgctgcgagcgaacaacctacactccggcgacaactttcagctgaacgactcagaaatcgaacgccagcactttaaagaccaggacatgtattctgataagtctgacaaagaaaacgaccaggagcatgacgagtcagacaacgaggtgatgggcaaaagtgaagagtccgacacagacacctcagagagacaggatgatagctacattgagccggagcctgtggagcccctgaaggagactacgtatactgagcagagccatgaggaactgggcgaggctggcgaggcctcacagaccgaaactgtgtcagaagaaaataaatctctgatctggaccctcctaaagcaagtgcggcccggcatggacttgtctaaagtcgtgcttcccacctttatcctcgagccacgctctttcttagataaattgtctgactactactaccacgccgattttctcagtgaagctgcacttgaggagaacccgtacttcagattgaagaaagtagtgaagtggtacctgtccgggttctacaaaaagcccaaaggtctcaaaaagccatacaaccctattttaggagaaactttccggtgtctttggatccacccacgcaccaattccaagacattctatatcgccgaacaggtatcacatcaccctcctatctcagctttctatgtatccaaccgcaaggacggcttctgcttatcagggtcaatcctagctaaatctaagttttacggcaactcactgtcagcgattctggaaggagaggctcgccttacctttcttaaccgaggcgaggactacgttatgaccatgccctacgcccactgtaagggaatcctctatggaacgatgacgctggagttgggcgggactgttaacattacctgtcagaaaaccggctacagtgctatccttgaatttaaactcaagccttttttaggttccagcgactgcgtgaaccagatctccgggaaactcaaactaggcaaagaggtgttggctactctagaagggcactgggactcagaagtgttcatcaccgataagaaaactgacaacagtgaggtcttctggaaccccacaccagatataaagcagtggcgtctcatacgacacacagtgaaatttgaggaacagggtgactttgaatctgaaaagttgtggcaacgagttaccagagctatcaacgccaaagaccagactgaggccacccaggaaaagtacgttctcgaggaagcccagagacaagcggcccgtgatcgcaagacgaagaacgaagagtggagctgcaaactgttcgagctggaccccttaacaggagagtggcactacaagtttgccgatacccggccctgggatccccttaatgatatgatccagttcgagaaagacggagtcatccaaacgaaagtcaagcatcgcacaccaatggtctccgtccccaagatgaagcacaagccaacccggcagcaaaaaaaggtggccaagggttattcctctcccgaacctgacatccaggacagctctggctccgaagctcagtccgttaagccatcaaccagacggaaaaaggggatcgagctcggcgacattcagtcatctattgagagcatcaagcagacccaagaggaaattaagcgcaatataatggcgctgcggaatcacctcgtgagtagcacaccagctacagactacttcctccagcagaaagactacttcatcatattcctgctcatcctgctccaggtcatcatcaatttcatgtttaagtag

SEQ ID NO: 20010 - DNA, 2544 bp, Artificial Sequence
  derived and/or modified sequence
atgtcacaaagacagggtaaggaggcgtaccctacacccaccaaagacctccatcagccatccctgagtccggcatcacctcactcccaagggttcgaacggggaaaagaagatatctctcaaaacaaagacgagtcctctctgagcatgagtaagagtaaaagcgaatccaagctgtacaatgggtccgaaaaagattccagcacaagcagcaaactcactaagaaagagtccctgaaggtccagaagaagaattatcgcgaggagaagaaacgggctaccaaggagcttctttcaaccataaccgacccatccgtaatagtaatggccgattggttaaaaatcaggggtacacttaagtcatggacgaaactttggtgcgtgctcaaacctggagtgttactcatctacaaaacccaaaagaacggtcagtgggttggcactgtgctgctgaatgcctgcgaaattatcgaacggccttccaaaaaggacgggttctgcttcaagttgtttcatcccttggagcaaagcatctgggcggttaagggtcccaaaggggaggccgtcgggagcattactcagccgctgcctagctcctatctaattattcgagctaccagcgaaagtgatggaagatgctggatggacgctctggagctggcgcttaagtgcagtagtctcctcaagcggacaatgatccgcgaaggcaaagaacatgatttgagtgtaagctcagactctacccacgttacgttttacggacttctcagagcaaataaccttcattctggagacaattttcagctcaacgacagcgagattgaacgacagcacttcaaggaccaagacatgtacagtgacaaaagcgacaaagagaacgatcaggagcacgatgaaagcgataacgaagtgatggggaagagcgaggagagtgacaccgacacgtccgaaaggcaggacgatagttacatcgaaccggagccagtggagccgctcaaggagacgacatacactgagcaatcgcacgaagagctgggggaagctggggaagctagtcagacagagactgtgtctgaggagaataaatcattgatctggaccctcctaaagcaggtcaggccaggcatggatcttagtaaggtcgtcctgcctacatttattttggaaccgaggagtttcttggacaaactttctgactactattatcacgctgatttcctgtcagaggcagccctagaagaaaacccgtattttcgcttgaagaaagtggtgaaatggtatctgtctgggttctacaagaagcctaagggcctgaagaaaccctacaaccctatcctgggagagacatttcgatgcctatggatccatccgcggaccaacagcaaaaccttttatatcgccgaacaggtctcacaccaccccccaatttcagccttttatgtctctaacaggaaggatggattctgcctttcgggctccatacttgccaagtccaaattctatggcaacagcctttctgccatattggaaggagaagcacgtttgacctttcttaataggggggaagactacgtgatgacaatgccctatgcccattgcaaaggcatcctctatggaaccatgacgctggagttaggagggaccgtgaatatcacgtgtcagaaaaccgggtactccgcgattctggagtttaaacttaaacctttcctcgggagcagcgactgtgtgaaccagatcagtggaaagcttaagttggggaaggaggttctggctactctggaaggacactgggattcagaagtctttatcacagataagaaaaccgacaacagcgaagtattctggaacccaacacctgatataaagcagtggagattaattcgtcatactgtcaagttcgaggagcagggagacttcgaaagcgagaaattatggcagagggtgacccgggcaataaacgcaaaagatcagaccgaagcgacacaagaaaagtacgtgttggaggaggctcaacggcaggccgctcgagaccggaagactaagaacgaagagtggtcttgcaagctgtttgagctcgatcctctgaccggggagtggcactacaagttcgccgacactcgcccatgggatccactcaacgacatgattcagtttgaaaaggatggggtgatccagaccaaggttaaacaccgcaccccaatggtgagcgtcccaaaaatgaaacacaagccaacacgtcagcaaaagaaagtagcgaagggctattccagtcccgaacccgatattcaagattcatctggttcagaggcgcaaagcgtcaaaccatcaactcggagaaaaaaaggtattgagctcggcgatattcagtccagtatcgagtccataaagcaaacacaggaagaaatcaagcgcaatattatggccctgcgaaatcatctggtaagcagtacccccgccaccgactacttcttacagcaaaaggactattttattatttttcttctgatcctgctgcaagtcattattaatttcatgttcaagtag

SEQ ID NO: 20011 - DNA, 231 bp, Artificial Sequence
  derived and/or modified sequence
atgagccagcgtcagggcaaggaggcgtaccccacccccacaaaggatcttcatcaaccctcactgtcacccgcgtctccacattcacaaggattcgaacgaggaaaggaagacatatcacagaacaaggacgagagtagcctaagtatgtcaaagagcaagagtgagagcaagctgtacaatggatccgagaaggattctagtacctcttctaagctgaccaagaaatag

SEQ ID NO: 20012 - DNA, 336 bp, Artificial Sequence
  derived and/or modified sequence
atgagccaaaggcaaggcaaggaggcttatcccacccccacaaaagacctccatcagccgtcactgagccccgcatcccctcatagtcaggggtttgagcgggggaaggaggatatttcacagaacaaagacgaatcgagcctgtccatgtcaaaatctaaaagcgagtcaaagttgtacaatggctcagaaaaggactccagcacttcttcaaagctcactaaaaaggaaagcttgaaagttcaaaagaagaactaccgcgaggaaaaaaagagagcaaccaaagagctgctctctactatcaccgatccctcagttatagtcatggcagattag

SEQ ID NO: 20013 - DNA, 2544 bp, Artificial Sequence
  derived and/or modified sequence
atgagccagaggcagggcaaggaggcctaccccacccccaccaaggacctgcaccagcccagcctgagccctgccagcccccacagccagggctttgagcggggcaaggaggacatcagccagaacaaggatgagagcagcctgtccatgagcaagagcaagtctgagagcaagctgtacaatggaagtgagaaggacagcagcaccagcagcaagctgaccaagaaggagagcctgaaggtgcagaagaagaactaccgggaggagaagaagagggccaccaaggagctgctgagcaccatcacagaccccagcgtgattgtgatggctgactggctgaagatccggggcaccctgaagtcctggaccaagctgtggtgtgtgctgaagccaggagtgctgctgatctacaagacccagaagaatggccagtgggtgggcaccgtgctgctgaatgcctgtgagatcatcgagcggcccagcaagaaggatggcttctgcttcaagctgttccaccccctggagcagagcatctgggccgtgaagggccccaagggggaggccgtgggcagcatcacccagcccctgcccagcagctacctgatcatccgggccaccagcgagagtgatggccgctgctggatggatgccctggagctggccctgaagtgcagcagcctgctgaagaggaccatgatccgggagggcaaggagcatgacctgtctgtgtccagtgacagcacccacgtgaccttctacggcctgctgcgggccaacaacctgcacagcggggacaacttccagctgaatgacagcgagattgaaaggcagcacttcaaggaccaggacatgtacagcgacaagagtgacaaggaaaatgaccaggagcatgatgaaagtgacaatgaggtgatgggcaagtctgaggagagtgacacagacaccagcgagcggcaggatgacagctacatcgagcctgagcctgtggagcccctgaaggagaccacctacacagagcagagccatgaggagctgggggaggccggggaggccagccagacagagaccgtgtctgaggagaacaagagcctcatctggaccctgctgaagcaggtgcggcccggcatggacctgagcaaggtggtgctgcccaccttcatcctggagcccaggagcttcctggacaagctgagtgactactactaccacgccgacttcctgtctgaggccgccctggaggagaacccctacttccggctgaagaaggtggtgaagtggtacctgagcggcttctacaagaagcccaagggcctgaagaagccctacaaccccatcctgggggagaccttccgctgcctgtggatccaccccaggaccaacagcaagaccttctacatcgccgagcaggtgagccaccacccccccatcagcgccttctacgtgagcaacaggaaggatggcttctgcctgagcggcagcatcctggccaagagcaagttctacggcaacagcctgagcgccatcctggagggggaggcccggctgaccttcctgaacagaggagaggactatgtgatgaccatgccctatgcccactgcaagggcatcctgtatggcaccatgaccctggagctgggcggcaccgtgaacatcacctgccagaagacaggctacagcgccatcctggagttcaagctgaagcccttcctgggcagcagtgactgtgtgaaccagatcagcggcaagctgaagctgggcaaggaggtgctggccaccctggagggccactgggacagcgaggtgttcatcacagacaagaagacagacaacagcgaggtgttctggaaccccaccccagacatcaagcagtggaggctcatccgccacacagtgaagtttgaggagcagggcgactttgaaagtgagaagctgtggcagagggtgacccgggccatcaatgccaaggaccagacagaggccacccaggagaagtatgtgctggaggaggcccagaggcaggccgcccgggacaggaagaccaagaatgaggagtggagctgcaagctgtttgagctggaccccctgaccggggagtggcactacaagtttgctgacacccggccctgggaccccctgaatgacatgatccagtttgagaaggatggagtcatccagaccaaggtgaagcacaggacccccatggtgtctgtgcccaagatgaagcacaagcccacccggcagcagaagaaggtggccaagggctacagcagccctgagccagacatccaggacagcagcggcagcgaggcccagagcgtgaagcccagcaccaggaggaagaagggcatcgagctgggggacatccagagcagcattgagagcatcaagcagacccaggaggagatcaagaggaacatcatggccctgaggaaccacctggtgagcagcaccccagccacagactacttcctgcagcagaaggactacttcatcatcttcctgctgatcctgctgcaggtgatcatcaacttcatgttcaagtag

SEQ ID NO: 20014 - DNA, 231 bp, Artificial Sequence
  derived and/or modified sequence
atgagccagaggcagggcaaggaggcctaccccacccccaccaaggacctgcaccagcccagcctgagccctgccagcccccacagccagggctttgagcggggcaaggaggacatcagccagaacaaggatgagagcagcctgtccatgagcaagagcaagtctgagagcaagctgtacaatggaagtgagaaggacagcagcaccagcagcaagctgaccaagaagtag

SEQ ID NO: 20015 - DNA, 336 bp, Artificial Sequence
  derived and/or modified sequence
atgagccagaggcagggcaaggaggcctaccccacccccaccaaggacctgcaccagcccagcctgagccctgccagcccccacagccagggctttgagcggggcaaggaggacatcagccagaacaaggatgagagcagcctgtccatgagcaagagcaagtctgagagcaagctgtacaatggaagtgagaaggacagcagcaccagcagcaagctgaccaagaaggagagcctgaaggtgcagaagaagaactaccgggaggagaagaagagggccaccaaggagctgctgagcaccatcacagaccccagcgtgattgtgatggctgactag

SEQ ID NO: 20016 - DNA, 2544 bp, Artificial Sequence
  derived and/or modified sequence
atgagccagcggcagggcaaggaggcctaccccacccccaccaaggacctgcaccagcctagcctatcaccagctagcccacactcccaggggttcgaacggggtaaagaggacatcagccagaacaaggatgagagctccctgagtatgtccaaaagtaaaagtgagtccaagctgtataatgggagcgagaaggatagtagcacctcttcgaagctcaccaagaaggagtccctaaaagtgcaaaagaagaattatcgcgaggagaaaaaacgcgccactaaagaactgttatcgacaattaccgatccctccgttattgtgatggcggactggctgaagattagggggactctgaaaagttggacgaaattatggtgcgtgctgaagccaggggtgctcttaatttacaagactcagaagaatggccagtgggtcggaacggtgcttctgaatgcatgcgagattatcgagaggccttctaagaaagacggcttttgctttaagctgtttcacccccttgagcagtctatctgggctgtgaagggccccaaaggcgaggctgttggttcaattacacagccactgccttctagttacttaatcatccgagccacgtccgagagtgacggaagatgttggatggatgccctggaactggctcttaagtgcagctccctcctcaagcgcaccatgatccgagagggtaaagagcatgatttaagcgtgtcctcagattcaactcacgtcactttctacggactgcttcgcgcaaacaacctgcattctggggacaatttccaattgaacgacagcgaaattgagcgtcaacactttaaagatcaggacatgtacagcgataaaagtgacaaggagaatgaccaagaacacgatgagtcggacaacgaggtgatgggaaaatccgaggagtctgacaccgacaccagcgagagacaggatgatagttatatcgagcctgaacctgtcgaacccttgaaggaaaccacatacacagaacagtctcatgaggagctcggggaggccggagaagcttctcagaccgaaacagtctctgaggaaaataaatccttaatttggaccctgctgaaacaagttagacctggtatggacttgtcgaaagtagtactcccgactttcatactggaaccaaggtcctttctggacaagctatcagattactactatcatgcagatttcctctctgaggctgcactggaagagaacccctactttagactcaagaaggtggttaagtggtatctcagtggtttttataagaaaccaaagggacttaaaaaaccttataaccctattctaggagaaacctttcgatgcctgtggattcatccccggacaaatagcaaaacattctacattgctgaacaggtgtcgcaccatccgcctataagtgctttttacgtgtctaaccgcaaagatggcttttgcctttccggatccatcctggccaagtcgaagttttacggcaattccctttcggccatactcgagggcgaagctcggcttaccttcttgaacaggggggaggactacgtgatgacaatgccctatgctcattgcaagggcattctgtatggtacgatgaccctcgagttaggtggtactgtgaatatcacctgccagaagactggctactccgccattctggaatttaagcttaagccattcctgggatcctcagattgcgtgaaccagatcagcggaaagctgaagctcggcaaggaggtcctggctactcttgaagggcactgggacagcgaagtattcattactgacaagaagacagacaatagtgaggtattttggaatcccaccccggacatcaagcagtggcgcctgatccggcacaccgtcaaattcgaggaacagggagacttcgagtctgaaaaactgtggcagcgcgtgacccgcgcaattaatgcgaaggaccaaacagaagccactcaagagaaatacgtcctcgaggaagcgcagcgccaagcagctcgcgacagaaaaacaaagaacgaagagtggagttgcaaactcttcgaattagaccctctcacaggggaatggcattacaaattcgctgacaccagaccgtgggaccccctaaatgacatgattcaattcgagaaggacggagtgatacagaccaaagtcaagcacaggactcctatggtcagcgtgcctaagatgaaacacaagcccacacgacagcagaaaaaggtagctaaggggtactctagtcccgaacccgatattcaggactcgtccggctcagaggcccagagcgtgaaaccctcaactaggaggaagaaagggattgaactcggcgacattcagtcttccatcgaaagcattaagcaaacccaggaggaaattaagaggaatattatggcactccggaaccatctcgtgtctagcacaccagccaccgattattttttgcagcaaaaagactactttatcattttcctactcatcctgctccaagtgatcatcaatttcatgttcaaatag

SEQ ID NO: 20017 - DNA, 2544 bp, Artificial Sequence
  derived and/or modified sequence
atgagccagcggcagggcaaggaggcctaccccacccccaccaaggacctccatcagccttccctttctcctgcctcccctcacagccaagggttcgaaaggggaaaagaggacatcagccagaataaggatgagtcaagcctttccatgagcaagtcaaagtctgagagcaagctatacaacggatccgaaaaagactcgtcgacgtcttcaaagttgacaaagaaggaaagtcttaaagtacagaaaaagaactacagagaggagaaaaagagagcaaccaaagagctgctttctacaatcacagatccatccgtgattgtgatggcagactggttgaagatacggggaacgcttaagtcttggaccaagctgtggtgtgttctgaagcccggagtgctgctgatttacaagactcagaaaaacggccagtgggttggcactgtgctcctgaatgcctgtgaaatcattgaaagaccatcaaagaaggatggcttttgcttcaagttgttccatcctctggaacaaagcatctgggccgtcaaaggccctaaaggtgaggccgtgggttcaatcacacagcctctccccagtagctacctgattatcagggccacatccgagagcgacgggaggtgctggatggatgctctggaactcgccctcaagtgctcttccctgctgaagagaactatgataagggagggcaaagaacatgatttatcggtatcctctgattccacccacgtgacattctacgggcttttaagagctaataacctgcatagcggtgacaatttccagctgaatgacagcgagatcgaacggcagcactttaaagatcaggacatgtactccgataaatcggataaggaaaatgaccaggaacacgatgaatccgataacgaagtaatgggcaaatccgaggagtccgatacggacactagcgagagacaggatgattcctacattgagcctgagccagtggagcctctgaaggagacaacctacactgagcagagccacgaggagctgggagaagctggcgaagccagccagaccgaaaccgtgagcgaggaaaacaaaagtctgatctggactctgctgaaacaagtcaggcccggcatggatctgtctaaggtggttctgcctacattcatcttagaaccgcggagcttcctggataagctgagcgattattattatcacgccgatttcctgtctgaggccgcacttgaagagaatccgtatttccgtcttaagaaagttgtcaaatggtatctgtccggcttttacaagaagcctaagggactgaagaagccgtacaatccgattcttggcgagacatttcggtgtttatggattcacccccggaccaactctaagaccttctacatagccgagcaggtctcacaccacccacccatctctgcattttacgtttctaaccggaaagatggattttgccttagcggttccatcctggccaagagcaagttctacggcaattccctttcggcaattctcgaaggggaggctcggcttacattcttaaacaggggggaggactacgtaatgactatgccctacgcacattgcaaaggaatattgtatggtacaatgaccctcgagttaggtggcacagtcaacattacatgccagaaaacaggttactccgcaatcctggaatttaagctaaaacccttccttgggagcagtgattgcgtcaatcaaatctccggtaagttaaaactcggaaaagaggtcctggccacactggaagggcactgggacagcgaagtgttcatcactgacaagaagactgacaatagtgaggtattctggaatccaacccctgatattaaacagtggcgtttgatccgccatacagtcaagtttgaagaacagggagacttcgagtcagagaagctgtggcagcgcgttacccgggcaattaatgctaaagatcaaacagaggctacacaggagaaatatgttcttgaggaggcccagcgtcaggcagctcgcgacaggaagactaagaacgaagagtggtcatgcaaactcttcgaactcgaccctctcaccggagagtggcactataagttcgccgatacacggccctgggacccactgaatgacatgatccagttcgaaaaggatggagtcatccaaaccaaagtcaagcacagaacccctatggtgtcagtaccgaagatgaagcacaagcctactcgtcaacagaagaaagttgctaagggatacagctccccggagcctgatatccaagattcatcgggcagtgaggctcagtctgtgaagccctctacacggcgcaaaaagggaatagaactgggtgatatccaatcatcaattgaatctattaagcagacacaggaggaaatcaagagaaacattatggccctgcgcaatcaccttgtgtccagcaccccagccacggactactttttgcagcagaaggattatttcatcatttttctccttatactgctgcaagttataattaacttcatgtttaaatag

SEQ ID NO: 20018 - DNA, 231 bp, Artificial Sequence
  derived and/or modified sequence
atgagccagcggcagggcaaggaggcctaccccacccccaccaaggacctgcaccagccgagtttgtcacccgcctctccccatagccagggcttcgagcgtggaaaagaggacatctctcaaaacaaggatgagtcatcattatcaatgtccaaatccaaatctgaatctaaactatacaacggctccgagaaagattcctccacatcctctaagctaacgaagaagtag

SEQ ID NO: 20019 - DNA, 336 bp, Artificial Sequence
  derived and/or modified sequence
atgagccagcggcagggcaaggaggcctaccccacccccaccaaggatcttcatcagcctagtctgtcccccgccagcccccactctcaagggtttgaaaggggcaaggaggatatttcccagaataaagatgagagctccttatcgatgtccaaatcaaaatccgagagtaaattgtacaacggcagtgagaaggactccagcaccagtagtaagcttacgaaaaaagaatctctgaaggttcagaaaaagaactatagggaagagaaaaagcgggcaaccaaggagctgctctccaccattacagatccatccgtcatcgtgatggctgactag

SEQ ID NO: 20020 - DNA, 2544 bp, Artificial Sequence
  derived and/or modified sequence
atgtcacagcgtcaggggaaggaggcttaccccacaccaacgaaggacctgcatcagccatcactgagtccagcgtctccgcactcacagggctttgagcgagggaaggaggacattagtcagaataaagatgaatcgtctttaagtatgagcaaaagcaaaagtgaatctaagttgtacaatggatccgaaaaggatagctcaacatcctctaaattgactaaaaaagaatccctgaaagtgcagaagaaaaattatcgggaggaaaagaagagagcaaccaaggaattgctgagtacaataacggatccttctgtgattgtgatggccgactggttaaagattcgaggaaccctgaaaagctggactaagttatggtgtgtgttaaagcccggagtgcttttgatctacaaaactcaaaaaaacggtcagtgggtgggcacagtcctgctcaatgcctgcgagattatagagcgcccatcgaagaaggatggcttttgctttaagcttttccaccctctggagcagtccatatgggccgtaaagggtccaaagggcgaagcggttggatcaatcacccagcccctgccgtccagctacctcattattcgagccacgagcgaatctgacggtagatgctggatggacgccctggagctggctctcaagtgctctagtttactgaaaagaacaatgatccgggaaggcaaggagcatgacttatcagtaagctcggatagcacacatgtgaccttttatggcctgctgagggccaataatcttcattccggcgacaatttccagctgaacgattcggaaatcgaacggcagcatttcaaagatcaggatatgtactccgacaagagtgacaaggagaacgatcaagaacacgatgaatctgacaacgaagtgatgggcaagtccgaggagtccgataccgacacttcagaaaggcaagatgacagctacattgaaccagagccagtagaacctttgaaagaaacaacatacacagagcagtctcatgaggaactgggagaagccggagaggcctcccaaaccgaaacagtatctgaggaaaacaagtcgctgatatggaccctgctgaagcaggtgcgcccagggatggatttgtcaaaagttgtccttccaacatttattctggaaccgaggtccttcttagataaactgagcgattattactatcacgcagatttcctgtccgaagcagccttagaggagaacccatatttccggcttaagaaggttgttaagtggtacctctctgggttctataaaaaacctaagggcctgaagaagccttacaatcctatattaggggaaacttttagatgcctgtggatacacccaaggacgaacagcaagaccttttatatcgccgagcaggtgagccaccacccaccaatttctgctttttacgtgtccaatcgcaaggacggtttttgcctcagcggctcaattctcgccaaaagtaagttttatggcaactccctgtccgccattctggagggagaagcccgtctgaccttcctaaatagaggcgaagactacgtaatgactatgccctatgcccattgcaagggaattctttacggcaccatgaccctcgagttaggcggtaccgttaacatcacttgtcagaagactggttattcggcaattctagaatttaagcttaagcctttcctgggttccagcgactgcgtcaatcaaatctccggaaagctcaaactcggcaaggaagtgctggccaccttggaaggccactgggactcagaagtttttatcaccgacaagaaaacagataactcagaagtcttctggaatcccacaccggacattaaacagtggagactcatcaggcacacagtgaaatttgaagaacagggagactttgaaagcgaaaaattgtggcaaagggtgactcgggcaatcaacgcgaaagaccaaaccgaggctacccaggagaaatacgtgcttgaagaagcccagcgacaggccgctagggataggaagaccaagaacgaggaatggtcgtgcaagttgttcgagctggatcccctcacaggcgaatggcattacaaatttgccgacacccggccttgggatcccctgaatgatatgatacaatttgaaaaagatggcgtgatccaaacaaaagttaagcacagaacccctatggtgagcgttccaaaaatgaaacataagccaacaaggcagcagaaaaaagtggccaaaggctacagcagtcctgagccagatatccaggacagtagcggcagcgaagcacaatcagttaaaccatccacgagacgcaaaaagggtattgagcttggagatattcagtcttctatagagtctattaaacagacacaggaagagattaagcggaatattatggctttgcgcaatcatctcgttagttcaacccctgccactgattattttctgcagcaaaaagattatttcatcatatttctcttaattctgctgcaggtcataatcaacttcatgtttaaatag

SEQ ID NO: 20021 - DNA, 2544 bp, Artificial Sequence
  derived and/or modified sequence
atgtcacagcggcaaggcaaggaagcctaccccactcccacaaaggacctgcaccaacctagcttaagccccgcttcacctcactcccagggttttgaacgcggaaaggaagacatctcacagaacaaggacgagtcatccctttccatgtctaagagtaagtcagagtctaaactgtacaacggaagtgaaaaagactcctccactagctcaaagttgacaaaaaaggagtcgcttaaagtccagaaaaaaaactatagagaagaaaaaaagcgcgcaactaaagagcttttgtctaccattaccgatccgtctgtcattgtgatggccgattggttgaaaattaggggaactctgaagtcttggactaagttatggtgtgtgctgaagcctggagtcctcctgatatacaaaacacagaagaatggccagtgggtgggaactgtgctgctgaatgcatgcgagattattgaaagacctagcaaaaaagacggattctgcttcaaactgttccatcccctagaacagtccatctgggctgtgaagggtcccaagggcgaggccgtgggatcgatcactcagccattgcctagttcatatttgattattcgcgcaacttccgaatcagacggaaggtgctggatggatgctttagagcttgcactcaagtgcagctctttgcttaagaggacaatgatcagggagggaaaagaacacgacctgtcggtgagttcagacagtacccacgtcaccttctacggcctattaagagcaaataatctccattctggcgacaactttcagttgaacgactccgaaatagaacgccagcacttcaaggatcaggatatgtattcagacaagagtgacaaagagaatgatcaagagcacgacgagtcagacaacgaggtgatgggcaagtctgaggaaagcgacaccgatacgtctgaaaggcaggatgactcatacattgagccagagccagtagaacccctcaaagagactacttataccgaacagtcccatgaggagctcggtgaagctggagaggcgtcccagactgagaccgtcagtgaagaaaacaagtcattgatttggacactccttaaacaggtcagacccggaatggatctgagcaaggtggtgctccccacttttattctggagcctcggagttttctggataaactcagtgactattactaccatgcagatttcctctcagaagctgcacttgaggaaaacccgtacttcaggttgaagaaggtagttaagtggtacctgtcaggcttttataagaagccaaagggcctcaagaaaccatataacccaatactcggggagactttccgctgcctgtggattcatccacgaaccaactctaagaccttttatatagccgagcaagtgtcccatcatcctcccatttctgctttctacgtgagcaatcggaaggatgggttctgtctcagtggttctattctggcaaaaagcaaattttacggtaactccctgagcgccatccttgaaggggaggctagacttacttttcttaaccggggtgaagattacgttatgactatgccttatgcccattgcaagggtatcctttacgggactatgacactggaactcggcggaaccgttaacattacctgtcaaaaaaccggctactcagccatcctcgaattcaagttgaagccttttcttggctcgtcagattgcgtgaatcagatctctggaaaactaaaactggggaaagaagtgttagcaactctggaagggcactgggactccgaggtgttcatcacagacaagaaaacagataactcggaagtattttggaatcccacgccggatataaaacaatggcgacttatccggcataccgttaaattcgaggaacagggagatttcgagagcgagaaactttggcaacgggtgacgcgggcaatcaacgcgaaggaccagaccgaggctactcaagagaagtatgtgctagaagaggcacagcgtcaggctgcacgcgatcgcaagacaaagaatgaggagtggagctgtaagctcttcgaactcgaccccttgactggtgagtggcactataagtttgccgataccaggccttgggacccactcaacgacatgatccagtttgaaaaagacggggtgatacagaccaaagtgaaacacaggaccccgatggttagcgttcctaaaatgaaacacaagccaacccgccaacagaagaaagttgctaaaggttattcaagccccgaaccggatatccaggatagctcagggagcgaggcgcagagcgtgaaaccaagcacacgaaggaagaaggggatcgaactgggagatatccaatcttctattgagtcaatcaagcaaacgcaggaggagatcaaaaggaatatcatggccctgagaaatcacctggtgagttccacgcctgctaccgactactttctgcaacagaaagattacttcataatattcctgctgatactgctgcaggtgataattaattttatgttcaaatag

SEQ ID NO: 20022 - DNA, 231 bp, Artificial Sequence
  derived and/or modified sequence
atgtcacaaaggcagggtaaggaagcttacccgacaccaaccaaggaccttcaccagccatcattgtcacctgcgtccccacacagtcagggcttcgagaggggtaaagaagacatttcccagaacaaagacgagtccagtctctctatgagcaaaagcaaatccgagagtaagctctacaatgggtcggagaaggactccagcacttcgtcaaaattaacgaaaaaatag

SEQ ID NO: 20023 - DNA, 336 bp, Artificial Sequence
  derived and/or modified sequence
atgagtcagagacagggtaaagaggcttaccccacgccaactaaagatctgcatcagccatcactgtcacctgcctccccacattcgcagggcttcgaacgcggtaaggaggacatcagccagaataaggatgaaagcagcctgagcatgagcaagtctaaaagtgaaagcaagctatacaacggttccgaaaaggatagtagcacttcttctaaattgactaagaaagagagtctgaaggtgcagaagaagaattaccgcgaggagaagaagcgcgctaccaaagagcttttgtctacgattactgatcccagcgtcattgtgatggcggactag

SEQ ID NO: 20024 - DNA, 2544 bp, Artificial Sequence
  derived and/or modified sequence
atgagccagagacagggcaaggaggcctaccccacccccaccaaggacctgcaccagcccagcctgagccccgccagcccccacagccagggcttcgagagaggcaaggaggacatcagccagaacaaggacgagagcagcctgagcatgagcaagagcaagagcgagagcaagctgtacaacggcagcgagaaggacagcagcaccagcagcaagctgaccaagaaggagagcctgaaggtgcagaagaagaactacagagaggagaagaagagagccaccaaggagctgctgagcaccatcaccgaccccagcgtgatcgtgatggccgactggctgaagatcagaggcaccctgaagagctggaccaagctgtggtgcgtgctgaagcccggcgtgctgctgatctacaagacccagaagaacggccagtgggtgggcaccgtgctgctgaacgcctgcgagatcatcgagagacccagcaagaaggacggcttctgcttcaagctgttccaccccctggagcagagcatctgggccgtgaagggccccaagggcgaggccgtgggcagcatcacccagcccctgcccagcagctacctgatcatcagagccaccagcgagagcgacggcagatgctggatggacgccctggagctggccctgaagtgcagcagcctgctgaagagaaccatgatcagagagggcaaggagcacgacctgagcgtgagcagcgacagcacccacgtgaccttctacggcctgctgagagccaacaacctgcacagcggcgacaacttccagctgaacgacagcgagatcgagagacagcacttcaaggaccaggacatgtacagcgacaagagcgacaaggagaacgaccaggagcacgacgagagcgacaacgaggtgatgggcaagagcgaggagagcgacaccgacaccagcgagagacaggacgacagctacatcgagcccgagcccgtggagcccctgaaggagaccacctacaccgagcagagccacgaggagctgggcgaggccggcgaggccagccagaccgagaccgtgagcgaggagaacaagagcctgatctggaccctgctgaagcaggtgagacccggcatggacctgagcaaggtggtgctgcccaccttcatcctggagcccagaagcttcctggacaagctgagcgactactactaccacgccgacttcctgagcgaggccgccctggaggagaacccctacttcagactgaagaaggtggtgaagtggtacctgagcggcttctacaagaagcccaagggcctgaagaagccctacaaccccatcctgggcgagaccttcagatgcctgtggatccaccccagaaccaacagcaagaccttctacatcgccgagcaggtgagccaccacccccccatcagcgccttctacgtgagcaacagaaaggacggcttctgcctgagcggcagcatcctggccaagagcaagttctacggcaacagcctgagcgccatcctggagggcgaggccagactgaccttcctgaacagaggcgaggactacgtgatgaccatgccctacgcccactgcaagggcatcctgtacggcaccatgaccctggagctgggcggcaccgtgaacatcacctgccagaagaccggctacagcgccatcctggagttcaagctgaagcccttcctgggcagcagcgactgcgtgaaccagatcagcggcaagctgaagctgggcaaggaggtgctggccaccctggagggccactgggacagcgaggtgttcatcaccgacaagaagaccgacaacagcgaggtgttctggaaccccacccccgacatcaagcagtggagactgatcagacacaccgtgaagttcgaggagcagggcgacttcgagagcgagaagctgtggcagagagtgaccagagccatcaacgccaaggaccagaccgaggccacccaggagaagtacgtgctggaggaggcccagagacaggccgccagagacagaaagaccaagaacgaggagtggagctgcaagctgttcgagctggaccccctgaccggcgagtggcactacaagttcgccgacaccagaccctgggaccccctgaacgacatgatccagttcgagaaggacggcgtgatccagaccaaggtgaagcacagaacccccatggtgagcgtgcccaagatgaagcacaagcccaccagacagcagaagaaggtggccaagggctacagcagccccgagcccgacatccaggacagcagcggcagcgaggcccagagcgtgaagcccagcaccagaagaaagaagggcatcgagctgggcgacatccagagcagcatcgagagcatcaagcagacccaggaggagatcaagagaaacatcatggccctgagaaaccacctggtgagcagcacccccgccaccgactacttcctgcagcagaaggactacttcatcatcttcctgctgatcctgctgcaggtgatcatcaacttcatgttcaagtag

SEQ ID NO: 20025 - DNA, 231 bp, Artificial Sequence
  derived and/or modified sequence
atgagccagagacagggcaaggaggcctaccccacccccaccaaggacctgcaccagcccagcctgagccccgccagcccccacagccagggcttcgagagaggcaaggaggacatcagccagaacaaggacgagagcagcctgagcatgagcaagagcaagagcgagagcaagctgtacaacggcagcgagaaggacagcagcaccagcagcaagctgaccaagaagtag

SEQ ID NO: 20026 - DNA, 336 bp, Artificial Sequence
  derived and/or modified sequence
atgagccagagacagggcaaggaggcctaccccacccccaccaaggacctgcaccagcccagcctgagccccgccagcccccacagccagggcttcgagagaggcaaggaggacatcagccagaacaaggacgagagcagcctgagcatgagcaagagcaagagcgagagcaagctgtacaacggcagcgagaaggacagcagcaccagcagcaagctgaccaagaaggagagcctgaaggtgcagaagaagaactacagagaggagaagaagagagccaccaaggagctgctgagcaccatcaccgaccccagcgtgatcgtgatggccgactag

SEQ ID NO: 20027 - protein, 88 aa, Artificial Sequence
  derived and/or modified sequence
MASVVPVKDKKLLEVKLGELPSWILMRDFSPSGIFGAFQRGYYRYYNKYINVKKGSISGITMVLACYVLFSYSFSYKHLKHERLRKYH

SEQ ID NO: 20028 - protein, 88 aa, Artificial Sequence
  derived and/or modified sequence
MSSKLPVKDKKLLEVKLGELPSWILMRDFSPSGIFGAFQRGYYRYYNKYINVKKGSISGITMVLACYVLFSYSFSYKHLKHERLRKYH

SEQ ID NO: 20029 - DNA, 267 bp, Artificial Sequence
  derived and/or modified sequence
atggccagcgtggtgcccgtgaaggacaagaagctgctggaggtgaagctgggcgagctgcccagctggatcctgatgagagacttcagccccagcggcatcttcggcgccttccagagaggctactacagatactacaacaagtacatcaacgtgaagaagggcagcatcagcggcatcaccatggtgctggcctgctacgtgctgttcagctacagcttcagctacaagcacctgaagcacgagagactgagaaagtaccactag

SEQ ID NO: 20030 - DNA, 267 bp, Artificial Sequence
  derived and/or modified sequence
atgagcagcaagctgcccgtgaaggacaagaagctgctggaggtgaagctgggcgagctgcccagctggatcctgatgagagacttcagccccagcggcatcttcggcgccttccagagaggctactacagatactacaacaagtacatcaacgtgaagaagggcagcatcagcggcatcaccatggtgctggcctgctacgtgctgttcagctacagcttcagctacaagcacctgaagcacgagagactgagaaagtaccactag

SEQ ID NO: 20031 - DNA, 267 bp, Artificial Sequence
  derived and/or modified sequence
atggcgtcagttgtgcccgttaaagataaaaagcttctggaagtcaagctgggagagctgccatcctggattctgatgcgggacttttccccaagtggcatttttggagccttccagcgcggatactaccgctactacaacaagtatattaacgttaaaaagggcagcatatccggaataactatggtactggcatgttacgtgcttttctcctactcttttagctacaagcacctgaaacacgaaaggctaagaaaataccactag

SEQ ID NO: 20032 - DNA, 267 bp, Artificial Sequence
  derived and/or modified sequence
atgagcagcaagctgcctgttaaagacaaaaagctgcttgaagttaaactgggggaactccccagttggatcctgatgagggatttttcccccagcgggatttttggagcctttcagaggggctattacagatattataataagtatatcaatgtcaaaaaaggcagcataagcgggatcactatggtgcttgcctgttacgtgctcttttcatactctttcagttacaaacacctgaagcacgaaaggctgaggaagtaccattag

SEQ ID NO: 20033 - DNA, 267 bp, Artificial Sequence
  derived and/or modified sequence
atggcctctgtggtgcctgtgaaggacaagaagctgctggaggtgaagctgggggagctgcccagctggatcctgatgagggacttcagccccagcggcatctttggagccttccagaggggctactaccgctactacaacaagtacatcaacgtgaagaagggcagcatcagcggcatcaccatggtgctggcctgctacgtgctcttctcctacagcttctcctacaagcacctgaagcatgagcggctgaggaagtaccactag

SEQ ID NO: 20034 - DNA, 267 bp, Artificial Sequence
  derived and/or modified sequence
atgagcagcaagctgcctgtgaaggacaagaagctgctggaggtgaagctgggggagctgcccagctggatcctgatgagggacttcagccccagcggcatctttggagccttccagaggggctactaccgctactacaacaagtacatcaacgtgaagaagggcagcatcagcggcatcaccatggtgctggcctgctacgtgctcttctcctacagcttctcctacaagcacctgaagcatgagcggctgaggaagtaccactag

SEQ ID NO: 20035 - DNA, 267 bp, Artificial Sequence
  derived and/or modified sequence
atggccagcgtggtgcccgtgaaggacaagaagctgctggaggtgaagctgggggagctcccaagctggatcttgatgcgagatttctcccctagtgggatcttcggtgcctttcagaggggttattaccgttactataataagtacattaacgtcaagaaggggtcaatcagcggcatcactatggtattggcatgctacgtactattcagttacagctttagttataaacacctcaagcatgaacgcctgcgaaaatatcactag

SEQ ID NO: 20036 - DNA, 267 bp, Artificial Sequence
  derived and/or modified sequence
atgagcagcaagctgcccgtgaaggacaagaagctgctggaggtgaagcttggggagctacccagttggattctcatgagagactttagtcctagcggaatttttggcgcattccagagggggtactaccggtactataataagtatatcaatgtgaagaaaggttccatctccggaatcactatggttctagcatgctacgtgctcttttcctacagtttcagttacaagcacctaaagcacgagcgcctgcgcaagtatcattag

SEQ ID NO: 20037 - DNA, 267 bp, Artificial Sequence
  derived and/or modified sequence
atggcatccgtagtgccggtgaaggataagaagcttctggaagtgaagctcggagagctgccatcatggatcctcatgcgggatttctctccttcgggaatttttggcgcatttcagaggggctactatcgatattacaataagtatatcaacgtcaagaagggaagtatcagtggcatcacaatggtccttgcctgttacgtgctcttctcatacagcttctcttataagcatctcaaacacgaaagacttaggaaatatcactag

SEQ ID NO: 20038 - DNA, 267 bp, Artificial Sequence
  derived and/or modified sequence
atgtcaagtaaactccctgtgaaagacaagaagctcctggaggtaaagctcggggagctgccttcttggatcctgatgcgagactttagtccatccggaatttttggcgcattccagagagggtactaccgttactataataagtatatcaacgtgaagaaagggagtatttccggcatcacgatggtcttagcatgttatgtcttattcagctactcgttcagctataaacatcttaagcatgagaggctgaggaagtaccactag

SEQ ID NO: 20039 - DNA, 305 bp, Artificial Sequence
  derived and/or modified sequence
gcggacaccaggactccaaaatggcgtcagttgtaccagtgaaggacaagaaacttctggaggtcaaactgggggagctgccaagctggatcttgatgcgggacttcagtcctagtggcattttcggagcgtttcaaagaggttactaccggtactacaacaagtacatcaatgtgaagaaggggagcatctcggggattaccatggtgctggcatgctacgtgctctttagctactccttttcctacaagcatctcaagcacgagcggctccgcaaataccactgaagaggacacactctgcac

SEQ ID NO: 20040 - DNA, 398 bp, Artificial Sequence
  derived and/or modified sequence
atgtcaagtaaattaccagtgaaggacaagaaacttctggaggtcaaactgggggagctgccaagctggatcttgatgcgggacttcagtcctagtggcattttcggagcgtttcaaagaggttactaccggtactacaacaagtacatcaatgtgaagaaggggagcatctcggggattaccatggtgctggcatgctacgtgctctttagctactccttttcctacaagcatctcaagcacgagcggctccgcaaataccactgaagaggacacactctgcacccccccaccccacgaccttggcccgagcccctccgtgaggaacacaatctcaatcgttgctgaatcctttcatatcctaataggaattaacctccaaataaaacatgactggt

SEQ ID NO: 20041 - protein, 55 aa, Artificial Sequence
  derived and/or modified sequence
MASVGECPAPVPVKDKKLLEVKLGELPSWILMRDFSPSGIFGAFQREHERLRKYH

SEQ ID NO: 20042 - DNA, 168 bp, Artificial Sequence
  derived and/or modified sequence
atggccagcgtgggcgagtgccccgcccccgtgcccgtgaaggacaagaagctgctggaggtgaagctgggcgagctgcccagctggatcctgatgagagacttcagccccagcggcatcttcggcgccttccagagagagcacgagagactgagaaagtaccactag

SEQ ID NO: 20043 - DNA, 168 bp, Artificial Sequence
  derived and/or modified sequence
atggcgagtgtaggggaatgtccagctcccgtgccggtgaaagacaaaaagctgctagaagtgaaactgggcgaattgccctcctggatcctgatgcgagacttcagccccagtggtattttcggagcatttcagagggagcatgaacggctgagaaaatatcactag

SEQ ID NO: 20044 - DNA, 168 bp, Artificial Sequence
  derived and/or modified sequence
atggcctctgtgggggagtgcccagcccctgtgcctgtgaaggacaagaagctgctggaggtgaagctgggggagctgcccagctggatcctgatgagggacttcagccccagcggcatctttggagccttccagcgggagcacgagcggctgaggaagtaccactag

SEQ ID NO: 20045 - DNA, 168 bp, Artificial Sequence
  derived and/or modified sequence
atggccagcgtgggcgagtgccccgcccccgtgcccgtgaaggacaagaaactgctcgaagtcaaacttggtgaactcccctcctggattctgatgcgcgacttttctcccagcggaatctttggcgcatttcagcgcgagcacgagcgcctgcggaaataccactag

SEQ ID NO: 20046 - DNA, 168 bp, Artificial Sequence
  derived and/or modified sequence
atggcgagcgtcggggagtgtccggcacctgtgccggttaaggataaaaaactgctggaagtcaaattgggggaactccccagctggattctcatgagagacttctcccccagtggaattttcggggctttccagcgcgaacatgagcgactgcgcaagtatcactag

SEQ ID NO: 20047 - DNA, 323 bp, Artificial Sequence
  derived and/or modified sequence
acagcggacaccaggactccaaaatggcgtcagttggtgagtgtccggccccagtaccagtgaaggacaagaaacttctggaggtcaaactgggggagctgccaagctggatcttgatgcgggacttcagtcctagtggcattttcggagcgtttcaaagagagcacgagcggctccgcaaataccactgaagaggacacactctgcacccccccaccccacgaccttggcccgagcccctccgtgaggaacacaatctcaatcgttgctgaatcctttcatatcctaataggaattaacctccaaataaaacatgactggta

SEQ ID NO: 20048 - protein, 435 aa, Artificial Sequence
  derived and/or modified sequence
MSSHHTTFPFDPERRVRSTLKKVFGFDSFKTPLQESATMAVVKGNKDVFVCMPTGAGKSLCYQLPALLAKGITIVVSPLIALIQDQVDHLLTLKVRVSSLNSKLSAQERKELLADLEREKPQTKILYITPEMAASSSFQPTLNSLVSRHLLSYLVVDEAHCVSQWGHDFRPDYLRLGALRSRLGHAPCVALTATATPQVQEDVFAALHLKKPVAIFKTPCFRANLFYDVQFKELISDPYGNLKDFCLKALGQEADKGLSGCGIVYCRTREACEQLAIELSCRGVNAKAYHAGLKASERTLVQNDWMEEKVPVIVATISFGMGVDKANVRFVAHWNIAKSMAGYYQESGRAGRDGKPSWCRLYYSRNDRDQVSFLIRKEVAKLQEKRGNKASDKATIMAFDALVTFCEELGRWGRGHGKSLRAAWCSQVVSRHAEL

SEQ ID NO: 20049 - DNA, 1308 bp, Artificial Sequence
  derived and/or modified sequence
atgtctagccaccacacaacctttcccttcgatcctgagaggagagtccgttccacacttaagaaggtgttcggtttcgattcatttaagactccgttgcaggagtctgccactatggccgtggtcaagggcaataaagatgtgtttgtatgcatgccaacaggagcaggtaagagcctgtgctatcagcttccagctcttctcgcaaaagggatcaccatcgttgtgtcccctctgatcgcacttatacaggaccaggtggatcacctccttactctcaaggttcgcgtttcatccctcaactctaagctgtccgcccaagagaggaaggagctgttagctgacctagagagagagaagcctcagacaaagatcttgtatatcactcctgaaatggctgccagtagttctttccagcctactctaaatagcctcgtatccagacacttactctcctacctggtagtagatgaggcccattgtgtgtcccaatgggggcatgatttcaggccagattatttgagactgggtgcactccgtagtagactcgggcacgcaccttgtgtggcgctgacggctacagctacgccccaagttcaagaggatgtgttcgcagccttgcacctgaagaaacccgtcgcaatcttcaagacaccctgtttcagagcaaaccttttttacgatgtccagtttaaggagctcattagcgatccctatggcaacctcaaggacttctgccttaaggcccttggccaggaggcagataagggtctctcagggtgtggcattgtgtactgtaggactagggaagcctgcgagcaactggcaatagagctgtcgtgtagaggtgtgaatgcaaaagcgtaccacgcaggactcaaggcttctgagcgcacattggtacagaacgattggatggaggagaaggtacctgtgattgtggccacaatcagtttcggcatgggcgtagataaagccaatgtgagattcgtagcccactggaacattgctaagagtatggctggctattatcaggaatcggggagggctgggcgcgatggcaaaccctcgtggtgtaggctgtactattctagaaacgatagagatcaagtgtcttttctcatcagaaaggaggtggccaagttgcaagagaagagagggaataaagcttcagataaagccacaataatggcctttgatgccctggtcactttctgtgaggagctcgggagatgggggcggggacacggcaaatccctgcgtgctgcatggtgctcccaggtcgtcagtcgacatgccgagctgtag

SEQ ID NO: 20050 - DNA, 1308 bp, Artificial Sequence
  derived and/or modified sequence
atgagcagccaccacaccaccttcccctttgatcctgagcggcgggtgcgcagcaccctgaagaaggtgtttggatttgacagcttcaagacccccctgcaggagagcgccaccatggctgtggtgaagggcaacaaggatgtgtttgtgtgcatgcccaccggggccggcaagagcctgtgctaccagctgcctgccctgctggccaagggcatcaccatcgtggtgagccccctcatcgccctgatccaggaccaggtggaccacctgctgaccctgaaggtgcgggtgagcagcctgaacagcaagctgagcgcccaggagaggaaggagctgctggccgacctggagcgggagaagccccagaccaagatcctgtacatcaccccagagatggccgccagcagcagcttccagcccaccctgaacagcctggtgagccgccacctgctgagctacctggtggtggatgaggcccactgtgtgtcccagtggggccatgacttccggccagactacctgcggctgggcgccctgcggagccggctgggccacgccccctgtgtggccctgacagccacagccaccccccaggtgcaggaggatgtgtttgctgccctgcacctgaagaagcctgtggccatcttcaagaccccctgcttccgggccaacctcttctatgatgtgcagttcaaggagctgatcagtgacccctacggcaacctgaaggacttctgcctgaaggccctgggccaggaggccgacaagggcctgagcggctgcggcatcgtgtactgcaggacccgggaggcctgtgagcagctggccatcgagctgagctgccggggcgtgaatgccaaggcctaccacgccggcctgaaggccagcgagaggaccctggtgcagaatgactggatggaggagaaggtgcctgtgattgtggccaccatcagctttggcatgggcgtggacaaggccaacgtgcgctttgtggcccactggaacatcgccaagtccatggccggctactaccaggagagcggccgggccggcagagatggcaagcccagctggtgccgcctgtactacagcagaaatgaccgggaccaggtgtccttcctgatcaggaaggaggtggccaagctgcaggagaagaggggcaacaaggccagtgacaaggccaccatcatggcctttgatgccctggtgaccttctgtgaggagctgggccgctggggccggggccacggcaagagcctgcgggccgcctggtgcagccaggtggtgtccagacatgctgagctgtag

SEQ ID NO: 20051 - DNA, 1308 bp, Artificial Sequence
  derived and/or modified sequence
atgagcagccaccacaccaccttccccttcgaccccgagcggcgggttcggagcactttgaagaaagtcttcgggttcgactcctttaaaacccctttgcaggagtctgccacaatggctgtggtgaaaggaaataaagacgtgtttgtgtgtatgccaacaggtgccggaaagtccttgtgttatcagcttcccgctctccttgctaagggcatcactatcgttgtgtccccactgatcgctttaatccaggaccaggtggaccacctcctgacgctcaaggttagggtgtcctcgcttaacagcaagctgtccgcacaggaaagaaaggaacttctggcagatctggagcgagagaagccgcaaactaagatactgtatattacaccagagatggctgctagcagctcatttcagccaaccctgaatagcctggtaagccgccatcttctgtcatacctggtggtggatgaggctcactgtgtgagccagtgggggcatgatttccggcctgactatttacgattaggagcactccggagccgactcggccacgcaccgtgcgtcgccctgacagccactgcaacaccgcaggttcaggaggacgtgtttgctgctctgcatctcaagaagcccgtggcaatctttaaaacaccctgtttccgcgcaaatctgttctacgacgtgcagttcaaagagctgatctctgacccttatggcaacctgaaagatttctgcctaaaggcgctgggacaggaggctgataaaggactgagtgggtgcggaattgtctattgtaggaccagggaggcctgcgagcagctggctatcgagctcagctgcaggggagtcaacgccaaggcctaccacgcggggttgaaagccagcgagcgcaccctggtccaaaatgactggatggaggagaaggtgcccgttatcgttgcgactatcagtttcggtatgggagtcgataaggccaacgttaggttcgtagctcattggaacattgcgaagtccatggccggctactaccaggagtccgggagggccggaagagatggaaagcctagttggtgtcgcctatactacagtcgcaatgatcgagatcaggtgagcttcctgattagaaaggaggtagcaaaacttcaggaaaagagggggaacaaggcatccgacaaagcaaccataatggcgtttgatgccttagtaacgttctgtgaagaactggggcggtggggacgaggccacggaaagtccctccgtgccgcctggtgttcccaggtggtgagccgacacgccgagctttag

SEQ ID NO: 20052 - DNA, 1308 bp, Artificial Sequence
  derived and/or modified sequence
atgagcagccatcacactaccttccccttcgatccggagcgacgagtgcgcagcacgctgaagaaggtgttcgggttcgacagttttaagacccctctgcaagagagcgccactatggccgtggtcaaggggaacaaggacgtgtttgtttgcatgccgaccggcgctggtaagtcactgtgttatcagttacccgctctcctggcgaagggaattacaatcgtggtatctccactgatcgctcttatccaggatcaagtggaccaccttctcactctgaaagtgagggttagctcactcaattctaaactgagcgcccaggaacgcaaggaactcttggctgatcttgagcgagaaaaaccccagactaagatcctgtatatcacaccggagatggccgcaagttcatcatttcagccgacccttaactccctggtgagtaggcatctgttatcctatctcgtcgtcgacgaggcccattgcgtgagtcagtgggggcatgatttccgaccggattacttacggttaggcgctctgaggagtcgtctgggccacgccccttgcgtggcgctgaccgctacagctacaccacaagtgcaggaggacgtgtttgctgcgctgcacctgaagaaacctgtggccatattcaagactccatgttttcgcgctaacctgttttacgacgttcaattcaaggagctaatcagcgatccatatggtaatcttaaagatttttgcctgaaggccctggggcaagaggcagataaagggctgagcggttgcggaatagtctactgcagaacccgggaggcttgcgaacagctggcaattgaactctcttgtcggggagtcaatgcaaaggcctatcacgctggcctaaaagcttccgaacgcactctggtacaaaatgattggatggaggagaaagtgccggttattgtcgctacaatttcctttgggatgggcgtagacaaggctaatgttcgctttgtggctcattggaacatagcaaaaagtatggccggttactaccaggagagcggaagggccggtagagacggaaagccatcatggtgccggctatattatagtaggaatgacagagaccaggtttcgtttctgattaggaaggaagtggcgaaattgcaagaaaaaagagggaacaaagcttcagacaaggcaaccataatggcctttgatgctctcgttaccttttgcgaagagctgggcagatggggcagggggcatggaaaaagcttaagggccgcttggtgcagccaggtggtgagcaggcacgccgaactgtag

SEQ ID NO: 20053 - DNA, 1741 bp, Artificial Sequence
  derived and/or modified sequence
acggatataagattgcgtgggttctgcctaaagctgaattcccagcgctttggcttctctgagttggggttgtgtataggggtcttcgaacagttccggaaccagccagcagcctttaattcttgggcggaccacggccggttctgtgttcttggctaagatgagcagccaccataccacctttccttttgaccctgagcggcgagtccggagtacgctgaagaaggtctttgggtttgactcttttaagacgcctttacaggagagtgcgaccatggctgtagtaaaaggtaacaaggacgtctttgtgtgcatgcccacaggggcaggaaaatccctatgctatcagctccctgctctgttggccaaaggcatcaccattgtagtctctcctctcattgctttgattcaggaccaagtggaccacttgctaaccctaaaggtacgagtaagttccctgaactcgaagctctctgcacaggaaaggaaggagctgcttgctgacctggagcgagaaaagccccagaccaagattctgtacatcaccccagagatggcagcttcatcctccttccagcccaccctgaactccctggtgtcccgccacctgctgtcttacttggtggtggatgaagctcattgtgtttcccaatgggggcatgactttcgtcctgactacttgcgtctgggtgccctgcgctcccgcctgggacatgccccttgtgtggctctgaccgccacagccaccccacaggtccaagaggacgtgtttgctgccctgcacctgaagaaaccagttgccatcttcaagactccctgcttccgggccaacctcttctatgatgtgcaattcaaggaactgatttctgatccctatgggaacctgaaggacttctgccttaaggctcttggacaggaggctgataaagggttatctggctgcggcattgtgtactgcaggactagagaggcttgtgaacagctggccatagagctcagctgcaggggtgtgaacgccaaggcttaccatgcagggctgaaggcctctgaaagaacgctggtgcagaacgactggatggaggagaaggtccctgtaattgttgcaaccattagttttgggatgggagtggataaagccaatgtcaggtttgtcgcccattggaatattgccaagtctatggctgggtactaccaggagtctggccgggctggcagggatgggaagccttcctggtgccgtctctattactccaggaatgaccgggaccaagtcagcttcctgatcaggaaggaagtagcaaaactccaggaaaagagaggaaacaaagcatctgataaagccactatcatggcctttgatgccctggtgaccttctgtgaagaactggggcgatggggcaggggccacggaaagagtctgagggctgcttggtgtagtcaggttgtgtccaggcatgcggagctgtgagtgcctgcaggagagacacccaggaggagtttttacattttggtctaaaaagctcttggattcatctcatctcatggaatgatcctgtcggatgacgctgacgtgattgcttcagacttagaggtgaataaattgaggtccagagaggtcacagtcacgaagctcatggtagactgaggccactaaacacccgtctcctgattttcagtggcgtcctcatttgcatacacctgggccatcttggtttttgcaagaaaaaagcgaggaaatcag

SEQ ID NO: 20054 - DNA, 1308 bp, Artificial Sequence
  derived and/or modified sequence
atgagcagccaccacaccaccttccccttcgaccccgagagaagagtgagaagcaccctgaagaaggtgttcggcttcgacagcttcaagacccccctgcaggagagcgccaccatggccgtggtgaagggcaacaaggacgtgttcgtgtgcatgcccaccggcgccggcaagagcctgtgctaccagctgcccgccctgctggccaagggcatcaccatcgtggtgagccccctgatcgccctgatccaggaccaggtggaccacctgctgaccctgaaggtgagagtgagcagcctgaacagcaagctgagcgcccaggagagaaaggagctgctggccgacctggagagagagaagccccagaccaagatcctgtacatcacccccgagatggccgccagcagcagcttccagcccaccctgaacagcctggtgagcagacacctgctgagctacctggtggtggacgaggcccactgcgtgagccagtggggccacgacttcagacccgactacctgagactgggcgccctgagaagcagactgggccacgccccctgcgtggccctgaccgccaccgccaccccccaggtgcaggaggacgtgttcgccgccctgcacctgaagaagcccgtggccatcttcaagaccccctgcttcagagccaacctgttctacgacgtgcagttcaaggagctgatcagcgacccctacggcaacctgaaggacttctgcctgaaggccctgggccaggaggccgacaagggcctgagcggctgcggcatcgtgtactgcagaaccagagaggcctgcgagcagctggccatcgagctgagctgcagaggcgtgaacgccaaggcctaccacgccggcctgaaggccagcgagagaaccctggtgcagaacgactggatggaggagaaggtgcccgtgatcgtggccaccatcagcttcggcatgggcgtggacaaggccaacgtgagattcgtggcccactggaacatcgccaagagcatggccggctactaccaggagagcggcagagccggcagagacggcaagcccagctggtgcagactgtactacagcagaaacgacagagaccaggtgagcttcctgatcagaaaggaggtggccaagctgcaggagaagagaggcaacaaggccagcgacaaggccaccatcatggccttcgacgccctggtgaccttctgcgaggagctgggcagatggggcagaggccacggcaagagcctgagagccgcctggtgcagccaggtggtgagcagacacgccgagctgtag

SEQ ID NO: 20055 - DNA, 1233 bp, Artificial Sequence
  derived and/or modified sequence
atgtcctctcaccataccacattcccgtttgatcctgaaagacgggtcaggagcaccctcaaaaaagtgttcgggttcgacagctttaagacgcccctgcaggaaagcgctactatggcagtcgtgaagggcaataaagacgtattcgtgtgtatgcctacaggggccggcaagtccctttgctatcagctgccagcactgttagcgaaaggtatcaccatcgtggtttcccccttgatcgctctaatacaggaccaggtggatcacctgctaactttgaaggtccgtgtgagctctttgaattcaaaattatccgcacaggagcgaaaggagctgttagcagatctcgaacgggaaaaacctcagactaagattctctacatcaccccagaaatggcagccagtagttcttttcagcctaccttgaacagcctcgtgtcccgacaccttctgtcatacctggtggttgatgaggcgcattgtgtaagccagtgggggcatgattttcgtccggattatctgcgcctgggagccctgaggagcagactaggccacgccccgtgcgtggcactgacggctacagccacaccccaggtgcaggaagatgtattcgccgccctgcacctcaagaaacctgtggctatttttaagacgccttgtttcagggccaatctcttttacgacgtccagtttaaagaactgatcagcgacccctacggaaacctgaaggacttctgcctcaaggccctgggccaggaagccgacaagggcctgtctggatgcggcatcgtgtattgtagaaccagagaggcatgtgagcagctggcaatcgaactttcttgcaggggcgtaaacgccaaggcctaccatgccggactgaaggcaagtgaacggaccctggtacagaacgactggatggaggagaaagtcccagtaatcgtcgccaccattagctttggtatgggagtcgacaaagccaatgtacgcttcgtggcccactggaatattgccaaatcaatggctgggtattatcaggagtccggccgagccggacgagacggaaaaccatcgtggtgcagactatattattcgaggaatgaccgcgatcaagtgagttttctcatccgcaaggaagtcgctaaactgcaggagaagcggggaaataaggcctctgacaaggccaccataatggcttttgatgccctggtcacattctgcgaggaactgggatag

SEQ ID NO: 20056 - DNA, 1233 bp, Artificial Sequence
  derived and/or modified sequence
atgagcagccaccacaccaccttcccctttgatcctgagcggcgggtgcgcagcaccctgaagaaggtgtttggatttgacagcttcaagacccccctgcaggagagcgccaccatggctgtggtgaagggcaacaaggatgtgtttgtgtgcatgcccaccggggccggcaagagcctgtgctaccagctgcctgccctgctggccaagggcatcaccatcgtggtgagccccctcatcgccctgatccaggaccaggtggaccacctgctgaccctgaaggtgcgggtgagcagcctgaacagcaagctgagcgcccaggagaggaaggagctgctggccgacctggagcgggagaagccccagaccaagatcctgtacatcaccccagagatggccgccagcagcagcttccagcccaccctgaacagcctggtgagccgccacctgctgagctacctggtggtggatgaggcccactgtgtgtcccagtggggccatgacttccggccagactacctgcggctgggcgccctgcggagccggctgggccacgccccctgtgtggccctgacagccacagccaccccccaggtgcaggaggatgtgtttgctgccctgcacctgaagaagcctgtggccatcttcaagaccccctgcttccgggccaacctcttctatgatgtgcagttcaaggagctgatcagtgacccctacggcaacctgaaggacttctgcctgaaggccctgggccaggaggccgacaagggcctgagcggctgcggcatcgtgtactgcaggacccgggaggcctgtgagcagctggccatcgagctgagctgccggggcgtgaatgccaaggcctaccacgccggcctgaaggccagcgagaggaccctggtgcagaatgactggatggaggagaaggtgcctgtgattgtggccaccatcagctttggcatgggcgtggacaaggccaacgtgcgctttgtggcccactggaacatcgccaagtccatggccggctactaccaggagagcggccgggccggcagagatggcaagcccagctggtgccgcctgtactacagcagaaatgaccgggaccaggtgtccttcctgatcaggaaggaggtggccaagctgcaggagaagaggggcaacaaggccagtgacaaggccaccatcatggcctttgatgccctggtgaccttctgtgaggagctgggctag

SEQ ID NO: 20057 - DNA, 1233 bp, Artificial Sequence
  derived and/or modified sequence
atgagcagccaccacaccaccttccccttcgaccccgagcggcgggtacggagcactctgaaaaaggtcttcggattcgattcgtttaagacaccccttcaggaatcagcaacaatggcagtagttaagggcaataaagacgtattcgtgtgtatgcccaccggcgcaggaaagagcttgtgctatcagctcccagccctcctggccaaggggataacaattgtcgtgtctcccctgattgccctgattcaagaccaggtggaccatctgttgacgcttaaggtcagagtgtcttctctgaactccaagctttcggcgcaagagcgaaaggaattactggctgatttggagcgcgagaaaccccaaacgaagattctctacatcacacccgagatggctgcctcaagtagttttcagcctacacttaacagcctggtaagtcggcatttactttcgtacctggtggtggatgaggctcattgtgtctctcagtggggtcatgactttaggccagactacctgcgactcggcgccctcagaagtcgcttagggcatgctccttgcgtggccctcactgccaccgcaactccacaggttcaggaagacgttttcgctgccttgcacttaaaaaaacctgtagctatttttaagaccccatgtttccgggcaaatctcttctacgacgttcagtttaaggaactgatttcagatccctacgggaacttgaaagacttttgcctgaaggcccttggccaggaagccgataagggtctgagcggctgcggaattgtgtattgcagaaccagggaagcttgcgagcagcttgccatcgagttgtcttgtcgaggcgttaatgcaaaggcctaccatgccggactcaaggcgtccgaacggactctggtccagaacgactggatggaagagaaggtcccagtgattgtggccacaatctccttcgggatgggagtagacaaggcaaacgtgcggtttgtcgctcactggaacatcgctaagagcatggcaggatactatcaggagtcaggtcgcgcaggccgtgacgggaagcccagctggtgtcgactgtactatagccgtaatgacagagatcaggtgagtttccttatcagaaaggaagtagccaagctgcaggagaagcgaggaaacaaggccagtgacaaggctactataatggcgtttgacgctctggtcaccttctgtgaggagttaggctag

SEQ ID NO: 20058 - DNA, 1233 bp, Artificial Sequence
  derived and/or modified sequence
atgagctctcaccacactactttccccttcgatcccgagagacgggtccggtctaccctcaaaaaggtctttgggtttgatagttttaagacccctctccaggagtctgctacaatggcagttgtgaaggggaataaggatgtgtttgtctgcatgcctacgggcgctggaaaatctttgtgctatcagctgcctgccttgctggcgaaaggaatcacaattgttgtatctcctctaattgccctgatccaggatcaggtcgatcatctactcacactgaaagttagagtctcatctctgaactcaaagttgagtgcccaggaacggaaagaattgctggcagatctggagagagagaagccccagaccaagattctgtacatcacccccgagatggctgcatcctcctcttttcagcctacattgaactcccttgtgtcgagacatctgctcagttacttggtggtcgatgaggcccactgcgttagtcaatggggccacgatttcaggccagactacctccggctgggagccctgaggtcacgcctagggcatgcgccttgtgtcgcgctaaccgccactgcaaccccacaggtgcaggaggacgtgttcgccgctctgcacctcaagaaaccggtcgccatcttcaaaacaccgtgctttcgggcaaacctgttttacgatgtgcagttcaaagaactgatctcagatccatacggcaacctgaaggatttttgcctgaaagcacttggacaggaagcggataagggactgtctggttgcggtattgtttactgtcgcacacgggaagcgtgtgagcagttggccatagaactttcttgcagaggcgtcaatgcaaaggcctatcatgcaggcctgaaggcttccgagaggacactggtccagaacgactggatggaagagaaagttcctgtgatcgtggctaccataagctttggcatgggggttgacaaagccaatgtgcgtttcgttgctcactggaacatcgccaaatctatggctggttactaccaggaatccggcagggccggacgtgacggcaagccgtcctggtgtcggctctactacagtagaaatgatcgggatcaggtctcattcctgattcgaaaagaggtggccaaactgcaagaaaagaggggtaacaaagccagtgacaaggctactattatggcttttgatgcactcgttacattttgcgaggaattaggatag

SEQ ID NO: 20059 - DNA, 3702 bp, Artificial Sequence
  derived and/or modified sequence
acggatataagattgcgtgggttctgcctaaagctgaattcccagcgctttggcttctctgagttggggttgtgtataggggtcttcgaacagttccggaaccagccagcagcctttaattcttgggcggaccacggccggttctgtgttcttggctaagatgagcagccaccataccacctttccttttgaccctgagcggcgagtccggagtacgctgaagaaggtctttgggtttgactcttttaagacgcctttacaggagagtgcgaccatggctgtagtaaaaggtaacaaggacgtctttgtgtgcatgcccacaggggcaggaaaatccctatgctatcagctccctgctctgttggccaaaggcatcaccattgtagtctctcctctcattgctttgattcaggaccaagtggaccacttgctaaccctaaaggtacgagtaagttccctgaactcgaagctctctgcacaggaaaggaaggagctgcttgctgacctggagcgagaaaagccccagaccaagattctgtacatcaccccagagatggcagcttcatcctccttccagcccaccctgaactccctggtgtcccgccacctgctgtcttacttggtggtggatgaagctcattgtgtttcccaatgggggcatgactttcgtcctgactacttgcgtctgggtgccctgcgctcccgcctgggacatgccccttgtgtggctctgaccgccacagccaccccacaggtccaagaggacgtgtttgctgccctgcacctgaagaaaccagttgccatcttcaagactccctgcttccgggccaacctcttctatgatgtgcaattcaaggaactgatttctgatccctatgggaacctgaaggacttctgccttaaggctcttggacaggaggctgataaagggttatctggctgcggcattgtgtactgcaggactagagaggcttgtgaacagctggccatagagctcagctgcaggggtgtgaacgccaaggcttaccatgcagggctgaaggcctctgaaagaacgctggtgcagaacgactggatggaggagaaggtccctgtaattgttgcaaccattagttttgggatgggagtggataaagccaatgtcaggtttgtcgcccattggaatattgccaagtctatggctgggtactaccaggagtctggccgggctggcagggatgggaagccttcctggtgccgtctctattactccaggaatgaccgggaccaagtcagcttcctgatcaggaaggaagtagcaaaactccaggaaaagagaggaaacaaagcatctgataaagccactatcatggcctttgatgccctggtgaccttctgtgaagaactggggtaagtgacttattttatatgtggagcaaagtgtcagtgagatcatttacttccccggcacgccctagttaagcagctgacataagacagcccgtaggctaccaagggacacctgcctgcaaaggctgttgtgtcgggcagtgtggaagtcaggaccttgctcttctctattggaggccccgggatctctcgcagtgtggggatttgctcagtattctgagtggtgtccttccctccactccaccctcttctgggatggctggccccacaagccactcagttccaagggatgtgaccagctctgagccatcggctttgtggtcatcatgtgccaccgagctgggacttctggcatcacttgagtagtcctcacccttatccaggacccacacagaagcctgtggccccacttacctcggggagtcatgtgctttgaactcacgcatctgttttacctgcatctgcaggcgatggggcaggggccacggaaagagtctgagggctgcttggtgtagtcaggttgtgtccaggcatgcggagctgtgagtgcctgcaggagagacacccaggaggagtttttacattttggtctaaaaagctcttggattcatctcatctcatggaatgatcctgtcggatgacgctgacgtgattgcttcagacttagaggtgaataaattgaggtccagagaggtcacagtcacgaagctcatggtagactgaggccactaaacacccgtctcctgattttcagtggcgtcctcatttgcatacacctgggccatcttggtttttgcaagaaaaaagcgaggaaatcagagaaactctttgggctgtgtgtttttatttccacctcctcctgttgaccagtgagtcggtggcttctggactgaagctattttcttctccaaactgctgtctctaatttggcctctgtggcaagaccacgcccagcaaaagtggtcggctgcagtgccaggaccacccttgcctgcagcctttgcgaccagagcccttttcaagcacaattaatatgggagttgctaaatttggccttcttaggcttcttgagcagagctcttatttctggtgaggaatgaaagggccaagtgttcctgttcattgtgagtcctgtttgctgaaaaaagctctggggctgtctgaggctctggaatgctctctggagggttaactctgcctgtccccagggtctgctccgcctgccaggcaagggaacaggtcctcccaagggcctctgccttcatttctcctgtcaccttccggggagctgggacttcttagtgcatcagtggcctggttgccaggggctggggtccaggcatctgtggactcaaggagtccaggtgacggtgttgcgctgcctcttgagcagcctcgtgcctgtctcctttgctacatgtgatgattctgaaatccaggcagcaggctggaataaacgctgctggtatgtctgtattggctactgttctttgaataagtgaatgtttctttattgcataactggcgtgtagcacaaagaaaaagccccttctccaccagatatttgcttcctaagaatagttctcattggaggctgaggtcgaagcagcctcccaccagcgatcccttggggcgggcacctggcagtgagggacagagctagtggggtgggctcagcagaagtgggtgcatttctgcaaaggaagctgtaggtttcttgtcagtttgttgtggggtctgaggcacatgggagtgggaccagcagaaaagatactcaggtcagttaactaatgaggcggggctgtggcagccagcggttttcctctcttctctatctgtagctactttctctgggctgcagccttgaaaaagcagtgtttgattattcataacaatgagtgtcttttagtgtcacagggaacagttattaggtttgaagcaacctccagcttgaggcctcggcatcttgagatggaagagcagccttgtgtttagacctggattgaattgggccctgttgtttcctgggatcttggggctgggggtgcccaacagcctggcatcttcttgtttctctgtgtgtttactcattcattcatttattcagctgataaatattgactgatgccagctctgtgccaggcacattggacatgggggatacactagtgggcagaaatagccccgtcccagagccggccatggtggctcatacctgttataccagcactttgggaggctgaagtgggaggatcgcttgagcctgggagttcaagaccagcctgggcaacatggcaagaccctgtctctact

SEQ ID NO: 20060 - DNA, 1233 bp, Artificial Sequence
  derived and/or modified sequence
atgagcagccaccacaccaccttccccttcgaccccgagagaagagtgagaagcaccctgaagaaggtgttcggcttcgacagcttcaagacccccctgcaggagagcgccaccatggccgtggtgaagggcaacaaggacgtgttcgtgtgcatgcccaccggcgccggcaagagcctgtgctaccagctgcccgccctgctggccaagggcatcaccatcgtggtgagccccctgatcgccctgatccaggaccaggtggaccacctgctgaccctgaaggtgagagtgagcagcctgaacagcaagctgagcgcccaggagagaaaggagctgctggccgacctggagagagagaagccccagaccaagatcctgtacatcacccccgagatggccgccagcagcagcttccagcccaccctgaacagcctggtgagcagacacctgctgagctacctggtggtggacgaggcccactgcgtgagccagtggggccacgacttcagacccgactacctgagactgggcgccctgagaagcagactgggccacgccccctgcgtggccctgaccgccaccgccaccccccaggtgcaggaggacgtgttcgccgccctgcacctgaagaagcccgtggccatcttcaagaccccctgcttcagagccaacctgttctacgacgtgcagttcaaggagctgatcagcgacccctacggcaacctgaaggacttctgcctgaaggccctgggccaggaggccgacaagggcctgagcggctgcggcatcgtgtactgcagaaccagagaggcctgcgagcagctggccatcgagctgagctgcagaggcgtgaacgccaaggcctaccacgccggcctgaaggccagcgagagaaccctggtgcagaacgactggatggaggagaaggtgcccgtgatcgtggccaccatcagcttcggcatgggcgtggacaaggccaacgtgagattcgtggcccactggaacatcgccaagagcatggccggctactaccaggagagcggcagagccggcagagacggcaagcccagctggtgcagactgtactacagcagaaacgacagagaccaggtgagcttcctgatcagaaaggaggtggccaagctgcaggagaagagaggcaacaaggccagcgacaaggccaccatcatggccttcgacgccctggtgaccttctgcgaggagctgggctag

SEQ ID NO: 20061 - protein, 698 aa, Artificial Sequence
  derived and/or modified sequence
MPSEGRCWETLKALRSSDKGRLCYYRDWLLRREDVLEECMSLPKLSSYSGWVVEHVLPHMQENQPLSETSPSSTSASALDQPSFVPKSPDASSAFSPASPATPNGTKGKDESQHTESMVLQSSRGIKVEGCVRMYELVHRMKGTEGLRLWQEEQERKVQALSEMASEQLKRFDEWKELKQHKEFQDLREVMEKSSREALGHQEKLKAEHRHRAKILNLKLREAEQQRVKQAEQERLRKEEGQIRLRALYALQEEMLQLSQQLDASEQHKALLKVDLAAFQTRGNQLCSLISGIIRASSESSYPTAESQAEAERALREMRDLLMNLGQEITRACEDKRRQDEEEAQVKLQEAQMQQGPEAHKEPPAPSQGPGGKQNEDLQVKVQDITMQWYQQLQDASMQCVLTFEGLTNSKDSQAKKIKMDLQKAATIPVSQISTIAGSKLKEIFDKIHSLLSGKPVQSGGRSVSVTLNPQGLDFVQYKLAEKFVKQGEEEVASHHEAAFPIAVVASGIWELHPRVGDLILAHLHKKCPYSVPFYPTFKEGMALEDYQRMLGYQVKDSKVEQQDNFLKRMSGMIRLYAAIIQLRWPYGNRQEIHPHGLNHGWRWLAQILNMEPLSDVTATLLFDFLEVCGNALMKQYQVQFWKMLILIKEDYFPRIEAITSSGQMGSFIRLKQFLEKCLQHKDIPVPKGFLTSSFWRS

SEQ ID NO: 20062 - protein, 444 aa, Artificial Sequence
  derived and/or modified sequence
MLQLSQQLDASEQHKALLKVDLAAFQTRGNQLCSLISGIIRASSESSYPTAESQAEAERALREMRDLLMNLGQEITRACEDKRRQDEEEAQVKLQEAQMQQGPEAHKEPPAPSQGPGGKQNEDLQVKVQDITMQWYQQLQDASMQCVLTFEGLTNSKDSQAKKIKMDLQKAATIPVSQISTIAGSKLKEIFDKIHSLLSGKPVQSGGRSVSVTLNPQGLDFVQYKLAEKFVKQGEEEVASHHEAAFPIAVVASGIWELHPRVGDLILAHLHKKCPYSVPFYPTFKEGMALEDYQRMLGYQVKDSKVEQQDNFLKRMSGMIRLYAAIIQLRWPYGNRQEIHPHGLNHGWRWLAQILNMEPLSDVTATLLFDFLEVCGNALMKQYQVQFWKMLILIKEDYFPRIEAITSSGQMGSFIRLKQFLEKCLQHKDIPVPKGFLTSSFWRS

SEQ ID NO: 20063 - DNA, 2097 bp, Artificial Sequence
  derived and/or modified sequence
atgccctccgaaggtcgctgttgggagaccctaaaagctctgcgatctagcgacaagggccgcctgtgttattatagggactggctcctccgcagagaggacgtcttagaagagtgtatgtctctcccgaaactgtcaagctatagcggttgggtagtggagcatgtgcttccccatatgcaggagaaccagccactaagcgagactagtccatcctccacttctgccagcgctctagatcagccgtctttcgtccccaaaagtcctgatgcttccagtgcattcagtcccgctagccctgccacaccaaatgggaccaaaggcaaggacgaatcacagcatactgaatcaatggtgttacagagcagccgaggtattaaggtcgagggttgcgtgcgtatgtacgaactcgtccatagaatgaaagggacggaaggcctgcgactgtggcaggaggaacaggaacgcaaggtgcaggccctgtccgagatggccagtgaacagctaaaaaggtttgacgaatggaaggaactgaaacagcataaggagtttcaggacttgagagaggtgatggaaaagagttctagggaagctctgggtcatcaagaaaaactaaaagccgagcacagacaccgcgctaaaatactcaacctgaagctacgcgaggcggagcagcaacgggtcaaacaggccgagcaagagcgtttgagaaaagaagaaggccagattaggctcagagccctgtacgccctacaggaagaaatgttgcagctaagtcagcagctcgacgcgtctgaacagcataaggcattactgaaagtcgatcttgcggcctttcagactaggggaaaccagttgtgttcacttatatccgggattattagggcgtcgtcggaaagcagttaccctacagctgaaagccaagcagaagcagaaagagccctgagggaaatgagggacctcttaatgaatctcggacaagaaattactagagcctgcgaagacaagcgacgccaagatgaggaagaggctcaggtcaagctgcaggaggcccaaatgcaacagggacccgaggcacataaggaaccgcctgccccttcccagggacccggtgggaagcagaatgaagatttacaagtcaaggtacaagacatcacaatgcagtggtatcagcagcttcaggacgcatcaatgcagtgcgtcctcactttcgagggtctgacgaacagtaaagactctcaggccaagaagatcaagatggacctccagaaagccgccaccattccagtcagccagatcagcacgatcgccggttcaaaacttaaagaaatttttgataagatccattcgctcctctctggcaagcctgtgcagagcggcggccgttccgttagcgtgaccctcaatccccaggggttggactttgttcagtataaacttgctgaaaaatttgtgaagcaaggggaagaagaggtggcttctcatcatgaggcagcatttccaatagcagttgttgcaagtgggatctgggagctccatcctcgggtcggagatcttatattggcccatttacacaaaaaatgtccttactccgtgcccttttacccaacattcaaggagggaatggctctggaggactaccagcggatgctcgggtatcaagtgaaagactccaaggtggaacaacaggacaatttcttgaagagaatgagtggaatgatccgactgtacgccgcgatcatccagttgcgatggccatacgggaaccgccaagagattcatccacacggtctaaaccacggctggcggtggctggcccagattctgaacatggagcccctgagcgacgtcacagccacgctgctcttcgactttttggaggtctgtggcaacgcccttatgaaacagtatcaagtgcaattctggaaaatgctgatcttaattaaggaagactactttcctaggatagaggccattacaagctccgggcagatgggctcattcatcaggctgaagcagtttctggagaagtgtctccagcacaaggacatccccgtgcctaaggggtttctcacatctagcttttggagatcatag

SEQ ID NO: 20064 - DNA, 1335 bp, Artificial Sequence
  derived and/or modified sequence
atgctccagttgtcccagcaactcgacgctagtgagcagcacaaggcgttgcttaaggtggacctagccgcgttccagacacgggggaaccagctgtgtagcctgatatcggggataataagagcttcgagtgaaagttcataccctacggctgaaagtcaggctgaggccgagcgcgcactgagggagatgcgggatctcctgatgaatcttggccaggaaatcactcgcgcttgtgaggataaaagacgccaagatgaggaagaagcccaggtgaagcttcaggaggctcagatgcagcaaggtcctgaagcccataaggaacctccagctccctcacagggtcctggtggcaaacaaaatgaagatctgcaagtgaaggtgcaagacattacgatgcaatggtaccagcagctccaggacgcgtcaatgcagtgtgtcctgaccttcgagggattgacaaattctaaagatagccaggcaaaaaagataaagatggacctccaaaaggctgccaccattcctgtgagccagatatcgacaattgctggaagcaagctgaaggagatctttgacaagatccatagcctgctcagtggtaagcctgttcaatcaggcggtaggagcgtgtcagtgaccctgaatccccaggggcttgacttcgttcagtataaacttgctgagaagtttgtgaagcagggcgaagaggaggtggcgagccaccatgaggcagccttccccatcgcggtggtggcgtctggcatctgggagctgcaccccagggttggtgatctgattttggctcacctacacaagaagtgcccttactcagtccctttttatcctacattcaaggaaggcatggctctggaggattatcagagaatgctgggctaccaggtgaaagactccaaagtggagcagcaggataacttcctgaaacgcatgtccgggatgatcaggctttatgcagcaattatccagctgagatggccttatggcaacagacaggagatccaccctcacggcctgaatcacggctggcgctggctcgcccagatccttaatatggagccgctttccgacgtgactgccactctgttgttcgacttccttgaagtgtgtggtaatgctctgatgaaacagtatcaagtacagttctggaaaatgctgattctgattaaggaagattacttccctcgaatcgaagcaatcactagctccggccagatgggatcgtttattcgcctaaagcagttcttagaaaagtgtcttcaacacaaggacatccccgtgcccaaaggattcttgacctcttcattttggaggagctag

SEQ ID NO: 20065 - DNA, 3321 bp, Artificial Sequence
  derived and/or modified sequence
gcgcgcgcgtcccggaagcagaagcctgtgtggccttcccggcggctgattcgagggcttgtttggtcagaaggggggcgtcagagaagctgccccttagccaaccatgccgtctgagggtcgctgctgggagaccttgaaggccctacgcagttccgacaaaggtcgcctttgctactaccgcgactggctgctgcggcgcgaggatgttttagaagaatgtatgtctcttcccaagctatcttcttattctggatgggtggtagagcacgtcctaccccatatgcaggagaaccaacctctgtctgagacttcgccatcctctacgtcagcttcagccctagatcaaccctcatttgttcccaaatctcctgacgcaagctctgccttttccccagcctcccctgcaacaccaaatggaaccaagggcaaagatgagtcccagcacacagaatctatggtacttcagtcctcacgggggatcaaagtggaaggctgcgtccgaatgtacgaactggtacacagaatgaaaggaacagagggcctgaggctatggcaggaggagcaggagaggaaggtgcaagccctctcggagatggcatctgaacaactgaagcggtttgatgaatggaaggaactgaagcagcataaagaattccaggacttgcgggaagtaatggagaagagctccagagaagccttgggacaccaagagaagctaaaagctgagcaccgtcacagagcaaagattctcaacctgaagctgcgggaagcagagcagcagcgcgtgaagcaagcagaacaggagcggcttcggaaggaagaaggccagatccgcctgcgggccctctatgctctgcaggaggagatgctgcagctcagccagcagctggatgcctctgagcagcacaaagccctgcttaaggtcgacctggctgccttccagacccgaggcaaccagctgtgcagcctcatctcagggatcatccgggcctcttcagagagcagctatcccacagcagagagtcaagctgaggctgagcgagctctgcgggaaatgcgggacctcctgatgaacttggggcaggagatcaccagagcctgcgaagacaagaggaggcaggatgaagaagaggcccaggtaaagctgcaagaggcacagatgcagcagggaccagaggcccacaaagagcccccagctcccagccagggcccaggagggaaacagaatgaagacctccaggtgaaggtacaagacattacaatgcagtggtaccagcagctgcaggatgcttccatgcagtgtgtgttgacctttgagggcctgaccaacagcaaggacagtcaggccaaaaagataaagatggacctccagaaggctgctaccatcccagtgagccaaatctctaccattgcaggctcaaaactgaaggagatctttgacaagatccacagcctgctctctggaaaacctgttcaatctggtgggcgctctgtgtctgtcacacttaacccacaggggctggactttgttcaatacaaactggcagagaaatttgtgaaacaaggcgaggaggaagtggcctctcaccatgaagcagcattccccattgcagttgtggcatccgggatctgggagctccaccccagagtgggggacctcattcttgctcatctacataagaagtgtccttactctgttcctttctatcccactttcaaggagggaatggctttggaagactatcagaggatgcttggttaccaagtaaaggattccaaagtggagcagcaagacaactttctaaaacgcatgtcagggatgatccgtctctacgctgctatcatccagctccggtggccatatggaaaccgacaggagattcaccctcatggcttaaatcatggatggcgctggttggcacagatcttaaacatggagcccttgtcagatgtgacagccaccctcctctttgacttcctggaggtgtgtgggaatgccctcatgaagcaataccaggttcagttctggaagatgctaattctcatcaaagaggactactttcccagaattgaagctatcacaagctcaggacagatgggctccttcatacgcctcaagcagttcttggagaaatgtttgcaacacaaggacattcctgtccccaagggctttctgacttcctccttctggcgctcctgatgtcactccatcacccaccatcaccgctgctgcaaagaggcaataataaaggaactgaagacagctgtatttgggagaagtcatgtcagattcagaaatttgccattatgtatttttatgtatttatgccttgtgactaggagaggagattttcatgggtcacaaaattcttggaggtcccttagtagatttggtagttccttaagagatccacgtgataaaataaatggagttggcctttcttgttttttgcaaaagtgataaaaggtctttagcacttggtctcctcccttgtctctagtgtctttcagaaagttggcaataccttaacaaatgcactctgagctggagggagcccaccatttgcacccacctacccaccctcacccctgttcagatgaatttccagaaagagctaaggctcataaggttcccttttaagtattatttaatagttgaggccagatacttacatgcaagtctgggttatggttgttttgcctttctcagcttgtgaagtcattctaaagctagaggaagtatgtgatatacacatggactaaggctcaggtgacactatggctagattaacatctgggattaggactggaaacacatgtcattttgaactaagggaaactctttgtcatcctaatttggaatttggtccctggatggctagggatccatgaaccaggcaggtaccttttttgtttttgttttgttttgtttcttttctgtttgaattaagatgggctaagatggggcttgcaacattaaacatgagctgagcatccataagcattgaattgggattaaataaagatgttgggcaggaactgaacactgctaatatgatgataaatatgcctgactaaagccactacagaaatccagagattggctgttaaaatttgttttgtggaaagactaattctctttgatactgcagaggcagtggccatggatctgttcctctgtgctaaatgtcttgtggcagggtgtgtttgtgggggagtgttcactggtactcttgagtggcctgaagtgacccattctatgaattgttaattaaggtgccaaaaaaaattaataataaagcttggttttttgaaaaa

SEQ ID NO: 20066 - DNA, 2242 bp, Artificial Sequence
  derived and/or modified sequence
atgccgtctgagggtcgctgctgggagaccttgaaggccctacgcagttccgacaaaggtcgcctttgctactaccgcgactggctgctgcggcgcgaggatgttttagaagaatgtatgtctcttcccaagctatcttcttattctggatgggtggtagagcacgtcctaccccatatgcaggagaaccaacctctgtctgagacttcgccatcctctacgtcagcttcagccctagatcaaccctcatttgttcccaaatctcctgacgcaagctctgccttttccccagcctcccctgcaacaccaaatggaaccaagggcaaagatgagtcccagcacacagaatctatggtacttcagtcctcacgggggatcaaagtggaaggctgcgtccgaatgtacgaactggtacacagaatgaaaggaacactccagagaagccttgggacaccaagagaagctaaaagctgagcaccgtcacagagcaaagattctcaacctgaagctgcgggaagcagagcagcagcgcgtgaagcaagcagaacaggagcggcttcggaaggaagaaggccagatccgcctgcgggccctctatgctctgcaggaggagatgctgcagctcagccagcagctggatgcctctgagcagcacaaagccctgcttaaggtcgacctggctgccttccagacccgaggcaaccagctgtgcagcctcatctcagggatcatccgggcctcttcagagagcagctatcccacagcagagagtcaagctgaggctgagcgagctctgcgggaaatgcgggacctcctgatgaacttggggcaggagatcaccagagcctgcgaagacaagaggaggcaggatgaagaagaggcccaggtaaagctgcaagaggcacagatgcagcagggaccagaggcccacaaagagcccccagctcccagccagggcccaggagggaaacagaatgaagacctccaggtgaaggtacaagacattacaatgcagtggtaccagcagctgcaggatgcttccatgcagtgtgtgttgacctttgagggcctgaccaacagcaaggacagtcaggccaaaaagataaagatggacctccagaaggctgctaccatcccagtgagccaaatctctaccattgcaggctcaaaactgaaggagatctttgacaagatccacagcctgctctctggaaaacctgttcaatctggtgggcgctctgtgtctgtcacacttaacccacaggggctggactttgttcaatacaaactggcagagaaatttgtgaaacaaggcgaggaggaagtggcctctcaccatgaagcagcattccccattgcagttgtggcatccgggatctgggagctccaccccagagtgggggacctcattcttgctcatctacataagaagtgtccttactctgttcctttctatcccactttcaaggagggaatggctttggaagactatcagaggatgcttggttaccaagtaaaggattccaaagtggagcagcaagacaactttctaaaacgcatgtcagggatgatccgtctctacgctgctatcatccagctccggtggccatatggaaaccgacaggagattcaccctcatggcttaaatcatggatggcgctggttggcacagatcttaaacatggagcccttgtcagatgtgacagccaccctcctctttgacttcctggaggtgtgtgggaatgccctcatgaagcaataccaggttcagttctggaagatgctaattctcatcaaagaggactactttcccagaattgaagctatcacaagctcaggacagatgggctccttcatacgcctcaagcagttcttggagaaatgtttgcaacacaaggacattcctgtccccaagggctttctgacttcctccttctggcgctcctgatgtcactccatcacccaccatcaccgctgctgcaaagaggcaataataaaggaactgaagacagctgtatttgggagaagtcatgtcagattcagaaatttgccattatgtatttttatgtatttatgccttgtgactaggagaggagattttcatgggtcacaaaattcttggaggtcccttagtagatttggtagttccttaagagatccacgtgataaaataaatggagttggcctttcttgttttttgcaaaagtgataaaaggtctttagcacttggtctcctcccttg

SEQ ID NO: 20067 - DNA, 2097 bp, Artificial Sequence
  derived and/or modified sequence
atgcccagcgagggccgctgctgggagaccctgaaggccctgcggagcagtgacaagggccgcctgtgctactacagagactggctgctgcggagagaagatgtgctggaggagtgcatgagcctgcccaagctgagcagctacagcggctgggtggtggagcacgtgctgccccacatgcaggagaaccagcccctgtctgagaccagccccagcagcaccagcgccagcgccctggaccagcccagctttgtgcccaagagcccagatgccagcagcgccttctccccagccagccctgccacccccaacggcaccaagggcaaggatgagagccagcacacagagagcatggtgctgcagagcagccggggcatcaaggtggagggctgtgtgaggatgtatgagctggtgcacaggatgaagggcacagagggcctgcggctgtggcaggaggagcaggagaggaaggtgcaggccctgtctgagatggccagcgagcagctgaagagatttgatgagtggaaggagctgaagcagcacaaggagttccaggacctgcgggaggtgatggagaagagcagccgggaggccctgggccaccaggagaagctgaaggccgagcaccgccaccgggccaagatcctgaacctgaagctgcgggaggccgagcagcagagggtgaagcaggccgagcaggagcggctgaggaaggaggagggccagatccggctgcgggccctgtatgccctgcaggaggagatgctgcagctgagccagcagctggatgccagcgagcagcacaaggccctgctgaaggtggacctggccgccttccagacccggggcaaccagctgtgcagcctcatcagcggcatcatccgggccagcagcgagagcagctaccccacagctgagagccaggccgaggccgagcgggccctgcgggagatgagggacctgctgatgaacctgggccaggagatcacccgggcctgtgaggacaagaggcggcaggatgaggaggaggcccaggtgaagctgcaggaggcccagatgcagcagggccctgaggcccacaaggagcccccagcccccagccagggccctgggggcaagcagaatgaagacctgcaggtgaaggtgcaggacatcaccatgcagtggtaccagcagctgcaggatgcctccatgcagtgtgtgctgacctttgagggcctgaccaacagcaaggacagccaggccaagaagatcaagatggacctgcagaaggccgccaccatccctgtgtcccagatcagcaccatcgccggcagcaagctgaaggagatctttgacaagatccacagcctgctgagcggcaagcctgtgcagagcggcggccgctctgtgtctgtgaccctgaacccccagggcctggactttgtgcagtacaagctggccgagaagtttgtgaagcagggcgaggaggaggtggccagccaccacgaggccgccttccccatcgctgtggtggccagcggcatctgggagctgcacccccgggtgggggacctgatcctggcccacctgcacaagaagtgcccctacagcgtgcccttctaccccaccttcaaggagggcatggccctggaggactaccagaggatgctgggctaccaggtgaaggacagcaaggtggagcagcaggacaacttcctgaagaggatgagcggcatgatccggctgtatgctgccatcatccagctgcgctggccctacggcaaccggcaggagatccacccccacggcctgaaccacggctggcgctggctggcccagatcctgaacatggagcccctgagtgatgtgacagccaccctgctgtttgacttcctggaggtgtgtggaaatgccctgatgaagcagtaccaggtgcagttctggaagatgctgatcctgatcaaggaggactacttcccccgcatcgaggccatcaccagcagcggccagatgggcagcttcatccggctgaagcagttcctggagaagtgcctgcagcacaaggacatccctgtgcccaagggcttcctgaccagcagcttctggaggagctag

SEQ ID NO: 20068 - DNA, 1335 bp, Artificial Sequence
  derived and/or modified sequence
atgctgcagctgagccagcagctggatgccagcgagcagcacaaggccctgctgaaggtggacctggccgccttccagacccggggcaaccagctgtgcagcctcatcagcggcatcatccgggccagcagcgagagcagctaccccacagctgagagccaggccgaggccgagcgggccctgcgggagatgagggacctgctgatgaacctgggccaggagatcacccgggcctgtgaggacaagaggcggcaggatgaggaggaggcccaggtgaagctgcaggaggcccagatgcagcagggccctgaggcccacaaggagcccccagcccccagccagggccctgggggcaagcagaatgaagacctgcaggtgaaggtgcaggacatcaccatgcagtggtaccagcagctgcaggatgcctccatgcagtgtgtgctgacctttgagggcctgaccaacagcaaggacagccaggccaagaagatcaagatggacctgcagaaggccgccaccatccctgtgtcccagatcagcaccatcgccggcagcaagctgaaggagatctttgacaagatccacagcctgctgagcggcaagcctgtgcagagcggcggccgctctgtgtctgtgaccctgaacccccagggcctggactttgtgcagtacaagctggccgagaagtttgtgaagcagggcgaggaggaggtggccagccaccacgaggccgccttccccatcgctgtggtggccagcggcatctgggagctgcacccccgggtgggggacctgatcctggcccacctgcacaagaagtgcccctacagcgtgcccttctaccccaccttcaaggagggcatggccctggaggactaccagaggatgctgggctaccaggtgaaggacagcaaggtggagcagcaggacaacttcctgaagaggatgagcggcatgatccggctgtatgctgccatcatccagctgcgctggccctacggcaaccggcaggagatccacccccacggcctgaaccacggctggcgctggctggcccagatcctgaacatggagcccctgagtgatgtgacagccaccctgctgtttgacttcctggaggtgtgtggaaatgccctgatgaagcagtaccaggtgcagttctggaagatgctgatcctgatcaaggaggactacttcccccgcatcgaggccatcaccagcagcggccagatgggcagcttcatccggctgaagcagttcctggagaagtgcctgcagcacaaggacatccctgtgcccaagggcttcctgaccagcagcttctggaggagctag

SEQ ID NO: 20069 - DNA, 2097 bp, Artificial Sequence
  derived and/or modified sequence
atgcccagcgagggccggtgctgggagaccctgaaggccctgcggagcagtgataaaggacggttgtgttattaccgcgactggctgctgcgtcgggaagatgtactggaagagtgcatgtctcttccaaagctgagctcttattcaggctgggtggtggaacacgttttaccgcacatgcaggaaaaccaaccactgtcagaaacatcacccagctctacatctgcctcagcgctcgaccaaccatcatttgtcccaaagagtcccgatgctagttccgcatttagccccgcttctcccgccactcctaatggcaccaaaggaaaggacgagagtcagcacactgaatctatggttctgcagtcctcccgagggattaaggtggaaggctgcgtacggatgtacgagctggtccatcgcatgaagggcacagagggactgagactatggcaggaggagcaggaacgcaaagtccaggcattgagtgagatggcttctgaacaactcaagagattcgacgagtggaaggagttgaagcagcacaaggagtttcaggacctccgcgaagtgatggagaagtcctcccgggaagccctaggccatcaggaaaaacttaaagccgagcaccggcacagggcgaagattctaaatctgaaactgagagaggctgaacaacagcgtgtgaaacaagcagagcaggagcgactccggaaagaggaaggtcagatccggctccgagctctgtatgcactgcaagaagagatgctccaattgtctcagcagctcgatgcaagcgaacagcataaagctttactgaaggtggatttagctgctttccagacaaggggtaatcaactgtgtagcctcatatctggcatcatcagagcatcctcagaaagctcatacccaaccgcagagtcgcaggccgaagccgagagagctctgagggagatgcgtgatctccttatgaacctcggccaggaaatcactagagcatgcgaagataagagaaggcaggacgaggaggaggctcaagtgaaactgcaagaagcgcagatgcagcagggccctgaggcccacaaggaaccgcctgctccttcccaagggcccggtggcaaacagaacgaagatctgcaggtcaaagtgcaggatataaccatgcagtggtaccaacagctgcaggatgcatctatgcagtgtgttctgactttcgagggcctgaccaactccaaagattcacaagcaaagaaaatcaaaatggacctccagaaagctgccaccatcccagtgagccaaatttcgaccatcgccggctccaaacttaaagaaatcttcgacaaaatacattctctgttaagcgggaaaccggtccagtcagggggcaggtcagttagcgtaaccctgaacccccaaggattagacttcgtgcagtataaactggctgaaaaattcgtgaagcagggggaggaggaagtggcaagccatcacgaggccgcctttcctatagccgttgtcgcttcggggatttgggaactgcacccaagagtcggagacctaatcctggcgcatttgcacaagaagtgtccctactcagtgcccttttatcccacctttaaggaggggatggccctggaagattatcaacgcatgctgggatatcaggtcaaggattccaaggttgagcaacaagacaacttcctcaaaaggatgtcaggaatgatcaggctttacgccgctattattcaactgagatggccatatggtaacagacaagagatccatcctcatggcctcaaccacgggtggcgctggctggcccagatcctcaacatggaaccactgagcgacgtgaccgccacactgctgttcgattttttggaggtatgcggaaatgctctgatgaaacagtaccaggttcagttttggaagatgctgattctcataaaggaagattacttcccacgcattgaggctattacctcttccggccagatgggttcattcattagattgaaacagtttctggagaaatgccttcaacacaaagatatcccagtgccaaaggggttcctgacgtcatccttctggcgctcctag

SEQ ID NO: 20070 - DNA, 1335 bp, Artificial Sequence
  derived and/or modified sequence
atgctgcagctgagccagcagctggacgccagcgagcagcacaaggcactgctgaaagtagacctcgctgcattccagacccgcgggaaccagctctgtagcttaatttctggaattattagggccagcagcgagtccagttaccccaccgcagagtcccaggctgaagccgagagagccctgagagagatgcgggacctgcttatgaatctgggtcaggaaatcacaagggcctgtgaggacaaacgacggcaggatgaggaggaagcccaggtgaagctgcaagaagcgcagatgcagcaaggaccagaggcacataaggagcctcccgcccctagtcaagggccaggtgggaagcaaaacgaggacttacaagtcaaagtgcaggacattacaatgcagtggtatcaacagctacaggatgcgagcatgcagtgtgttctaacattcgagggacttacaaattccaaagatagccaggctaaaaaaattaagatggacttgcaaaaggccgcaaccatacctgtgagtcagatctccaccatagctgggagcaaacttaaagagatttttgacaaaattcacagtcttctgtccggtaagcctgtacagagcggtgggaggagcgtgagcgtgacactgaacccgcagggattagacttcgtgcaatacaaacttgcagaaaagttcgtgaaacaaggcgaagaggaggttgcctcccatcacgaggcggctttcccaatcgctgtcgtagcttctggaatatgggaactccacccccgggtgggcgacctgatcttagctcatctgcacaaaaaatgtccttatagcgtgcccttctatcccacatttaaggaggggatggcactagaggactaccagcggatgcttggataccaagtgaaggattccaaagttgagcagcaggacaactttctcaaaaggatgtctgggatgatacggttatacgccgccatcatccagctgcgctggccctacggaaatcgtcaggaaatccatcctcatgggctgaaccacggttggcggtggctggctcagatcctcaacatggagccactttctgacgtgacagccaccctcttgtttgactttcttgaagtgtgcggcaatgccctcatgaaacagtaccaagtccagttttggaagatgcttatcctgattaaagaagattatttcccgaggatcgaggctatcaccagtagcggccagatgggatccttcattcgattaaaacagttcttagaaaagtgcctacagcacaaagatatcccggtgcccaaagggtttctgacaagttcattttggaggtcttag

SEQ ID NO: 20071 - DNA, 2097 bp, Artificial Sequence
  derived and/or modified sequence
atgccttccgagggtcgctgctgggaaactttaaaagccctccggagtagcgacaaaggccgtctctgctactatcgtgattggctgctgcgacgcgaggatgtgctggaagaatgtatgagcttgccaaagctgagctcatacagcggttgggtggtagaacatgtgctgcctcatatgcaagagaaccagccgctttcagagacgagcccttcctctacatcagcaagcgcccttgatcaacctagttttgttccaaaaagcccggatgcgagctccgctttcagtcctgcttctcctgccaccccaaatggcaccaaggggaaggatgagagccaacacacagagtccatggtgctgcaaagctctaggggtatcaaagtcgagggctgcgtgaggatgtacgaactggtgcacagaatgaaaggaacagaaggtcttagattatggcaggaggagcaggagagaaaagtgcaggccttgagcgaaatggcaagcgagcaattgaagcgatttgacgagtggaaagaactaaagcaacataaagaatttcaggatctccgtgaggtgatggagaagtcttcgcgcgaggcattaggccaccaagagaagctgaaagccgaacatcgccaccgcgctaagatcctgaacttaaagctgcgggaagccgaacaacaacgggtcaagcaagccgagcaggagcggctgagaaaggaagaggggcaaattaggctgagagctctctacgcacttcaggaagagatgctgcaattgagtcaacaactcgacgcttctgagcagcataaggcacttttgaaagtagatctggcagcctttcagactaggggcaatcagctctgctcccttatttctggcatcatccgcgcttccagcgagtcctcgtacccaacggctgagagccaagcggaggcagagcgcgctttacgggagatgcgtgatttgctgatgaatctcgggcaagagattacaagggcctgtgaagacaagcgacgtcaggacgaggaggaagctcaggtgaagctgcaggaggcccaaatgcaacaaggtcctgaggctcacaaagagcccccagctccaagccaaggacctggcggtaagcagaatgaagacctgcaggtgaaagtgcaggatattaccatgcagtggtatcagcagctccaggacgctagcatgcagtgtgtcctgacatttgagggcctaaccaatagcaaggacagtcaggctaagaaaataaagatggatttgcagaaagctgccaccattcctgtctctcaaatctcaaccattgcgggatcaaaactgaaggaaatcttcgacaaaattcacagcttgcttagtggaaagcccgttcagtcgggtggaaggtccgtctctgtgaccctgaatccccaggggttagactttgtgcaatataagttagccgaaaagtttgttaagcagggggaagaggaggtcgctagtcatcacgaagccgctttccctatcgcagtcgtcgcatcaggcatctgggagctccacccacgggtcggagacctaattctcgcccaccttcacaagaagtgtccctatagtgttccattttatcccacattcaaagaggggatggccctagaggactaccagcggatgctcggataccaggttaaggacagcaaagttgagcagcaggataacttcttaaagcgcatgtcaggtatgatcaggctctacgctgctattatccagcttaggtggccctatggaaaccggcaggaaatacaccctcacggcctcaatcacggctggagatggctggcacagatactgaatatggagcctctgtccgacgtcactgctactttgctttttgacttcctcgaggtgtgtgggaatgctctgatgaaacaataccaggtgcagttttggaagatgctcatcctgattaaagaggactactttcctcgtatcgaggcgatcacttcctctggacagatgggcagttttattagattgaaacagttcctggagaagtgtctgcagcataaagatatcccagttcccaaagggttcctaactagcagtttctggcggagctag

SEQ ID NO: 20072 - DNA, 1335 bp, Artificial Sequence
  derived and/or modified sequence
atgctgcaactcagtcagcagttggatgcttccgaacagcataaggctttgctgaaagtagatctcgccgcatttcagacccggggtaaccaactgtgttcactaatctccggcattatcagggcatcctccgagagctcttaccccaccgccgaatcccaggctgaagctgagagggctctccgtgaaatgagggacctgctgatgaacttggggcaagagatcacaagggcatgtgaagacaaaagacgtcaagacgaagaagaagcacaagtcaaactgcaggaagcccagatgcagcagggtcctgaagcacacaaagagcctcccgctccttcccagggaccaggagggaagcaaaatgaagatctgcaggtgaaagtacaggatatcaccatgcagtggtaccagcagctccaggacgccagtatgcagtgtgttctcactttcgaggggctcactaattctaaggatagtcaggcgaaaaaaatcaaaatggatctccaaaaagccgctactattccagtgagccagatttcaacaatcgcaggcagtaagctgaaagaaatctttgacaagatccattctttgctgtccggcaagccagtgcagtcaggtggtagatcagttagcgtaaccctcaatccacagggactggactttgtgcagtataagctggcggaaaagttcgtcaagcagggcgaagaggaggtggcaagtcaccacgaggcggcattccccatcgccgtggtcgcctctgggatatgggaattgcaccctcgtgtgggcgacctcattctggcccatttgcataagaagtgcccttattccgtccctttttaccccacgtttaaggaggggatggccctggaagactatcaacgcatgctgggatatcaagtgaaagactccaaggtagagcagcaggataattttctgaagaggatgtccggtatgattcggttgtacgccgctattattcaactccgttggccctatggcaaccgtcaggaaatacatccgcatggccttaaccatggctggagatggttagcccagattttgaacatggaaccccttagcgacgtcacggccactctattgtttgatttccttgaagtctgcggaaatgccttgatgaaacagtaccaggttcagttctggaaaatgctgatcttaatcaaggaggattacttccctcgcatcgaggccatcacatctagcggacagatgggctcttttattcgattaaagcagttcctcgaaaagtgtcttcagcacaaagacatccctgtgccaaagggtttcttaaccagttcgttctggcgcagctag

SEQ ID NO: 20073 - DNA, 2097 bp, Artificial Sequence
  derived and/or modified sequence
atgcccagcgagggcagatgctgggagaccctgaaggccctgagaagcagcgacaagggcagactgtgctactacagagactggctgctgagaagagaggacgtgctggaggagtgcatgagcctgcccaagctgagcagctacagcggctgggtggtggagcacgtgctgccccacatgcaggagaaccagcccctgagcgagaccagccccagcagcaccagcgccagcgccctggaccagcccagcttcgtgcccaagagccccgacgccagcagcgccttcagccccgccagccccgccacccccaacggcaccaagggcaaggacgagagccagcacaccgagagcatggtgctgcagagcagcagaggcatcaaggtggagggctgcgtgagaatgtacgagctggtgcacagaatgaagggcaccgagggcctgagactgtggcaggaggagcaggagagaaaggtgcaggccctgagcgagatggccagcgagcagctgaagagattcgacgagtggaaggagctgaagcagcacaaggagttccaggacctgagagaggtgatggagaagagcagcagagaggccctgggccaccaggagaagctgaaggccgagcacagacacagagccaagatcctgaacctgaagctgagagaggccgagcagcagagagtgaagcaggccgagcaggagagactgagaaaggaggagggccagatcagactgagagccctgtacgccctgcaggaggagatgctgcagctgagccagcagctggacgccagcgagcagcacaaggccctgctgaaggtggacctggccgccttccagaccagaggcaaccagctgtgcagcctgatcagcggcatcatcagagccagcagcgagagcagctaccccaccgccgagagccaggccgaggccgagagagccctgagagagatgagagacctgctgatgaacctgggccaggagatcaccagagcctgcgaggacaagagaagacaggacgaggaggaggcccaggtgaagctgcaggaggcccagatgcagcagggccccgaggcccacaaggagccccccgcccccagccagggccccggcggcaagcagaacgaggacctgcaggtgaaggtgcaggacatcaccatgcagtggtaccagcagctgcaggacgccagcatgcagtgcgtgctgaccttcgagggcctgaccaacagcaaggacagccaggccaagaagatcaagatggacctgcagaaggccgccaccatccccgtgagccagatcagcaccatcgccggcagcaagctgaaggagatcttcgacaagatccacagcctgctgagcggcaagcccgtgcagagcggcggcagaagcgtgagcgtgaccctgaacccccagggcctggacttcgtgcagtacaagctggccgagaagttcgtgaagcagggcgaggaggaggtggccagccaccacgaggccgccttccccatcgccgtggtggccagcggcatctgggagctgcaccccagagtgggcgacctgatcctggcccacctgcacaagaagtgcccctacagcgtgcccttctaccccaccttcaaggagggcatggccctggaggactaccagagaatgctgggctaccaggtgaaggacagcaaggtggagcagcaggacaacttcctgaagagaatgagcggcatgatcagactgtacgccgccatcatccagctgagatggccctacggcaacagacaggagatccacccccacggcctgaaccacggctggagatggctggcccagatcctgaacatggagcccctgagcgacgtgaccgccaccctgctgttcgacttcctggaggtgtgcggcaacgccctgatgaagcagtaccaggtgcagttctggaagatgctgatcctgatcaaggaggactacttccccagaatcgaggccatcaccagcagcggccagatgggcagcttcatcagactgaagcagttcctggagaagtgcctgcagcacaaggacatccccgtgcccaagggcttcctgaccagcagcttctggagaagctag

SEQ ID NO: 20074 - DNA, 1335 bp, Artificial Sequence
  derived and/or modified sequence
atgctgcagctgagccagcagctggacgccagcgagcagcacaaggccctgctgaaggtggacctggccgccttccagaccagaggcaaccagctgtgcagcctgatcagcggcatcatcagagccagcagcgagagcagctaccccaccgccgagagccaggccgaggccgagagagccctgagagagatgagagacctgctgatgaacctgggccaggagatcaccagagcctgcgaggacaagagaagacaggacgaggaggaggcccaggtgaagctgcaggaggcccagatgcagcagggccccgaggcccacaaggagccccccgcccccagccagggccccggcggcaagcagaacgaggacctgcaggtgaaggtgcaggacatcaccatgcagtggtaccagcagctgcaggacgccagcatgcagtgcgtgctgaccttcgagggcctgaccaacagcaaggacagccaggccaagaagatcaagatggacctgcagaaggccgccaccatccccgtgagccagatcagcaccatcgccggcagcaagctgaaggagatcttcgacaagatccacagcctgctgagcggcaagcccgtgcagagcggcggcagaagcgtgagcgtgaccctgaacccccagggcctggacttcgtgcagtacaagctggccgagaagttcgtgaagcagggcgaggaggaggtggccagccaccacgaggccgccttccccatcgccgtggtggccagcggcatctgggagctgcaccccagagtgggcgacctgatcctggcccacctgcacaagaagtgcccctacagcgtgcccttctaccccaccttcaaggagggcatggccctggaggactaccagagaatgctgggctaccaggtgaaggacagcaaggtggagcagcaggacaacttcctgaagagaatgagcggcatgatcagactgtacgccgccatcatccagctgagatggccctacggcaacagacaggagatccacccccacggcctgaaccacggctggagatggctggcccagatcctgaacatggagcccctgagcgacgtgaccgccaccctgctgttcgacttcctggaggtgtgcggcaacgccctgatgaagcagtaccaggtgcagttctggaagatgctgatcctgatcaaggaggactacttccccagaatcgaggccatcaccagcagcggccagatgggcagcttcatcagactgaagcagttcctggagaagtgcctgcagcacaaggacatccccgtgcccaagggcttcctgaccagcagcttctggagaagctag

SEQ ID NO: 20075 - protein, 634 aa, Artificial Sequence
  derived and/or modified sequence
MAPKKKIVKKNKGDINEMTIIVEDSPLNKLNALNGLLEGGNGLSCISSELTDASYGPNLLEGLSKMRQENFLCDLVIGTKTKSFDVHKSVMASCSEYFYNILKKDPSIQRVDLNDISPLGLATVIAYAYTGKLTLSLYTIGSIISAAVYLQIHTLVKMCSDFLIREMSVENCMYVVNIAETYSLKNAKAAAQKFIRDNFLEFAESDQFMKLTFEQINELLIDDDLQLPSEIVAFQIAMKWLEFDQKRVKYAADLLSNIRFGTISAQDLVNYVQSVPRMMQDADCHRLLVDAMNYHLLPYHQNTLQSRRTRIRGGCRVLVTVGGRPGLTEKSLSRDILYRDPENGWSKLTEMPAKSFNQCVAVMDGFLYVAGGEDQNDARNQAKHAVSNFCRYDPRFNTWIHLASMNQKRTHFSLSVFNGLVYAAGGRNAEGSLASLECYVPSTNQWQPKTPLEVARCCHASAVADGRVLVTGGYIANAYSRSVCAYDPASDSWQELPNLSTPRGWHCAVTLSDRVYVMGGSQLGPRGERVDVLTVECYSPATGQWSYAAPLQVGVSTAGVSALHGRAYLVGGWNEGEKKYKKCIQCFSPELNEWTEDDELPEATVGVSCCTLSMPNNVTRESRASSVSSVPVSI

SEQ ID NO: 20076 - DNA, 1905 bp, Artificial Sequence
  derived and/or modified sequence
atggctccaaagaaaaagattgtgaaaaaaaataagggagatataaatgaaatgactattatcgtagaagacagccccctgaacaaactgaacgcactgaacggacttttggaaggcgggaacggcctcagttgcatcagctcagagctgactgatgctagctacgggccgaacctgctagagggtctgtctaagatgcgacaggagaatttcctctgcgacctcgtgattggcaccaagactaaaagcttcgatgtgcacaagagtgtgatggcatcctgttccgagtacttctacaatatcttgaagaaggacccttccattcagagagtggacctgaatgacatatctccactgggactggccactgttattgcctacgcctatacgggaaagctcacactttcactctacacaatcggatccattatctcagccgccgtgtacctgcagatacacacacttgtcaagatgtgctcggacttcctcattcgggagatgagcgtggaaaactgcatgtacgtcgtgaacatcgctgaaacctacagcctgaaaaatgccaaggcggctgcccaaaaatttatcagggataactttctggaattcgcagagagtgaccaattcatgaaactgaccttcgaacagattaatgaattgcttattgatgatgatttacagctcccctcagaaattgtggccttccaaattgcaatgaaatggttagagttcgaccaaaagcgcgtgaaatacgccgccgacctactcagcaatatccggttcggcacgatctccgcgcaggatcttgtaaattatgtacagtccgtcccgagaatgatgcaagatgcagactgtcatagactgctggtcgatgcgatgaattatcatctgctaccttaccatcagaatacactgcaatctaggcggactaggatacgtggcggctgtcgtgtgttagtgaccgtggggggaagacccgggcttactgaaaagtcactttcccgtgatatactgtacagggacccagagaatggctggagcaaattgaccgagatgcccgccaaatcttttaatcagtgcgtggcagtaatggatggttttttatatgtggctgggggagaagaccagaacgatgctcgcaaccaggccaagcacgcagtgtccaacttctgtcgctacgaccctcggtttaacacgtggatacatcttgcctcaatgaaccagaaacggacacatttttcactatcagtttttaatgggttagtctatgctgcagggggacgtaatgccgagggctccctggcctcattagagtgctatgtgcccagcactaaccaatggcagcccaagacaccactagaggtagctcgctgctgccacgcctcggcagttgctgatggaagggtcttagtcactggggggtatatcgctaacgcctatagccggagcgtttgcgcgtatgaccccgctagtgattcctggcaggagctgcccaacctgtctactcctagaggttggcactgcgctgtgaccttgagtgacagagtctacgttatgggcggaagtcagctgggaccaagaggcgagagagtagatgtgctgactgtggagtgctactcccctgccacgggtcagtggtcctacgccgcccccctgcaagtgggggtgagcaccgctggagtctccgcccttcatggacgcgcctacctggtcggaggatggaacgaaggcgagaagaaatacaaaaagtgcattcagtgtttctcccctgagcttaacgagtggaccgaggacgatgagctcccagaagccacggtcggagtttcctgctgtaccctgtcaatgccaaacaatgtaaccagggaatctcgcgccagtagtgtgagctctgttccagtgtccatctag

SEQ ID NO: 20077 - DNA, 1905 bp, Artificial Sequence
  derived and/or modified sequence
atggcccctaagaagaaaattgtcaagaaaaacaagggggacatcaacgagatgactatcatagtcgaagacagccctctgaataaactcaacgcactgaatggcttactggaaggtgggaacggtctcagttgtatttcaagcgagctaactgacgcgtcttatggccctaatctgctagaaggcctgtccaaaatgaggcaagagaacttcctgtgtgaccttgtgatcggtacaaagacaaagtcattcgacgtacataaatccgtgatggcatcttgttcggaatacttctataacatcctaaagaaagatcctagtatacagagagtggacttgaacgatattagtcctttgggcctcgctacggtgattgcctatgcgtataccggaaaactgaccctctcactttacacaatcggcagcattattagtgctgccgtctacttacagatccacaccctcgtgaaaatgtgctcagattttcttatcagagagatgtctgtcgagaattgtatgtacgtggttaacattgccgaaacctattctctcaagaatgccaaggccgctgcccagaaatttatcagggacaactttctcgagtttgctgagtccgatcaattcatgaagctgacattcgaacaaattaacgaactactaattgacgatgatcttcagttgccttcagaaatcgtcgcttttcaaatcgcaatgaagtggctggaatttgaccaaaaaagagtgaaatacgcggccgatctcttgagtaacatcagatttggaacaatcagtgcccaagatctggtcaactacgtacagtccgtgcctcgaatgatgcaagacgcggactgccatagacttcttgttgacgcaatgaattaccacctcctgccctaccaccaaaacactcttcagtcgcgccggacccgcatccgtggaggttgccgcgtactggttactgttggcggccgacctggcttgacggagaaatccctgtcccgggacatcctctatcgcgatcccgaaaatggctggtctaagttgacagaaatgcccgctaaaagcttcaaccagtgtgtggcggttatggatggcttcctgtacgttgcgggaggcgaagaccagaatgatgcgcgcaatcaggctaagcatgcggtatcaaatttctgccgttacgaccctcgatttaacacttggatacacttggcatcaatgaaccagaagcgcacacacttctccctcagcgtcttcaacgggctggtgtacgccgccggtggccgaaatgctgaaggatccctcgcatcacttgagtgttacgtcccttcaaccaatcaatggcaacccaagacacccctagaggtggcgcgctgttgtcacgcctccgcagtagccgatggaagggtcctcgttactggtggatacattgccaatgcgtattcaagatccgtgtgtgcctacgatcctgccagcgacagttggcaggaactgccgaacctgagcactccaagaggctggcattgtgctgtgaccttgtccgatagagtgtatgtgatggggggctcccagctggggcccagaggcgaaagagtggatgtattaaccgtcgagtgctatagtcccgctactggccagtggtcgtatgctgcaccactccaagtgggagtttccacggcaggtgtatctgccctgcacggaagagcgtacttggtcggtggctggaacgagggggaaaaaaagtataagaaatgtattcagtgtttctcccctgaattgaatgagtggaccgaggatgatgaactgccagaggccaccgtgggcgtgtcatgctgtaccctctctatgccaaataatgtgactagggaatcccgcgcaagctcggtatcaagtgtgccagtcagcatttag

SEQ ID NO: 20078 - DNA, 5743 bp, Artificial Sequence
  derived and/or modified sequence
accggattttccttctccctctctctatctccacagatcccttcccaagaggagtctcctgctaaaacttcatcatctcaagttgacctgccacttcacccaaggaggcaagctcttgcctgtaacagtgtatttgccaacatggcacccaaaaagaagattgtcaaaaagaacaaaggagatatcaatgagatgactataatcgtagaagatagccccctaaacaaactgaatgctttgaatgggctcctagagggaggcaatggccttagctgcatttcttctgaactaacagatgcttcttatggccccaacctcttggaaggtttaagtaaaatgcggcaggagaacttcctatgtgacttagtcattggtaccaaaaccaaatcctttgatgttcataagtcagtcatggcttcatgcagtgagtatttttacaacatcctaaaaaaagacccgtcaattcagagggtggatctcaatgatatctcaccactaggcctggccactgtcattgcatatgcctacactggaaagctcactctctccttgtatacaataggaagcattatttctgctgctgtttatcttcagatccatactcttgtaaagatgtgcagtgattttctgatacgggagatgagtgttgagaattgcatgtatgttgttaatattgctgaaacatactccctaaaaaatgcaaaagcagcagcccagaaatttattcgggataacttccttgaatttgcagaatcggatcagtttatgaaacttacatttgaacaaattaatgaacttcttatagatgatgacttacagttgccttctgagatagtagcattccagattgcaatgaaatggttagaatttgaccaaaagagagtaaaatacgctgcagatcttttgagcaatattcgctttggtaccatctctgcacaagacctggtcaattatgttcaatccgtaccaagaatgatgcaagatgctgattgtcacagacttctcgtagatgctatgaactaccacttgcttccatatcatcaaaacacattgcaatctaggcgaacaagaatccgaggtggctgccgagtcctcgtcactgttgggggacgcccaggccttactgagaagtcccttagcagagacatcttgtatagagaccctgaaaatggatggagcaagcttacggaaatgccagccaaaagttttaatcagtgtgtggctgtgatggatggatttctttatgtagccggtggtgaagaccagaatgatgcaagaaatcaagccaagcatgcagtcagcaatttctgcagatacgatccccgcttcaacacctggatacacctggccagcatgaaccagaagcgcacgcacttcagcctgagcgtgttcaacgggctcgtgtacgccgcgggcggccgcaacgcagaaggaagcctggcctcgctggagtgctacgtgccctccaccaatcagtggcagccgaagacgcccctggaggtggcgcgctgctgccacgctagcgcggtcgccgacggccgcgtgctggtgaccggaggctacatagccaacgcctactcgcgctctgtgtgcgcctacgacccggccagcgactcgtggcaggagctgccgaacctcagcacaccccggggctggcactgcgcggtcacgctgagcgacagagtgtacgtgatgggcggcagccagctggggccgcgcggggagcgcgtggacgtgctcaccgtggagtgctacagccccgcgaccggccagtggagctacgcggcgccgctgcaggtgggagtgagcactgcgggcgtctcggcgctgcatggccgcgcctacctggtggggggctggaacgagggcgagaagaagtacaagaagtgcatccagtgcttcagccccgagctcaacgagtggacggaggacgacgagctacccgaggccactgtcggcgtgtcctgctgcaccctctcgatgcccaacaacgtgactcgggaatcccgggccagttcggtatcttctgtgccagtcagtatctgagcccaggtagatgcagggacgcaggaagaacacgttatttattcgtagagccacgtggttaacctctgagttcgcgaaaaggaaaatatttaacatttactacactgattgtattgtaaaatatgtcgaggcacatgtcctgatggctttaaattcctggtatggcataatctacctcttttttttttttttttttttagcaaaatacagggcaatggccaacaaaagaaacaatttatttcagcggccactgggtggcagacggaattcgttataggcactctcccaaggcggcatgtttcctaaatgtatagcggttacacccacatttgagattttttcctctacacgttagtacacttgaggtttatgtaagtgatttcatgttcaaaagtttattttcctctctctcttttttctttaggaagttgaagatattcatatagattttatttatttaaaaatggaaattgtcgatctccataaagacttaagatttaattctgtatttcaacgcaattttccccccatatgtgattgagtaaaggattttgaaagatatcccatgacaacgtaataaagcttaaaacaagatctgaccgaaaaggaatagggattccacccagggaccctaaatttgataacctttgtgttagcggacattcctcttcctccatgcctcaggccccagtttattttctaccataaaatcatgctctcaatgaagtaattgatatgaatcatttaatttatagcataaatttaagtcatttggttgtttcaactagaaggatttgcattttatcccttgtcctctattaaagaagaatttcacataccctgggagccttaccctcaccctaaaaactacaccaacctggttaaaggcaaccttggccctaatgtacaccccgcgaagatcaccaaataaaactatgtccctaaggaccattagccttaagcttagagagcttgaagtttacacaaccaataacaataattttatttgccccaatcttttatatgataagaatgatagaaacatttggaatttgtagatttggtagtaactggatgaatgggttctcctgttgataaatgccattgtttcccatttaatatggatcctcctgatttcttaagtaaaaatcaagcactcatctcacgtatataaaaatatatactcattctgtcctatttttattaatctcatctgctccaaatgagctttggatttataatcaaagtgtacccacttgatagcacttttcctatatgtttgccaagttttggggaaagggaatgactgtagtaaatgatacatattttccttttttataatttatcactttattctttgacagtttatttgttttggagaggaagtggcctatcaattatgggttatgtgcaattggattttgaaaaataaaacaagctatttaggaattgaacatgagatatatggaaatataatttggtttttgttaatctcatcctctccaccttgtgtagataggttattgctagttatgatatttatttctaaaatatgttatttgaactgtgaaaagtggttcatatagtacactttgtggaacaattttatatcattaccccgatgaaaagttcaatctctggatatttaatgataacactcaggtaagggctacaaacgctgtaaattaagaacaagatattattaatgtaaaagcgctgggctgtttccttatcccacacaaagaatcttttaccttggtatatgtggatatggtatattaccttggtgtatgtatatgtgtgtatacgcacacactcatacaactgagaagcctatagtatatggttaatttttggagaaaagggtgttttattgtgggttacagatcataagtgagtgaatagatgtaattccttgatgcacaccaatagatgtgttcccattgacatcttagaagtattgtatgaagaggaggacctagggcttgaaatgaaatgagaatcaatcaattgcaacattacatgatggaataatgagaagagatactgaaactagaggatttttcatctatcaaagcttgataaattaggttgtgcaaaaacttggcagtggctttctagagatgaaactggagacatgttagtgctggataaatcatttaaaattaccatttaatttattttctacattgtttatctgaagactcagaaaatccacatatttgagcttaccagactcttgggtgcattgctgttctatcttctgcttcaacagttaggaaaataaagaccaatatgaatttggaatgtcagaatttctgacataacacattggcgaggagtatggaatgtaagggtcggtgaaagtttcatatcctggaacatcttgcattgccaattgaaagacataaaagtatgcagaatcaaaataatatgtgtccactttcatgtgtaagtgaaacatattctttacaccaactattgaagcagttgctcctagaaacctagtttctccagatttcccaagtggaaaatatttagtatgttttaagcttacattcaattactccagagtcttaggacccaaccatatacttccttttattttttattaaagaaaatgacttgttatttttgtaacggctgagtcctgtgatcaaataaaagcatcagttcaatatatcagggaaattgcatgttacccagcaactgaaataataaaattcaagctctctttttctaaatgggccagagacctgatgagaaagtctccaggaagccaaactttaacatactttgtccatttttagttaggttcttggtgccaagttgtcatccctgatgcattagttgctttcagtgcattgaatgaattttatttttacttcctatgttgtaagaatggttttgaatagaaggtcagtgatggtacagattcgtataattttaaaacatgattagatggtagtgaagtgttatgagtgaggaggtataattgatgtcatgaggaagtgagtactgaatggttctatgatttaaggtaaagcagcagttgtagtaagtgtattttacaaatacacatgtaaatagaggtttacctggaaatatgtacgttctaaaaggtcaattttttaattttatttttttgctggttatcctggccaagtgtcttcagaactcatccaagttacgagacgaaataaactaaaatcacctcattaatttttttcccttagttacaaccaaatgaatttatgtaatctctgaatgaactacatccctattccagccgctgatgaatatgttctccagcacaaggcagcattaaaaggaaatacttttcagtatttcttttcatgccaaaaaacctacagaataattttccaaacagtcctttattcgtaattataagaattaaacaatctaaaatattaaagatttaccctccagcacattcactgggtaaagaccatttaatttgccctctcagggaatttgaaataaattatttgtcctggatattctttaaaaactttttatttattcagcaaattttggcaaaaaaatttctttctttgcttaaaacattctggtactatataaggaacaacaaactaaaatgtatgtagtgttattttgtaatctcatcactatcaataaagctgcattcaataagaccttagtcaatgactaaata

SEQ ID NO: 20079 - DNA, 1905 bp, Artificial Sequence
  derived and/or modified sequence
atggcacccaaaaagaagattgtcaaaaagaacaaaggagatatcaatgagatgactataatcgtagaagatagccccctaaacaaactgaatgctttgaatgggctcctagagggaggcaatggccttagctgcatttcttctgaactaacagatgcttcttatggccccaacctcttggaaggtttaagtaaaatgcggcaggagaacttcctatgtgacttagtcattggtaccaaaaccaaatcctttgatgttcataagtcagtcatggcttcatgcagtgagtatttttacaacatcctaaaaaaagacccgtcaattcagagggtggatctcaatgatatctcaccactaggcctggccactgtcattgcatatgcctacactggaaagctcactctctccttgtatacaataggaagcattatttctgctgctgtttatcttcagatccatactcttgtaaagatgtgcagtgattttctgatacgggagatgagtgttgagaattgcatgtatgttgttaatattgctgaaacatactccctaaaaaatgcaaaagcagcagcccagaaatttattcgggataacttccttgaatttgcagaatcggatcagtttatgaaacttacatttgaacaaattaatgaacttcttatagatgatgacttacagttgccttctgagatagtagcattccagattgcaatgaaatggttagaatttgaccaaaagagagtaaaatacgctgcagatcttttgagcaatattcgctttggtaccatctctgcacaagacctggtcaattatgttcaatccgtaccaagaatgatgcaagatgctgattgtcacagacttctcgtagatgctatgaactaccacttgcttccatatcatcaaaacacattgcaatctaggcgaacaagaatccgaggtggctgccgagtcctcgtcactgttgggggacgcccaggccttactgagaagtcccttagcagagacatcttgtatagagaccctgaaaatggatggagcaagcttacggaaatgccagccaaaagttttaatcagtgtgtggctgtgatggatggatttctttatgtagccggtggtgaagaccagaatgatgcaagaaatcaagccaagcatgcagtcagcaatttctgcagatacgatccccgcttcaacacctggatacacctggccagcatgaaccagaagcgcacgcacttcagcctgagcgtgttcaacgggctcgtgtacgccgcgggcggccgcaacgcagaaggaagcctggcctcgctggagtgctacgtgccctccaccaatcagtggcagccgaagacgcccctggaggtggcgcgctgctgccacgctagcgcggtcgccgacggccgcgtgctggtgaccggaggctacatagccaacgcctactcgcgctctgtgtgcgcctacgacccggccagcgactcgtggcaggagctgccgaacctcagcacaccccggggctggcactgcgcggtcacgctgagcgacagagtgtacgtgatgggcggcagccagctggggccgcgcggggagcgcgtggacgtgctcaccgtggagtgctacagccccgcgaccggccagtggagctacgcggcgccgctgcaggtgggagtgagcactgcgggcgtctcggcgctgcatggccgcgcctacctggtggggggctggaacgagggcgagaagaagtacaagaagtgcatccagtgcttcagccccgagctcaacgagtggacggaggacgacgagctacccgaggccactgtcggcgtgtcctgctgcaccctctcgatgcccaacaacgtgactcgggaatcccgggccagttcggtatcttctgtgccagtcagtatctga

SEQ ID NO: 20080 - DNA, 1905 bp, Artificial Sequence
  derived and/or modified sequence
atggcccccaagaagaagatcgtgaagaagaacaagggggacatcaatgagatgaccatcatcgtggaggacagccccctgaacaagctgaatgccctgaatggcctgctggagggcggcaatggcctgagctgcatcagcagcgagctgacagatgccagctatggccccaacctgctggagggcctgagcaagatgaggcaggagaacttcctgtgtgacctggtgattggcaccaagaccaagagctttgatgtgcacaagtctgtgatggccagctgcagcgagtacttctacaacatcctgaagaaggaccccagcatccagagggtggacctgaatgacatcagccccctgggcctggccaccgtgattgcctatgcctacaccgggaagctgaccctgagcctgtacaccatcggcagcatcatctctgctgctgtgtacctgcagatccacaccctggtgaagatgtgcagcgacttcctgatccgggagatgtctgtggagaactgcatgtatgtggtgaacattgctgagacctacagcctgaagaatgccaaggccgccgcccagaagttcatccgggacaacttcctggagtttgctgagagtgaccagttcatgaagctgacctttgagcagatcaatgagctgctgattgatgatgacctgcagctgcccagcgagatcgtggccttccagatcgccatgaagtggctggagtttgaccagaagagggtgaagtatgctgctgacctgctgagcaacatccgcttcggcaccatcagcgcccaggacctggtgaactacgtgcagagcgtgcccaggatgatgcaggatgctgactgccaccggctgctggtggatgccatgaactaccacctgctgccctaccaccagaacaccctgcagagcaggaggacccgcatccggggcggctgccgggtgctggtgacagtgggcggccggcccggcctgacagagaagagcctgagccgggacatcctgtacagagatcctgaaaatggctggagcaagctgacagagatgcctgccaagagcttcaaccagtgtgtggccgtgatggatggcttcctgtatgtggccggaggagaggaccagaatgatgccaggaaccaggccaagcatgctgtgagcaacttctgccgctatgacccccgcttcaacacctggatccacctggcctccatgaaccagaagaggacccacttcagcctgtctgtgttcaacggcctggtgtatgctgctgggggcagaaatgctgagggcagcctggccagcctggagtgctacgtgcccagcaccaaccagtggcagcccaagacccccctggaggtggcccgctgctgccacgccagcgctgtggctgatggccgggtgctggtgactggaggctacatcgccaatgcctacagccgctctgtgtgtgcctatgaccctgccagtgacagctggcaggagctgcccaacctgagcaccccccggggctggcactgtgctgtgaccctgagtgacagagtgtatgtgatgggcggcagccagctgggccccagaggagagcgggtggatgtgctgactgtggagtgctacagccctgccaccggccagtggagctatgctgcccccctgcaggtgggcgtgtccacagctggggtgtctgccctgcacggccgggcctacctggtgggcggctggaatgaaggagagaagaagtacaagaagtgcatccagtgcttcagccctgagctgaatgagtggacagaagatgatgagctgcctgaggccaccgtgggcgtgtcctgctgcaccctgtccatgcccaacaacgtgacccgggagagccgggccagctctgtgtcctctgtgcctgtgtccatctag

SEQ ID NO: 20081 - DNA, 1905 bp, Artificial Sequence
  derived and/or modified sequence
atggcccccaagaagaagatcgtgaagaagaacaagggcgacatcaacgagatgaccataatagttgaggactcccccctcaataagctgaacgcactgaacggacttctagaggggggtaacggcctgtcttgcatctctagtgagctgacggacgcatcctacggcccaaatctgctcgaaggccttagcaagatgcggcaggagaattttctgtgcgacttagtcatcggaacgaagaccaagtccttcgatgtgcataaatccgtcatggcctcgtgcagtgaatatttttataatattcttaaaaaagacccctctatccaaagggtggacctgaatgacatcagtccactcggactggcaaccgtaatagcatacgcctatacggggaaattaaccctctctctgtacaccatcggatctattatatccgctgccgtttacctccagattcatacgctcgtcaagatgtgttcggattttctgattagggaaatgtcagtcgagaactgcatgtatgttgtgaacattgctgaaacttactcattgaaaaacgctaaagctgctgctcagaaattcattcgtgataactttttagagttcgcggaatccgaccagtttatgaagttgacatttgagcaaattaatgagctgctcatcgacgatgatctccagctcccatcggaaattgtggctttccaaatcgctatgaagtggctggagttcgatcagaagagggtgaaatatgcggcggacctgttgtctaatattagatttggcacgatctcggcacaggacctcgtcaattacgtccagagtgtcccccgaatgatgcaggatgctgattgccataggttgctggtcgacgccatgaactatcacttactcccttaccaccagaataccctgcagtctcgaagaacccgtattcgagggggatgcagggtgcttgtcaccgtgggcgggaggcctggactcaccgaaaagtcgttgtctcgagatatcctttacagagaccctgagaacggctggtcaaaactgacagaaatgcccgcaaagtctttcaaccagtgtgttgccgtgatggacggttttttgtacgtggccggcggggaggatcagaatgacgctcgaaatcaggccaagcatgccgtatccaacttttgcagatacgacccacggtttaacacctggattcacctagcgtcgatgaaccagaagaggacccacttcagcttgtccgtgttcaacgggctggtttacgcagccggtggtcgaaatgcagaagggagccttgcttccctggagtgttacgtgccctccaccaatcaatggcagcccaaaactcccctggaagttgctaggtgctgccacgcttcggccgtagcagacggcagggtcttagtcactggcgggtacatagccaatgcctacagccgatcagtgtgtgcatatgatccggcaagcgattcctggcaggagctgcccaatttgagtacgccccgagggtggcattgtgccgtgaccctctcagatcgggtatacgtcatgggcggttctcagcttgggcccagaggcgagagagtggacgtacttacggttgagtgctattcgccggccacaggccagtggagctacgctgcacctctccaggtaggagtatccaccgccggagtttccgctctgcacggcagggcttacctggtggggggctggaatgagggagagaagaagtataagaagtgtatccaatgcttctcccccgaacttaacgagtggaccgaggacgacgaactgcccgaggctacagttggagtgagctgctgtaccctgagtatgccaaacaatgtcacgagggaaagcagagcatcctccgtgtcttctgtcccagttagcatatag

SEQ ID NO: 20082 - DNA, 1905 bp, Artificial Sequence
  derived and/or modified sequence
atggcccccaagaagaagatcgtgaagaagaacaagggcgacatcaatgagatgaccatcattgtcgaggactcccccctgaacaagctaaatgcgctgaacggattgctggagggcgggaatggattgtcttgcatatcttccgaactgaccgatgctagctatggcccaaatttactcgaaggactctctaaaatgcggcaggagaacttcctatgcgacctggtgatcggcaccaagactaagtcctttgatgtgcataaatccgtgatggctagctgctctgaatatttttataacatcttgaaaaaggatccatccattcaaagagtggaccttaacgatataagccccctgggactcgcaacagtgatcgcatatgcctatacaggaaagctgacattatctctgtacaccattggcagtataatcagcgcggcggtgtacctgcaaatacacacactggtgaaaatgtgttcagacttcctgattcgggagatgagcgtagaaaattgcatgtacgtcgtgaatattgctgaaacttattctctcaaaaatgccaaagcagccgcacagaagttcatacgggacaacttcctggaatttgccgaatcagatcagtttatgaagctgacattcgaacaaatcaatgaactcctaattgatgatgacctgcaactgccctctgaaattgtggcattccagatcgctatgaagtggttagagtttgatcagaagcgcgttaaatatgccgccgatcttttgagcaatatccgcttcggaaccatctctgcacaggacctggtgaattatgtgcagagcgtgcccagaatgatgcaagacgctgactgccaccgtctgttagttgatgccatgaattaccacctgttgccgtatcaccagaataccctccaatctaggaggaccagaatcagaggcgggtgtagagtcctcgttacagtgggaggcaggcccgggctcactgaaaaaagtctgtccagagatattctgtaccgggaccccgaaaatggatggagtaagttgactgaaatgccagccaaatcatttaatcagtgtgtggccgttatggatggctttctgtacgtggctgggggggaagatcaaaacgatgctaggaaccaggccaaacacgctgtgagtaatttttgcaggtatgatcccaggtttaacacctggatccatctcgccagcatgaatcagaagcggacccatttctccctgtcagtatttaatggcctggtttatgccgcagggggacgaaatgctgaagggtccctcgctagcctggagtgttacgtcccttcaactaaccagtggcagcccaaaacacctttagaggtggctcggtgttgccacgcctctgcggtcgctgacggaagagtcttagtgacaggggggtatatcgccaatgcttatagcagatccgtctgcgcatatgatcctgctagcgatagctggcaggaactgcccaacttaagcacccccagaggatggcattgcgcagtgacactctccgatcgggtctatgtgatgggcgggtcccagcttggtccacgcggggaacgggtggatgtgctgacagtcgaatgctactctcctgcaactggccagtggagctatgctgcccctctgcaggtgggtgtgtccactgcaggtgtttccgcgctgcatggccgtgcgtatctcgtgggaggctggaacgaaggcgaaaagaagtataagaaatgtattcagtgtttcagccctgaattgaacgagtggacagaggacgatgaattgccagaagctaccgttggcgtatcgtgctgtacgctttcgatgcctaacaatgtgactagagagtcccgtgcgtccagcgtgagctctgtgcctgtgtcaatttag

SEQ ID NO: 20083 - DNA, 1905 bp, Artificial Sequence
  derived and/or modified sequence
atggccccaaagaaaaagatcgtaaagaagaacaaaggagatattaacgagatgaccattatcgtggaggacagcccgctgaacaagttaaacgctctaaatggactgctggaagggggaaatgggttgtcttgcattagttccgagctgaccgatgccagttatggtccgaacctccttgaggggctctctaaaatgcgtcaagagaatttcctgtgtgacctagttatcgggaccaaaaccaagtcttttgacgtgcacaaatctgtgatggccagctgttctgaatatttctacaatatcctgaagaaggatccctccatccaacgcgttgatttaaacgacatatcccctcttggtctggccactgttattgcatatgcctacaccgggaaactgaccttgtcattatacaccattggatccatcatctctgctgctgtgtacctgcaaatacacactttggtcaagatgtgcagtgattttttgattcgggaaatgagcgtggagaattgcatgtacgtggtgaacatagctgagacctactctttgaaaaacgccaaggccgctgcgcaaaagttcatcagggataatttcctcgagtttgcagaaagcgatcagttcatgaaactgacttttgaacagatcaacgagctacttatcgacgatgacttgcagctaccctcagaaatcgtagccttccagatcgcgatgaaatggctcgagtttgatcagaagcgcgtcaagtatgccgctgatttgttgtctaacattcggtttgggacaatcagcgcacaagatctagtgaactatgtgcaatccgtgcccaggatgatgcaggacgcggactgccaccggttactcgtggatgccatgaattatcacctccttccctatcaccaaaatactttgcagtcacggcgaaccaggatccgtggcggatgccgggtactggtaactgttggaggcagaccagggcttaccgagaaatccctgagccgtgacatcctctatagagatccagaaaacgggtggtcaaaacttacagagatgcctgcaaaaagcttcaatcagtgtgtcgccgttatggacggctttctgtacgtagctggcggagaagaccagaatgacgcccgtaatcaggccaagcacgcagtctccaatttttgccgctatgacccgagatttaacacctggattcacttagccagtatgaatcaaaaaaggacccatttctcactgtccgtgttcaatgggctggtgtatgccgctggcggtcgtaatgccgaagggtccctggcttcgttagagtgctatgtacccagtaccaatcagtggcagcccaagaccccacttgaagttgctaggtgctgtcacgcaagcgccgtcgccgatggcagagtcctcgtgactggaggttacatcgccaacgcgtacagccggagcgtttgcgcttatgaccccgcatcagactcatggcaggaattgcctaatctcagtactcccagagggtggcactgtgctgttacactttcagatcgagtatacgtgatgggtggtagccaattgggtcctcggggagaacgggtggacgtgctcacagtggaatgttacagtcctgctaccggccagtggtcctacgcagctccactccaggtgggtgtgtccacagccggtgtgtcagcgctacacggaagggcctacttagtcggcggatggaatgagggggaaaaaaagtataaaaagtgcattcaatgcttttctcctgaactgaacgagtggactgaagatgatgagctgccagaggccactgtcggagtgtcttgctgtaccttgagcatgcctaacaacgttacacgcgaaagcagagccagcagtgtgtcttcagtccccgtgagtatttag

SEQ ID NO: 20084 - DNA, 1905 bp, Artificial Sequence
  derived and/or modified sequence
atggcacctaagaagaaaatcgttaaaaagaacaagggtgacataaatgaaatgacaatcatcgtagaagacagccccctgaacaaacttaacgccttgaacggcctgctagagggtggaaacgggttatcttgtattagcagtgaactgactgatgcctcttacggaccgaatctcctcgagggcctgagcaagatgcggcaggaaaatttcctctgcgatctggtgatcggtacaaagacaaaatcgtttgatgttcataaaagcgtcatggcttcttgcagtgagtatttttataacattctcaaaaaagacccctcaattcagcgagtagacctcaacgacattagcccactgggactcgctacagtcattgcctacgcttacacaggaaagctgacactgtctctttatacgattggctccattatatctgctgctgtctacttgcagatccacactctggtgaaaatgtgctctgactttcttattagagaaatgtctgtggaaaactgcatgtatgtggtcaatattgccgaaacttattcacttaagaacgctaaggccgctgcacaaaagtttattagagacaactttctggagttcgctgagtccgatcagttcatgaagctgactttcgagcagattaatgagctgttgattgatgatgacctccagctgccgtcggagatcgtcgctttccaaatcgcaatgaagtggctggaattcgatcaaaagcgcgttaagtacgctgcagatctcctgtcaaacatcaggtttggaacaataagtgcacaggaccttgtgaactacgtacagagtgttccgaggatgatgcaggacgccgattgtcaccggctgctagtggatgccatgaactaccacctgctgccctaccaccaaaacacattacagagccggcgtaccagaattaggggcggatgtcgtgtgctggtcaccgtggggggtaggccagggctcacagaaaagtccctctctcgtgacattctatatcgggacccagagaatggctggagcaagctgaccgaaatgcccgctaagtcctttaatcagtgcgtggcggtgatggacggattcctctatgtggctgggggagaggaccagaatgatgcaaggaaccaggccaagcatgctgtgtcgaatttctgccggtacgatcctagatttaatacttggatccatctggccagtatgaatcagaaacggacccacttctccctgtccgtgtttaacggcctggtatacgcggcaggtggcaggaatgccgagggtagcctggccagtctcgaatgctacgttccctccacgaatcagtggcaaccaaagaccccactggaagtggcaagatgctgtcacgcctccgccgtagctgacgggagagtgctagtcaccggtggctatattgccaatgcctactcccggagcgtatgtgcctatgatcctgcaagcgactcatggcaggaactgcctaacctctccaccccacgtggttggcactgtgccgttaccctgtcggaccgcgtgtacgttatgggcggttctcagctcggacctagaggagaacgcgtggatgtgctgactgtggaatgctactcacccgctaccgggcagtggtcttatgccgctcccttgcaggtaggagtttccaccgccggagtgtccgccctgcacggccgagcttacctcgtcgggggatggaatgagggagagaagaaatataaaaagtgtatccagtgtttttccccagagctgaatgaatggacagaggacgacgagctgccagaagcgaccgttggcgtgtcttgctgcaccctgtcaatgcccaataatgtgacaagagaatcaagagcctcttctgtttccagcgtgcccgtaagcatctag

SEQ ID NO: 20085 - DNA, 1905 bp, Artificial Sequence
  derived and/or modified sequence
atggcccccaagaagaagatcgtgaagaagaacaagggcgacatcaacgagatgaccatcatcgtggaggacagccccctgaacaagctgaacgccctgaacggcctgctggagggcggcaacggcctgagctgcatcagcagcgagctgaccgacgccagctacggccccaacctgctggagggcctgagcaagatgagacaggagaacttcctgtgcgacctggtgatcggcaccaagaccaagagcttcgacgtgcacaagagcgtgatggccagctgcagcgagtacttctacaacatcctgaagaaggaccccagcatccagagagtggacctgaacgacatcagccccctgggcctggccaccgtgatcgcctacgcctacaccggcaagctgaccctgagcctgtacaccatcggcagcatcatcagcgccgccgtgtacctgcagatccacaccctggtgaagatgtgcagcgacttcctgatcagagagatgagcgtggagaactgcatgtacgtggtgaacatcgccgagacctacagcctgaagaacgccaaggccgccgcccagaagttcatcagagacaacttcctggagttcgccgagagcgaccagttcatgaagctgaccttcgagcagatcaacgagctgctgatcgacgacgacctgcagctgcccagcgagatcgtggccttccagatcgccatgaagtggctggagttcgaccagaagagagtgaagtacgccgccgacctgctgagcaacatcagattcggcaccatcagcgcccaggacctggtgaactacgtgcagagcgtgcccagaatgatgcaggacgccgactgccacagactgctggtggacgccatgaactaccacctgctgccctaccaccagaacaccctgcagagcagaagaaccagaatcagaggcggctgcagagtgctggtgaccgtgggcggcagacccggcctgaccgagaagagcctgagcagagacatcctgtacagagaccccgagaacggctggagcaagctgaccgagatgcccgccaagagcttcaaccagtgcgtggccgtgatggacggcttcctgtacgtggccggcggcgaggaccagaacgacgccagaaaccaggccaagcacgccgtgagcaacttctgcagatacgaccccagattcaacacctggatccacctggccagcatgaaccagaagagaacccacttcagcctgagcgtgttcaacggcctggtgtacgccgccggcggcagaaacgccgagggcagcctggccagcctggagtgctacgtgcccagcaccaaccagtggcagcccaagacccccctggaggtggccagatgctgccacgccagcgccgtggccgacggcagagtgctggtgaccggcggctacatcgccaacgcctacagcagaagcgtgtgcgcctacgaccccgccagcgacagctggcaggagctgcccaacctgagcacccccagaggctggcactgcgccgtgaccctgagcgacagagtgtacgtgatgggcggcagccagctgggccccagaggcgagagagtggacgtgctgaccgtggagtgctacagccccgccaccggccagtggagctacgccgcccccctgcaggtgggcgtgagcaccgccggcgtgagcgccctgcacggcagagcctacctggtgggcggctggaacgagggcgagaagaagtacaagaagtgcatccagtgcttcagccccgagctgaacgagtggaccgaggacgacgagctgcccgaggccaccgtgggcgtgagctgctgcaccctgagcatgcccaacaacgtgaccagagagagcagagccagcagcgtgagcagcgtgcccgtgagcatctag

SEQ ID NO: 20086 - protein, 137 aa, Artificial Sequence
  derived and/or modified sequence
MAGRKLALKTIDWVAFAEIIPQNQKAIASSLKSWNETLTSRLAALPENPPAIDWAYYKANVAKAGLVDDFEKKVKSCAEWVSLSKARIVEYEKEMEKMKNLIPFDQMTIEDLNEAFPETKLDKKKYPYWPHQPIENL

SEQ ID NO: 20087 - DNA, 414 bp, Artificial Sequence
  derived and/or modified sequence
atggccggcagaaagctggccctgaagaccatcgactgggtggccttcgccgagatcatcccccagaaccagaaggccatcgccagcagcctgaagagctggaacgagaccctgaccagcagactggccgccctgcccgagaacccccccgccatcgactgggcctactacaaggccaacgtggccaaggccggcctggtggacgacttcgagaagaaggtgaagagctgcgccgagtgggtgagcctgagcaaggccagaatcgtggagtacgagaaggagatggagaagatgaagaacctgatccccttcgaccagatgaccatcgaggacctgaacgaggccttccccgagaccaagctggacaagaagaagtacccctactggccccaccagcccatcgagaacctgtag

SEQ ID NO: 20088 - DNA, 414 bp, Artificial Sequence
  derived and/or modified sequence
atggccggccggaaactggcacttaagaccatcgactgggtggcgtttgcggagatcatcccccagaaccaaaaggccatcgccagttcattgaagtcttggaacgagactctgacatccaggttggcggctctgcctgaaaatccccccgctatcgactgggcctattataaggctaacgtggctaaagccggactggtcgatgactttgaaaaaaaggtgaaaagttgcgcggaatgggtctccctttccaaggcaaggatagtggaatatgaaaaagaaatggaaaagatgaaaaatctgataccctttgatcaaatgactatcgaggatttgaacgaggccttcccggaaaccaagctcgataaaaagaagtatccctattggcctcaccagcctattgaaaacctgtag

SEQ ID NO: 20089 - DNA, 414 bp, Artificial Sequence
  derived and/or modified sequence
atggccggcaggaagctggccctgaagaccatcgactgggtggcctttgctgagatcatcccccagaaccagaaggccatcgccagcagcctgaagtcctggaatgagaccctgaccagccggctggccgccctgcctgaaaatcctccagccatcgactgggcctactacaaggccaacgtggccaaggccggcctggtggatgactttgagaagaaggtgaagagctgtgccgagtgggtgtccctgagcaaggcccgcatcgtggagtatgagaaggagatggagaagatgaagaacctgatcccctttgaccagatgaccatcgaggacctgaatgaggccttccctgagaccaagctggacaagaagaagtacccctactggccccaccagcccatcgagaacctgtag

SEQ ID NO: 20090 - DNA, 414 bp, Artificial Sequence
  derived and/or modified sequence
atggccggccggaagctggccctgaagaccatcgactgggtggccttcgccgaaatcattcctcagaatcaaaaagcgatcgcttccagtctgaagtcatggaatgaaacactgacatcccgcctcgcagcgcttccagagaacccacccgccatcgactgggcctattataaagccaatgtggccaaggcaggactcgttgacgatttcgagaagaaagtcaaaagttgcgccgagtgggtgtccctgtccaaggcccgcattgttgaatatgagaaggaaatggagaaaatgaagaatctaatcccgtttgatcagatgaccatcgaggatcttaatgaggcattccctgagactaagttagacaaaaaaaagtacccttattggccacaccagcccatcgagaacctgtag

SEQ ID NO: 20091 - DNA, 414 bp, Artificial Sequence
  derived and/or modified sequence
atggctggtcgcaagctggccctgaagaccattgactgggtcgctttcgccgaaatcatcccccaaaaccagaaagctattgcctctagcctgaaaagctggaatgaaaccttaacctcacgattagcagcgctgcccgagaaccctcctgcaatcgactgggcttattacaaggccaacgtggcgaaagctggcttagtagacgattttgaaaagaaggttaaatcttgcgccgaatgggtctctctttctaaggcgaggatagtggagtatgagaaagaaatggagaagatgaagaacctgatcccatttgaccagatgaccatcgaggacctgaacgaggcctttcctgaaactaagctggacaagaaaaagtacccttattggcctcaccagcctatagaaaatctttag

SEQ ID NO: 20092 - DNA, 550 bp, Artificial Sequence
  derived and/or modified sequence
tgacccacttccgttacttgctgcggaggaccgtgggcagccagggtcggtgaaggatcccaaaatggctgggcgaaaacttgctctaaaaaccattgactgggtagcttttgcagagatcataccccagaaccaaaaggccattgctagttccctgaaatcctggaatgagaccctcacctccaggttggctgctttacctgagaatccaccagctatcgactgggcttactacaaggccaatgtggccaaggctggcttggtggatgactttgagaagaaggtgaaatcttgtgctgagtgggtgtctctctcaaaggccaggattgtagaatatgagaaagagatggagaagatgaagaacttaattccatttgatcagatgaccattgaggacttgaatgaagctttcccagaaaccaaattagacaagaaaaagtatccctattggcctcaccaaccaattgagaatttataaaattgagtccaggaggaagctctggcccttgtattacacattctggacattaaaaataataattatacagtt

SEQ ID NO: 20093 - protein, 431 aa, Artificial Sequence
  derived and/or modified sequence
MSFLVSKPERIRRWVSEKFIVEGLRDLELFGEQPPGDTRRKTNDASSESIASFSKQEVMSSFLPEGGCYELLTVIGKGFEDLMTVNLARYKPTGEYVTVRRINLEACSNEMVTFLQGELHVSKLFNHPNIVPYRATFIADNELWVVTSFMAYGSAKDLICTHFMDGMNELAIAYILQGVLKALDYIHHMGYVHRSVKASHILISVDGKVYLSGLRSNLSMISHGQRQRVVHDFPKYSVKVLPWLSPEVLQQNLQGYDAKSDIYSVGITACELANGHVPFKDMPATQMLLEKLNGTVPCLLDTSTIPAEELTMSPSRSVANSGLSDSLTTSTPRPSNGDSPSHPYHRTFSPHFHHFVEQCLQRNPDARPSASTLLNHSFFKQIKRRASEALPELLRPVTPITNFEGSQSQDHSGIFGLVTNLEELEVDDWEF

SEQ ID NO: 20094 - DNA, 1296 bp, Artificial Sequence
  derived and/or modified sequence
atgagcttcctggtgagcaagcccgagagaatcagaagatgggtgagcgagaagttcatcgtggagggcctgagagacctggagctgttcggcgagcagccccccggcgacaccagaagaaagaccaacgacgccagcagcgagagcatcgccagcttcagcaagcaggaggtgatgagcagcttcctgcccgagggcggctgctacgagctgctgaccgtgatcggcaagggcttcgaggacctgatgaccgtgaacctggccagatacaagcccaccggcgagtacgtgaccgtgagaagaatcaacctggaggcctgcagcaacgagatggtgaccttcctgcagggcgagctgcacgtgagcaagctgttcaaccaccccaacatcgtgccctacagagccaccttcatcgccgacaacgagctgtgggtggtgaccagcttcatggcctacggcagcgccaaggacctgatctgcacccacttcatggacggcatgaacgagctggccatcgcctacatcctgcagggcgtgctgaaggccctggactacatccaccacatgggctacgtgcacagaagcgtgaaggccagccacatcctgatcagcgtggacggcaaggtgtacctgagcggcctgagaagcaacctgagcatgatcagccacggccagagacagagagtggtgcacgacttccccaagtacagcgtgaaggtgctgccctggctgagccccgaggtgctgcagcagaacctgcagggctacgacgccaagagcgacatctacagcgtgggcatcaccgcctgcgagctggccaacggccacgtgcccttcaaggacatgcccgccacccagatgctgctggagaagctgaacggcaccgtgccctgcctgctggacaccagcaccatccccgccgaggagctgaccatgagccccagcagaagcgtggccaacagcggcctgagcgacagcctgaccaccagcacccccagacccagcaacggcgacagccccagccacccctaccacagaaccttcagcccccacttccaccacttcgtggagcagtgcctgcagagaaaccccgacgccagacccagcgccagcaccctgctgaaccacagcttcttcaagcagatcaagagaagagccagcgaggccctgcccgagctgctgagacccgtgacccccatcaccaacttcgagggcagccagagccaggaccacagcggcatcttcggcctggtgaccaacctggaggagctggaggtggacgactgggagttctag

SEQ ID NO: 20095 - DNA, 1296 bp, Artificial Sequence
  derived and/or modified sequence
atgtcttttttggtaagtaagcctgaacggattaggcgctgggtgagtgaaaagtttatcgttgagggactgagggatctcgagcttttcggcgagcagccacctggggacactcgcagaaaaacgaatgatgcatcatcagagtctattgcatcattcagtaagcaagaggtgatgagctctttcctgcccgaaggcgggtgctacgagctcctcaccgtgattggcaaaggatttgaggatcttatgactgtcaacttagctaggtacaaacccaccggggaatacgttacagtgagaaggataaatctggaagcctgcagtaatgaaatggtcaccttcctgcagggcgagctgcacgtctctaaactttttaaccatcctaatatcgtgccttatagagccacctttatcgcggacaatgagctgtgggtggtgacaagcttcatggcctacggcagcgcgaaggacctgatatgtacacatttcatggatgggatgaatgagcttgccattgcttacattctgcaaggggtgttaaaagcacttgattacatccaccacatggggtatgtccacaggagcgtcaaggccagtcacatattgatctctgtggatggtaaggtatacttaagcggtctgcgaagtaacctatcaatgattagccacggacaaaggcagcgggtggttcatgatttcccaaagtacagcgtcaaggtgctgccctggctgagtcccgaagtgttacagcaaaatctccagggatacgatgctaagagcgatatttattcagtaggaataaccgcatgtgaactggccaacggtcacgtccccttcaaggatatgcccgccactcagatgctgttggagaagctgaacggaacagtgccctgtttactcgacacgtccacaattccagcggaggagctgaccatgagcccaagccgctccgtggcaaattccggtctgtccgacagtctgacaactagtaccccacggccaagtaacggggattcccccagtcacccctatcataggacattctcgcctcatttccaccattttgttgagcaatgtctgcagcggaatcctgacgcccgcccctccgcctctactctcctgaaccatagcttcttcaaacagattaagagaagggcctccgaagccctgcccgagctgcttagacctgtgacccctattacaaactttgagggatctcagagccaggaccacagtggaatattcggtctcgtgactaatctggaagagctggaggtggatgattgggaattttag

SEQ ID NO: 20096 - DNA, 1296 bp, Artificial Sequence
  derived and/or modified sequence
atgtccttcctggtgtccaagccagagcgcatccgccgctgggtgtctgagaagttcatcgtggagggcctgcgggacctggagctgtttggagagcagcccccaggggacaccaggaggaagaccaatgatgccagcagcgagagcatcgccagcttcagcaagcaggaggtgatgagcagcttcctgcctgagggcggctgctatgagctgctgactgtgattggaaaaggatttgaggacctgatgacagtgaacctggcccgctacaagcccactggagaatatgtgacagtgcggcgcatcaacctggaggcctgcagcaatgagatggtgaccttcctgcagggcgagctgcacgtgtccaagctgttcaaccaccccaacatcgtgccctaccgggccaccttcatcgctgacaatgagctgtgggtggtgaccagcttcatggcctacggcagcgccaaggacctgatctgcacccacttcatggatggcatgaatgagctggccatcgcctacatcctgcagggcgtgctgaaggccctggactacatccaccacatgggctacgtgcacaggtctgtgaaggccagccacatcctgatctctgtggatggcaaggtgtacctgagcggcctgcggagcaacctgtccatgatcagccacggccagaggcagagggtggtgcatgacttccccaagtacagcgtgaaggtgctgccctggctgagccctgaggtgctgcagcagaacctgcagggctatgatgccaagagtgacatctacagcgtgggcatcacagcctgtgagctggccaacggccacgtgcccttcaaggacatgcctgccacccagatgctgctggagaagctgaatggaacagtgccctgcctgctggacaccagcaccatcccagctgaggagctgaccatgagccccagccgctctgtggccaacagcggcctgagtgacagcctgaccaccagcaccccccggcccagcaatggagacagccccagccacccctaccacaggaccttcagcccccacttccaccactttgtggagcagtgcctgcagaggaacccagatgcccggcccagcgccagcaccctgctgaaccacagcttcttcaagcagatcaagaggcgggccagcgaggccctgcctgagctgctgcggcctgtgacccccatcaccaactttgagggcagccagagccaggaccacagcggcatcttcggcctggtgaccaacctggaggagctggaggtggatgactgggagttctag

SEQ ID NO: 20097 - DNA, 1296 bp, Artificial Sequence
  derived and/or modified sequence
atgagcttcctggtgagcaagcccgagcggatccggcggtgggtgagcgaaaaattcatcgtagagggactgcgcgatttggaactgtttggggaacagcccccaggtgatactcgtcgtaagaccaacgatgcatcttcagagtccatcgccagtttttcaaagcaggaggttatgtctagcttcctgccagaaggaggttgttacgaactgctgaccgtaattggcaagggatttgaggatctcatgactgtcaacctggctagatacaaacccaccggcgagtacgtcaccgtcaggagaattaaccttgaagcttgcagtaatgagatggtcaccttccttcagggagagctccacgtgtcaaaactattcaatcaccccaacattgtgccatatagagccacattcatcgctgacaacgagctatgggttgtgacgagttttatggcttacggtagtgccaaagatctgatctgtacacattttatggatggaatgaatgaactggcaattgcctatatcctgcaaggggtgctgaaagcactggattacatccaccatatgggttacgtgcaccgctccgtgaaggccagtcacattttgatttccgtcgacggcaaggtctacctttccggcctccggtccaacctgagtatgatctctcacggccagcggcagcgcgtggtgcacgacttccctaaatactcagttaaggtgcttccgtggctgtcccctgaagttctgcaacagaacctccaaggttacgacgccaagtctgatatttatagcgtgggcatcaccgcatgtgagttagccaatggccatgtccctttcaaggacatgcctgcaactcagatgctgctcgagaagttgaatggaacagtcccatgcctgctagatacctccaccatacccgctgaagaattaacgatgtctccgtccagaagtgtcgccaactctggcctgtccgatagtctcaccactagtacaccgaggccatccaatggggattcgccttcccatccatatcaccgaacattcagccctcactttcaccactttgtagaacagtgcctgcagaggaacccagacgctcgcccttctgcctctaccctgttaaaccactctttttttaagcagatcaagcgcagggccagtgaagccctgcccgagctgctccgtcccgtcaccccgatcactaattttgagggatcccaatctcaagatcactcaggtatctttggattggtgaccaatcttgaggaattggaggtagacgattgggagttctag

SEQ ID NO: 20098 - DNA, 1296 bp, Artificial Sequence
  derived and/or modified sequence
atgtcattcctcgtgtcgaagcctgaacgcatccggaggtgggtgtcggagaaattcatcgtggagggcttgagggatcttgaactgtttggggagcaaccaccgggagacacacgcaggaaaaccaatgacgcgtcatccgagtctatcgctagtttctctaaacaggaggtcatgagcagctttcttcctgaaggaggatgctacgaactgctgaccgtgattggtaaagggttcgaggatttgatgacagtcaacctggctaggtataaacccaccggggagtacgtgacagttcgtcgcatcaacctggaggcttgtagtaacgaaatggttaccttcctgcaaggagagctacacgtcagcaaattgtttaaccatcccaatattgtaccctaccgggcaacattcattgcggacaacgaattgtgggttgtcaccagttttatggcatacggttctgccaaggaccttatctgtacacatttcatggacgggatgaatgaactcgcgattgcctatattctgcagggtgtgcttaaggccctagattatatccaccacatgggatatgtgcacaggagtgtcaaggcatcccacatcttgatctccgttgacggcaaagtttatctgtccgggctcaggagcaatctctccatgatctcccatggccagcgccagcgagtggttcacgactttccaaaatatagcgtgaaagtactcccatggctgtcccccgaggtcttacagcagaacttgcagggctatgacgctaagagtgatatctacagtgttggaataactgcttgcgaactggctaatggtcatgtgccatttaaagatatgcctgccacacagatgctcctcgagaagttgaatggaaccgtcccatgtctgctggatacttcaactatccccgcagaggaattaaccatgagtccctcccgatctgtcgcgaattctggcctttccgactccctgactacgtccactccaaggccgagcaacggtgattcccctagccacccttaccacagaacgttttcaccacacttccatcatttcgtggagcagtgcctgcagcggaatcccgatgcgcgtccaagcgctagcactcttttaaaccacagcttctttaagcaaataaagcggagagccagtgaggctttgcctgaactgctgcggccagtcactccaataacaaacttcgaagggagccagagtcaggaccactctggtatcttcggcctcgtgacaaacctcgaagaacttgaagtggacgactgggagttctag

SEQ ID NO: 20099 - DNA, 2333 bp, Artificial Sequence
  derived and/or modified sequence
cggcgcggcggcggctgctagggcctgccgcagccgcggccactcggaaagggcgggacttccccgcagggcggggtggggcggagcgctctatcagtcctcccggtcgccccactgcgcatggcacgttgcgtactcccctcccagcaaccggtctggcggcggcgcggcagtaaaactgaggaggcggagccaagacggtcggggctgcttgctaactccaggaacaggtttaagtttttgaaactgaagtaggcctacacagtaggaactcatgtcatttcttgtaagtaaaccagagcgaatcaggcggtgggtctcggaaaagttcattgttgagggcttaagagatttggaactatttggagagcagcctccgggtgacactcggagaaaaaccaatgatgcgagctcagagtcaatagcatccttctctaaacaggaggtcatgagtagctttctgccagagggagggtgttacgagctgctcactgtgataggcaaaggatttgaggacctgatgactgtgaatctagcaaggtacaaaccaacaggagagtacgtgactgtacggaggattaacctagaagcttgttccaatgagatggtaacattcttgcagggcgagctgcatgtctccaaactcttcaaccatcccaatatcgtgccatatcgagccacttttattgcagacaatgagctgtgggttgtcacatcattcatggcatacggttctgcaaaagatctcatctgtacacacttcatggatggcatgaatgagctggcgattgcttacatcctgcagggggtgctgaaggccctcgactacatccaccacatgggatatgtacacaggagtgtcaaagccagccacatcctgatctctgtggatgggaaggtctacctgtctggtttgcgcagcaacctcagcatgataagccatgggcagcggcagcgagtggtccacgattttcccaagtacagtgtcaaggttctgccgtggctcagccccgaggtcctccagcagaatctccagggttatgatgccaagtctgacatctacagtgtgggaatcacagcctgtgaactggccaacggccatgtcccctttaaggatatgcctgccacccagatgctgctagagaaactgaacggcacagtgccctgcctgttggataccagcaccatccccgctgaggagctgaccatgagcccttcgcgctcagtggccaactctggcctgagtgacagcctgaccaccagcaccccccggccctccaacggtgactcgccctcccacccctaccaccgaaccttctccccccacttccaccactttgtggagcagtgccttcagcgcaacccggatgccaggcccagtgccagcaccctcctgaaccactctttcttcaagcagatcaagcgacgtgcctcagaggctttgcccgaattgcttcgtcctgtcacccccatcaccaattttgagggcagccagtctcaggaccacagtggaatctttggcctggtaacaaacctggaagagctggaggtggacgattgggagttctgagcctctgcaaactgtgcgcattctccagccagggatgcagaggccacccagaggcccttcctgagggccggccacattcccgccctcctgggcagattgggtagaaaggacattcttccaggaaagttgactgctgactgattgggaaagaaaatcctggagagacacttcactgctccaaggcttttgagacacaagggaatctcaacaaccagggatcaggagggtccaaagccgacattcccagtcctgtgagctcaggtgacctcctccgcagaagagagatgctgctctggccctgggagctgaattccaagcccagggtttggctccttaaacccgaggaccgccacctcttcccagtgcttgcgaccagcctcattctatttaactttgctctcagatgcctcagatgctataggtcagtgaaagggcaagtagtaagctgcctgcctcccttccctcagacctctccctcataattccagagaagggcatttctgtctttttaagcacagactaaggctggaacagtccatccttatccctcttctggcttgggccctgacacctaagtctttcccacggtttatgtgtgtgcctcattcctttcccaccaagaatccatcttagcgcctcctgccagctgccctggtgctttctccaagggccatcagtgtcttgcctagcttgagggcttaagtccttatgctgtgttagtttcgttgtcagaacaaattaaaattttcagagacgctgctgg

SEQ ID NO: 20100 - protein, 152 aa, Artificial Sequence
  derived and/or modified sequence
MAQLGAVVAVASSFFCASLFSAVHKIEEGHIGVYYRGGALLTSTSGPGFHLMLPFITSYKSVQTTLQTDEVKNVPCGTSGGVMIYFDRIEVVNFLVPNAVYDIVKNYTADYDKALIFNKIHHELNQFCSVHTLQEVYIELFGLENDFSQESS

SEQ ID NO: 20101 - DNA, 459 bp, Artificial Sequence
  derived and/or modified sequence
atggcccaactgggggccgtcgtcgcggtagcttcgtccttcttctgcgcctccctattttcggcagtacacaagattgaagaggggcatataggcgtgtactaccgtggcggcgcactgctaacatcaacaagtggacccggtttccatctgatgctgcctttcattactagttacaagagcgtgcaaactaccctgcagacagacgaggttaagaatgtgccctgtgggacttcaggcggggtgatgatctacttcgataggatagaagtggtcaatttcctagtgccgaatgctgtgtacgatatcgtcaagaattatacggccgattacgacaaggcactgattttcaacaaaattcaccacgagctgaatcaattttgcagcgtgcacacactccaagaagtttatatcgagctcttcgggctagagaacgatttctctcaggaaagttcttag

SEQ ID NO: 20102 - DNA, 621 bp, Artificial Sequence
  derived and/or modified sequence
atggcccagttgggagctgtggttgctgtggccagctcgttcttttgtgccagcctgttctctgcggtccacaaaattgaagaagggcatatcggggtgtactaccggggaggagcactgctgaccagcacatccgggcccggattccacctgatgttgccatttattacctcctataaaagcgtgcaaactacgcttcagaccgatgaagttaagaacgtaccttgtgggaccagcggaggagtcatgatttattttgacaggatcgaagtagttaacttcctcgtccctaacgcagtttatgacattgtgaaaaattacactgctgattacgataaagccttgatctttaataaaattcaccatgaattaaaccaattctgcagtgtccatactttacaagaagtgtatatcgaactgttcggcaaaaaagtgtcccccgagcatgctgtgctaaagcaaggctcctggaacccagcttccctgcattgcttgaagcctggctgcctgcagggtgtgatggtgacgtacggccaggaaatgctgaaaaacctcgtattaaggtcctggagccagcggtccagttggaggatgctgatcgccatgcaacaagacccatag

SEQ ID NO: 20103 - DNA, 459 bp, Artificial Sequence
  derived and/or modified sequence
atggcacagctgggcgcagtcgtggctgttgccagtagctttttttgtgcgagtctgttctctgccgtgcacaagatagaggagggacatataggagtttattatagagggggtgccctgctgaccagtacatctggaccgggtttccacctgatgctgccattcataacaagctataaaagcgtgcagaccaccctgcagactgacgaggtaaagaatgttccttgcggtacgtccggcggagttatgatctattttgatagaatcgaggtggtcaattttctggtaccaaatgcagtctatgacattgtgaagaactatacagccgattacgataaggcacttatcttcaataagattcatcacgaactgaatcagttttgcagcgtccacaccttacaggaggtttacattgaactatttggacttgagaacgattttagtcaggagtcctcatag

SEQ ID NO: 20104 - DNA, 459 bp, Artificial Sequence
  derived and/or modified sequence
atggcccagctgggcgctgtggtggccgtggccagcagcttcttctgtgccagcctcttctctgctgtgcacaagattgaggagggccacatcggcgtgtactacagaggaggagccctgctgaccagcaccagcggccctggcttccacctgatgctgcccttcatcaccagctacaagtctgtgcagaccaccctgcagacagatgaggtgaagaatgtgccctgtggcaccagcggaggagtgatgatctactttgacagaattgaggtggtgaacttcctggtgcccaatgctgtgtatgacatcgtgaagaactacacagctgactatgacaaggccctgatcttcaacaagatccaccacgagctgaaccagttctgcagcgtgcacaccctgcaggaggtgtacatcgagctgtttggcctggagaatgacttcagccaggagagcagctag

SEQ ID NO: 20105 - DNA, 621 bp, Artificial Sequence
  derived and/or modified sequence
atggcccagctgggcgctgtggtggccgtggccagcagcttcttctgtgccagcctcttctctgctgtgcacaagattgaggagggccacatcggcgtgtactacagaggaggagccctgctgaccagcaccagcggccctggcttccacctgatgctgcccttcatcaccagctacaagtctgtgcagaccaccctgcagacagatgaggtgaagaatgtgccctgtggcaccagcggaggagtgatgatctactttgacagaattgaggtggtgaacttcctggtgcccaatgctgtgtatgacatcgtgaagaactacacagctgactatgacaaggccctgatcttcaacaagatccaccacgagctgaaccagttctgcagcgtgcacaccctgcaggaggtgtacatcgagctgtttgggaagaaggtgtccccagagcacgctgtgctgaagcagggctcctggaacccagccagcctgcactgcctgaagccaggctgcctgcagggcgtgatggtgacctacggccaggagatgctgaagaacctggtgctgcgctcctggagccagaggagctcctggaggatgctgattgccatgcagcaggacccctag

SEQ ID NO: 20106 - DNA, 459 bp, Artificial Sequence
  derived and/or modified sequence
atggcccagctgggcgccgtggtggccgtggccagcagcttcttctgtgccagtctgttttcagctgtccataagatcgaggaaggccacattggggtctactaccgcggcggggctcttctgacttcaacttctggccctggctttcacctgatgctccccttcatcacaagctataagtctgtccagactaccctccaaacagacgaggtgaagaacgtcccctgtggtacaagcggtggtgtgatgatttacttcgaccggattgaggtggtcaacttcttggtacctaacgcggtgtacgatatcgtcaaaaactacactgccgactacgataaagccctgatcttcaataaaatccaccatgagcttaaccagttctgctcagttcacaccctccaggaggtgtacattgagttgttcggtctggaaaatgatttttctcaggaatcgagctag

SEQ ID NO: 20107 - DNA, 621 bp, Artificial Sequence
  derived and/or modified sequence
atggcccagctgggcgccgtggtggccgtggccagcagcttcttctgcgcctcccttttcagtgcggttcacaaaatcgaggagggacatatcggagtgtattatcgcgggggagccctactgacgtcgacctccggtcctggctttcatctgatgctgccttttatcacgtcctacaagtccgttcaaactacattacagacagacgaagttaagaacgttccatgtggaactagcggcggcgtcatgatttactttgatagaatcgaagtcgttaactttcttgttcctaacgccgtctacgacatagtcaagaattacaccgccgactacgacaaggccttgatatttaataaaatacatcacgagcttaaccagttttgttcagtgcacaccctacaggaagtgtatatagaattattcggtaaaaaggttagccccgagcatgcggtcctgaagcaaggaagctggaatccggcatctctgcattgccttaagcccggatgcttacagggagtaatggtcacttatgggcaggaaatgctgaaaaacttggtgctccgttcctggtcacaacggagctcatggaggatgttgattgcaatgcagcaggacccgtag

SEQ ID NO: 20108 - DNA, 459 bp, Artificial Sequence
  derived and/or modified sequence
atggcccagctgggcgccgtggtggccgtggccagcagcttcttctgtgcatctctgttcagcgctgttcataaaattgaagagggtcacatcggcgtgtactaccgaggaggcgcactgttgacatccacctctgggcctggctttcatctaatgttaccattcataaccagctacaagtccgtgcagacgacgttacagactgacgaagtaaaaaacgtcccctgtggcacatccggaggagttatgatctacttcgatcggatcgaagtcgttaattttttggttcccaacgcagtgtacgacatcgtgaagaattataccgctgactacgataaagcgctgatctttaataaaatccatcacgagctcaaccaattctgtagtgtccatacactgcaggaggtgtatatcgaactgtttgggctcgaaaatgacttttctcaggaaagtagttag

SEQ ID NO: 20109 - DNA, 459 bp, Artificial Sequence
  derived and/or modified sequence
atggcccagctcggagctgtggtggccgtcgctagttctttcttctgcgcgtcactgtttagcgcagtgcacaagattgaagagggccacattggcgtctattacagaggaggcgcactgctcacctcaactagtggtcctggcttccacctgatgcttccatttattacatcttacaagtctgtccagactacgctacagacagacgaagtcaagaacgtcccctgcgggaccagtgggggtgtcatgatctacttcgaccgcatagaagtggtgaattttctggtgccaaacgccgtttacgatatcgtcaagaattacacagcagattacgataaagccctgatttttaacaagattcatcatgagctgaatcagttctgctccgtgcacaccttacaggaagtttacattgaactgtttggcctggagaacgacttttctcaagagagctcttag

SEQ ID NO: 20110 - DNA, 621 bp, Artificial Sequence
  derived and/or modified sequence
atggcccagttgggcgcagtggttgccgtggcaagctccttcttttgcgcctctctgttttcagccgtgcacaaaatcgaggagggccacattggggtttactatcgcggaggggcactcctcacctctacaagcggccctgggtttcacttgatgctgccctttatcacaagttataagagtgttcagacaaccctgcaaacggacgaggtgaaaaacgtgccctgtggaactagcggcggtgttatgatctatttcgatagaattgaagttgtgaactttctagttcccaatgcagtgtatgatattgtgaagaactacacagctgattatgataaagccctgatctttaataagattcaccatgaactgaatcagttttgctccgttcacactttgcaggaggtctacattgagcttttcggcaagaaagtctcacccgaacatgccgtgcttaaacagggtagctggaaccccgcaagtctgcactgcttgaagcctggctgtctgcagggcgtcatggtgacttatgggcaggaaatgctgaagaatcttgtgctgaggtcctggagccagcggtctagctggcggatgcttattgcgatgcagcaggatccatag

SEQ ID NO: 20111 - DNA, 459 bp, Artificial Sequence
  derived and/or modified sequence
atggcccagctgggcgctgtggtcgctgtcgcctcgtcctttttctgtgctagtctgttttccgccgtccacaaaatcgaggaggggcacatcggggtgtactaccggggaggcgcattgttaacaagcacttctgggccagggttccacctgatgcttcctttcatcactagctataagtccgtgcagacaaccctgcaaaccgatgaagtgaaaaacgtaccttgcggtacttctgggggagtcatgatctattttgacaggatagaagtcgtcaacttcctagtgccgaacgcagtttatgacatagttaagaactatacagcggattacgataaggcccttattttcaataaaattcaccacgaattgaaccagttctgctctgtccacacacttcaggaagtctacatcgaactgtttggccttgagaatgacttttcacaggagtcttcatag

SEQ ID NO: 20112 - DNA, 459 bp, Artificial Sequence
  derived and/or modified sequence
atggcccagctgggcgccgtggtggccgtggccagcagcttcttctgcgccagcctgttcagcgccgtgcacaagatcgaggagggccacatcggcgtgtactacagaggcggcgccctgctgaccagcaccagcggccccggcttccacctgatgctgcccttcatcaccagctacaagagcgtgcagaccaccctgcagaccgacgaggtgaagaacgtgccctgcggcaccagcggcggcgtgatgatctacttcgacagaatcgaggtggtgaacttcctggtgcccaacgccgtgtacgacatcgtgaagaactacaccgccgactacgacaaggccctgatcttcaacaagatccaccacgagctgaaccagttctgcagcgtgcacaccctgcaggaggtgtacatcgagctgttcggcctggagaacgacttcagccaggagagcagctag

SEQ ID NO: 20113 - DNA, 621 bp, Artificial Sequence
  derived and/or modified sequence
atggcccagctgggcgccgtggtggccgtggccagcagcttcttctgcgccagcctgttcagcgccgtgcacaagatcgaggagggccacatcggcgtgtactacagaggcggcgccctgctgaccagcaccagcggccccggcttccacctgatgctgcccttcatcaccagctacaagagcgtgcagaccaccctgcagaccgacgaggtgaagaacgtgccctgcggcaccagcggcggcgtgatgatctacttcgacagaatcgaggtggtgaacttcctggtgcccaacgccgtgtacgacatcgtgaagaactacaccgccgactacgacaaggccctgatcttcaacaagatccaccacgagctgaaccagttctgcagcgtgcacaccctgcaggaggtgtacatcgagctgttcggcaagaaggtgagccccgagcacgccgtgctgaagcagggcagctggaaccccgccagcctgcactgcctgaagcccggctgcctgcagggcgtgatggtgacctacggccaggagatgctgaagaacctggtgctgagaagctggagccagagaagcagctggagaatgctgatcgccatgcagcaggacccctag

SEQ ID NO: 20114 - DNA, 1473 bp, Artificial Sequence
  derived and/or modified sequence
ggaagtcgcgtgctgaggggtgtgacggttttcttgctcgtgggctcggacgagtacggagcgcctgcagggacagcctggataaaggctcactgatggctcagttgggagcagttgtggctgtggcttccagtttcttttgtgcatctctcttctcagctgtgcacaagatagaagagggacatattggggtatattacagaggcggtgccctgctgacttcgaccagcggccctggtttccatctcatgctccctttcatcacatcatataagtctgtgcagaccacactccagacagatgaggtgaagaatgtaccttgtgggactagtggtggtgtgatgatctactttgacagaattgaagtggtgaacttcctggtcccgaacgcagtgtatgatatagtgaagaactatactgctgactatgacaaggccctcatcttcaacaagatccaccacgaactgaaccagttctgcagtgtgcacacgcttcaagaggtctacattgagctgtttggactggaaaatgatttttcccaggaatcttcataaaagggaccctgagcaagaacatttttcatagcagacaggaggactcatccacatcgccagcaatcataattaagcaaaccgccttttgcaccatttaagatttaggaaatcatccaaattacttttaatgtttctgcagtagaaaatgaatctaaattcattttatagggtttgtagtcttttatctgttttggattcactgtgcttttaagaaaaagttggtaaatttgccgttgatttttctttttaacctcaaactaatagaattttataaaatattaattttctctagccattgtcttaggacttgtgacattacatgaacatttcaaagcactgaaaaaagacaaaggatccctaatgtccctgaagaggaaattaaaatacaaagttgtttttcattagcaaacttcttactttcttacagctaaacttggtagcttagtgaagtacagctgcttgtatggaggagctggggaaatatatttgctttgaaacttttttatttttacatctcagtcttgctagcaagcactacttggcttagaatctgtcatatccataaaggaggagctcatgtctctagtcctggcccttcaactcagaaggttcttctatactttccttctctcaggactcttatagcccagactttaaacatgaagctgcataattttcatcacttcttactctgccgcatcctctttgcccatgttattaaagtattatctaatactttgaagtttacctgaagaacctctttgtgtgtacttagtaatacaactttttttcctgtcccaacaccttttaatacagttgaatggataaaaacatggatacaaacacatggatatagttatcactgaagcagtgtgacataaaataatacctatgtatacaacactcctctgtaaatagc

SEQ ID NO: 20115 - DNA, 2347 bp, Artificial Sequence
  derived and/or modified sequence
ggttttcttgctcgtgggctcggacgagtacggagcgcctgcagggacagcctggataaaggctcactgatggctcagttgggagcagttgtggctgtggcttccagtttcttttgtgcatctctcttctcagctgtgcacaagatagaagagggacatattggggtatattacagaggcggtgccctgctgacttcgaccagcggccctggtttccatctcatgctccctttcatcacatcatataagtctgtgcagaccacactccagacagatgaggtgaagaatgtaccttgtgggactagtggtggtgtgatgatctactttgacagaattgaagtggtgaacttcctggtcccgaacgcagtgtatgatatagtgaagaactatactgctgactatgacaaggccctcatcttcaacaagatccaccacgaactgaaccagttctgcagtgtgcacacgcttcaagaggtctacattgagctgtttggtaagaaagtctctcctgagcatgccgtgcttaagcagggttcctggaaccccgcgtctctccactgcctaaagcctggctgcctgcagggtgtgatggtcacttatggacaggaaatgttaaagaatcttgtgctcaggagctggtcacaaaggagttcatggagaatgctgatagctatgcaacaagatccttagagggctggagctttgggcacagggaccatagtggagtagagtattcacttctggcctcaatcagaggctggagtggaaatgtgttcccactgttcctaaactatcattctataatgaagacaaggtccattctagaagaaccttagagattgtccagaccagcatcctcattttaagctgagggtactgtgacccaaagcaagaaagtcacagagccagatgccaattagtagtggggctgaaacaggagccttcctctcctggctcttcagcattcttctcaccatgcaacactgaatggagggcccccaggaatgggtgatgaaaaagacatgattcatagttaattctagaagtgagatgagaaccatagctccttccagttctcagaacctttgtgattattatttttttactctgtacctgtagcaacgaatagaaaaacactttaaacaaaaagattccacgtgcctaagtagatatgttttgtcctttttacctttttcaaagtaaaggcaacctgacttagcagcaaaggaaggacacagttgggtaactgttataacttgtttgcagtcaagtattctgtttaaactcactgccagaaattctctaatagccaatgccaaaagtaaatgaatttttaaccaatagtataactgttcttgacactaggactggaaaatgatttttcccaggaatcttcataaaagggaccctgagcaagaacatttttcatagcagacaggaggactcatccacatcgccagcaatcataattaagcaaaccgccttttgcaccatttaagatttaggaaatcatccaaattacttttaatgtttctgcagtagaaaatgaatctaaattcattttatagggtttgtagtcttttatctgttttggattcactgtgcttttaagaaaaagttggtaaatttgccgttgatttttctttttaacctcaaactaatagaattttataaaatattaattttctctagccattgtcttaggacttgtgacattacatgaacatttcaaagcactgaaaaaagacaaaggatccctaatgtccctgaagaggaaattaaaatacaaagttgtttttcattagcaaacttcttactttcttacagctaaacttggtagcttagtgaagtacagctgcttgtatggaggagctggggaaatatatttgctttgaaacttttttatttttacatctcagtcttgctagcaagcactacttggcttagaatctgtcatatccataaaggaggagctcatgtctctagtcctggcccttcaactcagaaggttcttctatactttccttctctcaggactcttatagcccagactttaaacatgaagctgcataattttcatcacttcttactctgccgcatcctctttgcccatgttattaaagtattatctaatactttgaagtttacctgaagaacctctttgtgtgtacttagtaatacaactttttttcctgtcccaacaccttttaatacagttgaatggataaaaacatggatacaaacacatggatatagttatcactgaagcagtgtgacataaaataatacctatgtatacaacactcctctgtaaatagcaaatgtaaagtaaaagatacacaacaga

SEQ ID NO: 20116 - DNA, 1742 bp, Artificial Sequence
  derived and/or modified sequence
ggcccccgccccttcgtgcgcgcgctgggcctagctgccgctcagggtcggggctgacccgtcactttcgggaacctcagtcccagcagcttctctccctcagccggcccgctcctggagagagacagaaacccttttctgtcgcgtcctctccttgcgagccgcagggggaccgagcggaggctattggagccgcagccccagaccagggcgcttgaccctctctcggaacggggcggggaaggggcgcgagtgacctcggggagggaagggcactggcaggaaaggacgcaactgcagatcggtagccggaggccgccacggataaaggctcactgatggctcagttgggagcagttgtggctgtggcttccagtttcttttgtgcatctctcttctcagctgtgcacaagatagaagagggacatattggggtatattacagaggcggtgccctgctgacttcgaccagcggccctggtttccatctcatgctccctttcatcacatcatataagtctgtgcagaccacactccagacagatgaggtgaagaatgtaccttgtgggactagtggtggtgtgatgatctactttgacagaattgaagtggtgaacttcctggtcccgaacgcagtgtatgatatagtgaagaactatactgctgactatgacaaggccctcatcttcaacaagatccaccacgaactgaaccagttctgcagtgtgcacacgcttcaagaggtctacattgagctgtttggactggaaaatgatttttcccaggaatcttcataaaagggaccctgagcaagaacatttttcatagcagacaggaggactcatccacatcgccagcaatcataattaagcaaaccgccttttgcaccatttaagatttaggaaatcatccaaattacttttaatgtttctgcagtagaaaatgaatctaaattcattttatagggtttgtagtcttttatctgttttggattcactgtgcttttaagaaaaagttggtaaatttgccgttgatttttctttttaacctcaaactaatagaattttataaaatattaattttctctagccattgtcttaggacttgtgacattacatgaacatttcaaagcactgaaaaaagacaaaggatccctaatgtccctgaagaggaaattaaaatacaaagttgtttttcattagcaaacttcttactttcttacagctaaacttggtagcttagtgaagtacagctgcttgtatggaggagctggggaaatatatttgctttgaaacttttttatttttacatctcagtcttgctagcaagcactacttggcttagaatctgtcatatccataaaggaggagctcatgtctctagtcctggcccttcaactcagaaggttcttctatactttccttctctcaggactcttatagcccagactttaaacatgaagctgcataattttcatcacttcttactctgccgcatcctctttgcccatgttattaaagtattatctaatactttgaagtttacctgaagaacctctttgtgtgtacttagtaatacaactttttttcctgtcccaacaccttttaatacagttgaatggataaaaacatggatacaaacacatggatatagttatcactgaagcagtgtgacataaaataatacctatgtatacaacactcctctgtaaatagcaaatgtaaagtaaaagatacacaaca

SEQ ID NO: 20117 - protein, 419 aa, Artificial Sequence
  derived and/or modified sequence
MGKRLDQPQMYPQYTYYYPHYLQTKSYAPAPHPMAPPSPSTNSSSNNSSNNSSGEQLSKTNLYIRGLPPGTTDQDLIKLCQPYGKIVSTKAILDKNTNQCKGYGFVDFDSPAAAQKAVASLKANGVQAQMAKQQEQDPTNLYISNLPISMDEQELENMLKPFGHVISTRILRDANGVSRGVGFARMESTEKCEVVIQHFNGKYLKTPPGIPAPSEPLLCKFADGGQKKRQNQSKYTQNGRPWPREGEAGMALTYDPTAAIQNGFYSSPYSIATNRMIPQTSITPFIAASPVSTYQGAVITPTMDHPMSMQPANMMGPLTQQMNHLSLGTTGTIQSQDRIMILHQLLCQYMTAAAPMQGTYIPQYTPVPPTAVSIEGVVADTSPQTVAPSSQDTSGQQQQIAVDTSNEHAPAYSYQQSKP

SEQ ID NO: 20118 - DNA, 2757 bp, Artificial Sequence
  derived and/or modified sequence
ttctacagatctcactcctcgccctttttttttttcctttggtgtgtgttttttgttttgttttgttttttaaaaaaattcttgctgtgttggaactagcgagtggtggagtctctgaagcctcatcagtcaccgggactgtcaggaatagtggtttaagaggaagctcggcctggggcactataccctgtcatccagttccctgcctcggagataaagattccagctacatgggcaaacgcctggatcagccacaaatgtacccccagtacacttactactatcctcattatctccaaaccaagtcctatgcaccagctccccaccccatggctcctcccagccccagcacaaacagcagcagcaacaacagcagcaacaacagcagcggggaacagttgagtaaaaccaacctgtacattcgaggcctcccaccaggcaccactgaccaggacctaatcaagctgtgccaaccgtatggaaaaattgtatctacaaaggcaattcttgacaaaaacacaaatcagtgcaaaggttatggttttgtagattttgacagtcctgcagccgcacagaaagcggtagcatctctcaaggcaaatggcgtgcaggcacagatggctaagcaacaagagcaagacccaacaaacctatacatctcaaatctccccatttctatggatgagcaggagcttgagaatatgctgaaaccctttggacatgtcatttccacaagaatactaagagacgctaatggagtcagcagaggtgttggctttgccagaatggagtctactgaaaaatgtgaagtggtaattcaacattttaatggaaaatatctgaaaacaccaccaggcatcccagcccccagtgagcctttgctgtgcaaattcgctgatggaggacaaaagaagcgacagaatcaaagcaaatatacccagaatgggaggccttggcccagggaaggagaggctggcatggctttgacctatgaccccacagctgccatacagaatggattttattcttcaccgtacagtattgcaaccaaccgcatgattccacagacatctatcacgccattcattgctgcttcccctgtctccacataccagggtgctgtgattacaccaaccatggaccatcccatgtcaatgcagccagccaacatgatgggcccactgacacagcagatgaatcacctttcgttgggcacaacaggaacgattcaatcccaagacaggattatgatactccaccagctgttgtgtcagtatatgactgctgctgctcctatgcaagggacctacattcctcagtacacgcctgtgcctccgacagctgtttctattgaaggtgttgttgctgatacctctccccagacagtggcaccttcatcccaggacaccagtggtcagcagcaacagatagcagtggacacatccaacgaacatgcacctgcatattcttaccaacagtctaaaccataaacaggactgaagaatgtctgtctgaatctttgccttgaatgaagaaacttcattgaacaagaagttggcttccagtttgcacagacgtcaatggaatgcatttttttgttgttgttgttgttttttttttagtgttataccttacccaatgaaagcaaagtttttatgtgctgtgcaaatggtcttcatgtggtctgacaatttatttttgccatcatttttttaattaaagaaaaaatttccagaagaggaaaaaaaaactacaaaaaacaaaacattgaaggttgatattttatgtggaagaacatttgaattgaattcagaatttttctgaaggtgtagatactttttttttttttttaacagaaaacctgatgtcaagaggtgggcaatagaaatggaaacaaattgtcttcctcaataattaagctactttctctttttcccttcttgttttaatctagtgggttttttattttattttttcttagaaatatgtaggtaaggtttatcttgaatcttaattgccttaattttaaggacgtcaaaggctctcgaggcaagctgtcaacgtcttgttgaaaacaaaaatcaagaaagaattgaaatactgtgccggctttcactggcacagaagtttaagactatgagtttttagggtgaagaaaaaactgtacagtttaaatgaaaatgtttttcttcatttgaagaaaatttgttgataaaccatggcaactgcaagaattggaaaaatgctgggacttttcatgaactttgtcttaagtgttgacatgaatcattctaaaaggctaaaacattttacagtaaagttattaaggttggtttaaaaacaactgcattagaaataatgcgtgtttggggggcagaatgcagatttttttaatttacaaagcgtgatcgctagcaaaagcattagtgctttttatctgcagtcttttttatgagctttacaaagtttttagtcagctttgcttgtcacattgcaaaacctagcttaagagcattaaaaaaaaaaacttaagtagataggagcttatggtcaaaaagtgcaaaaaaaaaaacaaaaaaaaagcaatagatagagaaattgttgacaatttctgtagtctttcctagttgtgatcaaattcagcctatggatggcctattttataccaaagatgaagtgacaccctattacagtccagaagatagaggttgttttcgtttcttttctttttaaaaaaaaaaaaatttatttgaccga

SEQ ID NO: 20119 - DNA, 1260 bp, Artificial Sequence
  derived and/or modified sequence
atgggcaaaagactcgaccagccacagatgtatccccagtatacatattattaccctcactatcttcagacaaaatcctacgcacccgctccccaccccatggcccctccctcaccctccacaaactcgtcttcaaacaactcctctaataatagctccggggaacaattgtccaagacaaatctgtacatccgcggtctcccacctggaaccactgaccaggacctgatcaaactttgccagccttatggcaaaatcgtcagtacaaaggcgatcttagataagaacaccaatcaatgcaaaggctatggatttgtagattttgattcacctgccgctgcccagaaggcagttgcaagcctgaaggccaatggcgtgcaggcccagatggctaaacagcaggagcaggatcccacaaatctctatattagtaatctcccaatatcaatggatgaacaggaactcgagaatatgcttaagcctttcgggcacgtgatctccactcgcattctgagggacgccaacggcgttagccggggagtgggtttcgctcgtatggaatctacagagaaatgtgaggtagtgatccaacattttaacggtaagtacttgaagacgcccccaggaatcccagctccttctgagccccttttgtgtaaatttgctgatggcggccagaagaagagacaaaatcagagtaagtatactcagaatggtagaccatggccaagagaaggagaggcaggcatggcactcacctacgatcccacggcagctatccagaatggtttctattctagcccttactctatcgcaactaatcgcatgattccacagacatcaattacacctttcatagctgcctccccagtttcaacctaccagggtgcggtcatcacgcccacgatggaccatcctatgagtatgcaacccgcgaacatgatgggacctttgacccagcagatgaaccacctctccctgggcaccacaggaaccattcagtcccaggaccggatcatgatcctccaccagctgctgtgccagtatatgactgctgccgccccgatgcaaggcacgtatattccccagtacacccccgtcccaccaaccgcagtgtctatcgagggggttgtggcagacacatccccacaaactgtagccccgtcctctcaggatacttccggccagcaacagcagatcgctgtcgatacttccaatgagcacgctcccgcctactcttatcagcagagcaaaccttag

SEQ ID NO: 20120 - DNA, 1260 bp, Artificial Sequence
  derived and/or modified sequence
atgggcaagaggctggaccagccccagatgtacccccagtacacctactactacccccactacctgcagaccaagagctatgccccagccccccaccccatggccccacccagccccagcaccaacagcagcagcaacaacagcagcaacaacagcagtggagagcagctgagcaagaccaacctgtacatccggggcctgcccccaggcaccacagaccaggacctgatcaagctgtgccagccctacggcaagatcgtgtccaccaaggccatcctggacaagaacaccaaccagtgcaagggctacggctttgtggactttgacagccctgctgctgcccagaaggctgtggccagcctgaaggccaacggggtgcaggcccagatggccaagcagcaggagcaggaccccaccaacctgtacatcagcaacctgcccatctccatggatgagcaggagctggagaacatgctgaagcccttcggccacgtgatcagcacccgcatcctgagagatgccaatggagtgtcccggggcgtgggctttgccaggatggagagcacagagaagtgtgaggtggtgatccagcacttcaacgggaagtacctgaagaccccacctggcatcccagcccccagcgagcccctgctgtgcaagtttgctgatggcggccagaagaagaggcagaaccagagcaagtacacccagaatggccggccctggccccgggagggggaggccggcatggccctgacctatgaccccacagctgccatccagaatggcttctacagcagcccctacagcatcgccaccaacaggatgatcccccagaccagcatcacccccttcatcgccgccagccctgtgtccacctaccagggcgctgtgatcacccccaccatggaccaccccatgtccatgcagcctgccaacatgatgggccccctgacccagcagatgaaccacctgagcctgggcaccaccggcaccatccagagccaggaccgcatcatgatcctgcaccagctgctgtgccagtacatgacagctgctgcccccatgcagggcacctacatcccccagtacacccctgtgcccccaacagctgtgtccattgagggcgtggtggccgacaccagcccccagacagtggcccccagcagccaggacaccagcggccagcagcagcagattgctgtggacaccagcaatgagcacgccccagcctacagctaccagcagagcaagccctag

SEQ ID NO: 20121 - DNA, 1260 bp, Artificial Sequence
  derived and/or modified sequence
atgggcaagcggctggaccagccccagatgtacccccagtacacctactattatccccattatctgcaaacaaagagctatgcacctgccccacatccaatggctccaccctcacccagcaccaacagctcgagtaataattcctcaaataactcttccggcgaacagctgagtaagacaaacctttacatccggggactccccccagggactacagaccaagacctgattaagctgtgccagccctatggcaaaatcgtcagtacaaaggcgatcctagataagaacaccaatcagtgcaaaggttacggcttcgtggatttcgattctccagccgctgcccagaaggcagtcgcgtcacttaaggcaaacggagtgcaggcacagatggctaaacaacaggaacaggatccaaccaatctttacatcagcaacctcccaattagcatggacgagcaagaactggaaaacatgctgaaaccatttgggcatgttatttccaccaggatactgagagatgccaacggcgtaagtaggggcgtgggattcgcccggatggaatccaccgaaaagtgcgaagtggtaattcagcacttcaatggtaagtacctcaaaaccccccccggcatacccgcaccctctgaaccccttctatgcaagttcgctgacggtggacagaaaaaaaggcagaatcagtccaaatatacccagaatggcagaccctggcctcgagagggcgaagccggcatggccctgacatacgatccaacggccgctattcagaatggattctacagtagcccatactccattgcaactaaccgcatgatccctcagaccagtataacgccttttatcgccgccagtcctgtctcgacttaccagggggcagtaatcacacccactatggaccaccctatgtctatgcagcccgccaacatgatggggccccttactcaacaaatgaaccatctgtccctcggcacaacaggcacgatccaatcacaggaccgcataatgattctgcatcagctcctttgccagtacatgaccgcagcagcacccatgcaagggacctacataccccagtacacacccgtcccaccaacagcggttagcattgagggcgtcgtcgccgacactagcccacagacagtggccccaagcagccaggatacatccggccagcagcagcagatcgcagttgatacctccaacgaacacgcccctgcctatagttaccagcagtccaagccgtag

SEQ ID NO: 20122 - DNA, 1260 bp, Artificial Sequence
  derived and/or modified sequence
atggggaaaagacttgatcagccgcagatgtaccctcagtatacctactactatccacactacctgcagaccaagtcctacgcccctgctccacatcctatggcgccaccctcaccatcaactaattcatcatcaaataactcatcgaacaacagctctggcgaacagctgtccaagactaatctctacattagggggctgccgccaggaacaaccgatcaagatctgattaagttgtgtcaaccatatggcaagatagtgtcaacaaaagccatcttggacaagaatactaaccagtgcaaagggtatggatttgtcgacttcgattcccctgcagcagctcagaaggcagtggcaagtctgaaagccaatggcgttcaggctcaaatggccaaacaacaagagcaggatccaactaatttgtatattagcaatcttcctatcagcatggatgaacaagagctcgaaaacatgctgaagcctttcggccacgttatttcaaccagaattcttagagacgccaacggggtttccagaggtgttggtttcgctcggatggagtccactgagaaatgcgaggtggtgattcaacacttcaatggcaagtatttgaaaacaccccctggaatccccgctcccagtgaacccctgctctgtaagttcgccgatggtggacagaaaaaacgtcagaatcagtccaagtatactcagaacggacggccatggccgcgagagggtgaagctggcatggcgttaacttatgatcccaccgctgctatacagaacggattctacagcagtccatacagcatcgctaccaatcgcatgatcccccagacaagcattacaccttttatcgctgcatccccggtctccacttaccaaggggcagtgattacccctacgatggaccacccaatgtccatgcagccagctaacatgatgggccctctgacccagcagatgaatcacctatctctcggcacaacaggaacaatacagtcgcaggaccgcattatgattctgcaccagcttctctgccagtatatgaccgcggctgctcccatgcagggcacctacatcccacagtacacccctgtaccccctaccgcagttagtattgagggcgtggtagccgacacctctccccaaaccgtggcaccttcttcacaggacacctctgggcagcagcagcagattgcagttgacacttccaatgaacacgccccagcgtacagttaccagcagagcaagccctag

SEQ ID NO: 20123 - DNA, 1260 bp, Artificial Sequence
  derived and/or modified sequence
atgggcaagagactggaccagccccagatgtacccccagtacacctactactacccccactacctgcagaccaagagctacgcccccgccccccaccccatggccccccccagccccagcaccaacagcagcagcaacaacagcagcaacaacagcagcggcgagcagctgagcaagaccaacctgtacatcagaggcctgccccccggcaccaccgaccaggacctgatcaagctgtgccagccctacggcaagatcgtgagcaccaaggccatcctggacaagaacaccaaccagtgcaagggctacggcttcgtggacttcgacagccccgccgccgcccagaaggccgtggccagcctgaaggccaacggcgtgcaggcccagatggccaagcagcaggagcaggaccccaccaacctgtacatcagcaacctgcccatcagcatggacgagcaggagctggagaacatgctgaagcccttcggccacgtgatcagcaccagaatcctgagagacgccaacggcgtgagcagaggcgtgggcttcgccagaatggagagcaccgagaagtgcgaggtggtgatccagcacttcaacggcaagtacctgaagaccccccccggcatccccgcccccagcgagcccctgctgtgcaagttcgccgacggcggccagaagaagagacagaaccagagcaagtacacccagaacggcagaccctggcccagagagggcgaggccggcatggccctgacctacgaccccaccgccgccatccagaacggcttctacagcagcccctacagcatcgccaccaacagaatgatcccccagaccagcatcacccccttcatcgccgccagccccgtgagcacctaccagggcgccgtgatcacccccaccatggaccaccccatgagcatgcagcccgccaacatgatgggccccctgacccagcagatgaaccacctgagcctgggcaccaccggcaccatccagagccaggacagaatcatgatcctgcaccagctgctgtgccagtacatgaccgccgccgcccccatgcagggcacctacatcccccagtacacccccgtgccccccaccgccgtgagcatcgagggcgtggtggccgacaccagcccccagaccgtggcccccagcagccaggacaccagcggccagcagcagcagatcgccgtggacaccagcaacgagcacgcccccgcctacagctaccagcagagcaagccctag

SEQ ID NO: 20124 - protein, 437 aa, Artificial Sequence
  derived and/or modified sequence
MGKRLDQPQMYPQYTYYYPHYLQTKQSYAPAPHPMAPPSPSTNSSSNNSSNNSSGEQLSKTNLYIRGLPPGTTDQDLIKLCQPYGKIVSTKAILDKNTNQCKGYGFVDFDSPAAAQKAVASLKANGVQAQMAKQQEQDPTNLYISNLPISMDEQELENMLKPFGHVISTRILRDANGVSRGVGFARMESTEKCEVVIQHFNGKYLKTPPGIPAPSEPLLCKFADGGQKKRQNQSKYTQNGRPWPREGEAGMALTYDPTAAIQNGFYSSPYSIATNRMIPQTSITPFIAASPVSTYQVQSTSWMPHPPYVMQPTGAVITPTMDHPMSMQPANMMGPLTQQMNHLSLGTTGTIQSQDRIMILHQLLCQYMTAAAPMQGTYIPQYTPVPPTAVSIEGVVADTSPQTVAPSSQDTSGQQQQIAVDTSNEHAPAYSYQQSKP

SEQ ID NO: 20125 - DNA, 1864 bp, Artificial Sequence
  derived and/or modified sequence
atcactacagacagcctggttagagaacaaactgcctcatcccaagtggaccccggcagctgggggaagccaggcaagatctgggaaggctgtgtgtgggtgttttttctacagatctcactcctcgccctttttttttttcctttggtgtgtgttttttgttttgttttgttttttaaaaaaattcttgctgtgttggaactagcgagtggtggagtctctgaagcctcatcagtcaccgggactgtcaggaatagtggtttaagaggaagctcggcctggggcactataccctgtcatccagttccctgcctcggagataaagattccagctacatgggcaaacgcctggatcagccacaaatgtacccccagtacacttactactatcctcattatctccaaaccaagcagtcctatgcaccagctccccaccccatggctcctcccagccccagcacaaacagcagcagcaacaacagcagcaacaacagcagcggggaacagttgagtaaaaccaacctgtacattcgaggcctcccaccaggcaccactgaccaggacctaatcaagctgtgccaaccgtatggaaaaattgtatctacaaaggcaattcttgacaaaaacacaaatcagtgcaaaggttatggttttgtagattttgacagtcctgcagccgcacagaaagcggtagcatctctcaaggcaaatggcgtgcaggcacagatggctaagcaacaagagcaagacccaacaaacctatacatctcaaatctccccatttctatggatgagcaggagcttgagaatatgctgaaaccctttggacatgtcatttccacaagaatactaagagacgctaatggagtcagcagaggtgttggctttgccagaatggagtctactgaaaaatgtgaagtggtaattcaacattttaatggaaaatatctgaaaacaccaccaggcatcccagcccccagtgagcctttgctgtgcaaattcgctgatggaggacaaaagaagcgacagaatcaaagcaaatatacccagaatgggaggccttggcccagggaaggagaggctggcatggctttgacctatgaccccacagctgccatacagaatggattttattcttcaccgtacagtattgcaaccaaccgcatgattccacagacatctatcacgccattcattgctgcttcccctgtctccacataccaggtccagagtacttcatggatgcctcatccgccatacgttatgcaaccaacaggtgctgtgattacaccaaccatggaccatcccatgtcaatgcagccagccaacatgatgggcccactgacacagcagatgaatcacctttcgttgggcacaacaggaacgattcaatcccaagacaggattatgatactccaccagctgttgtgtcagtatatgactgctgctgctcctatgcaagggacctacattcctcagtacacgcctgtgcctccgacagctgtttctattgaaggtgttgttgctgatacctctccccagacagtggcaccttcatcccaggacaccagtggtcagcagcaacagatagcagtggacacatccaacgaacatgcacctgcatattcttaccaacagtctaaaccataaacaggactgaagaatgtctgtctgaatctttgccttgaatgaagaaacttcattgaacaagaagttggcttccagtttgcacagacgtcaatggaatgcatttttttgttgttgttgttgttttttttttagtgttataccttacccaatgaaagcaaagtttttatgtgctgtgcaaatggtcttcatgtggtctgacaatttatttttgcca

SEQ ID NO: 20126 - DNA, 1314 bp, Artificial Sequence
  derived and/or modified sequence
atggggaagaggctggatcagccccaaatgtatcctcagtacacctactactatcctcattacctccaaactaaacaatcatatgcaccggcacctcaccccatggcaccaccgagtcccagtactaactccagtagtaataacagctccaacaattcaagcggcgagcagttgagcaagacaaatctgtacattcggggactgccacctgggactaccgatcaggacctcataaaactctgccagccatacggtaagattgtctcaacgaaggccatcctggacaagaacacaaatcagtgcaagggctacggttttgttgactttgactcacccgccgccgctcagaaggctgtcgctagcctaaaggcaaacggagtgcaagcccagatggccaagcagcaggaacaggaccccacaaacctgtatatctctaacctgcctatcagtatggatgagcaagagcttgagaacatgctcaagcccttcgggcacgtgatctcaacccgtattttgcgtgatgctaacggcgtatcacggggagtcgggttcgcaagaatggaatcaactgaaaaatgcgaggtagtaatccagcactttaacggcaagtatctaaagacacccccaggaatacctgcaccaagcgagcctctgctgtgcaaatttgctgacggggggcaaaagaagcgccagaatcagtcaaagtatacacagaatggccggccttggcccagggaaggggaagctgggatggcccttacgtacgatccgaccgccgccatccagaacgggttttactcgagtccttactctatcgcaaccaatcgaatgattccacaaacctcaattaccccctttatcgccgcatcaccagtgtcaacttaccaggtccagtcaacatcatggatgccccatcccccttacgtcatgcagccaacaggggccgtgatcacgcccaccatggaccacccgatgagtatgcaacccgctaacatgatgggtcctctcacacaacaaatgaaccacctgagcctgggcaccacggggactatccaatcccaggacagaattatgatactgcaccagcttttatgccagtacatgaccgcggctgccccaatgcaggggacgtatatcccccagtacaccccggtgccgcctaccgcagtctcaattgaaggcgtggtcgcggacacatctccacagaccgtcgcacccagttctcaagacaccagcgggcagcagcaacaaatcgccgttgacaccagcaacgaacacgccccagcgtattcttaccagcaatccaaaccttag

SEQ ID NO: 20127 - DNA, 1314 bp, Artificial Sequence
  derived and/or modified sequence
atgggcaagaggctggaccagccccagatgtacccccagtacacctactactacccccactacctgcagaccaagcagagctatgccccagccccccaccccatggccccacccagccccagcaccaacagcagcagcaacaacagcagcaacaacagcagcggggagcagctgagcaagaccaacctgtacatccggggcctgcccccaggcaccacagaccaggacctgatcaagctgtgccagccctacggcaagatcgtgtccaccaaggccatcctggacaagaacaccaaccagtgcaagggctacggctttgtggactttgacagccctgctgctgcccagaaggctgtggccagcctgaaggccaatggagtgcaggcccagatggccaagcagcaggagcaggaccccaccaacctgtacatcagcaacctgcccatctccatggatgagcaggagctggagaacatgctgaagccctttggacatgtgatcagcacccgcatcctgagagatgccaacggggtgtccagaggagtgggctttgccaggatggagagcacagagaagtgtgaggtggtgatccagcacttcaacgggaagtacctgaagaccccacctggcatcccagcccccagcgagcccctgctgtgcaagtttgctgatggcggccagaagaagaggcagaaccagagcaagtacacccagaatggccggccctggccccgggagggggaggccggcatggccctgacctatgaccccacagctgccatccagaatggcttctacagcagcccctacagcatcgccaccaacaggatgatcccccagaccagcatcacccccttcatcgccgccagccctgtgtccacctaccaggtgcagagcacctcctggatgccccaccccccctacgtgatgcagcccactggagctgtgatcacccccaccatggaccaccccatgtccatgcagcctgccaacatgatgggccccctgacccagcagatgaaccacctgagcctgggcaccaccggcaccatccagagccaggaccgcatcatgatcctgcaccagctgctgtgccagtacatgacagctgctgcccccatgcagggcacctacatcccccagtacacccctgtgcccccaacagctgtgtccattgagggcgtggtggccgacaccagcccccagacagtggcccccagcagccaggacaccagcggccagcagcagcagattgctgtggacaccagcaatgagcacgccccagcctacagctaccagcagagcaagccctag

SEQ ID NO: 20128 - DNA, 1314 bp, Artificial Sequence
  derived and/or modified sequence
atgggcaagcggctggaccagccccagatgtacccccagtacacctactattatccccattatttgcagactaaacaatcttatgctccggcgcctcatcctatggccccaccgtcgccaagtaccaactcttcaagtaataattcctccaataatagctctggggagcaattaagcaaaacaaatctttacatcagaggattaccccccggcaccaccgatcaggatctaatcaagctgtgccaaccctacggcaagattgtgagtacaaaagctattctcgacaaaaacacgaatcagtgcaaaggctatggatttgtggactttgattctcccgctgccgcccaaaaggctgtggcttcattgaaagccaacggtgtgcaagcacagatggccaaacaacaagagcaggaccccaccaatctctatatctctaatctgccaatcagtatggacgagcaggagctggagaacatgttgaagccttttggccacgtaatctccactcgcattctgcgggacgcaaacggagtgtctagaggggtcgggtttgccaggatggaatccactgaaaaatgtgaggtagtaattcagcattttaatggaaagtatctgaaaacccctcccggaattcctgctcccagcgaaccgctcctctgtaagttcgccgacggtggccagaaaaaacgtcaaaatcagtccaaatatactcagaacggcaggccgtggccgcgtgagggggaagctgggatggccttgacatacgaccctacagccgctatccagaacggcttctacagttctccctattcgattgcaactaatcggatgattccgcaaaccagtattaccccatttatcgccgccagcccggtgtccacctatcaggttcaatcaaccagttggatgccacacccaccatatgttatgcagccaactggagccgtcattacccccacgatggatcacccaatgagcatgcagcctgcaaatatgatgggtccactgacacagcagatgaaccacctctctctcggtactacgggaaccatacagtcccaggacagaatcatgatcttgcaccaactactgtgtcagtacatgactgccgccgcccctatgcagggaacttacattccgcagtatacccccgtgccccccactgcagtgagcatagaaggcgtcgtggcggataccagcccccagacggttgctcctagtagtcaagatacctctggacagcaacagcagatcgctgttgatacctctaatgagcacgctcccgcctatagttatcagcaatctaaaccgtag

SEQ ID NO: 20129 - DNA, 1314 bp, Artificial Sequence
  derived and/or modified sequence
atggggaaacgacttgatcagccacagatgtatccacagtacacttactactatccccactacctgcaaacaaagcagtcttacgcccctgctccccatccaatggcgcctcccagcccctccactaactctagttcgaataactcttcgaacaattcctccggggaacaattgtcgaaaactaacctatatatccggggactgcctcccggtaccacggatcaggatttgatcaaactgtgtcagccttacggcaagattgtatccaccaaggctatcctcgacaagaatacaaatcaatgtaagggatatggcttcgtggactttgatagccctgccgcagcccagaaggctgtggcctctctcaaagctaatggtgtacaagcacagatggctaaacagcaagaacaggatccaactaacttgtatatatccaatctacccatatctatggacgagcaagagttagagaatatgctgaaacccttcggacatgtgatttcaacacggatcctgcgggatgcaaatggagttagtaggggtgtgggtttcgccaggatggaatctaccgagaagtgtgaggtggtgattcagcactttaatggaaagtatttgaagactccaccaggcattccagcccctagtgagccgctgctctgcaagttcgcagacggagggcaaaaaaaaagacagaaccaaagcaaatatacacagaacgggaggccttggcccagagagggagaagcagggatggccctgacgtatgacccaacggccgcaatccaaaatggtttttattcctcaccatactcaatcgccactaatcggatgatcccgcaaactagcattactccattcattgccgcatctcccgtgtctacctaccaggtgcagagcacatcttggatgccacaccctccatacgttatgcagccaaccggggcagtcatcacccctaccatggatcaccctatgagtatgcagcccgctaatatgatgggcccattgacgcagcagatgaatcacctgtctctgggcactacgggaactattcagagccaagatcggatcatgattctacaccagctgctgtgccagtatatgacagcagcggcaccaatgcagggtacttacattccgcagtatactccggtgcctcctaccgccgtcagtatagagggcgtggttgcagatacatctccacagacagtagccccaagctcccaagacacctccgggcaacagcagcagatcgcggtggacacatccaacgagcatgcacctgcttactcctaccagcagagcaagccttag

SEQ ID NO: 20130 - DNA, 1314 bp, Artificial Sequence
  derived and/or modified sequence
atgggcaagagactggaccagccccagatgtacccccagtacacctactactacccccactacctgcagaccaagcagagctacgcccccgccccccaccccatggccccccccagccccagcaccaacagcagcagcaacaacagcagcaacaacagcagcggcgagcagctgagcaagaccaacctgtacatcagaggcctgccccccggcaccaccgaccaggacctgatcaagctgtgccagccctacggcaagatcgtgagcaccaaggccatcctggacaagaacaccaaccagtgcaagggctacggcttcgtggacttcgacagccccgccgccgcccagaaggccgtggccagcctgaaggccaacggcgtgcaggcccagatggccaagcagcaggagcaggaccccaccaacctgtacatcagcaacctgcccatcagcatggacgagcaggagctggagaacatgctgaagcccttcggccacgtgatcagcaccagaatcctgagagacgccaacggcgtgagcagaggcgtgggcttcgccagaatggagagcaccgagaagtgcgaggtggtgatccagcacttcaacggcaagtacctgaagaccccccccggcatccccgcccccagcgagcccctgctgtgcaagttcgccgacggcggccagaagaagagacagaaccagagcaagtacacccagaacggcagaccctggcccagagagggcgaggccggcatggccctgacctacgaccccaccgccgccatccagaacggcttctacagcagcccctacagcatcgccaccaacagaatgatcccccagaccagcatcacccccttcatcgccgccagccccgtgagcacctaccaggtgcagagcaccagctggatgccccaccccccctacgtgatgcagcccaccggcgccgtgatcacccccaccatggaccaccccatgagcatgcagcccgccaacatgatgggccccctgacccagcagatgaaccacctgagcctgggcaccaccggcaccatccagagccaggacagaatcatgatcctgcaccagctgctgtgccagtacatgaccgccgccgcccccatgcagggcacctacatcccccagtacacccccgtgccccccaccgccgtgagcatcgagggcgtggtggccgacaccagcccccagaccgtggcccccagcagccaggacaccagcggccagcagcagcagatcgccgtggacaccagcaacgagcacgcccccgcctacagctaccagcagagcaagccctag

SEQ ID NO: 20131 - protein, 303 aa, Artificial Sequence
  derived and/or modified sequence
MPEESSPRRTPQSIPYQDLPHLVNADGQYLFCRYWKPTGTPKALIFVSHGAGEHSGRYEELARMLMGLDLLVFAHDHVGHGQSEGERMVVSDFHVFVRDVLQHVDSMQKDYPGLPVFLLGHSMGGAIAILTAAERPGHFAGMVLISPLVLANPESATTFKVLAAKVLNLVLPNLSLGPIDSSVLSRNKTEVDIYNSDPLICRAGLKVCFGIQLLNAVSRVERALPKLTVPFLLLQGSADRLCDSKGAYLLMELAKSQDKTLKIYEGAYHVLHKELPEVTNSVFHEINMWVSQRTATAGTASPP

SEQ ID NO: 20132 - protein, 77 aa, Artificial Sequence
  derived and/or modified sequence
MPEESSPRRTPQSIPYQDLPHLVNADGQYLFCRYWKPTGTPKALIFVSHGAGEHSGRYEELARMLMGLDLLVFAHDH

SEQ ID NO: 20133 - DNA, 912 bp, Artificial Sequence
  derived and/or modified sequence
atgcctgaagagtccagtcccaggcgtacgcctcagtctattccgtaccaggacctccctcacctggtaaatgcagacggccagtacctgttttgtcggtactggaaaccaacaggcacccccaaggctctaatatttgtgagccatggcgccggtgagcacagcggtagatatgaggagctggccaggatgttgatgggtctcgacttactcgtgttcgcccacgaccacgtgggccatggacagagtgagggcgaacgcatggttgtctccgacttccatgtcttcgtcagggatgtgctgcagcacgttgattctatgcaaaaggattaccccggcttgcccgtattcctgctgggtcacagcatggggggagccatcgccattcttacagctgcggagaggcccggacacttcgccgggatggtactgatcagccccttggtgctggctaaccccgagtctgcgaccacattcaaagtgctggcagctaaggttctgaacttggtgctgcccaacctgtcactgggcccaatagactcctccgtattgtcgaggaataagaccgaggtagatatctataactctgatcctctcatatgtcgggcaggcctgaaggtttgttttggaatccagctcctgaatgcagtctcccgggtggagagggcactccccaagctgacagtgccgttcttactcctgcaggggagtgctgaccgcctctgtgatagcaagggcgcatatctgttaatggaactggcaaagagccaagacaagacattaaagatctacgagggggcctatcatgtcctccataaggagctacctgaggtgactaacagcgtattccacgagataaacatgtgggtgagtcaaagaacagccacagcaggaactgctagccccccatag

SEQ ID NO: 20134 - DNA, 912 bp, Artificial Sequence
  derived and/or modified sequence
atgcccgaggagtcatcacctaggcggaccccacagtcaataccataccaggatctgccccacctcgttaacgccgatggccagtacctgttctgcaggtattggaaacctactggtactcctaaggccttgatcttcgtgtcacatggggcgggcgaacacagcggtagatacgaagagcttgctagaatgctcatgggattggacctgctcgtgttcgcacatgaccacgtgggccacggtcaatcagagggtgaacggatggtcgtgtcagatttccatgtcttcgtgcgcgacgtgctccaacacgttgattccatgcagaaagactatcctggtctgccggtttttctgctcggccatagcatgggaggagctatcgctattctgaccgctgcagaacggccaggacatttcgccgggatggtccttatctcacctttggtgctggctaacccagagagcgccactacttttaaggtactcgccgccaaagtcctgaacctggtgctcccgaacctttcgcttggcccgatcgattcttcggtgctgtcaagaaacaaaacagaggttgacatctacaattctgatcccttgatctgccgggcgggcctgaaagtctgctttggcattcaattactgaatgctgtaagtcgcgtggagcgggccctgcccaaactgactgttccttttctgcttctgcagggatctgctgataggctctgcgacagcaagggagcctacttgctaatggagctggcaaagtctcaagataaaactctcaaaatatacgagggcgcctaccatgttctccacaaggagcttccagaggtcacaaactcggtgttccacgaaatcaacatgtgggtttcccagcgcaccgccaccgccgggactgcctcccccccatag

SEQ ID NO: 20135 - DNA, 942 bp, Artificial Sequence
  derived and/or modified sequence
atgaagaccagacctgaggatcccagtagcatgcctgaggaatccagcccccgtcggactcctcagtcgatcccataccaggaccttccccatttggtgaatgcagacggccagtacctcttttgtcgttactggaagcccaccggaacacctaaagccctgatcttcgtgagtcacggcgccggcgaacactccggacggtatgaagaactagctaggatgctgatgggcttggacttgttagttttcgcccatgatcacgtcggacatggacaatcagaaggtgaaaggatggtggttagtgatttccacgtgtttgtgagggatgtgctgcagcacgtggacagtatgcagaaggattatcctggtttaccggtgtttcttctgggacactctatgggtggggcaatagccatactgaccgctgcagaacgcccaggccacttcgcaggtatggtgctgatctctcccttagtgctcgctaatccggagtctgcgaccacatttaaggtgctggcagcaaaagtgttgaacctggtgctgccaaacctgtctttaggcccaatcgacagttctgtcttgtcgagaaacaaaactgaggtcgacatatataactctgatcccctgatttgccgggcgggcctcaaagtttgctttggaattcagctgttgaacgctgtctcgcgtgtggagagggcacttcccaaactcactgtgcccttcttgcttctgcagggctccgctgatagactgtgcgacagcaagggcgcttaccttctaatggagctggctaagagtcaggacaagactttaaagatctatgagggggcttatcacgtgctgcacaaggagttgcccgaggtgacgaatagcgttttccacgaaataaatatgtgggtgagccaaaggactgctacagccggcaccgcctccccgccctag

SEQ ID NO: 20136 - DNA, 912 bp, Artificial Sequence
  derived and/or modified sequence
atgcctgaggagagcagccccaggaggaccccccagagcatcccctaccaggacctgccccacctggtgaatgctgatggccagtacctgttctgccgctactggaagcccaccggcacccccaaggccctgatctttgtgtcccatggagctggggagcacagcggccgctatgaggagctggccaggatgctgatgggcctggacctgctggtgtttgcccatgaccacgtgggccacggccagagcgagggggagaggatggtggtgtctgacttccacgtgtttgtgagagatgtgctgcagcacgtggacagcatgcagaaggactacccaggcctgcctgtgttcctgctgggccacagcatgggcggggccatcgccatcctgacagctgctgagcggcccggccactttgctggcatggtgctgatcagccccctggtgctggccaaccctgagagcgccaccaccttcaaggtgctggccgccaaggtgctgaacctggtgctgcccaacctgagcctgggccccatcgacagctctgtgctgagcaggaacaagacagaggtggacatctacaacagcgaccccctcatctgcagagctggcctgaaggtgtgcttcggcatccagctgctgaatgctgtgtcccgggtggagcgggccctgcccaagctgactgtgcccttcctgctgctgcagggcagcgctgaccggctgtgtgacagcaaaggagcctacctgctgatggagctggccaagagccaggacaagaccctgaagatctatgagggcgcctaccacgtgctgcacaaggagctgcctgaggtgaccaacagcgtcttccacgagatcaacatgtgggtgtcccagaggacagccacagctggaacagccagccccccatag

SEQ ID NO: 20137 - DNA, 942 bp, Artificial Sequence
  derived and/or modified sequence
atgaagaccaggcctgaggaccccagctccatgcctgaggagagcagccccaggaggaccccccagagcatcccctaccaggacctgccccacctggtgaatgctgatggccagtacctgttctgccgctactggaagcccaccggcacccccaaggccctgatctttgtgtcccatggagctggggagcacagcggccgctatgaggagctggccaggatgctgatgggcctggacctgctggtgtttgcccatgaccacgtgggccacggccagagcgagggggagaggatggtggtgtctgacttccacgtgtttgtgagagatgtgctgcagcacgtggacagcatgcagaaggactacccaggcctgcctgtgttcctgctgggccacagcatgggcggggccatcgccatcctgacagctgctgagcggcccggccactttgctggcatggtgctgatcagccccctggtgctggccaaccctgagagcgccaccaccttcaaggtgctggccgccaaggtgctgaacctggtgctgcccaacctgagcctgggccccatcgacagctctgtgctgagcaggaacaagacagaggtggacatctacaacagcgaccccctcatctgcagagctggcctgaaggtgtgcttcggcatccagctgctgaatgctgtgtcccgggtggagcgggccctgcccaagctgactgtgcccttcctgctgctgcagggcagcgctgaccggctgtgtgacagcaaaggagcctacctgctgatggagctggccaagagccaggacaagaccctgaagatctatgagggcgcctaccacgtgctgcacaaggagctgcctgaggtgaccaacagcgtcttccacgagatcaacatgtgggtgtcccagaggacagccacagctggaacagccagccccccatag

SEQ ID NO: 20138 - DNA, 4187 bp, Artificial Sequence
  derived and/or modified sequence
tggcggcgcagacgccgcaccctgtcgccgcgaagccggtcgcgcgcagctcgtcccggccctggcccgccgcaaacgaggatccgctgcgctcggggaacgcgacagcggcgctcgtggccccggacctgaagacccttccagcatgccagaggaaagttcccccaggcggaccccgcagagcattccctaccaggacctccctcacctggtcaatgcagacggacagtacctcttctgcaggtactggaaacccacaggcacacccaaggccctcatctttgtgtcccatggagccggagagcacagtggccgctatgaagagctggctcggatgctgatggggctggacctgctggtgttcgcccacgaccatgttggccacggacagagcgaaggggagaggatggtagtgtctgacttccacgttttcgtcagggatgtgttgcagcatgtggattccatgcagaaagactaccctgggcttcctgtcttccttctgggccactccatgggaggcgccatcgccatcctcacggccgcagagaggccgggccacttcgccggcatggtactcatttcgcctctggttcttgccaatcctgaatctgcaacaactttcaaggtccttgctgcgaaagtgctcaaccttgtgctgccaaacttgtccctcgggcccatcgactccagcgtgctctctcggaataagacagaggtcgacatttataactcagaccccctgatctgccgggcagggctgaaggtgtgcttcggcatccaactgctgaatgccgtctcacgggtggagcgcgccctccccaagctgactgtgcccttcctgctgctccagggctctgccgatcgcctatgtgacagcaaaggggcctacctgctcatggagttagccaagagccaggacaagactctcaagatttatgaaggtgcctaccatgttctccacaaggagcttcctgaagtcaccaactccgtcttccatgaaataaacatgtgggtctctcaaaggacagccacggcaggaactgcgtccccaccctgaatgcattggccggtgcccggctcatggtctgggggatgcaggcaggggaagggcagagatggcttctcagatatggcttgccaaaaaaaaaaaaaaaaaaaaatcagaaattggagaaatccttagcacaattttctaaaaaataacagacatttttgttatacattagactatcagacactggacctaccttaatggttagacactttatgcaaaaaaagagaaaggtcccaggtgattttccacaaagaatgtgctaaaatgtccactgaaaacaaagccaagcctctgccctgcctctcccagctcccacaagggttccaggaattcctggtgttcccaggacaccagactgcaataactggaggcgcctccttcctgcccacccttcgctcacgccccagcgccctctctgaccagcctccgcttggtggccttcctctggccgtgtgatgaggtggttgctgtctccataggggccagctccccagggcagactcacgtgcccctctgaggctcagaaaatgcccagcccttcctcaaaatgagcagccacccatgactttgtgggctccttgttagcctgagaccaggctttgcagaggggcggggggtgaggcttagcccagaaggagaactgagcaggaaaccaaggctcttctctgtcccctgcccttcccctcctgccagggggaggctcaggttggtccccgagtgccgcctgtactcacaaaggctgcctttcctctagagtcactaattttacctgatgctatgagagaatcatattgaagatgaaatgtctaatatataatgtatattttaaagcagagactattttggtggataggtgggagggagcaaggggagtttgagggaatcagagcttgatgctactgtacagaactggacaggttgggccggcagtggtggggccagagggctctgtgctctaggagctaagccagcagcccccgagaggggacttggctgggcctttcctatgggcaaggcccagtgctcttcctgcccaccagggaccatggagcagtggcaccctatggggctatgatccctaggcctgggcctgggcctgcctatggcccagagctaccctgggagtgtcagtgctagcagcacagctacctctggtggcaggagaagagaggcccagcacagcagcaggccaggccttcctgtccaggtctgcatggagcactcggtgacccagagcagggactggaggcacccccagccctgccccaggccacagcaggacaggccgggacaggcctcacccaaggccaaggctggcatcagccaatcattcagagctgaggccctgggcctagcctgcccttctcaggtgccaataccaccccagccctgcccttggcctcactttttcccagcaataagtggggttcaccacccgcctcgggaatactttccccttctaaatgggacttgctgttacctcaggaggctccttagtgcaaatatgaccctggtcagggctttgccaccgttgaagccctgcagaaggtgcaatgtaggggttctggggccacagaggagaggccacttcccaccaggacccccaacatgaagtctaggcctcaggggctcccgcccttcttcctccagcagcgggaactgccactgctctcccaggccctgttctggaggctaaccttggttcctggagagtgtgcccctccaccctccctccagcagccctgatcacaccatgagagccaggaacgggtcaccctgctgaagatcactctgtgccctgggggaggagccaagccctcaccccacaaggggcaggtgggggcttggttgctgacccggcccaagtccccacagagcaccttctgtagctccagcttgtctccctggcttctctttgaaggagaaaaatgtaaaatatgcactgagaaagccagccccgcctgcttagtcagccccggcagcagggcagccatgggaactcaggaaaagcaggaaccctttccaaaagcccagagatgccctgggctcagatctgtaattctcccaggagctgtgatagagcaggccacacaaagtccctacgcctccctgctgcctcccccagatgcatgtggtggcatcaccattccccaaattgaatatcagcatgcggcctgaccagggactctttagatgcatgaatttatttatatgaaggctctcacagagacacacacagcacttcagtagcatttgcattcctggttaaagaatcaccaatatttaaaataaaaactttcctgaaattgggactgtcatgttatccagaagggctggtacatccgcccaccatgtccccctgctgggtcaggagccaacacaggaccctgcgtgtgagcgtgcctgacatctcacgcacggccactccagagccggtccctgtccttggaaagctgtgaagccttgcgttgagttccttctcgatactgacggctccgtgctgacattctgagctctggagtcacaccagcgcaggggcgtggaggaactgaggtttggaaggaatgccaggtctcgcacagcttggcctcgagaaggtgagaggaaggcaaaggccagggaggggacccagagaggcctggcacacaaggcccaagcaccaccgtcaacacagcccagtccatacagaaatgggtttcatgcctgaaaagctttttacagaaagatgccgcctgtagccagtgacagccgcaaccctacaggcctcagttccttgcagaggtgaggggtagagagtcagcctccctcccttccagcagcgacccagcttccctccacttccaggtggtgctgggctcaccgagggagcactggtgggtgctctgaaaacccacaggatcccacctccaggcccacctgggtcccatctcactctcttcttctttcaccaattgctaacatagaccttgttgggatcacgatggcttcacaagccagctgttgggtttgctatgtcactgtggctcagtcacatccctgcgtgtatactgtctgcggggcacatatgtatccatttagagctaaaggaatcagtgtacactacagctaatcctaataaatccgatgttttcgg

SEQ ID NO: 20139 - DNA, 1023 bp, Artificial Sequence
  derived and/or modified sequence
atgaagacaagacctgaagacccttccagcatgccagaggaaagttcccccaggcggaccccgcagagcattccctaccaggacctccctcacctggtcaatgcagacggacagtacctcttctgcaggtactggaaacccacaggcacacccaaggccctcatctttgtgtcccatggagccggagagcacagtggccgctatgaagagctggctcggatgctgatggggctggacctgctggtgttcgcccacgaccatgttggccacggacagagcgaaggggagaggatggtagtgtctgacttccacgttttcgtcagggatgtgttgcagcatgtggattccatgcagaaagactaccctgggcttcctgtcttccttctgggccactccatgggaggcgccatcgccatcctcacggccgcagagaggccgggccacttcgccggcatggtactcatttcgcctctggttcttgccaatcctgaatctgcaacaactttcaaggtccttgctgcgaaagtgctcaaccttgtgctgccaaacttgtccctcgggcccatcgactccagcgtgctctctcggaataagacagaggtcgacatttataactcagaccccctgatctgccgggcagggctgaaggtgtgcttcggcatccaactgctgaatgccgtctcacgggtggagcgcgccctccccaagctgactgtgcccttcctgctgctccagggctctgccgatcgcctatgtgacagcaaaggggcctacctgctcatggagttagccaagagccaggacaagactctcaagatttatgaaggtgcctaccatgttctccacaaggagcttcctgaagtcaccaactccgtcttccatgaaataaacatgtgggtctctcaaaggacagccacggcaggaactgcgtccccaccctgaatgcattggccggtgcccggctcatggtctgggggatgcaggcaggggaagggcagagatggcttctcagatatggcttgc

SEQ ID NO: 20140 - DNA, 912 bp, Artificial Sequence
  derived and/or modified sequence
atgcccgaggagagcagcccccggcggaccccccagagcatcccctaccaggaccttccacacctggtcaatgcagatggtcagtatctgttttgccgctactggaaaccaaccggcacccctaaggctctaatttttgttagtcatggcgccggcgagcactccggcaggtatgaggagctggctagaatgctgatggggctagatctgttggtttttgcccatgatcatgttggccacggtcagtccgagggagaaaggatggttgtcagtgacttccatgtctttgtgcgcgacgttctccagcatgttgactccatgcagaaggactaccccggcttacctgtgttcctcctcggccatagtatggggggggcgatcgctatactaacagcagccgagcgccctgggcattttgctggcatggtgttgattagccccttagtcttagcaaaccccgagtctgccacaacttttaaggtactcgctgccaaggtgttaaatctggtcctccctaacctgagcctggggccaatcgattcaagtgtcctgtcccgcaacaagaccgaagtcgatatatataactccgaccctctcatatgtcgcgctggcctgaaagtgtgttttggcatacagctgttaaacgcagtgtcgcgggtcgagcgcgcgcttccaaaactcacagttccttttctgttgttgcagggttcagctgaccgactctgcgacagcaagggggcctacttattgatggagctggctaagtctcaggataaaaccctgaagatctacgagggcgcttatcacgtcttacacaaagagttaccagaggtaaccaattccgtgttccatgaaatcaatatgtgggtctctcaacgcaccgcaacagctggcaccgcctctcccccttag

SEQ ID NO: 20141 - DNA, 912 bp, Artificial Sequence
  derived and/or modified sequence
atgcccgaggagagcagcccccggcggaccccccagagcatcccctatcaggatctgccccaccttgtaaatgcagatggtcaatatcttttctgccggtattggaaacctaccgggacacccaaggcgttgatattcgtctcccacggcgccggtgagcattcaggccggtatgaggagctcgcccggatgctcatgggcctggacctgttggtgttcgcgcatgaccacgttggtcacggtcaatccgagggggagagaatggtggtgagcgacttccacgtgttcgtgcgagacgtacttcagcacgtggacagcatgcaaaaagattaccccgggctccctgtgttcctgctgggacactccatgggaggcgcgattgcgattcttactgccgccgagcgccccggccatttcgccggaatggttctgatctcgccactggttctcgctaacccagagtcggcaaccacctttaaggtactggccgcaaaagtgcttaatcttgtgctgcccaacctctctttggggcctatcgattcgagcgtattaagccgaaataagacagaggtcgacatttacaactccgatcctctgatatgccgcgctggcctgaaggtttgcttcggcatccagttactgaatgctgtgtctcgtgtggaaagggccctgcccaagctaaccgttcccttcctcctgcttcaggggtcagcagaccgtctgtgcgactcaaagggcgcctacctccttatggagctggcaaaatcccaggacaaaaccctaaagatatatgaaggagcctaccacgtcctgcacaaggaactacctgaagtcacgaattctgtattccacgagatcaatatgtgggtttcacaacgaaccgcgacagccggaactgcgtcaccaccctag

SEQ ID NO: 20142 - DNA, 942 bp, Artificial Sequence
  derived and/or modified sequence
atgaagacccggcccgaggaccccagcagcatgcccgaggagagctctccccgacgcacaccgcagtcaataccctaccaggaccttcctcacctggtgaacgcagacgggcagtacttattctgcagatactggaagcccaccggtacccctaaggctctaatctttgtctcacacggggctggagaacactccggtcgctacgaagagctggccaggatgctgatgggactagacctactggtgtttgcacacgatcacgttggccatggccagagtgaaggggaacggatggtcgtcagtgacttccacgtcttcgtgcgggacgtgctgcaacacgtggacagcatgcagaaagactacccggggctccccgtatttctcctggggcactccatgggtggagctatcgctatcctgaccgctgcagaacgccctggacatttcgctggcatggtgctcattagccctctcgtgctcgctaaccctgagtcggctactacatttaaggtcttggccgccaaggttttgaatctggtcctgcctaacctgtccctcggccctatcgacagcagcgtgttaagccggaacaagacggaagttgatatctataactctgatcccctgatctgtcgcgccggactaaaagtgtgctttggcatccaactccttaacgcagtctcccgtgtcgaacgggccctgcccaaactcactgtgccctttctcttattgcaggggtctgctgatcgtttgtgtgatagcaagggagcttacctcctgatggaattagctaaatcccaggacaaaacactgaagatctatgagggcgcttatcacgtcctgcataaggaactgcccgaggtcaccaattcagtgttccacgaaatcaacatgtgggtgtcacagcgaaccgccaccgccggaaccgcctcgcccccatag

SEQ ID NO: 20143 - DNA, 912 bp, Artificial Sequence
  derived and/or modified sequence
atgcccgaggagtcttcgccaaggagaaccccacagtcgatcccatatcaggatctgccacacctggtaaacgccgatgggcaatacctgttttgtaggtactggaaaccaacagggacgcccaaggctctgattttcgtgagccatggcgctggtgagcactctgggcgatatgaggagttagcaagaatgctcatgggcctcgatctcctggtctttgcccacgaccatgtgggacacggacagtccgaaggcgaaagaatggtcgtaagtgatttccacgtgtttgtgagagatgtcttgcaacacgtcgatagtatgcagaaggattatccgggtttgcccgtatttctgcttgggcattccatgggaggagcgatcgccattctaaccgctgctgagcgtccagggcactttgcaggcatggtgctgatttcaccactggtgttggccaacccagaaagcgccactaccttcaaagtactggccgctaaggtactaaacctggtccttcctaacctgtctctgggtccaatagattcttccgtgttgagcagaaataagaccgaagtcgacatctacaattctgatccgttgatctgtcgggctggattaaaggtatgcttcggaattcagcttttaaatgccgtgtctagagtcgaacgagctctgcctaagctgaccgtgccgtttctgctgttacaggggagtgccgaccggttgtgtgattctaaaggcgcttacctcttaatggagttggctaagtctcaggataagactctcaagatctacgaaggagcctatcacgtcctccataaggagctgcccgaagtcacaaattctgtgtttcatgaaataaacatgtgggtttcccagcggactgccacagccggaacagcttctccaccatag

SEQ ID NO: 20144 - DNA, 912 bp, Artificial Sequence
  derived and/or modified sequence
atgcccgaggagagctccccgaggcgaacacctcagtctattccttatcaggatttaccacatctagtgaacgctgacggtcagtacctcttttgcaggtattggaagccaacaggaaccccaaaggcgttgatattcgtctcacatggcgcaggtgagcactctggcagatacgaggaattagccaggatgttaatgggccttgacttgctggtattcgctcacgatcatgtggggcacggacaatcagaaggcgagcgtatggtggtatcagatttccacgttttcgtgcgggacgttctacagcacgtggacagtatgcagaaggactatcccggactgcccgtctttcttctcggacattccatgggaggtgctatcgctattttaacggctgcggaacgacctggtcactttgccggaatggttttgatctctccgttggttctcgccaatcccgaatctgccacaactttcaaggtactggccgctaaggtgctgaatctcgtgttgccaaacttatctttaggacccatcgattcatctgtgctgtctagaaataagactgaagtggacatctataattccgatcctctcatctgcagagctggactcaaggtctgtttcggaattcagctcttgaacgccgtcagcagagtggagagggccctccccaagttaacggtgccgttcctcctgctacagggttccgcagacaggctgtgcgactcgaaaggcgcttacctgctcatggagctggccaaaagtcaggataagactttgaagatctacgaaggagcataccacgtgttacacaaggagctgcctgaagtcaccaacagcgtgttccacgaaataaatatgtgggtgtctcagagaactgctaccgccggaaccgcgtctcctccttag

SEQ ID NO: 20145 - DNA, 942 bp, Artificial Sequence
  derived and/or modified sequence
atgaagaccagacccgaagacccaagtagcatgcctgaggagagtagccccagacgtaccccgcagtccatcccctaccaggatttgccccacttggtgaatgccgatggacaatatctgttctgtcgttactggaaaccaacgggaactccaaaggctctcatattcgtgtctcatggtgctggggaacattcgggacggtatgaagagctggctagaatgctgatgggcctggatctgttagtgttcgcccacgaccacgtgggtcacggacaatccgagggcgaaagaatggttgtatccgactttcatgtgttcgtgcgcgatgttcttcaacacgtggacagtatgcagaaggactaccccggactccctgtcttcctgctggggcacagtatgggcggagcaatcgccatcctgacagccgcagaacggcctggccatttcgctggcatggtgttaatctctcccttggtgctggccaatcccgaatctgccacaactttcaaagttttggcagccaaagtgcttaacctggtgctgcctaacctgtcactgggcccaatcgactccagcgtactgtctcggaataaaacagaggttgatatttacaactctgaccccctgatctgtcgggcaggtctgaaggtgtgcttcgggatacagttgctgaacgccgtaagtcgggttgaacgggcattacctaagctgaccgtgccgtttctgctcctgcaggggtccgccgatcggctttgtgactccaaaggcgcttatcttctgatggaacttgccaaatcgcaagacaagaccctcaaaatttacgaaggtgcgtaccacgttttgcataaggaactgcctgaggtcacgaactccgttttccatgaaattaatatgtgggtatcacaaaggaccgcgacagccggaactgcatcgccaccatag

SEQ ID NO: 20146 - DNA, 912 bp, Artificial Sequence
  derived and/or modified sequence
atgcccgaggagagcagccccagaagaaccccccagagcatcccctaccaggacctgccccacctggtgaacgccgacggccagtacctgttctgcagatactggaagcccaccggcacccccaaggccctgatcttcgtgagccacggcgccggcgagcacagcggcagatacgaggagctggccagaatgctgatgggcctggacctgctggtgttcgcccacgaccacgtgggccacggccagagcgagggcgagagaatggtggtgagcgacttccacgtgttcgtgagagacgtgctgcagcacgtggacagcatgcagaaggactaccccggcctgcccgtgttcctgctgggccacagcatgggcggcgccatcgccatcctgaccgccgccgagagacccggccacttcgccggcatggtgctgatcagccccctggtgctggccaaccccgagagcgccaccaccttcaaggtgctggccgccaaggtgctgaacctggtgctgcccaacctgagcctgggccccatcgacagcagcgtgctgagcagaaacaagaccgaggtggacatctacaacagcgaccccctgatctgcagagccggcctgaaggtgtgcttcggcatccagctgctgaacgccgtgagcagagtggagagagccctgcccaagctgaccgtgcccttcctgctgctgcagggcagcgccgacagactgtgcgacagcaagggcgcctacctgctgatggagctggccaagagccaggacaagaccctgaagatctacgagggcgcctaccacgtgctgcacaaggagctgcccgaggtgaccaacagcgtgttccacgagatcaacatgtgggtgagccagagaaccgccaccgccggcaccgccagccccccctag

SEQ ID NO: 20147 - DNA, 942 bp, Artificial Sequence
  derived and/or modified sequence
atgaagaccagacccgaggaccccagcagcatgcccgaggagagcagccccagaagaaccccccagagcatcccctaccaggacctgccccacctggtgaacgccgacggccagtacctgttctgcagatactggaagcccaccggcacccccaaggccctgatcttcgtgagccacggcgccggcgagcacagcggcagatacgaggagctggccagaatgctgatgggcctggacctgctggtgttcgcccacgaccacgtgggccacggccagagcgagggcgagagaatggtggtgagcgacttccacgtgttcgtgagagacgtgctgcagcacgtggacagcatgcagaaggactaccccggcctgcccgtgttcctgctgggccacagcatgggcggcgccatcgccatcctgaccgccgccgagagacccggccacttcgccggcatggtgctgatcagccccctggtgctggccaaccccgagagcgccaccaccttcaaggtgctggccgccaaggtgctgaacctggtgctgcccaacctgagcctgggccccatcgacagcagcgtgctgagcagaaacaagaccgaggtggacatctacaacagcgaccccctgatctgcagagccggcctgaaggtgtgcttcggcatccagctgctgaacgccgtgagcagagtggagagagccctgcccaagctgaccgtgcccttcctgctgctgcagggcagcgccgacagactgtgcgacagcaagggcgcctacctgctgatggagctggccaagagccaggacaagaccctgaagatctacgagggcgcctaccacgtgctgcacaaggagctgcccgaggtgaccaacagcgtgttccacgagatcaacatgtgggtgagccagagaaccgccaccgccggcaccgccagccccccctag

SEQ ID NO: 20148 - protein, 855 aa, Artificial Sequence
  derived and/or modified sequence
MSAPSEEEEYARLVMEAQPEWLRAEVKRLSHELAETTREKIQAAEYGLAVLEEKHQLKLQFEELEVDYEAIRSEMEQLKEAFGQAHTNHKKVAADGESREESLIQESASKEQYYVRKVLELQTELKQLRNVLTNTQSENERLASVAQELKEINQNVEIQRGRLRDDIKEYKFREARLLQDYSELEEENISLQKQVSVLRQNQVEFEGLKHEIKRLEEETEYLNSQLEDAIRLKEISERQLEEALETLKTEREQKNSLRKELSHYMSINDSFYTSHLHVSLDGLKFSDDAAEPNNDAEALVNGFEHGGLAKLPLDNKTSTPKKEGLAPPSPSLVSDLLSELNISEIQKLKQQLMQMEREKAGLLATLQDTQKQLEHTRGSLSEQQEKVTRLTENLSALRRLQASKERQTALDNEKDRDSHEDGDYYEVDINGPEILACKYHVAVAEAGELREQLKALRSTHEAREAQHAEEKGRYEAEGQALTEKVSLLEKASRQDRELLARLEKELKKVSDVAGETQGSLSVAQDELVTFSEELANLYHHVCMCNNETPNRVMLDYYREGQGGAGRTSPGGRTSPEARGRRSPILLPKGLLAPEAGRADGGTGDSSPSPGSSLPSPLSDPRREPMNIYNLIAIIRDQIKHLQAAVDRTTELSRQRIASQELGPAVDKDKEALMEEILKLKSLLSTKREQITTLRTVLKANKQTAEVALANLKSKYENEKAMVTETMMKLRNELKALKEDAATFSSLRAMFATRCDEYITQLDEMQRQLAAAEDEKKTLNSLLRMAIQQKLALTQRLELLELDHEQTRRGRAKAAPKTKPATPSVSHTCACASDRAEGTGLANQVFCSEKHSIYCD

SEQ ID NO: 20149 - DNA, 2568 bp, Artificial Sequence
  derived and/or modified sequence
atgtcagctcctagcgaggaagaggaatatgctaggctcgtgatggaagctcagccagaatggctgagagctgaagtgaaaaggctctcgcacgagttggccgagactactagagagaagatccaggccgccgagtacggactcgccgtgttggaagaaaagcatcaactgaagttacagtttgaggagctcgaggtggattacgaagccatcagaagtgaaatggaacaattgaaagaagctttcggtcaggcgcacacgaaccataaaaaagtagcagccgatggggaatctagagaagagtctctgattcaggagagtgcttctaaagaacaatattacgtgaggaaggttttagaactccagaccgaactcaaacagctaagaaacgtattaacaaatactcagagcgaaaatgagcggctcgcatctgtggcacaggagctgaaagaaatcaatcagaacgtggaaattcagagaggacggctgcgtgacgacatcaaagagtacaaattcagagaagctcggttactgcaggattacagcgagctggaagaagagaatatctcacttcagaagcaagtcagcgtgttgaggcagaaccaagtggagtttgaggggctaaaacacgagattaagcggctggaagaggagaccgagtacttgaactcacaactggaagacgctatccgcttaaaggaaatctccgagcggcagcttgaggaagctctggagaccctgaagaccgagcgggagcaaaagaatagcctccggaaggaactcagccactacatgtccatcaacgactctttctacactagccatctccatgtgtcactcgacggactgaagttctccgacgatgccgctgaaccgaacaacgacgctgaggccttggtaaatggatttgagcacggtgggcttgctaagcttcctctggataacaagacgtccacacctaagaaggaaggactggcacctccgtccccatcactggtctctgaccttctttccgagctgaacatcagcgaaatacaaaagttgaagcagcaactgatgcagatggaacgagaaaaggccgggctgttggctacgctgcaggacacccaaaagcaacttgagcatactagaggatcccttagtgagcagcaagagaaggtgacgcggctgacggagaatctgagtgccctgcggagattgcaggcatccaaggagaggcagaccgccttagacaatgagaaagatcgcgactcacatgaggatggcgactattacgaagtggacatcaacggacctgaaatcctcgcatgcaagtaccacgttgcagttgccgaggcaggagaacttagagaacaactaaaggccctaagatctacacacgaggcgagggaagctcagcacgctgaggagaaagggcgatacgaagccgagggacaggctctgaccgaaaaggtctccttactcgagaaggcgtcgagacaggatcgcgagctcctcgccagacttgagaaagagctgaaaaaggtctctgatgtagctggcgagacccagggatccctgtccgttgctcaggacgagctggtgaccttctctgaggaattagctaatctgtaccaccatgtgtgcatgtgcaataatgagactcctaacagagtcatgctagactattatcgagaagggcagggcggcgccggccggacctcccccggtggccggacatcgcctgaggctagagggcgtagaagccctattctgctccctaagggcctgctagcgccggaggctggccgtgcagacggagggaccggagattcctctccttctccgggatcgtctttgcccagtccgctgagcgatcccagacgggagccaatgaatatctataatttgatcgcaatcatccgagatcagatcaaacacctgcaggccgccgtcgacagaaccactgaactgagccgacagcggatcgcctcccaggagctgggacccgctgtcgacaaagacaaggaggccctgatggaggaaatcttgaaactcaaaagtctcctttcaacaaagagggaacagattacaacactgcgtaccgttctgaaggcaaacaaacagacagcagaggtggcccttgccaatctgaagtccaaatatgagaatgagaaagcaatggtgactgaaactatgatgaagcttaggaatgaactgaaggcgctcaaggaggacgcagcaaccttttccagcctgcgcgccatgtttgcaaccaggtgtgacgaatatattacgcagttagacgagatgcaaaggcaactagccgccgcggaggacgagaagaaaaccctaaacagcctcctccggatggccattcagcaaaaactcgccctcacgcagcggcttgaactgctggagctcgatcatgagcagacgagaagggggagggcaaaggccgcccctaagactaaacctgcgactccctccgtgagtcatacttgtgcttgcgctagcgaccgtgcagagggcactggtctcgctaatcaggtattctgtagcgagaaacattctatttactgcgactag

SEQ ID NO: 20150 - DNA, 2568 bp, Artificial Sequence
  derived and/or modified sequence
atgtctgcccccagcgaggaggaggagtatgcccggctggtgatggaggcccagcctgagtggctgcgggcagaggtgaagaggctgagccatgagctggccgagaccacccgggagaagatccaggccgcagaatatggcctggccgtgctggaggagaagcaccagctgaagctgcagtttgaggagctggaggtggactatgaggccatccgctctgagatggagcagctgaaggaggccttcggccaggcccacaccaaccacaagaaggtggccgcagatggagagagccgggaggagagcctcatccaggagagcgccagcaaggagcagtactacgtgaggaaggtgctggagctgcagacagagctgaagcagctgagaaatgtgctgaccaacacccagagtgaaaatgaaaggctggcctctgtggcccaggagctgaaggagatcaaccagaatgtggagatccagaggggccgcctgagagatgacatcaaggagtacaagttccgggaggcccggctgctgcaggactacagcgagctggaggaggagaacatcagcctgcagaagcaggtgtctgtgctgcggcagaaccaggtggagtttgagggcctgaagcatgagatcaagaggctggaggaggagacagagtacctgaacagccagctggaggatgccatccggctgaaggagatcagcgagcggcagctggaggaggccctggagaccctgaagacagagcgggagcagaagaacagcctgaggaaggagctgagccactacatgagcatcaatgacagcttctacaccagccacctgcacgtgtccctggatggcctgaagttcagtgatgatgctgctgagcccaacaatgatgctgaggccctggtgaatggatttgaacatggaggcctggccaagctgcccctggacaacaagaccagcacccccaagaaggagggcctggccccacccagccccagcctggtgtctgacctgctgtctgagctgaacatcagcgagatccagaagctgaagcagcagctgatgcagatggagcgggagaaggccggcctgctggccaccctgcaggacacccagaagcagctggagcacacccggggcagcctgtctgagcagcaggagaaggtgacccggctgacagagaacctgagcgccctgcggcggctgcaggccagcaaggagcggcagacagccctggacaatgagaaggaccgggacagccatgaagatggagactactatgaggtggacatcaatggacctgagatcctggcctgcaagtaccacgtggccgtggccgaggccggggagctgcgggagcagctgaaggccctgcggagcacccatgaggcccgggaggcccagcacgccgaggagaagggccgctatgaggccgagggccaggccctgacagagaaggtgtccctgctggagaaggccagccggcaggaccgggagctgctggcccggctggagaaggagctgaagaaggtgtctgatgtggccggggagacccagggcagcctgtctgtggcccaggatgagctggtgaccttcagcgaggagctggccaacctgtaccaccacgtgtgcatgtgcaacaatgagacccccaacagagtgatgctggactactaccgggagggccagggcggggccggccgcaccagccctgggggccgcaccagccctgaggcccggggccgccgcagccccatcctgctgcccaagggcctgctggcccctgaggccggccgggcagatggcggcaccggggacagcagccccagccctggcagcagcctgcccagccccctgagtgacccccggcgggagcccatgaacatctacaacctgattgccatcatccgggaccagatcaagcacctgcaggccgctgtggacaggaccacagagctgagccggcagagaattgccagccaggagctgggccctgctgtggacaaggacaaggaggccctgatggaggagatcctgaagctgaagagcctgctgagcaccaagcgggagcagatcaccaccctgaggacagtgctgaaggccaacaagcagacagctgaggtggccctggccaacctgaagagcaaatatgaaaatgagaaggccatggtgacagagaccatgatgaagctgagaaatgagctgaaggccctgaaggaggatgctgccaccttcagcagcctgcgggccatgtttgccacccgctgtgatgagtacatcacccagctggatgagatgcagaggcagctggccgctgctgaagatgagaagaagaccctgaacagcctgctgaggatggccatccagcagaagctggccctgacccagaggctggagctgctggagctggaccacgagcagacccggcggggccgggccaaggccgcccccaagaccaagccagccaccccatctgtgagccacacctgtgcctgtgccagtgacagagctgagggcaccggcctggccaaccaggtgttctgcagcgagaagcacagcatctactgtgactag

SEQ ID NO: 20151 - DNA, 2568 bp, Artificial Sequence
  derived and/or modified sequence
atgagcgcccccagcgaggaggaggagtacgcccggctggtgatggaggcccagcctgagtggctgcgggcagaagttaagagattatcccatgagctagccgaaacaaccagggagaagatccaggcggcggagtatggcttggcggttctggaagagaaacaccagctaaaattacagttcgaggagttagaagtcgactatgaagccatacgctcagagatggagcaactgaaggaggccttcggtcaggcccataccaaccacaagaaagtggccgctgatggtgaatccagggaagaaagcctgatccaagagagcgccagcaaggaacagtattatgtccggaaggttctcgagctgcaaaccgagctgaagcagctgcggaatgttctaactaacacacaaagcgagaacgaacggctggccagtgtggcgcaggagttgaaagaaattaaccagaatgttgagattcagcgaggccgcctccgtgacgatatcaaagagtataagttccgtgaagctcgcctcctgcaggactacagcgaacttgaggaggaaaacatctcactgcaaaaacaagtctctgtattaaggcaaaatcaagtagaattcgaggggcttaagcacgagatcaaacgattggaggaggaaacagagtatctcaactctcaactagaggacgctattcgcctgaaggagatttctgaacgccaactggaggaggctctcgaaaccctgaagacggaaagggaacaaaagaactctctacggaaagaactttcccactacatgtcaatcaacgactcattctacacaagtcacctccacgtgagcctcgacggtctgaagttttctgacgacgccgcggagcccaacaatgacgctgaggctttggtcaacgggtttgagcacggtggtctggccaaactgcctttggataacaagacgtctactccgaaaaaagaaggcctcgcaccaccaagccctagcctggtgagcgacctgttgagtgagttaaacatctcagaaattcagaagctgaagcaacagcttatgcaaatggagcgcgaaaaagccgggctcctggccacactgcaggatacacagaaacagctggagcacaccagaggcagtctttctgagcagcaggagaaagtgactagattgaccgagaatttatctgcgttgagacggttgcaagcttccaaggagcggcagacggccttagacaatgaaaaggatcgggattcccatgaggatggagactattacgaagtcgatatcaacggtccggagatccttgcctgcaaataccacgtggccgtggccgaagctggtgaacttcgagaacaacttaaggcattgcgcagtacccacgaggctagggaggcccagcacgctgaagaaaaggggcggtacgaggccgaaggccaagcccttacggaaaaggtttctctgctggagaaggcatcccggcaagatagagagctgctcgctagactggaaaaagagctgaaaaaagtgtccgatgtggcaggagaaacccagggatcgttgagcgtcgcgcaggatgagctcgttacgttttctgaggaacttgcgaacctttaccatcacgtttgcatgtgtaacaacgagactcccaatcgtgtgatgctcgactattatcgtgaaggtcaaggaggagcagggcggacatctcctggcggccgaacatcccctgaggcgagaggacggcgctcccccatccttttacccaaggggctgttggcacctgaagctggccgagccgatggcggcacgggagactcctcccccagtcctggctcatctctgccgagcccactctcagacccgagaagagaacctatgaatatatataatctcattgccatcatcagagaccagattaaacatctgcaggctgccgtcgacaggacgactgagctctcgagacagcggatcgcatcccaggagctgggtcctgctgtcgacaaggataaggaggcactgatggaagaaatcctcaaattgaaaagcctcctgagcacaaagcgggaacaaataactactctgcgcacagtcctgaaggctaacaaacaaactgccgaggtggctcttgccaatctcaagtccaagtatgaaaacgaaaaagctatggttactgaaacaatgatgaagctcaggaacgagctgaaagcccttaaagaagacgcagcaacattttcctctctcagggcaatgtttgctacccgatgtgacgagtatatcacccagctggatgaaatgcaaagacaactggcagccgcagaagacgaaaaaaaaacacttaatagcctactgaggatggccattcagcagaaattggctctgacccagcggcttgagctgcttgagcttgatcatgaacaaacccgtcggggcagggctaaggcggctccaaagactaagcctgctaccccctccgtgtcccacacatgtgcttgcgctagcgaccgggctgagggcaccgggctcgccaatcaggtgttctgcagcgagaaacacagcatttactgcgactag

SEQ ID NO: 20152 - DNA, 2568 bp, Artificial Sequence
  derived and/or modified sequence
atgtctgccccaagtgaagaggaggaatatgccaggcttgtgatggaagcacagccagagtggctgcgcgcagaagtcaaacggctgagccacgaactggccgagacaacaagggagaaaatacaagccgctgaatatggactcgccgtcttagaagaaaagcaccaactgaagttgcagttcgaggaactggaggtcgattacgaagccatccgtagcgagatggaacagctgaaagaggctttcggccaggcccatacaaaccacaagaaggtagccgctgacggagagtctcgagaagaatccttgattcaggagagtgcttctaaagaacagtactacgtaaggaaagtgctggagctccaaacagagctcaagcaattaagaaacgttctcacaaacacccagagcgaaaacgaacggctcgctagcgtggcccaagagctcaaagaaatcaaccagaatgtggaaatccagcgcggaaggttaagggacgacataaaagaatacaaatttcgggaggcaagacttctgcaagattattccgaattggaagaagaaaatatctcacttcaaaagcaggtgagcgtcctacgacagaaccaggtagagttcgaggggctcaaacacgaaatcaagcggctcgaagaagagaccgaataccttaatagccagctggaagacgcaattaggttaaaagagatcagtgaacgtcagttagaagaagccctggaaacactcaagacggagagggaacagaagaattccttgaggaaggagcttagtcactacatgtctattaacgactcattttatacatcccacctacatgtgagcttggacggcctgaaattctctgatgatgcagccgaaccaaataacgacgcagaggcgcttgtaaacgggttcgagcatggcggtctggcaaagttgccacttgacaacaagacgtctactcccaaaaaagaaggcttagcaccgccttccccttcgcttgtttctgacttgctgagtgagctcaatatcagcgagattcagaaacttaagcagcagcttatgcagatggagagagaaaaggcaggcttgttggcaaccctacaggatacgcaaaagcagttggagcatactcgcggtagtctgtctgagcagcaggagaaggtgacaagactcactgaaaacttaagcgcccttagaaggctacaggcttccaaagagagacagacagcactggacaacgagaaagaccgggatagccacgaggatggggactattacgaagtggatattaacggccctgagatcctggcctgtaagtaccacgtcgccgtggcggaagcaggagagttgagagaacagttgaaggcgctgaggagtacacacgaggcacgcgaagcacagcacgcggaggagaagggtagatacgaagctgagggtcaggcgctgacagaaaaagtctcactcttagaaaaggccagccgccaagatcgcgagttgctcgcgagactcgaaaaggagcttaagaaggtgtctgacgtggccggagagactcaggggagtttatcggtggcccaggacgaactagttacgttttccgaggaattggccaacctgtaccatcacgtgtgtatgtgcaataacgaaactcccaaccgagttatgcttgattactatcgggagggacaaggaggtgcagggcgtacctctcctgggggaaggacaagcccagaagcacgtgggaggcggtcccctatcctactgcctaaagggctgttggctcctgaagctggcagggccgatgggggaacgggggacagctccccctcaccgggatcctccctccccagccctctgagcgatccacggcgagagcctatgaacatttataatctcatcgccattatacgtgatcagataaaacacctgcaggcggctgttgatagaacaaccgagctctcaaggcaacgcattgccagccaggaacttggacctgctgtggataaagacaaggaggccctgatggaagaaatactgaagctgaaatccttactcagcaccaaaagagagcaaataactacgctcaggactgtactgaaagcaaacaaacaaactgctgaggtagcactcgccaacctgaagtcaaagtatgagaacgagaaagctatggtgacagaaactatgatgaaactgcgaaatgagctgaaagccctcaaagaggacgctgccaccttctcttccctcagagcgatgttcgcaactcgctgtgatgagtatattacacagctggacgagatgcaacggcagttagctgccgcagaggacgaaaaaaagaccctgaactctctcctccgcatggctatccagcagaagttagctttgacccagcggttggagttattggagctggatcacgagcagactcgccgaggtcgggcaaaagccgcacccaagactaagcctgctactccctcggtttcccacacctgcgcgtgtgcctccgatcgcgctgaaggcaccgggctggccaaccaagtcttctgttccgagaagcactcaatctactgtgactag

SEQ ID NO: 20153 - DNA, 6427 bp, Artificial Sequence
  derived and/or modified sequence
gcggcggcggctgaggagggcccggcctgcgagagcctcagtgggagccggctcagccctcggccaccatgtcggcgccgtcggaggaggaggagtacgcgcggctggtgatggaggcgcagccggagtggctgcgcgccgaggtgaagcggctgtcccacgagctggccgagaccacgcgtgagaagatccaggcggccgagtacgggctggcggtgctcgaggagaagcaccagctcaagctgcagttcgaggagctcgaggtggactatgaggctatccgcagcgagatggagcagctcaaggaggcctttggacaagcacacacaaaccacaagaaggtggctgctgacggagagagccgggaggagagcctgatccaggagtcggcctccaaggagcagtactacgtgcggaaggtgctagagctgcagacggagctgaagcagttgcgcaatgtcctcaccaacacgcagtcggagaatgagcgcctggcctctgtggcccaggagctgaaggagatcaaccagaatgtggagatccagcgtggccgcctgcgggatgacatcaaggagtacaaattccgggaagctcgtctgctgcaggactactcggaactggaggaggagaacatcagcctgcagaagcaagtgtctgtgctcagacagaaccaggtggagtttgagggcctcaagcatgagatcaagcgtctggaggaggagaccgagtacctcaacagccagctggaggatgccatccgcctcaaggagatctcagagcggcagctggaggaggcgctggagaccctgaagacggagcgcgaacagaagaacagcctgcgcaaggagctgtcacactacatgagcatcaatgactccttctacaccagccacctgcatgtctcgctggatggcctcaagttcagtgacgatgctgccgagcccaacaacgatgccgaggccctggtcaatggctttgagcacggcggcctggccaagctgccactggacaacaagacctccacgcccaagaaggagggcctcgcaccgccctcccccagcctcgtctccgacctactcagtgagctcaacatctctgagatccagaagctgaagcagcagctgatgcagatggagcgggaaaaggcgggcctgctggcaacgctgcaggacacacagaagcagctggagcacacgcggggctccctgtcagaacagcaggagaaggtgacccgcctcacagagaatctgagtgccctgcggcgcctgcaggccagcaaggagcggcagacagccctggacaacgagaaggaccgtgacagccatgaggatggggactactacgaggtggacatcaacgggcctgagatcttggcctgcaagtaccatgtggctgtggctgaggctggcgagctccgcgagcagctcaaggcactgcgcagcacgcacgaggctcgtgaggcccagcacgccgaggagaagggccgctatgaggctgagggccaggcactcacggagaaggtctccctgctagagaaggccagccgccaggaccgcgagctgctggcccggctggagaaggagctaaagaaggtgagcgacgtcgccggcgagacacagggcagcctgagtgtggcccaggatgagctggtgaccttcagtgaggagctggccaatctctaccaccacgtgtgcatgtgcaacaatgagacacccaaccgtgtcatgctggactactaccgcgagggccagggcggggccggccgcaccagtcccgggggccgcaccagccccgaggcgcgtggccggcgctcacccatcctcctacccaaggggctgctggctcctgaggcgggccgagcagatggtgggacgggggacagcagcccctcgcctggctcctcactgccatcacccctgagtgacccacgccgggagcccatgaacatctacaacctgatcgctatcatccgtgaccagatcaagcacctgcaggcagccgtggaccgcaccacggagctgtcacgccagcgcattgcctctcaggagctgggccccgccgtggacaaggacaaggaagcgcttatggaggagatcctcaagctgaagtcgctgctcagcaccaagcgggagcagatcaccacgctgcgcactgtgctcaaggccaacaagcagacggccgaggtggcccttgccaacctgaagagcaagtatgagaatgagaaggccatggttaccgagaccatgatgaagctgcgcaatgagctcaaggccctcaaggaggacgcagccaccttctcctcgctgcgtgctatgtttgccaccaggtgtgacgagtacattacacagctggatgagatgcagcggcagctggcggctgctgaggacgagaagaagacgctgaactcgctgctgcgcatggccatccagcagaagctggcgctgacccagcggctggagctgctcgagctggaccatgagcagacccggcgtggccgtgccaaagccgccccgaagaccaagccagccacaccgagcgtaagtcacacctgtgcctgtgccagcgacagggccgagggcaccgggctggccaaccaggtgttctgcagcgagaagcacagcatttactgtgattaggggctgtggggcgccgcacgctgcagctaacatctgcttcacctcaactaacccagcagcagcgggacggcggtgctaggtcaatcttaacgtgactaatgcacagagggtaggagtctagccgaggcgccatggggcgttgcatcagcaggacacttgtgagagctttgtgtcgcttctcactcctcaaagccccctcaggagcacccagtcctcagctgctctcttaggtgggggtcagaggtggggatagagctgcacattcttgcagcagatgtgtgatgaaagcatcttctaagccctgcgcacccgtggggaaacccaagggaggagtcctggtcctgctccctcagcacccaaaaggggcagaacctgagttgagacttgcatgttcctcgcatgtgtctaatgtcagcactagaaagcagttttaggaggttccagcctgcagcataggtacgacctcagaggatggctttgcacttggcatagtttcatggaaaggagtacgttgtagtttatgcagtatctgactgcaaatcatattcaggaaagaagtgcagaatttcttccccaagcccagagaagagcagccctgagcccctgtattctgctggccagacacacatggcacagacacagctgaccataacccaggaatccagagctcggtttctcatttctgagatcaggatgcttgtatagtggcctgtgaggtgacagattggcagggcccaaggccccaggttttcatttttcatgagaaaagctttccaagtgcctggccagaccttggtccttagtgcagagcccgtccttttgtacttggggtgaccccagcagccaattatccggccttccatagggggttcagtcccaaagacatggggctttgaaaaccctagcctgaagtctgagccaccaagggcttggctgggttggacacccacaggtgtatccagagcccagcccggtgctgggaaagctttgcatagggccagggccacttgtcaggattcacaggtaggagatgtttaggtctctttatttagtgcaatctgggggatggcaacagagaaagaggaaaggtagctgtagggttctcccatttccagaggctccatccacacctgccttcccacattctgagcagaacttttctcagtacttttttcccgatcaccctgtgggaccagctggacctgaggctgcagtcttctctcctgcaggctgcttgccttgtctctcatgcggaagaggcattcgagttacctggtgagagaccgtgttgccccctcccacagctctctgccctgcgcgttcttccctttggtgccgagtatgtttcggtcccctccagactccaggacacgcccatgtatgtcccctgcgtgttcatcctgggcccagatccccctgccccagcaagactcgcagtgggatggctgctggcatgcccaccctgcatgcgctttgccctctccttgcaagcctggcacatagcttctctccatactcctaagggactttgcagacacccaagccactgggacccctgctaacacatgcaggtcttctcttctgccaactaacgtgctcgcgccctcccagcacgtggagagcttcaattgtcagataaacaggaagcgacagatgaccgctttctaacgctctcttttctcccgttttcagctgtagagtagctgccaggaggacttggccacccggccctgtcacactgcagccccttccccttccctctcgtggcccacaaggaggaaggaagggcaacctaaaagcccacttagaaactttttggatatgccactgcaattcttttcaaaatagcattccccaggtttttaatgggaggaaaaaaagctttaatgttgagcatgctgcgagctgctgcgtggaaaggcctctgtatgggccgaagacccttcttccctggctgccaggctcgccaggagcccactggaaacgcccaccacgggggctccttgttacacatgttctttttttatccgatcaacctgtgcacttttgatattttgatattatatttgcttccttaattcctcgcgtagagacggtctcaggtgccgtggtctatgctcgtggtcctgtagctgtccgcctcagctcccaccgtgtttgtctggtgtcagcacgaggcagagctgtgtgctccatagcgtgtagctttagactcggagatgagtgctttgacccagcgaggagctcagctaagtgtatccacgctgtggttcagcagcctttagatcatacggcattgtggttcatgtttgaaattacagattttaaatgccatgttcattaagaaatccagggtattcagattctggggtttttcatattgtattattattattcttaggaatagttcaatgtaacaagaagaaaacttgacctttgctctggttaaaacagtaataggcacttgaaaaaaaaagataaattattgaatgagtagtattacctacaaattccagaattttctgggttttaggacgttgtgaagcatgactgattaacagaattttatacaactgtaccaataaaattccaaattggaattgttttgttactctggttgttgtgccaaattgtggtacacttagaaaattctacagtcgtcgatttttagggtgttctctttcaacacctttttgttagtaatcattgccagtagtgccttcatcagttaagggaggtgtcccagcacagatcattctcaaaagcgagcagggaagagctagtgggcatgctgaaggccagcgtggacagcaggtgaggcaggtgctcctcacacccagacctgggcatcttcattgagggaaagaaaacagtcattgtgcaaaattctgttagtcagtgattctttacttgcaaattcaggggcttagaaaatgaaagcaaacacaaaaccttgagtgtgctttgggaaccaaatggaccttctgggacaagctgagcaagctgtatgaacgccacgtttgtgaagagctgagggtatcaggagggccgacgctgtgttggcatgcgcagtaggggatgagggttagccatagtattctttgcaaatgtgaaagcgagacattatatcttctcttgcttggtgtaactaatcactgttaatttcaggaaacagaactcattaaaactccttagcaaaccaggtctacatcctgttttgtttgctgagtgaggttagtgggagtggtcaaattggtactcttggaggaagaaaaactgtccttccttctccaaaaaaggaaaaattataataatataaatgacaaaaataaaagaattctgtttcctggaataagcatttcttattcctagttgtagggactcctatttttaccttccgttacagtgttgattcataagaaatattgttacatttgagataacttcatctgtatggggtatttatttgcaatgatgtctgagtactgtattttttctgtgcattaccttagtgtcagaatgttggtctttattttaaagtcatatgcatgttctcctgccaaggaacctttacacagacccaaacaaaaaaataataatcaaatgccttcaatttctgagaaaatgaggcagagcatggaaaaggaataggaaggagaaattaattgagattttcaggacacagacatatgatgtgaatgcctacaaagccagtgcgcataggaacagtgggcctgggtaaagagtcacattggtaggaccaataaagaataataaaaagacaaagcaca

SEQ ID NO: 20154 - DNA, 2568 bp, Artificial Sequence
  derived and/or modified sequence
atgagcgcccccagcgaggaggaggagtacgccagactggtgatggaggcccagcccgagtggctgagagccgaggtgaagagactgagccacgagctggccgagaccaccagagagaagatccaggccgccgagtacggcctggccgtgctggaggagaagcaccagctgaagctgcagttcgaggagctggaggtggactacgaggccatcagaagcgagatggagcagctgaaggaggccttcggccaggcccacaccaaccacaagaaggtggccgccgacggcgagagcagagaggagagcctgatccaggagagcgccagcaaggagcagtactacgtgagaaaggtgctggagctgcagaccgagctgaagcagctgagaaacgtgctgaccaacacccagagcgagaacgagagactggccagcgtggcccaggagctgaaggagatcaaccagaacgtggagatccagagaggcagactgagagacgacatcaaggagtacaagttcagagaggccagactgctgcaggactacagcgagctggaggaggagaacatcagcctgcagaagcaggtgagcgtgctgagacagaaccaggtggagttcgagggcctgaagcacgagatcaagagactggaggaggagaccgagtacctgaacagccagctggaggacgccatcagactgaaggagatcagcgagagacagctggaggaggccctggagaccctgaagaccgagagagagcagaagaacagcctgagaaaggagctgagccactacatgagcatcaacgacagcttctacaccagccacctgcacgtgagcctggacggcctgaagttcagcgacgacgccgccgagcccaacaacgacgccgaggccctggtgaacggcttcgagcacggcggcctggccaagctgcccctggacaacaagaccagcacccccaagaaggagggcctggccccccccagccccagcctggtgagcgacctgctgagcgagctgaacatcagcgagatccagaagctgaagcagcagctgatgcagatggagagagagaaggccggcctgctggccaccctgcaggacacccagaagcagctggagcacaccagaggcagcctgagcgagcagcaggagaaggtgaccagactgaccgagaacctgagcgccctgagaagactgcaggccagcaaggagagacagaccgccctggacaacgagaaggacagagacagccacgaggacggcgactactacgaggtggacatcaacggccccgagatcctggcctgcaagtaccacgtggccgtggccgaggccggcgagctgagagagcagctgaaggccctgagaagcacccacgaggccagagaggcccagcacgccgaggagaagggcagatacgaggccgagggccaggccctgaccgagaaggtgagcctgctggagaaggccagcagacaggacagagagctgctggccagactggagaaggagctgaagaaggtgagcgacgtggccggcgagacccagggcagcctgagcgtggcccaggacgagctggtgaccttcagcgaggagctggccaacctgtaccaccacgtgtgcatgtgcaacaacgagacccccaacagagtgatgctggactactacagagagggccagggcggcgccggcagaaccagccccggcggcagaaccagccccgaggccagaggcagaagaagccccatcctgctgcccaagggcctgctggcccccgaggccggcagagccgacggcggcaccggcgacagcagccccagccccggcagcagcctgcccagccccctgagcgaccccagaagagagcccatgaacatctacaacctgatcgccatcatcagagaccagatcaagcacctgcaggccgccgtggacagaaccaccgagctgagcagacagagaatcgccagccaggagctgggccccgccgtggacaaggacaaggaggccctgatggaggagatcctgaagctgaagagcctgctgagcaccaagagagagcagatcaccaccctgagaaccgtgctgaaggccaacaagcagaccgccgaggtggccctggccaacctgaagagcaagtacgagaacgagaaggccatggtgaccgagaccatgatgaagctgagaaacgagctgaaggccctgaaggaggacgccgccaccttcagcagcctgagagccatgttcgccaccagatgcgacgagtacatcacccagctggacgagatgcagagacagctggccgccgccgaggacgagaagaagaccctgaacagcctgctgagaatggccatccagcagaagctggccctgacccagagactggagctgctggagctggaccacgagcagaccagaagaggcagagccaaggccgcccccaagaccaagcccgccacccccagcgtgagccacacctgcgcctgcgccagcgacagagccgagggcaccggcctggccaaccaggtgttctgcagcgagaagcacagcatctactgcgactag

SEQ ID NO: 20155 - protein, 483 aa, Artificial Sequence
  derived and/or modified sequence
MAADEVAGGARKATKSKLFEFLVHGVRPGMPSGARMPHQGAPMGPPGSPYMGSPAVRPGLAPAGMEPARKRAAPPPGQSQAQSQGQPVPTAPARSRSAKRRKMADKILPQRIRELVPESQAYMDLLAFERKLDQTIMRKRVDIQEALKRPMKQKRKLRLYISNTFNPAKPDAEDSDGSIASWELRVEGKLLDDPSKQKRKFSSFFKSLVIELDKDLYGPDNHLVEWHRTPTTQETDGFQVKRPGDLSVRCTLLLMLDYQPPQFKLDPRLARLLGLHTQSRSAIVQALWQYVKTNRLQDSHDKEYINGDKYFQQIFDCPRLKFSEIPQRLTALLLPPDPIVINHVISVDPSDQKKTACYDIDVEVEEPLKGQMSSFLLSTANQQEISALDSKIHETIESINQLKIQRDFMLSFSRDPKGYVQDLLRSQSRDLKVMTDVAGNPEEERRAEFYHQPWSQEAVSRYFYCKIQQRRQELEQSLVVRNT

SEQ ID NO: 20156 - DNA, 1452 bp, Artificial Sequence
  derived and/or modified sequence
atggccgccgacgaggtggccggcggcgccagaaaggccaccaagagcaagctgttcgagttcctggtgcacggcgtgagacccggcatgcccagcggcgccagaatgccccaccagggcgcccccatgggcccccccggcagcccctacatgggcagccccgccgtgagacccggcctggcccccgccggcatggagcccgccagaaagagagccgcccccccccccggccagagccaggcccagagccagggccagcccgtgcccaccgcccccgccagaagcagaagcgccaagagaagaaagatggccgacaagatcctgccccagagaatcagagagctggtgcccgagagccaggcctacatggacctgctggccttcgagagaaagctggaccagaccatcatgagaaagagagtggacatccaggaggccctgaagagacccatgaagcagaagagaaagctgagactgtacatcagcaacaccttcaaccccgccaagcccgacgccgaggacagcgacggcagcatcgccagctgggagctgagagtggagggcaagctgctggacgaccccagcaagcagaagagaaagttcagcagcttcttcaagagcctggtgatcgagctggacaaggacctgtacggccccgacaaccacctggtggagtggcacagaacccccaccacccaggagaccgacggcttccaggtgaagagacccggcgacctgagcgtgagatgcaccctgctgctgatgctggactaccagcccccccagttcaagctggaccccagactggccagactgctgggcctgcacacccagagcagaagcgccatcgtgcaggccctgtggcagtacgtgaagaccaacagactgcaggacagccacgacaaggagtacatcaacggcgacaagtacttccagcagatcttcgactgccccagactgaagttcagcgagatcccccagagactgaccgccctgctgctgccccccgaccccatcgtgatcaaccacgtgatcagcgtggaccccagcgaccagaagaagaccgcctgctacgacatcgacgtggaggtggaggagcccctgaagggccagatgagcagcttcctgctgagcaccgccaaccagcaggagatcagcgccctggacagcaagatccacgagaccatcgagagcatcaaccagctgaagatccagagagacttcatgctgagcttcagcagagaccccaagggctacgtgcaggacctgctgagaagccagagcagagacctgaaggtgatgaccgacgtggccggcaaccccgaggaggagagaagagccgagttctaccaccagccctggagccaggaggccgtgagcagatacttctactgcaagatccagcagagaagacaggagctggagcagagcctggtggtgagaaacacctag

SEQ ID NO: 20157 - DNA, 1452 bp, Artificial Sequence
  derived and/or modified sequence
atggctgccgacgaagtggccggaggagcccgcaaagctaccaagtctaagctatttgagtttcttgttcacggagtgcgccccggaatgccaagcggggcccgaatgcctcaccagggagcccctatgggacccccaggctctccttatatgggctcgccagccgtgaggcccggacttgcgcctgccggtatggagccagctagaaagcgagcagcccctcccccaggccagtcccaagctcaatcccaggggcaacccgtgcctacagcacccgcaaggtctaggtctgcgaagcgaaggaaaatggcagacaagatcctgcctcagcgaatccgcgaactagtgccagaaagccaggcatacatggatctcttagccttcgagaggaaactggaccagacgataatgcgtaagcgggttgatatccaggaggctctgaaaaggccaatgaagcagaagcggaaactgagattgtatattagtaacactttcaatcccgcaaagccagacgcggaagatagcgacggctccattgccagctgggaactccgggttgaagggaagttgctcgacgacccaagtaaacagaaacgtaaatttagcagctttttcaaatctctcgtgatcgaactggacaaagacctgtatggtcccgacaaccacctggtggagtggcatcggacgcccacaacccaggagacagacggctttcaggtaaaaaggccaggcgatctttcggtccgatgcactctgttgctgatgctcgactatcaacccccacagttcaaactcgatcctcgcctcgcgagactcttgggactgcacactcagtcccgtagtgccattgtacaagcactgtggcaatatgtgaagacaaacagactgcaggatagccatgacaaagagtatatcaacggcgataaatactttcagcaaattttcgattgtccccgccttaaattctctgaaatcccccagcgcttaactgctctactgttgcctccagatcccatcgtgatcaaccatgttatcagcgtggatccaagtgaccagaaaaagacagcttgctacgatattgacgtggaggttgaggaacccctaaagggtcagatgtcttcattcctcttatcaactgctaaccagcaggaaatcagtgcgctcgactctaaaattcatgagactatagagtctatcaaccagctgaagattcaacgggatttcatgctgagtttttcacgcgacccaaagggatatgtgcaggatttgctgcgctcccaatccagggacttgaaggttatgacagacgtcgctggcaatcccgaagaagaacgtagggccgaattctatcatcagccttggagtcaagaagcagtgtctcggtatttctactgcaagatccaacaaaggcgtcaggagctagaacagtccctcgtggttaggaacacatag

SEQ ID NO: 20158 - DNA, 1452 bp, Artificial Sequence
  derived and/or modified sequence
atggctgctgatgaggtggccggcggggccaggaaggccaccaagagcaagctgtttgagttcctggtgcacggcgtgcggcccggcatgcccagcggggccaggatgccccaccagggcgcccccatgggccccccaggcagcccctacatgggcagccctgctgtgcggcccggcctggccccagctggcatggagcccgccaggaagagagctgcccctcctcctggccagagccaggcccagagccagggccagcctgtgcccacagccccagcccggagccgcagcgccaagaggaggaagatggctgacaagatcctgccccagaggatccgggagctggtgcctgagagccaggcctacatggacctgctggcctttgagaggaagctggaccagaccatcatgaggaagagggtggacatccaggaggccctgaagaggcccatgaagcagaagaggaagctgcggctgtacatcagcaacaccttcaacccagccaagccagatgctgaagattctgatggcagcatcgcctcctgggagctgcgggtggagggcaagctgctggatgaccccagcaagcagaagaggaagttcagcagcttcttcaagagcctggtgattgagctggacaaggacctgtatggccctgacaaccacctggtggagtggcacaggacccccaccacccaggagacagatggcttccaggtgaagaggcctggggacctgtctgtgcgctgcaccctgctgctgatgctggactaccagcccccccagttcaagctggacccccggctggcccggctgctgggcctgcacacccagagccgcagcgccatcgtgcaggccctgtggcagtatgtgaagaccaaccggctgcaggacagccatgacaaggagtacatcaacggggacaagtacttccagcagatctttgactgcccccggctgaagttcagcgagatcccccagaggctgacagccctgctgctgcccccagaccccatcgtcatcaaccacgtgatctctgtggaccccagcgaccagaagaagacagcctgctatgacattgatgtggaggtggaggagcccctgaagggccagatgagcagcttcctgctgagcacagccaaccagcaggagatcagcgccctggacagcaagatccacgagaccatcgagagcatcaaccagctgaagatccagagggacttcatgctgtccttcagccgggaccccaagggctacgtgcaggacctgctgcggagccagagccgggacctgaaggtgatgacagatgtggccggcaaccctgaggaggagaggagagctgagttctaccaccagccctggagccaggaggccgtgagccgctacttctactgcaagatccagcagaggcggcaggagctggagcagagcctggtggtgaggaacacctag

SEQ ID NO: 20159 - DNA, 1452 bp, Artificial Sequence
  derived and/or modified sequence
atggccgccgacgaggtggccggcggcgcccggaaggccaccaagtctaaactatttgagttcttagttcacggcgttcgccccggcatgccttcaggtgctcgcatgccacaccagggtgcgcccatgggaccacctgggtctccatacatgggaagccccgccgtgcggccaggcttggcgcccgccggaatggagcctgctagaaagagggctgcacctcctcccggccagagccaggctcagtcccagggtcaacctgtccctactgctcctgcacggtcaaggagcgctaagcgacgaaagatggctgataagattctgccacaacggattcgggagctggtgccggagtcccaagcctatatggaccttttggcctttgagcgcaagcttgatcaaaccatcatgcgcaagcgtgtcgatatccaggaagcactaaaaaggcctatgaagcagaagcgaaagttacggctatacattagcaacacctttaaccccgcaaagcccgatgctgaagacagcgatggcagtattgcctcatgggaactgagggtcgaaggcaaattgctggacgaccccagcaaacagaagaggaaattcagctcgttttttaagtcactggtgatcgagctcgataaggacctctatgggccagacaatcatctcgtagaatggcatcgcaccccgactacgcaagagactgatggattccaagtaaagcggcctggtgacttgtccgttagatgcactttgttgcttatgctggattatcagcccccccagtttaagttggaccctcgcctggcccgtttactgggattgcatacacagagtaggagcgcaattgtgcaagccctatggcaatacgtcaagactaacaggcttcaggactcccacgataaggaatacattaatggggacaagtattttcagcagatcttcgattgtccaagattgaaattttccgagattcctcagcgcctgactgctcttctactcccacccgatcctattgttatcaatcacgttatctcagtagacccctcagatcagaaaaagactgcctgctacgatatcgacgtggaggttgaggaacccctgaagggccagatgtcttcatttctgctgtccacagctaaccaacaagaaataagtgctctggactctaaaatccatgagaccattgaatcgatcaaccaactaaagattcagcgggacttcatgctgtcattttctagggatcccaagggctacgtacaagatttactgcgcagccagagtcgcgatctgaaagtaatgactgatgtcgccggcaaccctgaggaagaacggcgagcagaattttatcatcagccctggtcacaggaagcagtctctcgttacttttactgcaagattcagcagcgccgacaggaacttgaacaaagtcttgtggtccgtaatacttag

SEQ ID NO: 20160 - DNA, 1452 bp, Artificial Sequence
  derived and/or modified sequence
atggccgctgatgaggttgcgggaggggcacggaaagccaccaaatcaaagctgttcgaatttctggtccatggcgttaggccaggcatgcctagcggagccagaatgccacaccagggggcaccaatgggaccacctggatccccttacatgggctcccctgccgttcgcccagggctggcgcctgcaggtatggagccagccagaaaacgcgcagcaccccctccgggtcaaagccaggcacagagtcaaggtcagcccgtgccaacagcgccagcgagaagcaggagcgctaaaaggaggaaaatggctgacaagatcctgccccagaggattagggagttagttcctgaatcacaggcgtacatggatctcctggccttcgaaagaaaactcgaccagacaatcatgaggaagagagttgatatccaggaggccctgaaaaggcccatgaaacagaaaaggaaactgcgcctttatatctcaaacacctttaaccctgcaaagccagacgctgaagacagcgacggatccatcgcaagttgggagctcagagttgaggggaaactcctggacgatccgagtaaacagaaacggaagttctcgtccttcttcaagagtctggtgatcgaactcgataaagacttgtacggaccagataatcatctggtcgagtggcaccgtacgcccactacacaagagacagatgggttccaggttaagagaccgggagacttgagcgtgcggtgtactttactgctcatgctcgattatcagccgccacaatttaagctggacccgcgattggcacgtctgctgggcctccacacccagtccaggagcgccatagtccaggcactgtggcagtatgtgaaaacaaaccgactccaggattcacacgataaggagtatataaacggtgacaagtactttcagcagatatttgactgcccacggcttaagttctcagaaattccccagcgcctgacagcgctgcttcttcccccagacccaattgttatcaatcacgtaataagcgtggatcccagtgatcaaaagaaaacagcctgctacgatattgatgtagaagtagaagagcccctgaaagggcaaatgtcatcttttctgctctccacagccaatcagcaggagatcagcgccttggacagcaagatacacgaaacaatagagagcatcaatcagctcaaaattcaacgggatttcatgctaagcttctctcgggaccctaaaggatacgtccaggacttgctccgctcacaaagtagagatcttaaggttatgacagacgtggctggcaatcctgaagaagagcgtcgggctgagttctatcaccaaccttggtcacaggaagcagtgagtagatacttctactgcaagattcagcaacgtcgccaggaactagaacagtctttggttgtgcgcaacacctag

SEQ ID NO: 20161 - DNA, 1993 bp, Artificial Sequence
  derived and/or modified sequence
cgcgggcctcggcggcttcgggctgcagcactgctgcccagcgcccgcggccgggctggtcggcgcgcctcgccgcttatctgcgctgtttggacagcgggcttggaaaggcaggcggccccgtccccgccgagtcaacaggcagaccccgggccgccggactatttctgtcttatcagtgcaggaatgcggcagccgcggcggcggcggcggcggcgggcgggcggcggcggcgtgggccgtgggccgtcagggcagccctgaaggggccccctccccactccgctcgagtagaagtgtgagagagcccagcaggactcagaggggagagttggaggaaaaaaaaaggcagaaaagggaaagaaagaggaagagagagagagagtgagaggagccgctgagcccaccccgatggccgcggacgaagttgccggaggggcgcgcaaagccacgaaaagcaaactttttgagtttctggtccatggggtgcgccccgggatgccgtctggagcccggatgccccaccagggggcgcccatgggccccccgggctccccgtacatgggcagccccgccgtgcgacccggcctggcccccgcgggcatggagcccgcccgcaagcgagcagcgcccccgcccgggcagagccaggcacagagccagggccagccggtgcccaccgcccccgcgcggagccgcagtgccaagaggaggaagatggctgacaaaatcctccctcaaaggattcgggagctggtccccgagtcccaggcttacatggacctcttggcatttgagaggaaactggatcaaaccatcatgcggaagcgggtggacatccaggaggctctgaagaggcccatgaagcaaaagcggaagctgcgactctatatctccaacacttttaaccctgcgaagcctgatgctgaggattccgacggcagcattgcctcctgggagctacgggtggaggggaagctcctggatgatcccagcaaacagaagcggaagttctcttctttcttcaagagtttggtcatcgagctggacaaagatctttatggccctgacaaccacctcgttgagtggcatcggacacccacgacccaggagacggacggcttccaggtgaaacggcctggggacctgagtgtgcgctgcacgctgctcctcatgctggactaccagcctccccagttcaaactggatccccgcctagcccggctgctggggctgcacacacagagccgctcagccattgtccaggccctgtggcagtatgtgaagaccaacaggctgcaggactcccatgacaaggaatacatcaatggggacaagtatttccagcagatttttgattgtccccggctgaagttttctgagattccccagcgcctcacagccctgctattgccccctgacccaattgtcatcaaccatgtcatcagcgtggacccttcagaccagaagaagacggcgtgctatgacattgacgtggaggtggaggagccattaaaggggcagatgagcagcttcctcctatccacggccaaccagcaggagatcagtgctctggacagtaagatccatgagacgattgagtccataaaccagctcaagatccagagggacttcatgctaagcttctccagagaccccaaaggctatgtccaagacctgctccgctcccagagccgggacctcaaggtgatgacagatgtagccggcaaccctgaagaggagcgccgggctgagttctaccaccagccctggtcccaggaggccgtcagtcgctacttctactgcaagatccagcagcgcaggcaggagctggagcagtcgctggttgtgcgcaacacctaggagcccaaaaataagcagcacgacggaactttcagccgtgtcccgggccccagcattttgccccgggctccagcatcactcctctgccaccttggggtgtggggctggattaaaagtcattcatctgaca

SEQ ID NO: 20162 - protein, 675 aa, Artificial Sequence
  derived and/or modified sequence
MNLIFHKDILFGIPANKVPQDEWTGYTPRGKDDEIPCRRMRSGSYIKAMGDEDSGDSDTSPKPSPKVAARRESYLKATQPSLTELTTLKISNEHSPKLQIRSHSYLRAVSEVSINRSLDSLDPAGLLTSPKFRSRNESYMRAMSTISQVSEMEVNGQFESVCESVFSELESQAVEALDLPMPGCFRMRSHSYVRAIEKGCSQDDECVSLRSSSPPRTTTTVRTIQSSTVSSCITTYKKTPPPVPPRTTTKPFISITAQSSTESAQDAYMDGQGQRGDIISQSGLSNSTESLDSMKALTAAIEAANAQIHGPASQHMGNNTATVTTTTTIATVTTEDRKKDHFKKNRCLSIGIQVDDAEEPDKTGENKAPSKFQSVGVQVEEEKCFRRFTRSNSVTTAVQADLDFHDNLENSLESIEDNSCPGPMARQFSRDASTSTVSIQGSGNHYHACAADDDFDTDFDPSILPPPDPWIDSITEDPLEAVQRSVCHRDGHWFLKLLQAERDRMEGWCQQMEREERENNLPEDILGKIRTAVGSAQLLMAQKFYQFRELCEENLNPNAHPRPTSQDLAGFWDMLQLSIENISMKFDELHQLKANNWKQMDPLDKKERRAPPPVPKKPAKGPAPLIRERSLESSQRQEARKRLMAAKRAASVRQNSATESAESIEIYIPEAQTRL

SEQ ID NO: 20163 - DNA, 2028 bp, Artificial Sequence
  derived and/or modified sequence
atgaacctgatcttccacaaggacatcctgttcggcatccccgccaacaaggtgccccaggacgagtggaccggctacacccccagaggcaaggacgacgagatcccctgcagaagaatgagaagcggcagctacatcaaggccatgggcgacgaggacagcggcgacagcgacaccagccccaagcccagccccaaggtggccgccagaagagagagctacctgaaggccacccagcccagcctgaccgagctgaccaccctgaagatcagcaacgagcacagccccaagctgcagatcagaagccacagctacctgagagccgtgagcgaggtgagcatcaacagaagcctggacagcctggaccccgccggcctgctgaccagccccaagttcagaagcagaaacgagagctacatgagagccatgagcaccatcagccaggtgagcgagatggaggtgaacggccagttcgagagcgtgtgcgagagcgtgttcagcgagctggagagccaggccgtggaggccctggacctgcccatgcccggctgcttcagaatgagaagccacagctacgtgagagccatcgagaagggctgcagccaggacgacgagtgcgtgagcctgagaagcagcagcccccccagaaccaccaccaccgtgagaaccatccagagcagcaccgtgagcagctgcatcaccacctacaagaagacccccccccccgtgccccccagaaccaccaccaagcccttcatcagcatcaccgcccagagcagcaccgagagcgcccaggacgcctacatggacggccagggccagagaggcgacatcatcagccagagcggcctgagcaacagcaccgagagcctggacagcatgaaggccctgaccgccgccatcgaggccgccaacgcccagatccacggccccgccagccagcacatgggcaacaacaccgccaccgtgaccaccaccaccaccatcgccaccgtgaccaccgaggacagaaagaaggaccacttcaagaagaacagatgcctgagcatcggcatccaggtggacgacgccgaggagcccgacaagaccggcgagaacaaggcccccagcaagttccagagcgtgggcgtgcaggtggaggaggagaagtgcttcagaagattcaccagaagcaacagcgtgaccaccgccgtgcaggccgacctggacttccacgacaacctggagaacagcctggagagcatcgaggacaacagctgccccggccccatggccagacagttcagcagagacgccagcaccagcaccgtgagcatccagggcagcggcaaccactaccacgcctgcgccgccgacgacgacttcgacaccgacttcgaccccagcatcctgcccccccccgacccctggatcgacagcatcaccgaggaccccctggaggccgtgcagagaagcgtgtgccacagagacggccactggttcctgaagctgctgcaggccgagagagacagaatggagggctggtgccagcagatggagagagaggagagagagaacaacctgcccgaggacatcctgggcaagatcagaaccgccgtgggcagcgcccagctgctgatggcccagaagttctaccagttcagagagctgtgcgaggagaacctgaaccccaacgcccaccccagacccaccagccaggacctggccggcttctgggacatgctgcagctgagcatcgagaacatcagcatgaagttcgacgagctgcaccagctgaaggccaacaactggaagcagatggaccccctggacaagaaggagagaagagcccccccccccgtgcccaagaagcccgccaagggccccgcccccctgatcagagagagaagcctggagagcagccagagacaggaggccagaaagagactgatggccgccaagagagccgccagcgtgagacagaacagcgccaccgagagcgccgagagcatcgagatctacatccccgaggcccagaccagactgtag

SEQ ID NO: 20164 - DNA, 5258 bp, Artificial Sequence
  derived and/or modified sequence
cacttagaatcggcaaatcatagagagaagctaaatgctctcagctgcactataccaaatcaaagctgagatgaataatgaacttaattttccataaagacattctgtttggcattccagctaataaggttccacaagatgaatggacagggtacaccccacgaggtaaagatgatgaaattccatgccgaagaatgcggagtggcagttatatcaaggccatgggggatgaagacagtggagactcagacacgagtcctaagccttctccaaaagttgctgcgcggagagaaagctatctcaaggctactcagccatcccttacagaactcaccacactcaaaatctccaatgaacactcacccaaactccagatccggagtcatagttacctgagggcagtgagtgaagtctccatcaaccggagcctggacagcctggaccctgcaggcttgctcacatcaccaaagttccgctccaggaatgagagctacatgcgagccatgagcaccatcagccaggtgagcgagatggaagtgaacgggcagttcgagtccgtgtgcgagtccgtgttcagcgagctggagtcgcaggccgtggaagcgctggacctgcccatgcccggctgcttccgcatgcggagccacagctatgtgcgggccattgagaaaggctgctcccaggacgacgagtgcgtgtccctgaggtcgtcctcgccgccgcgcaccaccaccaccgttaggaccatccagagcagcacggtgtcatcttgcattacaacatataagaagacaccacctccagtcccacccagaactaccacgaaacctttcatttctatcacagcccagagtagcacagagtcagcccaggatgcctacatggacggacagggccagcgaggagatattatcagccagtctggactcagcaactccaccgagagcctggacagtatgaaggctctgacagccgccatcgaagctgcaaacgcccagatccatggccctgccagtcaacacatgggcaataacactgccaccgtcaccaccacgactaccatagccaccgtcaccacggaggacaggaagaaggaccactttaagaaaaatcgatgcctgtctatcgggatacaggtggatgatgctgaagaacctgacaaaacaggggagaataaagcacccagtaagttccagtccgtgggagtgcaagtagaagaagagaagtgcttccgcaggttcactcgatccaacagtgtgacgacagcagtacaggccgacctggacttccatgataatctggaaaattctctggaatctatagaggacaattcgtgtcctggccccatggccagacagttctcccgcgatgccagcacctccacagtcagcattcagggctcaggaaaccattaccatgcctgtgccgccgatgatgactttgacacggattttgacccctctattctgcctcctccggacccctggattgactctatcactgaagaccctctggaggccgtgcaaaggtcagtgtgccaccgggatggccactggttcctgaagcttctccaggcagagcgagaccgcatggaggggtggtgtcaacagatggagcgggaagaacgggaaaacaacctgcccgaagacattctaggaaaaatccgaaccgcagtgggcagtgcccaacttctcatggcccagaaattctaccagttcagagaactgtgtgaagaaaacctgaatcctaatgctcatccaagacccacctcccaggatttggcggggttttgggacatgctgcagttgtccatagaaaatattagtatgaaatttgatgaacttcatcagttaaaggccaataattggaaacagatggatcctcttgacaagaaggagagaagggcccctcctccagtgccaaagaagccggcgaagggccccgcgccgctgatccgggagcgctcgctggagagctcgcagcgccaggaggcccgcaagcgcctgatggccgccaagcgcgccgcgtccgtccgccagaactcggccaccgagagcgccgagagcatcgagatctacatccccgaggcgcagacccggctctgagcgccccgcagcccggccgccgccgccaagcatctgtcccctcctcccccggccgctcctctgccggctgcctctccccctccgagcccgtccgctcccgagctcggtgacttccactgtcgcggtgtagttgtccacctcgcaggagccgccccccgggcccccctcagccccccacttcccgtacccgtttgcccatctccttcttcaccgagcttcgccccctgtcctgatgccgtcgccctgcctcatactgagatccaaccctttattttctgggcaaagccaaacccacctgtgtagaagtgatgcctttaggtcacccgccgtcctcagttctctcgagctagtctgttcagcaatataaaaccatagggtatttcagaaatccagtatcacagggtgatcctttgggacttaccgtcttccacgtgaaagaaactaggcctccgattccctttatttcccctaaatggttattcttttaaaaaagcagatggagcactttattcccaacctcagaaatcacaccatctcactggaatccatgagggacacagagagaggggaccaagcctggcctgggggtgggggacctggatgtgtagcaaggatgggagaagcgaaatctgcaggtgctgggggcacctgcacactcacagctgcacaaactgcctcactgttacttcatcaatcacagcttcaaatgtctcaatcagcagaagattgtaaattcgatctttcagggaaattaatctattctgaaaggcaataacatgaagcaaggcaaaggaggcactgatggtttagtatactacataagggatttttttgttctattattaagaaaatctagacctgaaatgttttctcaactcttattgtactgtgtatatttatattgttgtcgtggcggctgtttttaaagggaaagtgttggttctattaatttgttaagtgtccatccaggtgggcctacctgattccacatatataagtacatatctgcttataaagcgctgtaaatggcagcaaggctgtttttggagaagagtttgggttttcctaccatccctttgaatgctacacatccgtctattttaacccaagtagttcgtatttcagatatattttctcctttcatctcctctcactactgcagagtccagtaatacctagcataggattctgtcctgtgtcaaatggctaaaataaatttttgccccaatagacatgctgcctcattcaaaagagctgccgctgtcatcttgaggttccaggtagtgagagaagaaactcgacctgccagggtcaacagccatgaagaggtggggggagtcatgattcataaacactgaaagaagtcaaggcttttggcagagagtgttgatttagatttttagtcttgattgatgggcagtatgcatcggtgtctagctgaagttgtctttaaatgcccttactcgtcacagtttaaacacttaggatgtggcaatcttaagtatcaatggcattttatgtccagctaacatcctaaagcattagaaattaaaaacgaaagacttttaaaaacatacatcaaacatgcttgcaccagagaagctttttaaaataatacactctcatagccaggtgctaatttaattttacttatgaaattaagagaggtgatgggttctagcaacagatattttcacggacatattctaaaaccactagagaattcgctacctctcagagccatcgatgctttgagctacctttataaacagggcacaaatgtttactgctgtggtttacaagaaaagggctactcacttattttgaaaccaacgaaccaacttttaactagggtgaacaaagcactcaaagtgctttgtgaaattggagcatacagagattttgagcttcaagtatttgctagttttaaaaagaatacaccttttctttaccttgtagcagcaattaaaagtcacacaaagcttgcatcgagtagggccaactgccacttgggtagcctatggtcacattcaatactgagaatgacttggaactcacagattaatatgaaagaagcagcgttcatcccaagacccatgctcacaattacagctccgtgccctgaggtagagttgagatttggattaagaaatagatttctaatacgactcaagatcatcctacaatattttctttggaaactaatttagcccatgatattttaaagagagacaagagaaggcctatttatcttgtctaagtgaacggcatttgtatattcataagctatttttggtaagaattttaaatcttttagctcaaggcctacagggcatcatgatctttgccttccttgaaaatacaatttaaattgtacaaacactttataaaaagctaattattggtgttagaacatgaccccacacaatgctgcttgacccctgaaactgacattcatgagcataacctttgttacattgttctttttgatgtaatttgtagaaatgttttttagttcgtaatggaaaatgtatgtaccctgaaaaattacttattttgtttaactttggtataaaggtgttgggcattttcttggggagggggggattacaaaagaagtttgtctcccacatcaaaaaacgttcaaagaaattaagtatttattatattttttgcagatgtttccatacaattcacataacctttttgtaaagagagatgaagaaatggattaaagatttttaatatttgaaatggtaaatagaactaatttattgtaatatatttctgttatttatagatgtttccttaatgttttactgtgcattaccactttcatttaagccttatccttgtgaatttaccatttcttttttaaaacatgtctagatgcatattttaaataactggaatgtaaatcactagcatatctgaattcccaaatgtaatttttaaaaattattttggtttggaaaaaaaagattcatttgaaagccttcagatggaggggtgggaacatttttatggctttatgaattggaatttcataggcttatttacctagattgtgtgtgaacaaaaaaatattgtaaatagatgaatgtttcccataatgtaaaaagaagaaattaataaaataattaatgcactgct

SEQ ID NO: 20165 - DNA, 2028 bp, Artificial Sequence
  derived and/or modified sequence
atgaatctgatctttcacaaggatattctcttcggtatacccgccaataaggtgccccaggacgagtggaccggatatacaccccgaggaaaggacgatgagattccctgccggcgaatgaggtccggatcttatattaaggcgatgggggatgaggacagcggggactcagacacttcccctaagccgagccctaaagtggccgcgaggcgcgaaagctatttgaaagctacacaacccagcctcaccgagttaaccacactgaagatatcgaatgagcatagtccaaaactgcaaatccgaagtcactcctacctgcgggcagtaagcgaagttagcataaaccggtccctcgattcccttgaccccgccggactcctcactagtcccaaatttagaagccgaaatgaatcctatatgagagctatgtccaccataagtcaggtgagtgaaatggaagtgaacggccagttcgaatctgtgtgcgagagcgttttctctgagcttgaatcacaagcagttgaggccctagatctgccgatgcctgggtgcttccgcatgaggagtcattcctacgtaagggctattgagaaagggtgcagtcaggatgacgagtgtgtctccctgcgcagctctagtcctcccaggacaaccaccacggttcggaccattcagtccagcactgtcagttcctgcataacgacatacaagaagacgcctccgcctgtgcctccccgcacaacaactaaaccgttcatctccattacagcacagtcctccaccgaatcagctcaggatgcatatatggatggtcagggccagagaggggacataattagccagtcagggctatctaatagcaccgagtctttagatagtatgaaggcgttgacagcggcgatagaagctgcaaatgctcagatccacggccctgcatcccagcacatgggaaacaatacggccacagtgacaacgacaacaaccattgccacagtgaccactgaagatagaaaaaaggaccattttaaaaagaatagatgcttatctattggaatccaggtggatgacgccgaggagcccgataagacaggagagaacaaggcccctagcaagttccagagtgtcggagttcaagtggaggaggaaaagtgtttcagacgattcacgcgttccaattctgttaccacagccgtgcaggccgacttggacttccacgacaacctcgagaatagtctcgaatctatcgaagataattcttgtccggggcctatggcgaggcagttctccagagatgccagcaccagcaccgtgtccattcaggggtccggtaaccactatcatgcctgcgctgctgacgatgacttcgacacggattttgacccaagcattctgcctcctcccgatccctggattgactctataactgaggatcccttagaagcagtccaacgatcagtgtgtcatagggacggtcactggtttctgaagctcctgcaggcggagcgcgataggatggaaggctggtgccagcagatggaacgggaggagcgggagaataacttaccagaggacatccttggaaaaattagaacagctgtcgggagtgcccagctgctgatggcccagaaattttaccagttcagagaattatgtgaagagaacctcaatccaaatgctcatcctcgtcccacgagtcaggacctagccggtttttgggacatgctgcagctgagcattgagaacataagcatgaaattcgacgaactgcaccagctgaaggcaaataactggaagcagatggacccactggataagaaggagcgcagagcaccaccccctgtcccaaaaaaacctgccaagggaccagcccccctcattagggagaggtctttggagagttcccagcgccaagaggcgcggaagcgcctcatggctgctaagcgcgctgcatccgtccggcaaaactctgcaaccgaatcggctgaatccattgagatctacatacccgaggcgcaaactcgtctgtag

SEQ ID NO: 20166 - DNA, 2028 bp, Artificial Sequence
  derived and/or modified sequence
atgaacctgatcttccacaaggacatcctgtttggcatcccagccaacaaggtgccccaggatgagtggacaggctacaccccccggggcaaggatgatgagatcccctgcaggaggatgaggagcggcagctacatcaaggccatgggagatgaggacagcggggacagcgacaccagccccaagcccagccccaaggtggccgcccggcgggagagctacctgaaggccacccagcccagcctgacagagctgaccaccctgaagatcagcaatgagcacagccccaagctgcagatccgcagccacagctacctgcgggctgtgtctgaggtgtccatcaacagaagcctggacagcctggaccctgctggcctgctgaccagccccaagttccgcagcagaaatgaaagctacatgagggccatgagcaccatcagccaggtgtctgagatggaggtgaatggccagtttgagagcgtgtgtgagagcgtcttcagcgagctggagagccaggccgtggaggccctggacctgcccatgcctggctgcttcaggatgaggagccacagctatgtgcgggccatcgagaagggctgcagccaggatgatgaatgtgtgtccctgcggagcagcagcccccccaggaccaccaccaccgtgaggaccatccagagcagcacagtgagcagctgcatcaccacctacaagaagaccccacctcctgtgccccccaggaccaccaccaagcccttcatcagcatcacagcccagagcagcacagaaagtgcccaggatgcctacatggatggccagggccagagaggagacatcatcagccagagcggcctgagcaacagcacagagagcctggacagcatgaaggccctgacagctgccattgaagctgccaatgcccagatccacggccctgccagccagcacatgggcaacaacacagccaccgtgaccaccaccaccaccatcgccaccgtgaccacagaggacaggaagaaggaccacttcaagaagaaccgctgcctgagcatcggcatccaggtggatgatgctgaggagccagacaagacaggagagaacaaggcccccagcaagttccagagcgtgggcgtgcaggtggaggaggagaagtgcttccgccgcttcaccaggagcaacagcgtgaccacagctgtgcaggccgacctggacttccatgacaacctggagaacagcctggagagcattgaggacaacagctgccccggccccatggcccggcagttcagcagagatgccagcaccagcacagtgtccatccagggcagcggcaaccactaccacgcctgtgccgcagatgatgactttgacacagactttgaccccagcatcctgcccccaccagacccctggattgacagcatcacagaggaccccctggaggccgtgcagaggtctgtgtgccacagagatggccactggttcctgaagctgctgcaggccgagcgggacaggatggagggctggtgccagcagatggagcgggaggagcgggagaacaacctgcctgaggacatcctgggcaagatcagaacagctgtgggcagcgcccagctgctgatggcccagaagttctaccagttccgggagctgtgtgaggagaacctgaaccccaatgcccacccccggcccaccagccaggacctggccggcttctgggacatgctgcagctgagcattgagaacatctccatgaagtttgatgagctgcaccagctgaaggccaacaactggaagcagatggaccccctggacaagaaggagcggcgggcccctcctcctgtgcccaagaagccagccaagggccctgcccccctcatccgggagaggagcctggagagcagccagaggcaggaggccaggaagaggctgatggccgccaagagagctgcctctgtgcggcagaacagcgccacagagagcgctgagagcattgagatctacatccctgaggcccagacccggctgtag

SEQ ID NO: 20167 - DNA, 2028 bp, Artificial Sequence
  derived and/or modified sequence
atgaacctgatcttccacaaggacatcctgttcggcatccccgccaataaagtgccacaggatgagtggacaggctacacacctagaggaaaagatgatgagatcccgtgccggaggatgaggtccgggtcttatataaaggccatgggtgacgaggacagcggcgacagcgacacatccccaaagccatcacctaaggtcgcagcacggcgcgagtcgtatctcaaagctacacagccttccttgaccgagctgactacactcaaaatctctaatgaacactctcccaaactgcagatcaggtcccactcatacctgcgtgccgtttccgaagtgtctattaacagatccctggattccctggacccagccggcttgctaacttctcccaaattcaggagtagaaatgaatcttacatgcgtgctatgagtacaattagccaagtgtcagagatggaagtgaacgggcagtttgagagtgtgtgtgagagcgtgttttccgaacttgagtcccaagcagttgaagccttagatctgcccatgcctggttgttttagaatgcggtcccattcttatgtgcgggctatcgagaagggctgctcccaagatgacgagtgcgtctccctccggagcagttcccccccaagaacaaccacaaccgtgaggacaattcagtcttcgactgttagttcttgtatcactacatacaagaagacccccccgcccgttccaccccggaccaccactaagccatttatctcaatcaccgcccaatcgagtaccgagtcggctcaggatgcctatatggatggccagggacagcgaggcgatattatctcccaaagcgggctgtccaattctacagaaagcttagattccatgaaggctctgaccgccgccatagaggctgccaacgcacagatacatggtcccgcgtcacagcatatgggtaataatactgcaacggtgaccacaacaaccaccatagcaacagtaacaacagaggatagaaagaaagatcacttcaaaaagaataggtgcttgagtatcgggattcaggtcgatgatgctgaagaaccagacaagactggagaaaacaaagcaccatccaagttccaaagcgtcggggtgcaagtggaggaggagaagtgttttcgaagatttacacgatcaaattccgtaactactgctgtgcaggctgatttagattttcatgacaacctcgagaattctctggaatctattgaggacaactcatgtcctggccccatggccaggcagttcagccgggacgcatctaccagcaccgtctccatccagggatccggaaaccactatcacgcatgcgccgccgacgacgatttcgacacagatttcgatccaagtatccttccacccccggacccatggattgactccatcaccgaagacccactcgaggcggtgcaacggagtgtctgccatcgggacggccattggtttcttaaacttctgcaggcggagagagacagaatggaggggtggtgtcagcagatggaaagagaagagagggagaacaatctgcccgaggatattttaggcaaaattaggactgcagtcggctcggcgcagctgctcatggcccaaaagttctatcagtttagagaattgtgtgaggaaaatcttaatcctaacgcccacccacggcctactagccaagacctggcaggattctgggacatgctgcagctaagcattgaaaatatcagtatgaaatttgacgagcttcatcagctgaaagcaaataattggaagcagatggaccctttggataagaaggaacgacgcgcacctccgcctgtgcccaagaaaccagccaagggcccagctcctttgattcgtgaaaggtctctcgaaagctctcagagacaagaggcccggaagaggctgatggcagccaaaagagccgcaagtgtgcgccagaatagcgcgactgaatcagcagagtccatcgaaatctatattccggaagctcaaactcgtctctag

SEQ ID NO: 20168 - DNA, 2028 bp, Artificial Sequence
  derived and/or modified sequence
atgaaccttatatttcataaagatattttgttcgggattccagccaacaaagtacctcaggacgaatggactgggtatactccacgtggcaaagatgacgagatcccatgccgcaggatgcgatctggatcctacataaaagctatgggcgacgaagacagtggagattccgacacatcgcctaaacctagccctaaggtggccgctcggagggaatcgtacctgaaggctacacagccgtccttgacagagctcacaacactgaaaattagtaatgagcactctcccaagctgcagatccggtcgcattcatacctgcgggcagtgtccgaagtttcgattaatcgaagcctggatagcttagatccagccggactgctcacctcccccaagtttagatcccggaacgagagctacatgcgggcaatgagcacgatctcccaggtgtccgagatggaagttaacgggcagttcgagtctgtgtgtgagagcgtgttttccgagttggagtctcaagcggtcgaggcgctggacctgcccatgcctggttgcttccggatgcgaagccattcctatgtgcgtgccatagaaaaagggtgctcacaggatgatgagtgtgttagcctgagatcatcctcaccaccaagaaccaccactaccgtgcgtactattcaatcttctactgtgagttcttgcatcaccacctacaaaaagacacctccacccgtgccacccaggacaaccactaaaccatttatatcgataactgcacagtcatctacagaaagcgcccaggacgcgtatatggatggccaggggcaacggggagacatcatttcccaaagtggattgagtaacagtactgaatccctagattccatgaaggctctgaccgctgctatcgaagccgctaatgcgcagatccacggccctgctagtcagcacatgggaaataatactgctacagtgaccacaacaactactattgctacagtgaccaccgaggaccgaaaaaaagaccattttaagaagaaccgctgcctgtctatagggatccaagtggatgatgctgaagaaccagataaaacgggggagaacaaggctccttctaagtttcagtcggtcggagtgcaagtagaggaagaaaagtgcttccgcaggtttaccagatccaactccgtgaccacagccgtgcaggcagatctcgactttcacgataatctcgagaatagtttggagagtattgaggataattcatgtcccggtcctatggcaagacagttctctcgcgacgcctctaccagcacagtgtccatccaaggtagcgggaatcactaccacgcatgtgctgcagatgatgacttcgacacagactttgacccgtcaattctgcctcctccggacccatggattgatagtatcacagaggatcctcttgaagccgtacaacgctctgtctgccaccgggacggccactggtttctcaagctgctgcaagcagaacgtgaccgcatggagggatggtgtcaacagatggaaagagaggagagagagaacaacttgccggaggacattttgggaaaaatcagaaccgcggtggggtcagcccagcttctgatggcccagaagttttatcaatttagagaactgtgcgaagaaaatctaaatcctaacgctcaccctcggcctaccagtcaagacctggctggcttttgggatatgttgcagctcagcattgagaatatctcaatgaaatttgacgagctgcaccaattaaaggctaacaattggaagcagatggatccccttgacaagaaggagaggagagcacctcctcccgtgcctaagaaacccgctaaaggaccagcccctttgatccgtgagaggtccttagagtcttctcagaggcaggaagcgaggaaaaggctcatggccgctaaacgggctgcctccgtccggcagaattctgctacagaaagtgccgagtccattgagatctacattccagaggcccagacacgcctgtag

SEQ ID NO: 20169 - protein, 281 aa, Artificial Sequence
  derived and/or modified sequence
MSEEQFGGDGAAGNGGGRRAGEQEGAMVAATQGAAAREAEPGPGAEPRLEAPKGAESEGAKIDASKNEEDEGKMFIGGLSWDTTKKDLKDYFSKFGEVVDCTLKLDPITGRSRGFGFVLFKESESVDKVMDQKEHKLNGKVIDPKRAKAMKTKEPVKKIFVGGLSPDTPEEKIREYFGGFGEVESIELPMDNKTNKRRGFCFITFKEEEPVKKIMEKKYHNVGLSKCEIKVAMSKEQYQQQQQWGSRGGFAGRARGRGGDQQSGYGKVSRRGGHQNSYKPY

SEQ ID NO: 20170 - DNA, 846 bp, Artificial Sequence
  derived and/or modified sequence
atgagcgaggagcagttcggcggcgacggcgccgccggcaacggcggcggcagaagagccggcgagcaggagggcgccatggtggccgccacccagggcgccgccgccagagaggccgagcccggccccggcgccgagcccagactggaggcccccaagggcgccgagagcgagggcgccaagatcgacgccagcaagaacgaggaggacgagggcaagatgttcatcggcggcctgagctgggacaccaccaagaaggacctgaaggactacttcagcaagttcggcgaggtggtggactgcaccctgaagctggaccccatcaccggcagaagcagaggcttcggcttcgtgctgttcaaggagagcgagagcgtggacaaggtgatggaccagaaggagcacaagctgaacggcaaggtgatcgaccccaagagagccaaggccatgaagaccaaggagcccgtgaagaagatcttcgtgggcggcctgagccccgacacccccgaggagaagatcagagagtacttcggcggcttcggcgaggtggagagcatcgagctgcccatggacaacaagaccaacaagagaagaggcttctgcttcatcaccttcaaggaggaggagcccgtgaagaagatcatggagaagaagtaccacaacgtgggcctgagcaagtgcgagatcaaggtggccatgagcaaggagcagtaccagcagcagcagcagtggggcagcagaggcggcttcgccggcagagccagaggcagaggcggcgaccagcagagcggctacggcaaggtgagcagaagaggcggccaccagaacagctacaagccctactag

SEQ ID NO: 20171 - DNA, 468 bp, Artificial Sequence
  derived and/or modified sequence
atgagcgaggagcagttcggcggcgacggcgccgccgccgccgccaccgccgccgtgggcggcagcgccggcgagcaggagggcgccatggtggccgccacccagggcgccgccgccgccgccggcagcggcgccggcaccggcggcggcaccgccagcggcggcaccgagggcggcagcgccgagagcgagggcgccaagatcgacgccagcaagaacgaggaggacgagggcaagatgttcatcggcggcctgagctgggacaccaccaagaaggacctgaaggactacttcagcaagttcggcgaggtggtggactgcaccctgaagctggaccccatcaccggcagaagcagaggcttcggcttcgtgctgttcaaggagagcgagagcgtggacaaggtgatggaccagaaggagcacaagctgaacggcaaggtgatcgaccccaagagagccaaggcctag

SEQ ID NO: 20172 - DNA, 633 bp, Artificial Sequence
  derived and/or modified sequence
tgaaagatgttcatcggcggcctgagctgggacaccaccaagaaggacctgaaggactacttcagcaagttcggcgaggtggtggactgcaccctgaagctggaccccatcaccggcagaagcagaggcttcggcttcgtgctgttcaaggagagcgagagcgtggacaaggtgatggaccagaaggagcacaagctgaacggcaaggtgatcgaccccaagagagccaaggccatgaagaccaaggagcccgtgaagaagatcttcgtgggcggcctgagccccgacacccccgaggagaagatcagagagtacttcggcggcttcggcgaggtggagagcatcgagctgcccatggacaacaagaccaacaagagaagaggcttctgcttcatcaccttcaaggaggaggagcccgtgaagaagatcatggagaagaagtaccacaacgtgggcctgagcaagtgcgagatcaaggtggccatgagcaaggagcagtaccagcagcagcagcagtggggcagcagaggcggcttcgccggcagagccagaggcagaggcggcgaccagcagagcggctacggcaaggtgagcagaagaggcggccaccagaacagctacaagccctactag

SEQ ID NO: 20173 - DNA, 846 bp, Artificial Sequence
  derived and/or modified sequence
atgtctgaagagcagtttggcggcgacggtgcagcaggaaacggaggaggacgccgagccggcgagcaagaaggcgctatggttgcggctacccagggggccgcggcacgggaagctgagccaggcccgggcgcagagcccagattggaagctccgaagggtgctgagtctgagggcgctaaaattgatgcatctaagaacgaggaggacgagggtaaaatgttcattggtggcctgtcttgggacacgacaaagaaggacttgaaggattacttcagcaaattcggggaggtggtggattgcactctgaagttggaccccattaccggccgttctagggggttcggtttcgtgctgttcaaagaatccgagtcagtcgataaagttatggaccagaaggagcacaaattgaatggtaaggttattgacccaaagcgagcaaaggctatgaaaacaaaggagcctgtaaagaagatttttgtgggcggtctgtcccccgacactcccgaggagaagatcagagagtatttcgggggctttggcgaagtggagtctatcgaattacccatggacaataagactaataagcgaagggggttctgcttcatcaccttcaaggaggaggagcctgtgaaaaaaattatggaaaagaagtatcacaatgtgggcctttccaaatgcgaaattaaggtcgccatgtccaaggaacagtatcagcagcaacagcagtgggggagtaggggtggctttgcaggacgagcccgcggtcggggcggggaccagcaaagcggttacggaaaagtgagtcgcaggggtggccaccaaaacagttataagccatactag

SEQ ID NO: 20174 - DNA, 468 bp, Artificial Sequence
  derived and/or modified sequence
atgtcggaggagcagttcggtggcgacggagccgctgcagcggcaaccgccgctgtcgggggcagtgcaggagagcaggagggagctatggtcgccgcgacacaaggagccgcagctgctgctggcagcggggctggcacaggaggcgggacggccagtggtggcacagagggaggcagcgcagaatccgaaggggccaaaatcgatgccagtaaaaatgaagaggacgagggaaagatgttcatcggcggcctgtcttgggatacaacaaaaaaagatttgaaggactacttctccaagtttggtgaggtcgtggattgcacactgaagctcgaccccattaccggtcgcagcagggggtttgggttcgtgcttttcaaggagagcgaaagcgtggataaggtaatggatcagaaggagcataaattaaacggcaaggtaatcgaccccaaaagggctaaggcctag

SEQ ID NO: 20175 - DNA, 633 bp, Artificial Sequence
  derived and/or modified sequence
taaaaaatgtttattggaggcctctcatgggacactacgaagaaggacctgaaagattatttcagcaaattcggcgaggtggtggattgcacacttaaactcgatccaattaccgggcggagtagagggttcggcttcgtcttatttaaggagagcgaatctgtcgacaaagtgatggatcagaaggaacataaattgaacgggaaagttatcgaccctaaacgggcaaaggccatgaaaacaaaggagccggttaaaaaaatcttcgttgggggtctgtctcctgataccccagaggaaaagatcagagaatattttggtggctttggagaggtagagagtatcgagctgcccatggacaacaaaaccaataaacgacgggggttctgcttcattacatttaaagaggaagagccagtgaaaaaaatcatggaaaagaaataccataacgtcggccttagtaagtgcgagatcaaagttgcaatgagcaaagagcagtatcagcagcaacagcagtgggggtcccggggcggtttcgcagggagagctagaggccggggaggggatcagcagtccggatatgggaaggtaagccgccgtggaggtcatcaaaacagctacaagccttactag

SEQ ID NO: 20176 - DNA, 1197 bp, Artificial Sequence
  derived and/or modified sequence
atgtcggaggagcagttcggcggggacggggcggcgggcaacggcggcggtaggcgggcgggcgagcaggagggagccatggtggcggcgacacagggggcagcggcgcgggaagcggagccgggaccgggggcggaaccgcgtctggaggcaccgaagggggccgagtcggagggggcgaagattgacgccagtaagaacgaggaggatgaagggaaaatgtttataggaggccttagctgggacactacaaagaaagatctgaaggactacttttccaaatttggtgaagttgtagactgcactctgaagttagatcctatcacagggcgatcaaggggttttggctttgtgctatttaaagaatcggagagtgtagataaggtcatggatcaaaaagaacataaattgaatgggaaggtgattgatcctaaaagggccaaagccatgaaaacaaaagagccggttaaaaaaatttttgttggtggcctttctccagatacacctgaagagaaaataagggagtactttggtggttttggtgaggtggaatccatagagctccccatggacaacaagaccaataagaggcgtgggttctgctttattacctttaaggaagaagaaccagtgaagaagataatggaaaagaaataccacaatgttggtcttagtaaatgtgaaataaaagtagccatgtcgaaggaacaatatcagcaacagcaacagtggggatctagaggaggatttgcaggaagagctcgtggaagaggtggtgaccagcagagtggttatgggaaggtatccaggcgaggtggtcatcaaaatagctacaaaccatactaaattattccatttgcaacttatccccaacaggtggtgaagcagtattttccaatttgaagattcatttgaaggtggctcctgccacctgctaatagcagttcaaactaaattttttgtatcaagtccctgaatggaagtatgacgttgggtccctctgaagtttaattctgagttctcattaaaagaaatttgctttcattgttttatttcttaattgctatgcttcagaatcaatttgtgttttatgccctttcccccagtattgtagagcaagtcttgtgttaaaagcccagtgtgacagtgtcatgatgtagtagtgtcttactggttttttaataaatccttttgtat

SEQ ID NO: 20177 - DNA, 607 bp, Artificial Sequence
  derived and/or modified sequence
ttaaaggcccccaaggctgtgcaacgcggagcgtgagaggaagagcgggcgcgcggcagcggcggggattactttgctgctagtttcggttcgcggcagcggcgggtgtagtctcggcggcagcggcggagacactagcactatgtcggaggagcagttcggcggggacggggcggcggcagcggcaacggcggcggtaggcggctcggcgggcgagcaggagggagccatggtggcggcgacacagggggcagcggcggcggcgggaagcggagccgggaccgggggcggaaccgcgtctggaggcaccgaagggggcagcgccgagtcggagggggcgaagattgacgccagtaagaacgaggaggatgaagggaaaatgtttataggaggccttagctgggacactacaaagaaagatctgaaggactacttttccaaatttggtgaagttgtagactgcactctgaagttagatcctatcacagggcgatcaaggggttttggctttgtgctatttaaagaatcggagagtgtagataaggtcatggatcaaaaagaacataaattgaatgggaaggtgattgatcctaaaagggccaaagcc

SEQ ID NO: 20178 - DNA, 1089 bp, Artificial Sequence
  derived and/or modified sequence
gaaaatgtttataggaggccttagctgggacactacaaagaaagatctgaaggactacttttccaaatttggtgaagttgtagactgcactctgaagttagatcctatcacagggcgatcaaggggttttggctttgtgctatttaaagaatcggagagtgtagataaggtcatggatcaaaaagaacataaattgaatgggaaggtgattgatcctaaaagggccaaagccatgaaaacaaaagagccggttaaaaaaatttttgttggtggcctttctccagatacacctgaagagaaaataagggagtactttggtggttttggtgaggtggaatccatagagctccccatggacaacaagaccaataagaggcgtgggttctgctttattacctttaaggaagaagaaccagtgaagaagataatggaaaagaaataccacaatgttggtcttagtaaatgtgaaataaaagtagccatgtcgaaggaacaatatcagcaacagcaacagtggggatctagaggaggatttgcaggaagagctcgtggaagaggtggtgaccagcagagtggttatgggaaggtatccaggcgaggtggtcatcaaaatagctacaaaccatactaaattattccatttgcaacttatccccaacagcgggaacttcattgcaggccctgtgtcgcgctgacttcacgattctcacaggcccgctcaatgcggacagggtacgagatgctcacgctctcgaatgctgccgtttggtggtgaagcagtattttccaatttgaagattcatttgaaggtggctcctgccacctgctaatagcagttcaaactaaattttttgtatcaagtccctgaatggaagtatgacgttgggtccctctgaagtttaattctgagttctcattaaaagaaatttgctttcattgttttatttcttaattgctatgcttcagaatcaatttgtgttttatgccctttcccccagtattgtagagcaagtcttgtgttaaaagcccagtgtgacagtgtcatgatgtagtagtgtcttactggttttttaataaatccttttgtat

SEQ ID NO: 20179 - DNA, 846 bp, Artificial Sequence
  derived and/or modified sequence
atgtctgaggagcagtttggaggagatggagctgctggaaatggaggcggccggcgggccggggagcaggagggcgccatggtggccgccacccagggcgctgctgcccgggaggccgagcccggccctggagctgagccccggctggaggcccccaagggagctgagagcgagggcgccaagattgatgccagcaagaatgaagaagatgagggcaagatgttcatcggcggcctgtcctgggacaccaccaagaaggacctgaaggactacttcagcaagtttggagaggtggtggactgcaccctgaagctggaccccatcaccggccgcagccggggctttggatttgtgctcttcaaggagagcgagagcgtggacaaggtgatggaccagaaggagcacaagctgaatggcaaggtgattgaccccaagagggccaaggccatgaagaccaaggagcctgtgaagaagatctttgtgggcggcctgagcccagacaccccagaggagaagatccgggagtactttggaggctttggagaggtggagagcattgagctgcccatggacaacaagaccaacaagagaagaggcttctgcttcatcaccttcaaggaggaggagcctgtgaagaagatcatggagaagaagtaccacaacgtgggcctgagcaaatgtgagatcaaggtggccatgagcaaggagcagtaccagcagcagcagcagtggggcagccggggcggctttgctggccgggcccggggccggggcggggaccagcagagcggctacggcaaggtgtcccggcggggcggccaccagaacagctacaagccctactag

SEQ ID NO: 20180 - DNA, 468 bp, Artificial Sequence
  derived and/or modified sequence
atgtctgaggagcagtttggaggagatggagctgctgctgctgccacagctgctgtgggcggcagcgctggggagcaggagggcgccatggtggccgccacccagggcgctgctgctgctgctggcagcggggccggcactggaggcggcacagccagcggcggcacagagggcggcagcgctgagagcgagggcgccaagattgatgccagcaagaatgaagaagatgagggcaagatgttcatcggcggcctgtcctgggacaccaccaagaaggacctgaaggactacttcagcaagtttggagaggtggtggactgcaccctgaagctggaccccatcaccggccgcagccggggctttggatttgtgctcttcaaggagagcgagagcgtggacaaggtgatggaccagaaggagcacaagctgaatggcaaggtgattgaccccaagagggccaaggcctag

SEQ ID NO: 20181 - DNA, 633 bp, Artificial Sequence
  derived and/or modified sequence
tgaaagatgtttattggaggcctgtcctgggacaccaccaagaaggacctgaaggactacttcagcaagtttggagaggtggtggactgcaccctgaagctggaccccatcaccggccgcagccggggcttcggctttgtgctcttcaaggagagcgagagcgtggacaaggtgatggaccagaaggagcacaagctgaatggcaaggtgattgaccccaagagggccaaggccatgaagaccaaggagcctgtgaagaagatctttgtgggcggcctgagcccagacaccccagaggagaagatccgggagtactttggaggctttggagaggtggagagcattgagctgcccatggacaacaagaccaacaagaggcggggcttctgcttcatcaccttcaaggaggaggagcctgtgaagaagatcatggagaagaagtaccacaacgtgggcctgagcaaatgtgagatcaaggtggccatgagcaaggagcagtaccagcagcagcagcagtggggcagcagaggaggctttgctggccgggcccggggccggggcggggaccagcagagcggctacggcaaggtgtccagaagaggaggccaccagaacagctacaagccctactag

SEQ ID NO: 20182 - DNA, 846 bp, Artificial Sequence
  derived and/or modified sequence
atgagcgaggagcagttcggcggcgacggcgccgccggcaacggcggaggccgacgcgcgggcgagcaggagggcgcgatggtggccgcaacccagggcgcggctgcacgggaagcagagccaggacctggtgccgagcccagactggaggcccccaagggggccgagtcagaaggagcaaaaattgatgcaagtaaaaacgaggaggacgagggcaaaatgttcatcggaggccttagctgggataccacaaagaaggaccttaaggattactttagcaagttcggagaagtagttgattgcactctgaaactggacccaataacaggaaggtctcggggatttggatttgtactgttcaaggagtctgaatcagtggacaaagtcatggaccagaaggaacacaagctgaacggaaaagtcatcgatcctaaacgtgcaaaggccatgaaaaccaaggaacctgtgaaaaaaattttcgtaggcggcctcagcccagacaccccagaagagaagattcgtgagtacttcggcggttttggtgaagtggagagcatagagctgcctatggacaataaaaccaacaagcgcaggggtttctgtttcattactttcaaggaggaggagccagtcaaaaaaattatggagaaaaaatatcataatgtgggcttgtcgaagtgtgagattaaggtcgctatgagcaaggaacagtaccagcagcagcaacagtggggatccaggggaggattcgcagggagggccagaggtcggggtggcgaccagcagtccgggtatggcaaggtgtctagacggggggggcaccagaattcctacaagccctattag

SEQ ID NO: 20183 - DNA, 468 bp, Artificial Sequence
  derived and/or modified sequence
atgagcgaggagcagttcggcggcgacggcgccgccgccgccgccaccgcagccgtcgggggttctgcaggtgagcaggaaggagccatggtcgctgctacccagggcgccgctgccgcggctggatctggggccggaacgggtggtggcaccgcatctggaggaaccgaaggagggtcagctgaatcagaaggcgccaagatagatgcctccaaaaacgaagaagatgagggtaagatgttcatcggcggactgtcttgggataccacgaaaaaagaccttaaggattatttttctaaatttggcgaggtggtggattgtactctcaagctcgatccaattaccggcaggtcccgcgggtttggatttgtcctgtttaaagagtctgaatccgttgataaggtcatggaccaaaaggagcacaagcttaatggaaaggtcattgaccccaaacgggccaaggcctag

SEQ ID NO: 20184 - DNA, 633 bp, Artificial Sequence
  derived and/or modified sequence
tgaaagatgttcatcggcggcctgagctgggacaccaccaagaaggaccttaaagattattttagtaagtttggcgaagtggtcgactgcaccctaaagctcgatcccattacagggaggtctcgtgggttcggattcgtgctctttaaggagagtgagtcagtcgataaagttatggaccagaaagaacataaactcaacgggaaggtgatcgaccctaagcgggcaaaggctatgaagacgaaggagccagtgaagaaaatctttgtagggggcttatcaccagacacacccgaagagaaaatcagagaatacttcggcgggttcggagaagttgaatcaatcgaacttcctatggataataagaccaacaagaggcgagggttctgttttattacgttcaaagaggaagagcctgtgaagaagatcatggagaaaaagtatcataatgtcggactttccaagtgcgagattaaggtcgccatgtccaaggagcagtaccagcaacaacagcagtggggcagcagaggggggtttgcagggcgtgcccgcggccgcgggggggaccaacagtctggctacgggaaggtgtccaggcgcggaggccatcagaactcttataagccctattag

SEQ ID NO: 20185 - DNA, 846 bp, Artificial Sequence
  derived and/or modified sequence
atgagcgaagaacagtttggaggggatggggcagctgggaatggtggaggcagacgtgctggtgaacaggagggcgctatggtggccgcaacacaaggagctgccgcacgggaggccgagccagggccaggggcagagcccaggctggaagctcccaagggcgcagagtcagagggagccaagatcgacgccagcaagaatgaggaggatgagggcaagatgtttatcgggggactgagttgggacaccacaaaaaaagatctcaaagactacttttccaagtttggagaggttgtggattgtactctgaagcttgatcccatcacaggcaggtctcgtgggtttggctttgtgctctttaaggagtctgagtctgtagacaaagtgatggatcaaaaagaacacaaattgaatggtaaagtcattgaccctaagcgcgctaaggcaatgaaaaccaaggaacctgtgaaaaagatcttcgtgggcggactttcacccgacacgcctgaagagaagatacgggagtactttggagggttcggggaggtagagtcaattgaactccccatggacaacaaaaccaataagagaaggggcttctgttttattacattcaaagaggaagaacctgttaagaaaatcatggagaaaaaatatcacaacgtgggcctctccaagtgcgagatcaaggtcgcaatgtccaaggagcagtaccaacaacagcagcaatgggggtctcggggtggcttcgccggtcgggctcgcggtagaggcggtgatcagcaatcaggctatggaaaagtatcccggcgtggtggtcaccagaattcctacaaaccatactag

SEQ ID NO: 20186 - DNA, 468 bp, Artificial Sequence
  derived and/or modified sequence
atgtctgaagaacagtttggtggggatggcgcagccgcagctgcaactgcagccgtcgggggatcggcgggtgaacaggaaggcgctatggttgccgctactcagggcgctgccgctgctgccggttctggagccggaacaggaggcggtaccgcctctggtggcaccgaaggaggctccgcagagtccgaaggagctaaaatcgacgcctcgaagaacgaggaggatgaaggtaagatgtttattggaggcctctcatgggacactactaagaaggacctgaaggattacttttctaagtttggtgaggtcgttgactgtacccttaaattagacccaattactggcagatctcggggtttcggattcgtgctgttcaaagagagcgagagtgttgacaaggtgatggaccagaaagagcacaagctcaatgggaaagtgattgacccgaaaagagctaaggcatag

SEQ ID NO: 20187 - DNA, 633 bp, Artificial Sequence
  derived and/or modified sequence
tgaaaaatgttcatcggtggcctcagctgggatacgacaaaaaaggatttaaaggactatttttccaagttcggcgaggtggttgactgcacgttaaagctagatcccattaccggtcgatccagaggattcgggttcgtgctgtttaaggagagcgagtccgtggacaaggtgatggatcagaaagagcataagttaaatggaaaggtgatagatccaaagcgagctaaagcaatgaaaaccaaagagcccgttaagaagatctttgtgggtggcctgagtccggacacacccgaagagaagatccgggaatacttcggcggatttggcgaagtagaaagcatcgagcttccaatggataataaaacaaataaacgaaggggattctgttttatcaccttcaaagaggaggagcccgtcaagaagattatggagaagaagtaccacaacgttggcctgtcaaagtgcgagatcaaggtggccatgagtaaagagcagtaccagcagcagcagcaatggggcagtcgcggtggcttcgccggtcgagccaggggcagaggtggggaccagcagagcgggtacggcaaggtttcccgacgcggaggccaccaaaacagctataaaccttattag

SEQ ID NO: 20188 - protein, 940 aa, Artificial Sequence
  derived and/or modified sequence
MISAHCNLRLLCSSDSSASASQVAGTTEVVENLVTNDNSPNIPEAIDRLFSDIANINRESMAEITDIQIEEMAVNLWNWALTIGGGWLVNEEQKIRLHYVACKLLSMCEASFASEQSIQRLIMMNMRIGKEWLDAGNFLIADECFQAAVASLEQLYVKLIQRSSPEADLTMEKITVESDHFRVLSYQAESAVAQGDFQRASMCVLQCKDMLMRLPQMTSSLHHLCYNFGVETQKNNKYEESSFWLSQSYDIGKMDKKSTGPEMLAKVLRLLATNYLDWDDTKYYDKALNAVNLANKEHLSSPGLFLKMKILLKGETSNEELLEAVMEILHLDMPLDFCLNIAKLLMDHERESVGFHFLTIIHERFKSSENIGKVLILHTDMLLQRKEELLAKEKIEEIFLAHQTGRQLTAESMNWLHNILWRQAASSFEVQNYTDALQWYYYSLRFYSTDEMDLDFTKLQRNMACCYLNLQQLDKAKEAVAEAERHDPRNVFTQFYIFKIAVIEGNSERALQAIITLENILTDEESEDNDLVAERGSPTMLLSLAAQFALENGQQIVAEKALEYLAQHSEDQEQVLTAVKCLLRFLLPKIAEMPESEDKKKEMDRLLTCLNRAFVKLSQPFGEEALSLESRANEAQWFRKTAWNLAVQCDKDPVMMREFFILSYKMSQFCPSDQVILIARKTCLLMAVAVDLEQGRKASTAFEQTMFLSRALEEIQTCNDIHNFLKQTGTFSNDSCEKLLLLYEFEVRAKLNDPLLESFLESVWELPHLETKTFETIAIIAMEKPAHYPLIALKALKKALLLYKKEEPIDISQYSKCMHNLVNLSVPDGASNVELCPLEEVWGYFEDALSHISRTKDYPEMEILWLMVKSWNTGVLMFSRSKYASAEKWCGLALRFLNHLTSFKESYETQMNMLYSQLVEALSNNKGPVFHEHGYWSKSD

SEQ ID NO: 20189 - protein, 615 aa, Artificial Sequence
  derived and/or modified sequence
MEILHLDMPLDFCLNIAKLLMDHERESVGFHFLTIIHERFKSSENIGKVLILHTDMLLQRKEELLAKEKIEEIFLAHQTGRQLTAESMNWLHNILWRQAASSFEVQNYTDALQWYYYSLRFYSTDEMDLDFTKLQRNMACCYLNLQQLDKAKEAVAEAERHDPRNVFTQFYIFKIAVIEGNSERALQAIITLENILTDEESEDNDLVAERGSPTMLLSLAAQFALENGQQIVAEKALEYLAQHSEDQEQVLTAVKCLLRFLLPKIAEMPESEDKKKEMDRLLTCLNRAFVKLSQPFGEEALSLESRANEAQWFRKTAWNLAVQCDKDPVMMREFFILSYKMSQFCPSDQVILIARKTCLLMAVAVDLEQGRKASTAFEQTMFLSRALEEIQTCNDIHNFLKQTGTFSNDSCEKLLLLYEFEVRAKLNDPLLESFLESVWELPHLETKTFETIAIIAMEKPAHYPLIALKALKKALLLYKKEEPIDISQYSKCMHNLVNLSVPDGASNVELCPLEEVWGYFEDALSHISRTKDYPEMEILWLMVKSWNTGVLMFSRSKYASAEKWCGLALRFLNHLTSFKESYETQMNMLYSQLVEALSNNKGPVFHEHGYWSKSD

SEQ ID NO: 20190 - DNA, 2823 bp, Artificial Sequence
  derived and/or modified sequence
atgatcagcgcccactgcaacctgagactgctgtgcagcagcgacagcagcgccagcgccagccaggtggccggcaccaccgaggtggtggagaacctggtgaccaacgacaacagccccaacatccccgaggccatcgacagactgttcagcgacatcgccaacatcaacagagagagcatggccgagatcaccgacatccagatcgaggagatggccgtgaacctgtggaactgggccctgaccatcggcggcggctggctggtgaacgaggagcagaagatcagactgcactacgtggcctgcaagctgctgagcatgtgcgaggccagcttcgccagcgagcagagcatccagagactgatcatgatgaacatgagaatcggcaaggagtggctggacgccggcaacttcctgatcgccgacgagtgcttccaggccgccgtggccagcctggagcagctgtacgtgaagctgatccagagaagcagccccgaggccgacctgaccatggagaagatcaccgtggagagcgaccacttcagagtgctgagctaccaggccgagagcgccgtggcccagggcgacttccagagagccagcatgtgcgtgctgcagtgcaaggacatgctgatgagactgccccagatgaccagcagcctgcaccacctgtgctacaacttcggcgtggagacccagaagaacaacaagtacgaggagagcagcttctggctgagccagagctacgacatcggcaagatggacaagaagagcaccggccccgagatgctggccaaggtgctgagactgctggccaccaactacctggactgggacgacaccaagtactacgacaaggccctgaacgccgtgaacctggccaacaaggagcacctgagcagccccggcctgttcctgaagatgaagatcctgctgaagggcgagaccagcaacgaggagctgctggaggccgtgatggagatcctgcacctggacatgcccctggacttctgcctgaacatcgccaagctgctgatggaccacgagagagagagcgtgggcttccacttcctgaccatcatccacgagagattcaagagcagcgagaacatcggcaaggtgctgatcctgcacaccgacatgctgctgcagagaaaggaggagctgctggccaaggagaagatcgaggagatcttcctggcccaccagaccggcagacagctgaccgccgagagcatgaactggctgcacaacatcctgtggagacaggccgccagcagcttcgaggtgcagaactacaccgacgccctgcagtggtactactacagcctgagattctacagcaccgacgagatggacctggacttcaccaagctgcagagaaacatggcctgctgctacctgaacctgcagcagctggacaaggccaaggaggccgtggccgaggccgagagacacgaccccagaaacgtgttcacccagttctacatcttcaagatcgccgtgatcgagggcaacagcgagagagccctgcaggccatcatcaccctggagaacatcctgaccgacgaggagagcgaggacaacgacctggtggccgagagaggcagccccaccatgctgctgagcctggccgcccagttcgccctggagaacggccagcagatcgtggccgagaaggccctggagtacctggcccagcacagcgaggaccaggagcaggtgctgaccgccgtgaagtgcctgctgagattcctgctgcccaagatcgccgagatgcccgagagcgaggacaagaagaaggagatggacagactgctgacctgcctgaacagagccttcgtgaagctgagccagcccttcggcgaggaggccctgagcctggagagcagagccaacgaggcccagtggttcagaaagaccgcctggaacctggccgtgcagtgcgacaaggaccccgtgatgatgagagagttcttcatcctgagctacaagatgagccagttctgccccagcgaccaggtgatcctgatcgccagaaagacctgcctgctgatggccgtggccgtggacctggagcagggcagaaaggccagcaccgccttcgagcagaccatgttcctgagcagagccctggaggagatccagacctgcaacgacatccacaacttcctgaagcagaccggcaccttcagcaacgacagctgcgagaagctgctgctgctgtacgagttcgaggtgagagccaagctgaacgaccccctgctggagagcttcctggagagcgtgtgggagctgccccacctggagaccaagaccttcgagaccatcgccatcatcgccatggagaagcccgcccactaccccctgatcgccctgaaggccctgaagaaggccctgctgctgtacaagaaggaggagcccatcgacatcagccagtacagcaagtgcatgcacaacctggtgaacctgagcgtgcccgacggcgccagcaacgtggagctgtgccccctggaggaggtgtggggctacttcgaggacgccctgagccacatcagcagaaccaaggactaccccgagatggagatcctgtggctgatggtgaagagctggaacaccggcgtgctgatgttcagcagaagcaagtacgccagcgccgagaagtggtgcggcctggccctgagattcctgaaccacctgaccagcttcaaggagagctacgagacccagatgaacatgctgtacagccagctggtggaggccctgagcaacaacaagggccccgtgttccacgagcacggctactggagcaagagcgactag

SEQ ID NO: 20191 - DNA, 1848 bp, Artificial Sequence
  derived and/or modified sequence
atggagatcctgcacctggacatgcccctggacttctgcctgaacatcgccaagctgctgatggaccacgagagagagagcgtgggcttccacttcctgaccatcatccacgagagattcaagagcagcgagaacatcggcaaggtgctgatcctgcacaccgacatgctgctgcagagaaaggaggagctgctggccaaggagaagatcgaggagatcttcctggcccaccagaccggcagacagctgaccgccgagagcatgaactggctgcacaacatcctgtggagacaggccgccagcagcttcgaggtgcagaactacaccgacgccctgcagtggtactactacagcctgagattctacagcaccgacgagatggacctggacttcaccaagctgcagagaaacatggcctgctgctacctgaacctgcagcagctggacaaggccaaggaggccgtggccgaggccgagagacacgaccccagaaacgtgttcacccagttctacatcttcaagatcgccgtgatcgagggcaacagcgagagagccctgcaggccatcatcaccctggagaacatcctgaccgacgaggagagcgaggacaacgacctggtggccgagagaggcagccccaccatgctgctgagcctggccgcccagttcgccctggagaacggccagcagatcgtggccgagaaggccctggagtacctggcccagcacagcgaggaccaggagcaggtgctgaccgccgtgaagtgcctgctgagattcctgctgcccaagatcgccgagatgcccgagagcgaggacaagaagaaggagatggacagactgctgacctgcctgaacagagccttcgtgaagctgagccagcccttcggcgaggaggccctgagcctggagagcagagccaacgaggcccagtggttcagaaagaccgcctggaacctggccgtgcagtgcgacaaggaccccgtgatgatgagagagttcttcatcctgagctacaagatgagccagttctgccccagcgaccaggtgatcctgatcgccagaaagacctgcctgctgatggccgtggccgtggacctggagcagggcagaaaggccagcaccgccttcgagcagaccatgttcctgagcagagccctggaggagatccagacctgcaacgacatccacaacttcctgaagcagaccggcaccttcagcaacgacagctgcgagaagctgctgctgctgtacgagttcgaggtgagagccaagctgaacgaccccctgctggagagcttcctggagagcgtgtgggagctgccccacctggagaccaagaccttcgagaccatcgccatcatcgccatggagaagcccgcccactaccccctgatcgccctgaaggccctgaagaaggccctgctgctgtacaagaaggaggagcccatcgacatcagccagtacagcaagtgcatgcacaacctggtgaacctgagcgtgcccgacggcgccagcaacgtggagctgtgccccctggaggaggtgtggggctacttcgaggacgccctgagccacatcagcagaaccaaggactaccccgagatggagatcctgtggctgatggtgaagagctggaacaccggcgtgctgatgttcagcagaagcaagtacgccagcgccgagaagtggtgcggcctggccctgagattcctgaaccacctgaccagcttcaaggagagctacgagacccagatgaacatgctgtacagccagctggtggaggccctgagcaacaacaagggccccgtgttccacgagcacggctactggagcaagagcgactag

SEQ ID NO: 20192 - DNA, 2823 bp, Artificial Sequence
  derived and/or modified sequence
atgatatctgcccactgtaatcttcggctgctctgtagctccgactcatccgcaagcgcaagtcaagtcgccggcactacggaggttgtcgagaatttggtcactaacgataattctccgaacatcccagaagccattgacagacttttctcagatatcgctaatattaatagggagtcaatggctgagatcacagatattcagatcgaagagatggctgttaacctgtggaactgggcgctcactataggtggaggctggctcgtcaacgaggagcagaagattcgccttcactatgtcgcttgcaagctgctgtccatgtgtgaggccagcttcgcctccgagcaatcaatccagcggttgattatgatgaacatgcgcattggaaaagagtggcttgatgccggaaacttcttaatagccgacgagtgctttcaggccgctgtcgctagccttgagcaactctacgttaagcttatccagagatccagtcctgaagcagacctcacaatggaaaagatcacagtagagtcggaccactttagagtgctttcatatcaggcagagtccgctgttgcccagggcgactttcagcgagctagtatgtgcgtgcttcaatgtaaagatatgctcatgcgactgccccagatgacctcaagcttgcatcatctatgctataacttcggagtggagacccagaaaaataataagtatgaagagtctagcttctggctctcacaatcctatgatatcggtaaaatggataagaaatctaccggccctgagatgctggcaaaggtgctcaggctcttagccacgaattatctcgactgggatgatacaaagtattatgacaaagccctgaatgcagtgaaccttgctaacaaggagcacttgtcctctcccggactgttcctgaagatgaagatcctgttgaagggagagacatccaacgaagagttgctggaagcagtcatggaaatccttcacctggatatgcccctggatttctgcttgaacatcgcaaaactcttgatggaccacgaacgagaaagcgtcggattccacttcctgaccataatccatgagaggttcaagtctagcgagaacattggaaaagtgcttatcctacacaccgacatgctcctgcagcgcaaagaagagctgctggcaaaggagaaaatcgaggaaatatttctggcccaccaaaccggcaggcagttaacagcagaaagcatgaactggctgcataacattctatggagacaggcagcctcctccttcgaggtgcaaaactatactgatgcgctgcagtggtactactactctctccgcttctattcaaccgatgaaatggacctggattttaccaagctgcaacgaaatatggcttgttgctacttgaacctccagcagttagataaggcaaaggaagcagtcgctgaggcggagcggcacgatccaaggaacgtgtttacacaattttacatcttcaagatcgcagtgatagaaggtaattccgaaagggccctgcaggctatcatcactttggaaaacattctcacggacgaggaatccgaagataacgatttggtcgccgagagaggatcacccacaatgcttctgtccctggccgcgcagtttgccttagaaaatgggcagcaaattgtcgccgaaaaagcactggaatacctcgcccaacactcagaagaccaagagcaggtgctgaccgcggtgaagtgtcttttgcgatttctcctacctaagatcgccgagatgcccgagtccgaagataagaagaaagaaatggatcgcttgctgacatgcctcaacagagcatttgttaagctcagccaaccatttggagaggaggccctgagtctggagtcgagagccaacgaagcccagtggttccgcaaaaccgcgtggaacctcgctgtgcaatgtgacaaggaccccgtgatgatgagagagttcttcattctttcatataaaatgtcccagttttgccctagcgaccaggtgatcctgatcgccagaaagacttgtctgctcatggcggttgctgtggacctagagcaggggaggaaggcctcaacggcttttgagcagacaatgttcctgagccgtgcccttgaggagattcagacttgcaatgacatccataactttctgaaacaaacaggtactttttctaatgacagttgtgaaaagctactactcctgtatgagtttgaagtgcgcgccaagctgaacgatcccctgttagaaagttttcttgagagcgtgtgggaactgccacatctagaaaccaaaacattcgagacaattgccataatcgccatggagaagccggcgcactatcccctcattgctctgaaggctttgaaaaaagctctcctgctgtacaagaaggaggaacctatcgacattagccagtactccaagtgcatgcacaatctcgtcaatctgagcgtccctgacggagcctccaatgtcgagctgtgtcctctggaggaggtgtgggggtattttgaagacgccctgtctcatatctcccgcaccaaagactaccccgagatggagatcctgtggctgatggtcaaatcttggaatacaggcgtgctgatgttcagccggagtaagtacgcaagcgccgaaaaatggtgtggcctggccctgcggttccttaaccacctcacgtcctttaaagagtcctacgagacccagatgaatatgctgtacagccagttggtggaggctctttcaaacaacaagggacccgtttttcatgaacatggctattggtctaagtcggattag

SEQ ID NO: 20193 - DNA, 1848 bp, Artificial Sequence
  derived and/or modified sequence
atggaaattctgcacctcgatatgccactggacttctgcttgaacattgccaaactcctcatggaccatgaaagagaatctgtggggttccattttctgaccatcatccatgagaggtttaaatcttccgaaaatatagggaaagtcttgattctgcacactgacatgctccttcagcggaaggaggaactgctggcaaaggagaagattgaggaaatcttcctggcgcaccagacagggagacaactgacggcagagtccatgaattggctgcataatattctttggcgccaagccgccagctcttttgaggtgcaaaactatacagacgctctgcagtggtactactatagtcttcgcttctacagtacggatgagatggacttagacttcacaaagttgcagcgtaacatggcttgttgttacttaaacctccagcagctggacaaagcaaaagaggccgtggcagaggccgagcggcacgacccccgcaatgtgttcacccagttctacatttttaagatcgcagtcattgagggcaattcagagcgcgctctccaggccattataaccttggagaacatattgacagatgaggaatctgaggataatgatctcgttgctgagcgggggagtccaacaatgttactctccctggcggctcagttcgcgctcgagaacggtcaacagatcgtggccgagaaagctctcgagtacctggcgcagcatagtgaggatcaagaacaggttttaactgcagtgaagtgcttgctccgctttctcctgcctaagatagccgagatgccagagtccgaagacaaaaagaaagaaatggatagactgctgacctgcctgaatcgtgcctttgtcaaactgagccagccatttggtgaggaagctctatcattagagtcccgcgcaaacgaagcccagtggtttaggaagacggcctggaatttggctgtgcagtgtgataaggatccggttatgatgcgagagttttttatcctttcctacaagatgtcacagttctgcccttccgaccaggttatcctcattgcgagaaagacatgcctgttgatggccgtcgccgtggacttagaacaagggagaaaggcctcaactgccttcgaacagacaatgttcctgagccgggcgctcgaggaaatccagacttgtaatgacattcacaatttcctgaaacaaaccgggaccttttcaaacgattcatgcgagaagctcctgttactgtatgagtttgaggttcgggccaaattaaatgacccgctgctggagagcttcttggagtccgtgtgggagttgcctcatctggagaccaaaactttcgaaaccatagccatcattgccatggagaagccggcccattacccgctcattgcgctaaaggcgctcaagaaggccttgctgctgtacaagaaggaggagcccatcgatattagccagtatagcaaatgcatgcacaatcttgtgaacctgagtgtgccagacggggcttccaatgtcgaactttgtcccttggaggaggtctggggctacttcgaagacgctctttcccacatcagccgcacaaaagattatcccgagatggagatcctgtggctgatggtcaagtcctggaacacaggcgttttgatgttcagccgctctaagtatgctagcgctgaaaagtggtgtggacttgcactgagatttctaaaccacctgacttcttttaaagagagttacgagacgcagatgaatatgctgtactcacagctggtggaggctctctccaataataagggccctgtgtttcacgaacacggatactggtctaagtccgactag

SEQ ID NO: 20194 - DNA, 2823 bp, Artificial Sequence
  derived and/or modified sequence
atgatatctgctcattgtaacctccggctgctgtgcagctcggattcttcagcatcagcctcccaggtagctgggaccaccgaggtggtcgaaaacttggttaccaacgataattctccgaatataccagaggctattgataggctgttctccgacatcgctaacattaatcgagaaagtatggccgaaattaccgacatccagattgaggagatggctgttaacttgtggaattgggccctcaccataggcggcggatggttggtcaatgaagagcaaaaaatcaggctccactatgtcgcatgtaagctgctttccatgtgtgaagcctcatttgctagcgagcagagcatccaaaggctgatcatgatgaacatgcggatcggaaaggaatggctagacgcaggaaatttcctcatcgctgacgagtgtttccaggcagcagtggcttctctggaacagctatacgtcaagctgatacagcgctcaagtcccgaggctgacctgactatggaaaaaatcacagtggagagtgaccacttcagggtgctgagctatcaggctgaaagtgcagtcgcccagggcgacttccaacgtgcttctatgtgtgtcctgcagtgtaaggatatgctaatgcgattaccacaaatgacttccagcttacatcatttatgctacaactttggcgtggaaactcagaaaaataataaatatgaagagagttctttctggttaagccagtcatacgatattggcaagatggacaaaaagtccaccggaccagagatgctggccaaggttttgagacttctcgccactaactatctagactgggatgacacaaagtattacgacaaagcccttaacgccgtgaatctggcgaacaaggagcacttgagcagtcccggcctgtttcttaagatgaaaatactacttaagggggagacttctaacgaggagctgctcgaagcagtgatggagattttacatctcgatatgcctctcgacttttgtcttaatattgctaaactgctcatggaccatgaaagagaatctgtggggtttcattttctgacaatcatccatgaaaggtttaagagtagcgagaacatcgggaaggtcttaatccttcacacagatatgctcttgcagcgaaaagaagaactcttggcaaaggagaagattgaagaaatattcctcgcacaccaaactggaagacagttaaccgccgaaagcatgaactggttgcataacatcctctggaggcaggctgccagcagtttcgaggtgcagaattataccgacgcactgcagtggtactattattcactgagattttatagcaccgatgaaatggacctggacttcactaaactgcaaaggaacatggcgtgttgttacctgaacctgcagcagttggacaaagccaaagaggccgttgcagaggccgaacgccatgacccgaggaatgtgttcacacagttctatatttttaagatcgcagtcattgagggcaattctgagcgagcacttcaggcgattatcacattagaaaacatattaacagacgaggaatcagaggacaatgacctagtggccgagaggggcagtcctacaatgttgctcagcttagccgcccaattcgcattggagaacggccagcagatcgtggcagagaaggctctagaatacctggcccagcatagcgaggatcaggaacaggtcctgacagcagtcaagtgtttactgcgattcttacttcctaagattgcggagatgcccgagtctgaggataagaaaaaggagatggaccggctgctgacctgcctgaacagagcctttgtcaagctgagccaaccttttggggaggaggctctatctctggaatctcgcgcgaacgaggcccagtggttccgcaaaaccgcttggaatctcgctgttcaatgcgacaaagatcccgtgatgatgcgcgagtttttcattctgagttataaaatgtcgcaattctgtccctctgaccaagtaatactcatcgcccgcaagacatgcttgttgatggccgtagccgtggacctggaacagggacggaaggcttccactgcctttgagcagacaatgttcttgagtagggctcttgaagagatccagacctgtaacgacatccataattttctgaagcagacaggaacctttagtaacgattcatgtgaaaaactccttctgctctatgaatttgaggtcagagctaagctgaacgatccactgctggaaagctttcttgagtctgtgtgggagctgccccacctagaaaccaaaaccttcgagacaattgcaataatcgccatggagaaacccgcccactacccactgatcgccctcaaggccctgaagaaggctctcctgttatacaaaaaggaggagcctatcgatattagtcagtatagcaagtgcatgcataacctggttaatctcagtgtaccagatggggcctccaacgtggaactctgccccctcgaggaggtgtggggatactttgaagatgccctttcccacataagtaggacaaaagactaccctgagatggaaatcctttggcttatggtcaagagttggaacaccggcgtgctgatgttctcaagatcaaaatatgcctctgcagagaaatggtgtggattagccttacggttccttaatcacctgaccagcttcaaggaatcgtatgagacccagatgaatatgttatatagccagctcgtggaggctctttccaataataagggtcccgtgttccacgagcacgggtattggtcgaaaagtgactag

SEQ ID NO: 20195 - DNA, 2823 bp, Artificial Sequence
  derived and/or modified sequence
atgatcagcgcccactgcaacctgcggctgctgtgcagcagtgacagcagcgccagcgccagccaggtggccggcaccacagaggtggtggagaacctggtgaccaatgacaacagccccaacatccctgaggccatcgacaggctcttcagtgacatcgccaacatcaaccgggagagcatggccgagatcacagacatccagatcgaggagatggctgtgaacctgtggaactgggccctgaccatcggcggcggctggctggtgaatgaggagcagaagatccggctgcactacgtggcctgcaagctgctgtccatgtgtgaggccagctttgccagcgagcagagcatccagaggctcatcatgatgaacatgagaattggcaaggagtggctggatgctggcaacttcctgattgctgatgagtgcttccaggccgctgtggccagcctggagcagctgtatgtgaagctgatccagaggagcagccctgaggccgacctgaccatggagaagatcaccgtggagagtgaccacttccgggtgctgagctaccaggccgagagcgctgtggcccagggcgacttccagagggcctccatgtgtgtgctgcagtgcaaggacatgctgatgaggctgccccagatgaccagcagcctgcaccacctgtgctacaactttggagtggagacccagaagaacaacaagtatgaggagagcagcttctggctgagccagagctatgacatcggcaagatggacaagaagagcactggacctgagatgctggccaaggtgctgcggctgctggccaccaactacctggactgggatgacaccaagtactatgacaaggccctgaatgctgtgaacctggccaacaaggagcacctgagcagccctggcctcttcctgaagatgaagatcctgctgaagggggagaccagcaatgaggagctgctggaggccgtgatggagatcctgcacctggacatgcccctggacttctgcctgaacatcgccaagctgctgatggaccacgagcgggagagcgtgggcttccacttcctgaccatcatccacgagcgcttcaagagcagtgaaaatattggcaaggtgctgatcctgcacacagacatgctgctgcagaggaaggaggagctgctggccaaggagaagattgaggagatcttcctggcccaccagacaggccggcagctgacagctgagagcatgaactggctgcacaacatcctgtggaggcaggccgccagcagctttgaggtgcagaactacacagatgccctgcagtggtactactacagcctgcgcttctacagcacagatgagatggacctggacttcaccaagctgcagaggaacatggcctgctgctacctgaacctgcagcagctggacaaggccaaggaggccgtggccgaggccgagagacatgaccccagaaatgtgttcacccagttctacatcttcaagattgctgtgattgagggcaacagcgagcgggccctgcaggccatcatcaccctggagaacatcctgacagatgaggagagtgaagataatgacctggtggccgagcggggcagccccaccatgctgctgagcctggccgcccagtttgccctggagaatggccagcagatcgtggccgagaaggccctggagtacctggcccagcacagcgaggaccaggagcaggtgctgacagctgtgaagtgcctgctgcgcttcctgctgcccaagattgctgagatgcctgagagcgaggacaagaagaaggagatggaccggctgctgacctgcctgaacagagcctttgtgaagctgagccagccctttggagaggaggccctgagcctggagagccgggccaatgaggcccagtggttcaggaagacagcctggaacctggccgtgcagtgtgacaaggaccctgtgatgatgagggagttcttcatcctgagctacaagatgagccagttctgccccagcgaccaggtgatcctgattgccaggaagacctgcctgctgatggctgtggccgtggacctggagcagggcaggaaggccagcacagcctttgagcagaccatgttcctgagccgggccctggaggagatccagacctgcaatgacatccacaacttcctgaagcagacaggcaccttcagcaatgacagctgtgagaagctgctgctgctgtatgaatttgaggtgcgggccaagctgaatgaccccctgctggagagcttcctggagagcgtgtgggagctgccccacctggagaccaagacctttgagaccatcgccatcatcgccatggagaagccagcccactaccccctgattgccctgaaggccctgaagaaggccctgctgctgtacaagaaggaggagcccatcgacatcagccagtacagcaagtgcatgcacaacctggtgaacctgtctgtgcctgatggagccagcaatgtggagctgtgccccctggaggaggtgtggggctactttgaagatgccctgagccacatcagcaggaccaaggactacccagagatggagatcctgtggctgatggtgaagtcctggaacacaggagtgctgatgttcagccgcagcaaatatgccagcgctgagaagtggtgtggcctggccctgcgcttcctgaaccacctgaccagcttcaaggagagctatgagacccagatgaacatgctgtacagccagctggtggaggccctgagcaacaacaagggccctgtgttccatgaacatggctactggagcaagagtgactag

SEQ ID NO: 20196 - DNA, 1848 bp, Artificial Sequence
  derived and/or modified sequence
atggagatcctgcacctggacatgcccctggacttctgcctgaacatcgccaagctgctgatggaccacgagcgggagagcgtgggcttccacttcctgaccatcatccacgagcgcttcaagagcagcgagaacatcggcaaggtgctgatcctgcacacagacatgctgctgcagaggaaggaggagctgctggccaaggagaagattgaggagatcttcctggcccaccagacaggccggcagctgacagctgagagcatgaactggctgcacaacatcctgtggaggcaggccgccagcagctttgaggtgcagaactacacagatgccctgcagtggtactactacagcctgcgcttctacagcacagatgagatggacctggacttcaccaagctgcagaggaacatggcctgctgctacctgaacctgcagcagctggacaaggccaaggaggccgtggccgaggccgagagacatgaccccagaaatgtgttcacccagttctacatcttcaagattgctgtgattgagggcaacagcgagcgggccctgcaggccatcatcaccctggagaacatcctgacagatgaggagagcgaggacaatgacctggtggccgagcggggcagccccaccatgctgctgagcctggccgcccagtttgccctggagaatggccagcagatcgtggccgagaaggccctggagtacctggcccagcacagcgaggaccaggagcaggtgctgacagctgtgaagtgcctgctgcgcttcctgctgcccaagattgctgagatgcctgagagcgaggacaagaagaaggagatggaccggctgctgacctgcctgaacagagcctttgtgaagctgagccagccctttggagaggaggccctgagcctggagagccgggccaatgaggcccagtggttcaggaagacagcctggaacctggccgtgcagtgtgacaaggaccctgtgatgatgagggagttcttcatcctgagctacaagatgagccagttctgccccagcgaccaggtgatcctgattgccaggaagacctgcctgctgatggctgtggccgtggacctggagcagggcaggaaggccagcacagcctttgagcagaccatgttcctgagccgggccctggaggagatccagacctgcaatgacatccacaacttcctgaagcagacaggcaccttcagcaatgacagctgtgagaagctgctgctgctgtatgaatttgaggtgcgggccaagctgaatgaccccctgctggagagcttcctggagagcgtgtgggagctgccccacctggagaccaagacctttgagaccatcgccatcatcgccatggagaagccagcccactaccccctcatcgccctgaaggccctgaagaaggccctgctgctgtacaagaaggaggagcccatcgacatcagccagtacagcaagtgcatgcacaacctggtgaacctgtctgtgcctgatggagccagcaatgtggagctgtgccccctggaggaggtgtggggctactttgaagatgccctgagccacatcagcaggaccaaggactacccagagatggagatcctgtggctgatggtgaagtcctggaacacaggagtgctgatgttcagccgcagcaaatatgccagcgctgagaagtggtgtggcctggccctgcgcttcctgaaccacctgaccagcttcaaggagagctatgagacccagatgaacatgctgtacagccagctggtggaggccctgagcaacaacaagggccctgtgttccacgagcacggctactggagcaagagtgactag

SEQ ID NO: 20197 - DNA, 2823 bp, Artificial Sequence
  derived and/or modified sequence
atgatcagcgcccactgcaacctgcggctgctgtgcagcagcgacagcagcgcctccgcatcccaggtggcaggcactaccgaggtggttgagaacctcgttactaatgataatagtccaaatattcctgaggccattgataggctgtttagcgacatcgcaaacatcaatagggagtcgatggcagaaatcacagatattcaaatagaggaaatggctgtaaatctgtggaattgggctctgacaatcggcggcggatggctggtgaatgaggaacaaaagatccgtctgcactacgtcgcctgcaaacttcttagtatgtgcgaagctagctttgcatccgaacagtctatccagaggctaataatgatgaacatgcggatcgggaaagaatggttggatgccggcaattttctgattgctgacgagtgtttccaagccgccgtggcttccctggagcagctgtacgtaaagctcattcagagatcatcgccagaggccgacctaactatggaaaagattacagtggagtccgatcatttcagggtgctgtcgtaccaggcagaatccgccgtggcacagggggacttccaaagggccagtatgtgcgtactacagtgcaaagacatgctgatgcgccttccacaaatgacaagctccctacaccacctatgctacaattttggggttgaaacccagaagaacaacaaatacgaagagtcaagcttttggctctcacagtcttacgacatagggaaaatggacaagaagagcacaggacccgagatgttggccaaggtactcaggctactagctacaaattacctagattgggatgataccaagtattatgacaaggcccttaacgccgtaaatttagctaataaagagcatctgtcgtctcccggcctgttcctgaaaatgaagatcttactgaaaggagagacttcaaatgaggaattgctggaggccgtaatggaaatccttcacctggatatgccactggatttttgtctcaacattgctaagctgctgatggaccatgaaagagaaagtgtcggattccatttcctgacgatcatacacgaacgctttaagagcagcgaaaacattgggaaagtgctcattcttcatacggacatgttgctacagcgtaaagaagaattgctggctaaggagaaaatagaggaaatcttcctggctcaccagacgggcaggcaacttacggcagagtctatgaattggttgcataacatcttgtggcggcaggctgcctcttcctttgaggttcagaactacaccgatgccctgcagtggtactattactcgctcaggttttattcgaccgacgagatggatctcgacttcacgaaactgcagcgcaacatggcctgttgctatctgaacctgcaacagctggataaagccaaggaggcagtggccgaggcggagagacatgaccctcgcaatgtgtttactcaattttacattttcaaaattgcggttatcgagggcaattcggaacgcgccctgcaagcaatcatcaccctcgagaatattttaactgatgaagaaagcgaggacaacgatttggtggctgagaggggctccccaacaatgctactgagccttgccgcccagtttgctctcgaaaacgggcaacaaatcgtagccgagaaggctctggaatatctcgcccagcatagtgaggaccaggagcaggtgctaaccgccgtgaaatgtttgctaaggttcctcttgcctaaaatcgcagaaatgcctgagtcagaggacaagaagaaggagatggaccgcctactcacctgccttaatcgcgctttcgtgaaactctcccaaccctttggggaggaagcactgtcactggaatcaagggctaacgaggctcagtggtttcggaaaacggcttggaacttagccgtgcaatgcgataaagaccctgtgatgatgagggagttcttcatactgtcttataagatgagccaattttgtccttctgaccaggttattcttatcgctaggaaaacgtgtctgctgatggctgtggcggttgatctggagcaggggcgcaaggcaagcaccgcatttgagcagaccatgttcttgtctcgtgcgcttgaagagattcaaacttgtaatgatattcacaacttcctaaaacagactggtaccttctctaacgattcctgtgagaaattacttctgttgtacgagtttgaagtccgtgccaagcttaacgatcccctgctggaaagctttttggagtctgtctgggagttgccccacctcgaaaccaaaactttcgaaaccatcgctatcattgcaatggagaagcccgcccattatcctctgatcgccctcaaagcgctcaagaaagccctgctcctgtacaaaaaggaagaacccattgacatctcccaatactcaaagtgtatgcacaacttggtgaatctgtccgtgccagatggtgcaagtaacgtcgaactgtgtcctttggaggaggtttgggggtattttgaggatgccctaagtcatatcagcaggacaaaagactaccctgagatggagatcctgtggctgatggtgaagtcatggaatacaggggtgttgatgttctctagaagtaaatatgctagcgccgagaagtggtgtgggctcgcactccgctttttaaaccaccttacctcattcaaggagagttacgagacacagatgaacatgctctacagccaactggtcgaggctctcagcaataacaaaggacctgtatttcacgagcacggatattggtcaaagagcgattag

SEQ ID NO: 20198 - DNA, 1848 bp, Artificial Sequence
  derived and/or modified sequence
atggagatcctgcacctggacatgcccctggacttctgcctgaacattgccaaactgttaatggatcacgagcgcgagagcgtaggctttcactttcttacaatcattcacgaacgctttaaaagcagtgaaaatataggcaaagtcctcatcctgcatactgacatgctgcttcagaggaaagaggagctgctggcgaaggagaaaatcgaagagatcttccttgcccatcagactggaagacaactgacagcagagtcaatgaattggctccacaatatactgtggagacaggcagcctcctcctttgaggtacagaattacactgatgcactccagtggtattactactctctcaggttctactcaacagatgaaatggacctggatttcaccaaattgcagaggaatatggcctgctgttacctgaaccttcagcagctggataaggccaaagaagccgtggctgaggcagagagacacgatcctcggaacgtcttcacccagttctacattttcaaaattgcagtgatcgagggaaattccgagcgcgccctgcaggccattatcactctcgagaacattctgaccgatgaagaatcggaagacaacgatcttgttgcagagaggggttcaccaacgatgctgttgagtcttgccgctcagttcgccctggagaatgggcagcagatcgtggccgagaaagctctggagtatctggcccagcactctgaggatcaggaacaggtgctcacggcggtcaaatgtctccttagattcctgctgccaaagatcgccgaaatgcctgagtccgaggataagaagaaagaaatggacagattgctgacatgccttaacagagcgtttgtcaagctgagccagccatttggcgaggaggccctgagcctcgagagcagggccaacgaggcacagtggttccggaagaccgcttggaatctcgcggttcagtgcgataaggaccctgtgatgatgagagaatttttcatcctttcgtacaagatgagccagttttgtccatccgaccaagtgatcctgatcgcccggaaaacctgtttgctgatggcagttgcggtcgacctggagcaggggagaaaagcctcgaccgctttcgagcagaccatgtttcttagcagggctctagaagaaattcaaacctgcaatgacatccacaacttcttaaagcagacagggacgttcagtaatgattcctgcgagaaattattacttctgtacgaatttgaggtccgggccaaactgaatgatcctcttctggaatctttcctcgagagtgtatgggaactcccccacctcgagactaaaacctttgagaccattgccatcatcgcaatggaaaaacccgcccactaccccttaattgccctgaaggccctaaagaaagctctgttactatataagaaagaggagccaatcgatatctcccagtattcaaagtgcatgcacaatcttgtcaatctctcggttccagatggagcttcgaatgtggaactgtgccctctggaggaagtgtgggggtattttgaagatgcacttagccatatctcccggacaaaagactacccagaaatggaaatactttggctgatggtaaagtcctggaacacgggtgtcctgatgttttctcgctccaagtacgctagtgccgaaaagtggtgtggcctggctctgcgcttcctcaatcatctgacatctttcaaagagagttacgagacccagatgaacatgctctattcccagttggtagaggccttgagtaataataaggggcccgtgtttcatgagcatggctattggtctaagtccgattag

SEQ ID NO: 20199 - DNA, 2823 bp, Artificial Sequence
  derived and/or modified sequence
atgatcagcgcccactgcaacctgcggctgctgtgcagcagcgacagcagcgcatccgccagccaggtagccgggacaaccgaggtcgtggaaaatcttgtgactaacgataatagccccaatatacctgaggcaatcgatcgccttttctctgatattgctaacattaatcgggagtctatggccgaaatcaccgatatccagattgaggaaatggcagtgaacttgtggaactgggctctcactataggggggggatggctggtcaatgaggaacagaagatccggttacactacgtagcttgtaagctgttatcaatgtgtgaggcgagctttgcaagcgagcagtcgatccagaggctcataatgatgaacatgcgaattggaaaagaatggcttgacgccgggaattttctgatagcggacgagtgctttcaggcagcggtggcgagcctggaacaactgtatgtgaaactgatacagaggtcctcccctgaggcagaccttactatggaaaagatcacagtggagtccgaccattttcgcgtactgtcttaccaggcagaaagcgccgtcgcacaaggtgattttcagcgggcaagtatgtgcgtgctgcaatgtaaagacatgttaatgcggttaccccaaatgactagcagcttacatcacctttgctataactttggagtggaaactcagaaaaacaataagtacgaagaatcgtccttctggcttagtcagagctacgacattggtaaaatggacaagaagagcactggcccagagatgctggcaaaagtgctgcgcttactggccacaaattatctggactgggatgacaccaaatactatgataaagcgctgaacgcggtgaatctcgccaataaagaacacctgagctcaccgggactcttccttaaaatgaaaatcctactaaagggggagacatcaaatgaggagcttctggaggccgtaatggaaatcttgcacctggacatgcctctggatttttgcctgaacattgcaaagctgctgatggaccatgaacgcgagagcgtcggctttcactttcttaccatcatccacgagcggttcaaatcaagcgaaaacattggtaaagtcttgattttgcataccgatatgcttcttcagcgcaaagaggaactgctggccaaggaaaaaatcgaggaaattttcctggctcaccagacaggccggcagctcacggccgaatctatgaactggttacacaacatcctgtggcgccaggccgcttccagcttcgaagttcagaattacaccgatgctctacagtggtattactactccctgcgtttttactcaacagatgagatggatctggattttactaagttacaacggaacatggcttgctgctatctgaatctacaacagctagacaaagccaaagaagccgttgcagaggcagagcgacacgatccacgaaacgtgtttacccagttttatatcttcaagatagcagtgattgaggggaattcggaaagggctctgcaggctattataactctggaaaacattcttactgatgaagagtctgaggacaatgacctggtggctgaaagaggcagtccaaccatgttgttgtccctggccgcacagtttgcactggagaatggacagcagatcgtcgcagagaaagcgctggaatacctggctcagcacagcgaggatcaagaacaagtgctcactgccgttaagtgtctgctccggtttctgcttccaaagattgcggagatgcccgaatctgaggataaaaagaaagagatggacagactcctgacatgcttgaacagagcctttgttaagctgtcacagccgtttggggaggaggcgctgagtttggagtccagagccaacgaagcacagtggttccgcaaaactgcttggaacctggctgtacagtgtgataaagaccctgttatgatgcgggaatttttcatcctgtcgtataaaatgagccaattctgtccgtccgaccaggtcatcctgatagcaaggaagacctgccttctgatggcagtcgccgtggatttggagcaaggcaggaaggcctctacagcctttgaacagacgatgttcttgagcagagccctggaggagatccagacctgtaacgatatccataatttcctcaaacaaacagggacattttccaatgattcttgcgagaagctgctgctcttatacgaatttgaggtccgggcaaaacttaacgacccgctgcttgaaagtttcttggagagcgtgtgggaactccctcacctggagacaaaaacttttgaaactattgccatcatcgccatggagaagcctgcccattatccgctaatcgccctgaaagcgctcaaaaaggccctgctgttgtataagaaggaagaacctattgatatctcacagtactctaaatgtatgcacaacctggttaaccttagcgtgcctgatggggcgagcaatgtagaactctgccccctcgaggaagtgtggggttacttcgaagacgctctgagccacattagtcgcacgaaggactatcctgaaatggaaatcctgtggctgatggtcaagtcctggaatacaggggtcctaatgttttcacgaagtaagtacgcctctgctgagaagtggtgcggcttagcgctgcgatttcttaaccacctgactagttttaaagaatcctatgaaactcagatgaacatgctctactctcagctcgttgaggcactgtccaataacaagggaccagtgtttcacgaacatggatattggtccaaatcggactag

SEQ ID NO: 20200 - DNA, 2823 bp, Artificial Sequence
  derived and/or modified sequence
atgattagtgcccactgtaacctacgtctgctttgttcttctgacagctcagcctcggcctcccaagtggctggaactacagaagtggtggaaaatcttgttactaacgataattctcctaacatccctgaggcaatcgaccgcctgttttctgatattgccaatataaaccgggagagtatggcagaaattacagatatccagattgaagagatggccgtgaacctctggaattgggcgttgaccattggaggcggatggctagtgaatgaagagcagaaaattcgcttacactatgtagcctgcaagctgttgtccatgtgcgaggctagtttcgctagcgagcagtccatccagaggctcatcatgatgaatatgagaatcgggaaggagtggctggatgccggaaacttcctgatagccgatgagtgttttcaggcagcggtagcttctctggagcagttatacgtcaagctcatacagcggagtagtccggaggccgacctaaccatggagaagattactgtggagtctgatcactttcgagtgctgtcataccaggccgaaagtgccgtggctcaaggggacttccagagagcctcaatgtgtgtgttacagtgcaaagatatgcttatgcgactgccgcagatgaccagcagtctgcatcatctttgctataatttcggcgtagaaacacagaaaaacaataaatatgaggaatcgtccttttggctgtcgcagagctacgatataggtaagatggacaagaagagcacgggcccagagatgttagcgaaggtgctccggttattagccacaaactacctggattgggacgacacaaagtactatgacaaggctcttaacgcagtaaatttagccaacaaggaacatctgtcaagccccggactattccttaaaatgaagattctactgaagggggaaacctccaatgaagaattacttgaggctgtcatggagatattgcacctggacatgcctctggacttttgtcttaacatcgccaaactgctgatggatcacgagagggaatctgtcggatttcattttctcaccattatccatgagcgattcaagagttctgaaaatatcggaaaggtgctgatccttcataccgatatgctattgcagcggaaagaagagctgttagcgaaagagaagatcgaggaaattttcctggctcaccagacaggtcgccaactgacagccgaatcgatgaattggctccataatattctgtggagacaggctgcaagcagcttcgaggttcagaattatacggacgctctacaatggtattactatagcctgcgcttttactcaacggacgagatggacctcgacttcaccaagctccagaggaatatggcatgctgctaccttaatttacaacagctagacaaagctaaggaggccgttgccgaagctgaacgccacgaccccagaaacgtgttcacgcagttttacatttttaaaattgcagtcatagagggaaattccgagagggctttgcaggcaattatcaccctggaaaatatcctgacggatgaagaatccgaggacaacgaccttgtggctgagaggggttctcccactatgttgctttctcttgctgcacagtttgctctcgaaaacgggcagcagattgtcgctgaaaaggccctggaatatctcgctcagcactcagaggaccaggaacaggtcctgacagctgttaagtgcctgctgcggttcctgttgcctaagatcgcggagatgccagaaagcgaagacaaaaaaaaagagatggataggctcctcacatgcctcaatagggcattcgttaaactctcccagcccttcggcgaagaggcactgagcttggaaagtagggccaacgaggcacaatggtttagaaagaccgcttggaacctggccgtgcagtgtgataaggatcccgttatgatgcgagagttcttcatcctgtcctataagatgagccagttttgccccagcgaccaagtgattctgatagctcggaaaacctgtctattaatggccgtggcggttgacctggagcaggggcgaaaagcttccaccgcattcgaacagactatgtttctgtctagagcactggaagaaatccagacttgtaatgacattcataactttttaaaacagacaggaacattctctaatgacagctgcgagaaactgctgctgctatatgaattcgaggtgcgggctaaactgaacgaccccctgttagaaagcttcctggagtcagtgtgggagctgcctcatctggagaccaagacctttgagactattgccattattgcgatggaaaagcccgctcactaccctctgatagcgctcaaggcacttaaaaaggctctgcttctctacaaaaaggaagagcctattgatatttctcaatatagtaaatgtatgcacaatctggtcaacctgagcgtccctgacggagcaagcaacgtggagctgtgccccctggaagaggtgtggggctactttgaagacgctctgagccacatctcacgaacaaaggactaccccgagatggagatcctttggctgatggtgaagtcttggaacacaggtgtcttgatgttcagtaggtcaaagtacgcctcagcagagaagtggtgtggactcgccctgaggttcctaaatcatctgacaagcttcaaggagagttatgaaacccaaatgaatatgctttattcgcagctagtcgaggcattgagcaacaataaaggccctgtatttcacgagcatggctattggagcaaaagcgactag

SEQ ID NO: 20201 - DNA, 1848 bp, Artificial Sequence
  derived and/or modified sequence
atggagatcctgcacctagatatgccacttgacttttgtctgaatatcgctaagctgttgatggatcacgaacgggagagcgtgggcttccactttctgaccatcattcatgaaagattcaaaagctcagagaatattggcaaagtactgatccttcataccgacatgcttctccagagaaaggaggaattactggctaaagagaagatcgaagaaatcttcctcgcccaccagaccggtcggcagctgacagcagagtcaatgaactggctacacaacatactctggaggcaagctgcatccagtttcgaagtgcagaactatactgatgctctccagtggtactattattcactcagattctattcaaccgacgagatggacttggactttaccaagcttcagcgtaacatggcttgctgttaccttaatctccagcagctcgataaagcaaaggaggctgtagcagaagccgagcgccacgaccctcgtaacgtgtttactcagttttatatctttaaaatagccgtaatagaggggaatagcgaacgggcactacaggcaatcattactctggagaatatcttgaccgatgaagagtctgaggataacgacctggttgccgaacgcggaagtcctaccatgctgctgtccttggcagcccagttcgcattggagaacggacagcagatagtggcagaaaaggctctcgagtatttagcccagcacagtgaggaccaggagcaggtgctgaccgccgtcaagtgcctgctccggttcttgctgcctaaaatagcagaaatgccggaaagtgaagacaagaagaaggagatggacaggttgctgacatgtctgaaccgggcatttgtgaaacttagccaacccttcggtgaggaagccctgagcttggagtctcgggcaaacgaggctcagtggttccgcaagaccgcctggaatctggctgtgcagtgtgacaaagaccctgtgatgatgcgggagttcttcatacttagctataaaatgtcccaattctgccctagtgaccaagtgattcttatcgcgaggaaaacctgcctgttgatggcagtcgccgtggacctggaacaaggtcgcaaggctagcactgccttcgaacagacgatgttcctcagtcgcgcattggaagaaatccaaacctgcaacgatatacacaattttcttaaacagaccggcactttctccaatgacagttgtgagaagcttctgcttctctatgagtttgaggtccgggctaaactaaacgacccccttctggagagtttccttgagtccgtgtgggagttgccccatctggagaccaaaacattcgagactatagcaatcatcgcgatggagaagccagcccactatcccttgattgccttaaaggcgctgaagaaagccttgctgctttacaaaaaggaagagcctatcgatatctcacagtattcaaagtgcatgcataatctcgttaacttgtcggttccagacggtgcttcaaatgtggagctgtgcccgttagaggaagtgtggggctattttgaagatgcactgagtcatattagtcgcaccaaggattacccagaaatggagatactgtggctgatggtcaagagctggaataccggagtcttgatgttttcacgctcgaagtatgccagcgccgaaaaatggtgtggactggctctgcgcttccttaatcatcttactagcttcaaagagtcttatgaaacccagatgaacatgctgtacagtcagctggtcgaggcactgtctaacaacaaaggcccagtttttcatgaacatgggtactggtctaagagcgactag

SEQ ID NO: 20202 - DNA, 2823 bp, Artificial Sequence
  derived and/or modified sequence
atgattagcgcacactgcaatttgaggctcctgtgctcttccgacagctcagccagcgcctcccaggttgccggaacaacagaggttgtagagaacctggttacgaatgataactcccccaatatacccgaagctatcgaccggctgtttagcgacatagccaatattaatagagagtctatggctgaaattaccgacattcagattgaggagatggctgtcaacctgtggaactgggccttgacgattggaggcggatggctggtcaacgaggaacagaaaatcaggttgcactatgtggcttgtaaattattgagcatgtgcgaggcaagctttgccagcgaacagtccatccagcgattgatcatgatgaatatgagaattggcaaagagtggctggatgccggaaactttctcattgcggacgagtgcttccaggccgctgtggcaagtctcgagcagctgtatgtaaagctgatccagcgaagttcccccgaagccgatctgactatggaaaaaatcaccgtagagagcgaccatttcagggtgctctcatatcaggcagaatccgccgtggcacaaggagacttccagagggcatctatgtgcgtcttgcagtgcaaagatatgctaatgcgccttcctcaaatgacgtcctctctgcaccatttgtgctataattttggcgttgagacacagaaaaacaacaagtatgaagagagttctttctggctgagccaatcatacgatatcggaaagatggacaaaaagagtacaggccctgaaatgctggccaaggtgcttcgtttgctggccacaaactacctggattgggacgataccaaatactatgacaaagcccttaacgccgtgaacctggcaaacaaggagcacctgagcagccccggtctcttcctgaaaatgaagatccttctgaagggggagacatctaatgaggaactgctggaagcagtgatggagattctgcacttggacatgcctctcgatttttgcctcaatatcgccaaacttctgatggatcatgaacgggaatcagtcggatttcatttcctcaccattatccacgaacggtttaaaagctctgaaaacattgggaaagttttaatattgcatacagacatgctgctgcaacgtaaagaggagttgcttgccaaagaaaaaatcgaggaaatttttctcgcccaccagaccggacgccagcttacagctgaatccatgaattggctccataacattctctggaggcaggccgcaagcagttttgaagtgcagaactacacggatgccttgcaatggtactattatagcctgaggttttattcaaccgacgagatggacttggattttaccaaactgcagagaaacatggcctgctgttatctgaaccttcaacagctggacaaagccaaggaggccgttgcagaggccgagcgacacgatccccgtaacgtcttcacccagttttacattttcaagatcgcagttatcgaggggaatagtgaacgggcactccaggctatcatcacattggaaaacattctgaccgatgaggagagcgaagataacgatctggttgcggaacggggatctccaaccatgttgctctctctggccgcacagtttgcactcgagaatgggcagcagattgttgctgaaaaggctttggaatatttggcacaacattctgaggaccaagaacaagtgttgactgccgtaaaatgcctcctgcgtttcctgctgccaaaaatcgctgaaatgcccgagtcagaggataagaaaaaagagatggataggctgttgacttgcctaaatcgcgcttttgtgaagctcagtcagccttttggcgaggaggcactctctctggagagccgcgctaacgaggctcaatggtttcggaagacagcctggaatttggcggtgcaatgcgataaagacccagtaatgatgcgggaattctttatccttagctacaagatgagccagttttgcccatccgaccaagtgatactgattgcccgaaagacttgtctgctgatggcagtcgctgttgaccttgaacagggcagaaaagcctctaccgctttcgagcagacaatgttcttatcacgagctctggaggaaatccagacttgtaacgacatacataacttcctgaagcagacagggaccttttcaaatgacagctgcgaaaaattactccttctgtacgagtttgaagtgagagctaaattaaacgacccactattggaaagctttcttgaatccgtctgggaactcccccacctggaaaccaaaacctttgagaccatagctatcatcgccatggagaagcccgctcattatccccttattgccctgaaggccctgaaaaaggccttactactgtacaagaaggaggagccaattgacatcagccagtattcgaaatgcatgcataacttggtcaatctgagcgtgccggatggcgcaagcaacgtcgaactgtgtccactggaggaggtctggggttactttgaagacgcactgagccacatcagtaggactaaagattacccagagatggaaatcctgtggttgatggtgaagagctggaacactggcgttcttatgtttagcaggagcaaatacgcctctgccgagaaatggtgcggtttggcgctgcgattcctgaatcaccttactagttttaaggagtcctatgagacccagatgaacatgctgtactcccagctcgtggaagcgctctctaataacaagggccctgttttccatgagcatgggtattggtccaaatctgactag

SEQ ID NO: 20203 - DNA, 2977 bp, Artificial Sequence
  derived and/or modified sequence
atgatctcggctcactgcaacctccgcctcctgtgttcaagcgattcttctgcctcagcctcccaagtagctgggactacagaagttgttgaaaacctggttacaaatgataattcacctaacataccagaggcaattgatagactcttcagcgacatagcaaatatcaacagggagtctatggctgaaataacagacattcagattgaagaaatggcagtaaacctatggaactgggcacttaccataggaggaggttggcttgtaaatgaagagcagaaaattagattacattatgttgcttgcaagttgctgagtatgtgtgaagcctcatttgcctcagaacaaagtattcaacgactgattatgatgaatatgagaataggaaaagaatggttggatgctggaaattttctaatcgctgatgaatgttttcaagctgctgtggccagtctggagcaattatacgtcaaattaattcaaaggagctcccctgaggctgacttgaccatggagaagattactgttgagagtgaccacttcagagtgctttcttaccaagcagagtcagcagttgctcaaggggattttcaaagagcatctatgtgtgtactgcaatgtaaagatatgttgatgaggctcccccagatgacttcaagtcttcatcatctctgttacaactttggagtagaaacccagaagaataataaatatgaagaaagttctttctggcttagccaaagctatgatattgggaagatggataagaaatctactgggccagaaatgctggctaaagttctacggctattagccacgaattatttggattgggatgacaccaaatattatgataaggctctcaatgctgtaaacctagcaaacaaggaacatttaagttctcctgggcttttcttaaaaatgaaaatcctcttgaaaggcgaaacatctaatgaagaactccttgaagctgtcatggaaatactacatcttgacatgcccttagacttctgtctgaacattgctaaactgctgatggatcatgaaagagaatctgttgggtttcatttcctgacgattattcatgaacgttttaagtcatcggaaaatattggaaaagttctgatactccatactgacatgcttttacaaaggaaggaagaacttcttgccaaggagaagattgaagaaatctttttagctcaccaaacaggaagacaactgacagcagaatcaatgaactggttacacaacattctgtggagacaagctgccagtagttttgaggtacaaaattacactgatgccctacaatggtactattattctctgaggttttattcaactgatgaaatggatctggacttcaccaagctgcagaggaacatggcttgctgttacctgaatttgcaacaacttgataaggccaaagaggcagtggcagaagctgaacgacatgaccctaggaacgttttcactcaattttatatattcaagattgcagtcatagagggcaactctgaaagagctttgcaggcaataattactttagagaatatattaacagatgaagagtcagaagataatgatctagttgcagagagaggttcacctaccatgcttctaagtttagctgcccagtttgctctagagaatggacaacaaattgtggcagaaaaagctttggaatatttagctcaacattcagaagaccaggaacaagttcttacagctgtaaagtgtttgcttcgttttcttcttccaaaaattgctgaaatgccggaatctgaagataagaagaaagaaatggatcgacttttgacttgcctgaatagagcctttgtgaaactttctcagccttttggtgaagaagccttaagtttggagtcaagagctaatgaagctcagtggtttcgaaaaacagcttggaacttggctgtgcaatgtgacaaagatccagtgatgatgagagagttttttatactttcttataagatgtcccagttttgtccttctgatcaagtaattctgattgcacggaaaacatgtttacttatggcagttgcagttgatctagagcaagggagaaaagcttcaacagcttttgaacagaccatgttcctgagtcgtgcacttgaggagatccagacatgcaatgacatccataatttcctgaaacaaacagggaccttctcaaatgattcatgtgagaaattgcttctgctgtacgagtttgaagttagagccaaattgaatgatccattactggaaagcttcctggaatcagtgtgggagttgcctcatttagaaactaaaacttttgaaacaattgcaataatagcaatggaaaagcctgcacactatcctttgattgctctcaaggccttgaaaaaggctttattgctctacaaaaaggaagaaccaattgatatatcacaatacagcaaatgtatgcacaacttggttaacctctcagtgccagatggggcgtcgaatgtagagctctgtcccctggaagaagtttggggctattttgaagatgctctgagccacattagccgcactaaagactacccagaaatggagattctctggctgatggtcaagtcctggaataccggagtacttatgtttagcaggagcaagtatgcatctgctgaaaagtggtgtggcctggccttgcgtttccttaaccaccttacctccttcaaggaaagctatgaaactcagatgaatatgctgtatagtcagcttgtggaagcattgagtaacaacaagggcccagtttttcatgaacatggctactggagcaagtcagattaggcaagctcatggccacatgaagaagatacattgtcccgagatgctgactgtttaaatttttgccagagtttctcttgagcttttgtttctgtttgctcagaccctgttttcatgttgttgaataaactttctaaaataaaagcatgctgaattt

SEQ ID NO: 20204 - DNA, 2224 bp, Artificial Sequence
  derived and/or modified sequence
agtatcacctcagcatacacagattgaaaaatgttagaaaccaggaagacaactctacttttttgcattgggggaataaacaaaccaactaaccaactaaaataatacacttactccaactaagacaacataggaagaccagagagatgattggagtcaccaagttgaagtacattagtttgggatgataattccttatgacagtgtttatccaaatctgtcatggaaatactacatcttgacatgcccttagacttctgtctgaacattgctaaactgctgatggatcatgaaagagaatctgttgggtttcatttcctgacgattattcatgaacgttttaagtcatcggaaaatattggaaaagttctgatactccatactgacatgcttttacaaaggaaggaagaacttcttgccaaggagaagattgaagaaatctttttagctcaccaaacaggaagacaactgacagcagaatcaatgaactggttacacaacattctgtggagacaagctgccagtagttttgaggtacaaaattacactgatgccctacaatggtactattattctctgaggttttattcaactgatgaaatggatctggacttcaccaagctgcagaggaacatggcttgctgttacctgaatttgcaacaacttgataaggccaaagaggcagtggcagaagctgaacgacatgaccctaggaacgttttcactcaattttatatattcaagattgcagtcatagagggcaactctgaaagagctttgcaggcaataattactttagagaatatattaacagatgaagagtcagaagataatgatctagttgcagagagaggttcacctaccatgcttctaagtttagctgcccagtttgctctagagaatggacaacaaattgtggcagaaaaagctttggaatatttagctcaacattcagaagaccaggaacaagttcttacagctgtaaagtgtttgcttcgttttcttcttccaaaaattgctgaaatgccggaatctgaagataagaagaaagaaatggatcgacttttgacttgcctgaatagagcctttgtgaaactttctcagccttttggtgaagaagccttaagtttggagtcaagagctaatgaagctcagtggtttcgaaaaacagcttggaacttggctgtgcaatgtgacaaagatccagtgatgatgagagagttttttatactttcttataagatgtcccagttttgtccttctgatcaagtaattctgattgcacggaaaacatgtttacttatggcagttgcagttgatctagagcaagggagaaaagcttcaacagcttttgaacagaccatgttcctgagtcgtgcacttgaggagatccagacatgcaatgacatccataatttcctgaaacaaacagggaccttctcaaatgattcatgtgagaaattgcttctgctgtacgagtttgaagttagagccaaattgaatgatccattactggaaagcttcctggaatcagtgtgggagttgcctcatttagaaactaaaacttttgaaacaattgcaataatagcaatggaaaagcctgcacactatcctttgattgctctcaaggccttgaaaaaggctttattgctctacaaaaaggaagaaccaattgatatatcacaatacagcaaatgtatgcacaacttggttaacctctcagtgccagatggggcgtcgaatgtagagctctgtcccctggaagaagtttggggctattttgaagatgctctgagccacattagccgcactaaagactacccagaaatggagattctctggctgatggtcaagtcctggaataccggagtacttatgtttagcaggagcaagtatgcatctgctgaaaagtggtgtggcctggccttgcgtttccttaaccaccttacctccttcaaggaaagctatgaaactcagatgaatatgctgtatagtcagcttgtggaagcattgagtaacaacaagggcccagtttttcatgaacatggctactggagcaagtcagattaggcaagctcatggccacatgaagaagatacattgtcccgagatgctgactgtttaaatttttgccagagtttctcttgagcttttgtttctgtttgctcagaccctgttttcatgttgttgaataaactttctaaaataaaagcatgctgaattt

SEQ ID NO: 20205 - DNA, 3133 bp, Artificial Sequence
  derived and/or modified sequence
gtgcgctgtggacggaggttgtggagagagcagggcggcattggtggctgcggctgaggcttgagccagagatttaaaaatggacaatgatgattttttttccatggactttaaagatggagtctgtctctgttgtccaggctggagtgcagtggcatgatctcggctcactgcaacctccgcctcctgtgttcaagcgattcttctgcctcagcctcccaagtagctgggactacagaagttgttgaaaacctggttacaaatgataattcacctaacataccagaggcaattgatagactcttcagcgacatagcaaatatcaacagggagtctatggctgaaataacagacattcagattgaagaaatggcagtaaacctatggaactgggcacttaccataggaggaggttggcttgtaaatgaagagcagaaaattagattacattatgttgcttgcaagttgctgagtatgtgtgaagcctcatttgcctcagaacaaagtattcaacgactgattatgatgaatatgagaataggaaaagaatggttggatgctggaaattttctaatcgctgatgaatgttttcaagctgctgtggccagtctggagcaattatacgtcaaattaattcaaaggagctcccctgaggctgacttgaccatggagaagattactgttgagagtgaccacttcagagtgctttcttaccaagcagagtcagcagttgctcaaggggattttcaaagagcatctatgtgtgtactgcaatgtaaagatatgttgatgaggctcccccagatgacttcaagtcttcatcatctctgttacaactttggagtagaaacccagaagaataataaatatgaagaaagttctttctggcttagccaaagctatgatattgggaagatggataagaaatctactgggccagaaatgctggctaaagttctacggctattagccacgaattatttggattgggatgacaccaaatattatgataaggctctcaatgctgtaaacctagcaaacaaggaacatttaagttctcctgggcttttcttaaaaatgaaaatcctcttgaaaggcgaaacatctaatgaagaactccttgaagctgtcatggaaatactacatcttgacatgcccttagacttctgtctgaacattgctaaactgctgatggatcatgaaagagaatctgttgggtttcatttcctgacgattattcatgaacgttttaagtcatcggaaaatattggaaaagttctgatactccatactgacatgcttttacaaaggaaggaagaacttcttgccaaggagaagattgaagaaatctttttagctcaccaaacaggaagacaactgacagcagaatcaatgaactggttacacaacattctgtggagacaagctgccagtagttttgaggtacaaaattacactgatgccctacaatggtactattattctctgaggttttattcaactgatgaaatggatctggacttcaccaagctgcagaggaacatggcttgctgttacctgaatttgcaacaacttgataaggccaaagaggcagtggcagaagctgaacgacatgaccctaggaacgttttcactcaattttatatattcaagattgcagtcatagagggcaactctgaaagagctttgcaggcaataattactttagagaatatattaacagatgaagagtcagaagataatgatctagttgcagagagaggttcacctaccatgcttctaagtttagctgcccagtttgctctagagaatggacaacaaattgtggcagaaaaagctttggaatatttagctcaacattcagaagaccaggaacaagttcttacagctgtaaagtgtttgcttcgttttcttcttccaaaaattgctgaaatgccggaatctgaagataagaagaaagaaatggatcgacttttgacttgcctgaatagagcctttgtgaaactttctcagccttttggtgaagaagccttaagtttggagtcaagagctaatgaagctcagtggtttcgaaaaacagcttggaacttggctgtgcaatgtgacaaagatccagtgatgatgagagagttttttatactttcttataagatgtcccagttttgtccttctgatcaagtaattctgattgcacggaaaacatgtttacttatggcagttgcagttgatctagagcaagggagaaaagcttcaacagcttttgaacagaccatgttcctgagtcgtgcacttgaggagatccagacatgcaatgacatccataatttcctgaaacaaacagggaccttctcaaatgattcatgtgagaaattgcttctgctgtacgagtttgaagttagagccaaattgaatgatccattactggaaagcttcctggaatcagtgtgggagttgcctcatttagaaactaaaacttttgaaacaattgcaataatagcaatggaaaagcctgcacactatcctttgattgctctcaaggccttgaaaaaggctttattgctctacaaaaaggaagaaccaattgatatatcacaatacagcaaatgtatgcacaacttggttaacctctcagtgccagatggggcgtcgaatgtagagctctgtcccctggaagaagtttggggctattttgaagatgctctgagccacattagccgcactaaagactacccagaaatggagattctctggctgatggtcaagtcctggaataccggagtacttatgtttagcaggagcaagtatgcatctgctgaaaagtggtgtggcctggccttgcgtttccttaaccaccttacctccttcaaggaaagctatgaaactcagatgaatatgctgtatagtcagcttgtggaagcattgagtaacaacaagggcccagtttttcatgaacatggctactggagcaagtcagattaggcaagctcatggccacatgaagaagatacattgtcccgagatgctgactgtttaaatttttgccagagtttctcttgagcttttgtttctgtttgctcagaccctgttttcatgttgttgaataaactttctaaaataaaagcatgctgaattt

SEQ ID NO: 20206 - protein, 842 aa, Artificial Sequence
  derived and/or modified sequence
MCGSERILQAGNILEIRVGQAGARRVATMTSPVLVDIREEVTCPICLELLTEPLSIDCGHSFCQACITPNGRESVIGQEGERSCPVCQTSYQPGNLRPNRHLANIVRRLREVVLGPGKQLKAVLCADHGEKLQLFCQEDGKVICWLCERSQEHRGHHTFLVEEVAQEYQEKFQESLKKLKNEEQEAEKLTAFIREKKTSWKNQMEPERCRIQTEFNQLRNILDRVEQRELKKLEQEEKKGLRIIEEAENDLVHQTQSLRELISDLERRCQGSTMELLQDVSDVTERSEFWTLRKPEALPTKLRSMFRAPDLKRMLRVCRELTDVQSYWAIQGSLTRRERRASGVRTRRSQGSSAMASKILLNVQEEVTCPICLELLTEPLSLDCGHSLCRACITVSNKEAVTSMGGKSSCPVCGISYSFEHLQANQHLANIVERLKEVKLSPDNGKKRDLCDHHGEKLLLFCKEDRKVICWLCERSQEHRGHHTVLTEEVFKECQEKLQAVLKRLKKEEEEAEKLEADIREEKTSWKYQVQTERQRIQTEFDQLRSILNNEEQRELQRLEEEEKKTLDKFAEAEDELVQQKQLVRELISDVECRSQWSTMELLQDMSGIMKWSEIWRLKKPKMVSKKLKTVFHAPDLSRMLQMFRELTAVRCYWVDVTLNSVNLNLNLVLSEDQRQVISVPIWPFQCYNYGVLGSQYFSSGKHYWEVDVSKKTAWILGVYCRTYSRHMKYVVRRCANRQNLYTKYRPLFGYWVIGLQNKCKYGVFEESLSSDPEVLTLSMAVPPCRVGVFLDYEAGIVSFFNVTSHGSLIYKFSKCCFSQPVYPYFNPWNCPAPMTLCPPSS

SEQ ID NO: 20207 - DNA, 2302 bp, Artificial Sequence
  derived and/or modified sequence
accctggcttttcttcacctcttcaaccaggagccgagatttctgttgctctgaagccatccaggggtctttaaccagaagagagaggagagcctcaggagttaggaccagaagaagccagggaagcagtgcaatggcttcaaaaatcttgcttaacgtacaagaggaggtgacctgtcccatctgcctggagctgttgacagaacccttgagtctagactgtggccacagcctctgccgagcctgcatcactgtgagcaacaaggaggcagtgaccagcatgggaggaaaaagcagctgtcctgtgtgtggtatcagttactcatttgaacatctacaggctaatcagcatctggccaacatagtggagagactcaaggaggtcaagttgagcccagacaatgggaagaagagagatctctgtgatcatcatggagagaaactcctactcttctgtaaggaggataggaaagtcatttgctggctttgtgagcggtctcaggagcaccgtggtcaccacacagtcctcacggaggaagtattcaaggaatgtcaggagaaactccaggcagtcctcaagaggctgaagaaggaagaggaggaagctgagaagctggaagctgacatcagagaagagaaaacttcctggaagtatcaggtacaaactgagagacaaaggatacaaacagaatttgatcagcttagaagcatcctaaataatgaggagcagagagagctgcaaagattggaagaagaagaaaagaagacgctggataagtttgcagaggctgaggatgagctagttcagcagaagcagttggtgagagagctcatctcagatgtggagtgtcggagtcagtggtcaacaatggagctgctgcaggacatgagtggaatcatgaaatggagtgagatctggaggctgaaaaagccaaaaatggtttccaagaaactgaagactgtattccatgctccagatctgagtaggatgctgcaaatgtttagagaactgacagctgtccggtgctactgggtggatgtcacactgaattcagtcaacctaaatttgaatcttgtcctttcagaagatcagagacaagtgatatctgtgccaatttggccttttcagtgttataattatggtgtcttgggatcccaatatttctcctctgggaaacattactgggaagtggacgtgtccaagaaaactgcctggatcctgggggtatactgtagaacatattcccgccatatgaagtatgttgttagaagatgtgcaaatcgtcaaaatctttacaccaaatacagacctctatttggctactgggttatagggttacagaataaatgtaagtatggtgtctttgaagagtctttgtcctctgatcccgaggttttgactctctccatggctgtgcctccctgccgtgttggggttttcctcgactatgaagcaggcattgtctcatttttcaatgtcacaagccatggctccctcatttacaagttctctaaatgttgcttttctcagcctgtttatccatatttcaatccttggaactgtccagctcccatgactctatgcccaccaagctcttgaattttctcatttcttcacctacaaccctttgtcttgacttatctcctgcaactgactcatctgcaacattcacaccattgcttccttgtggtttcccttctttagaacttttactcatccttgagatgtatggtgtatttggcttgagttatgagagatgcttatttattcatttactctttttcatattttcagagaaagttacctaatccctcctaaagacacagcagtatgggtataacatccttgccttcccatttatccatgtttcactttatcactgatatgaagaggcccaaagcctgttagccaccatccatgctacctaggtagtccataggaaccacccccatgaccaccaccaacatcaactaaaggttcttggagggtatgtcagtgtgttgctcaggataccccaggtacatcaaggaatcaaggagaggaaaatatgagcaatatgtgtattcagagtgaagattttatgtccagagtatttgagctcaaaccttgcctgttgttttctaatcatgatgaatactttctcagtttctttttcctgaaatataaattgggatttaagactgtacctaactattaagatcactgtgtaaaactaagtgtctctaaatgtaatgcatcgatttagtgtctggaacataataaatatttgctctcatgattgctaaaaaaaaaaaaaaaaaa

SEQ ID NO: 20208 - DNA, 2529 bp, Artificial Sequence
  derived and/or modified sequence
atgtgcggcagcgagagaatcctgcaggccggcaacatcctggagatcagagtgggccaggccggcgccagaagagtggccaccatgaccagccccgtgctggtggacatcagagaggaggtgacctgccccatctgcctggagctgctgaccgagcccctgagcatcgactgcggccacagcttctgccaggcctgcatcacccccaacggcagagagagcgtgatcggccaggagggcgagagaagctgccccgtgtgccagaccagctaccagcccggcaacctgagacccaacagacacctggccaacatcgtgagaagactgagagaggtggtgctgggccccggcaagcagctgaaggccgtgctgtgcgccgaccacggcgagaagctgcagctgttctgccaggaggacggcaaggtgatctgctggctgtgcgagagaagccaggagcacagaggccaccacaccttcctggtggaggaggtggcccaggagtaccaggagaagttccaggagagcctgaagaagctgaagaacgaggagcaggaggccgagaagctgaccgccttcatcagagagaagaagaccagctggaagaaccagatggagcccgagagatgcagaatccagaccgagttcaaccagctgagaaacatcctggacagagtggagcagagagagctgaagaagctggagcaggaggagaagaagggcctgagaatcatcgaggaggccgagaacgacctggtgcaccagacccagagcctgagagagctgatcagcgacctggagagaagatgccagggcagcaccatggagctgctgcaggacgtgagcgacgtgaccgagagaagcgagttctggaccctgagaaagcccgaggccctgcccaccaagctgagaagcatgttcagagcccccgacctgaagagaatgctgagagtgtgcagagagctgaccgacgtgcagagctactgggccatccagggcagcctgaccagaagagagagaagagccagcggcgtgagaaccagaagaagccagggcagcagcgccatggccagcaagatcctgctgaacgtgcaggaggaggtgacctgccccatctgcctggagctgctgaccgagcccctgagcctggactgcggccacagcctgtgcagagcctgcatcaccgtgagcaacaaggaggccgtgaccagcatgggcggcaagagcagctgccccgtgtgcggcatcagctacagcttcgagcacctgcaggccaaccagcacctggccaacatcgtggagagactgaaggaggtgaagctgagccccgacaacggcaagaagagagacctgtgcgaccaccacggcgagaagctgctgctgttctgcaaggaggacagaaaggtgatctgctggctgtgcgagagaagccaggagcacagaggccaccacaccgtgctgaccgaggaggtgttcaaggagtgccaggagaagctgcaggccgtgctgaagagactgaagaaggaggaggaggaggccgagaagctggaggccgacatcagagaggagaagaccagctggaagtaccaggtgcagaccgagagacagagaatccagaccgagttcgaccagctgagaagcatcctgaacaacgaggagcagagagagctgcagagactggaggaggaggagaagaagaccctggacaagttcgccgaggccgaggacgagctggtgcagcagaagcagctggtgagagagctgatcagcgacgtggagtgcagaagccagtggagcaccatggagctgctgcaggacatgagcggcatcatgaagtggagcgagatctggagactgaagaagcccaagatggtgagcaagaagctgaagaccgtgttccacgcccccgacctgagcagaatgctgcagatgttcagagagctgaccgccgtgagatgctactgggtggacgtgaccctgaacagcgtgaacctgaacctgaacctggtgctgagcgaggaccagagacaggtgatcagcgtgcccatctggcccttccagtgctacaactacggcgtgctgggcagccagtacttcagcagcggcaagcactactgggaggtggacgtgagcaagaagaccgcctggatcctgggcgtgtactgcagaacctacagcagacacatgaagtacgtggtgagaagatgcgccaacagacagaacctgtacaccaagtacagacccctgttcggctactgggtgatcggcctgcagaacaagtgcaagtacggcgtgttcgaggagagcctgagcagcgaccccgaggtgctgaccctgagcatggccgtgcccccctgcagagtgggcgtgttcctggactacgaggccggcatcgtgagcttcttcaacgtgaccagccacggcagcctgatctacaagttcagcaagtgctgcttcagccagcccgtgtacccctacttcaacccctggaactgccccgcccccatgaccctgtgcccccccagcagctag

SEQ ID NO: 20209 - DNA, 3391 bp, Artificial Sequence
  derived and/or modified sequence
ctgcctttctcggaacggaacggagcagagtcgtgcgtggttgagtttagataaaagccgagtgagcgcgctctgttccttaagattagtttaaggtgccttggattgctctgaagagctttgaccacctgatattgcttacatctggaacttcttggcttctcattccccagatgtgcgggtcagagaggattctacaggcaggaaacatcttagaaatcagggttgggcaggcaggagccaggagagtagctacaatgacttcaccagtactggtggacatacgagaagaggtgacctgccctatctgcctggagctcctaacagaacccctgagcatagactgtggccacagcttctgccaagcctgcatcacaccaaatggcagggaatcagtgattggtcaagaaggggaaagaagctgccctgtgtgccagaccagctaccagccagggaacctgcggcctaatcggcatctggccaacatagtgaggcggctcagagaggtagtgttgggccctgggaagcagctgaaagcagttctttgtgcagaccatggagaaaaactgcagctcttctgtcaggaggatgggaaggtcatttgctggctttgtgagcggtctcaggagcaccgtggtcaccacacgttcctcgtggaggaggttgcccaggagtaccaggagaagtttcaggagtctctaaagaagctgaagaacgaggagcaggaagctgagaagctaacagcttttatcagagagaagaaaacatcctggaagaatcagatggagcctgagagatgcaggatccagacagagtttaatcagctgcgaaatatcctagacagagtggagcaacgggagctgaaaaagctggaacaggaagagaagaaggggctacgaattatagaagaggctgagaatgatctggtccaccagacccagtcgctgcgagagctcatctcggatctggagcgtcgatgtcaggggtcaacaatggagctgctgcaggatgtgagtgatgtcacagaaaggagtgagttctggaccctgaggaagccagaagctctccctacaaagctgagaagtatgttccgagccccagatctgaaaaggatgctgcgagtgtgtagagagctgacagatgtccaaagctactgggccatccaggggtctttaaccagaagagagaggagagcctcaggagttaggaccagaagaagccagggaagcagtgcaatggcttcaaaaatcttgcttaacgtacaagaggaggtgacctgtcccatctgcctggagctgttgacagaacccttgagtctagactgtggccacagcctctgccgagcctgcatcactgtgagcaacaaggaggcagtgaccagcatgggaggaaaaagcagctgtcctgtgtgtggtatcagttactcatttgaacatctacaggctaatcagcatctggccaacatagtggagagactcaaggaggtcaagttgagcccagacaatgggaagaagagagatctctgtgatcatcatggagagaaactcctactcttctgtaaggaggataggaaagtcatttgctggctttgtgagcggtctcaggagcaccgtggtcaccacacagtcctcacggaggaagtattcaaggaatgtcaggagaaactccaggcagtcctcaagaggctgaagaaggaagaggaggaagctgagaagctggaagctgacatcagagaagagaaaacttcctggaagtatcaggtacaaactgagagacaaaggatacaaacagaatttgatcagcttagaagcatcctaaataatgaggagcagagagagctgcaaagattggaagaagaagaaaagaagacgctggataagtttgcagaggctgaggatgagctagttcagcagaagcagttggtgagagagctcatctcagatgtggagtgtcggagtcagtggtcaacaatggagctgctgcaggacatgagtggaatcatgaaatggagtgagatctggaggctgaaaaagccaaaaatggtttccaagaaactgaagactgtattccatgctccagatctgagtaggatgctgcaaatgtttagagaactgacagctgtccggtgctactgggtggatgtcacactgaattcagtcaacctaaatttgaatcttgtcctttcagaagatcagagacaagtgatatctgtgccaatttggccttttcagtgttataattatggtgtcttgggatcccaatatttctcctctgggaaacattactgggaagtggacgtgtccaagaaaactgcctggatcctgggggtatactgtagaacatattcccgccatatgaagtatgttgttagaagatgtgcaaatcgtcaaaatctttacaccaaatacagacctctatttggctactgggttatagggttacagaataaatgtaagtatggtgtctttgaagagtctttgtcctctgatcccgaggttttgactctctccatggctgtgcctccctgccgtgttggggttttcctcgactatgaagcaggcattgtctcatttttcaatgtcacaagccatggctccctcatttacaagttctctaaatgttgcttttctcagcctgtttatccatatttcaatccttggaactgtccagctcccatgactctatgcccaccaagctcttgaattttctcatttcttcacctacaaccctttgtcttgacttatctcctgcaactgactcatctgcaacattcacaccattgcttccttgtggtttcccttctttagaacttttactcatccttgagatgtatggtgtatttggcttgagttatgagagatgcttatttattcatttactctttttcatattttcagagaaagttacctaatccctcctaaagacacagcagtatgggtataacatccttgccttcccatttatccatgtttcactttatcactgatatgaagaggcccaaagcctgttagccaccatccatgctacctaggtagtccataggaaccacccccatgaccaccaccaacatcaactaaaggttcttggagggtatgtcagtgtgttgctcaggataccccaggtacatcaaggaatcaaggagaggaaaatatgagcaatatgtgtattcagagtgaagattttatgtccagagtatttgagctcaaaccttgcctgttgttttctaatcatgatgaatactttctcagtttctttttcctgaaatataaattgggatttaagactgtacctaactattaagatcactgtgtaaaactaagtgtctctaaatgtaatgcatcgatttagtgtctggaacataataaatatttgctctcatgattgctaaaaa

SEQ ID NO: 20210 - DNA, 2529 bp, Artificial Sequence
  derived and/or modified sequence
atgtgtggctccgagcggatcctccaagccggaaatatcctggagatacgggtggggcaggccggagcgcgccgggttgccactatgacatcgcctgtgcttgtggatattcgtgaagaggtgacctgccctatatgcctggaactcctgaccgagcctctgtcaatagattgtgggcactccttctgccaggcttgcatcacaccaaacggcagagagagcgtgattggacaagagggcgaacgtagctgccccgtctgtcagacttcttaccaaccaggaaacctgcggccaaatcgccatctggcaaatatcgttagacgcctcagagaagtcgtgctgggcccaggtaagcagcttaaggccgtgctatgtgctgatcatggagagaaactacaactgttttgtcaagaggacggcaaagtgatctgctggctgtgtgagaggagccaagagcaccggggccatcatacattcctagtagaggaggtcgcccaagagtatcaggagaagtttcaggagagtctgaagaaacttaagaatgaggagcaggaagcagagaagcttaccgctttcattcgcgagaaaaaaactagttggaaaaatcagatggagcctgagcgctgtcgcatacagaccgaattcaaccagctgagaaacattttagacagagttgagcagagggaactaaagaagttggaacaagaagagaaaaagggactgagaataattgaggaagccgagaacgacctagtgcaccaaacccagagcctccgggagctgatctctgatctcgagcgaaggtgccagggcagtacaatggaactgctgcaggacgtttctgatgtgactgagcgaagtgagttttggaccctccgcaaaccagaagcactgcctacaaagctcaggtccatgtttagggcgcccgatctgaaacgcatgctcagagtgtgcagagagctcactgatgttcaaagttactgggccatacaggggagtcttactagaagggagcgtagggcctccggtgtacgaaccaggcgttcccaggggagttcggctatggccagtaagatcctgctcaatgtacaggaagaggtgacctgtcccatctgcctggagttgctgacggaaccattgagcctggactgcggtcactctctctgtcgcgcctgcatcactgtgtctaacaaggaagctgtgacctccatgggggggaaaagttcctgccccgtctgtggcatcagctacagcttcgaacatctgcaggctaaccaacacctggcgaatattgtcgaaagactcaaagaagtcaagctttcccccgataatgggaaaaaacgtgatttatgtgaccatcatggtgagaaactgttacttttctgcaaggaagatagaaaggttatatgctggctgtgcgaaaggtcccaggaacacaggggacatcatactgtgctgactgaggaagttttcaaagagtgccaggagaaactgcaggcggtgcttaagcggctgaaaaaggaggaagaagaagcggagaaactggaggccgatataagggaggagaagacctcatggaagtatcaggtccagaccgagagacagcgtatccagacagagttcgaccagcttcgaagcatcctcaataacgaggaacagcgggaactgcagcgcctggaggaggaggagaagaagactcttgacaagttcgctgaagcggaagacgagttagtacagcaaaagcagctagtaagggagttgatctcagacgtggagtgtcgatcacagtggagcacaatggagcttcttcaggatatgtcgggcatcatgaagtggtccgagatttggcggctgaaaaagccaaaaatggtgtccaaaaagctgaaaaccgtttttcatgccccagatctcagcagaatgttacagatgtttcgcgagctgactgccgtccgctgctattgggtcgatgtcaccctcaattccgtaaaccttaatctgaacctggtgctcagcgaggatcagagacaggtgatcagcgtgcccatctggccctttcagtgctataattatggggtgctggggtctcaatattttagctcaggtaaacattattgggaggtagatgtcagcaagaaaacagcctggattttaggagtttactgcagaacgtattcccggcatatgaaatacgtggtccggcgttgcgccaaccggcaaaatctgtacaccaaatatcgcccgctgttcggctactgggtaattggcctccagaataagtgcaagtacggtgttttcgaagaaagtctcagttctgacccagaagtgctgacgctgtcaatggcagtccctccctgccgtgtgggtgtgtttctggattatgaggcgggaattgtttctttctttaatgttactagccatggctctctgatctacaagttcagcaagtgttgtttctctcagcctgtgtatccctattttaacccctggaactgccctgcaccgatgacgctgtgtcccccctcgtcctag

SEQ ID NO: 20211 - DNA, 2529 bp, Artificial Sequence
  derived and/or modified sequence
atgtgtggcagcgagcgcatcctgcaggccggcaacatcctggagatccgggtgggccaggccggggcccggcgggtggccaccatgaccagccctgtgctggtggacatccgggaggaggtgacctgccccatctgcctggagctgctgacagagcccctgagcattgactgtggccacagcttctgccaggcctgcatcacccccaacggccgggagagcgtcatcggccaggagggggagaggagctgccctgtgtgccagaccagctaccagcccggcaacctgcggcccaacagacacctggccaacatcgtgcggcggctgcgggaggtggtgctgggccctgggaagcagctgaaggctgtgctgtgtgccgaccacggggagaagctgcagctgttctgccaggaggatggcaaggtgatctgctggctgtgtgagaggagccaggagcaccggggccaccacaccttcctggtggaggaggtggcccaggagtaccaggagaagttccaggagagcctgaagaagctgaagaatgaggagcaggaggccgagaagctgacagccttcatccgggagaagaagacctcctggaagaaccagatggagcctgagcgctgccgcatccagacagagttcaaccagctgaggaacatcctggacagagtggagcagcgggagctgaagaagctggagcaggaggagaagaagggcctgcgcatcatcgaggaggccgagaatgacctggtgcaccagacccagagcctgcgggagctgatcagtgacctggagcggcgctgccagggcagcaccatggagctgctgcaggatgtgtctgatgtgacagagaggtctgagttctggaccctgaggaagccagaggccctgcccaccaagctgcgctccatgttccgggccccagacctgaagaggatgctgcgggtgtgccgggagctgacagatgtgcagagctactgggccatccagggcagcctgacccggcgggagcggcgggccagcggcgtgaggaccaggaggagccagggcagcagcgccatggccagcaagatcctgctgaatgtgcaggaggaggtgacctgccccatctgcctggagctgctgacagagcccctgagcctggactgtggccacagcctgtgccgggcctgcatcaccgtgagcaacaaggaggccgtgacctccatgggcggcaagagcagctgccctgtgtgtggcatctcctacagctttgagcacctgcaggccaaccagcacctggccaacatcgtggagcggctgaaggaggtgaagctgagcccagacaacgggaagaagagggacctgtgtgaccaccacggggagaagctgctgctcttctgcaaggaggacaggaaggtgatctgctggctgtgtgagaggagccaggagcaccggggccaccacacagtgctgacagaggaggtgttcaaggagtgccaggagaagctgcaggccgtgctgaagaggctgaagaaggaggaggaggaggccgagaagctggaggccgacatccgggaggagaagacctcctggaagtaccaggtgcagacagagcggcagaggatccagacagaatttgaccagctgcggagcatcctgaacaatgaggagcagcgggagctgcagaggctggaggaggaggagaagaagaccctggacaagtttgctgaggccgaggatgagctggtgcagcagaagcagctggtgcgggagctgatcagtgatgtggagtgccgcagccagtggagcaccatggagctgctgcaggacatgagcggcatcatgaagtggagcgagatctggaggctgaagaagcccaagatggtgtccaagaagctgaagacagtgttccacgccccagacctgagcaggatgctgcagatgttccgggagctgacagctgtgcgctgctactgggtggatgtgaccctgaacagcgtgaacctgaacctgaacctggtgctgtctgaggaccagaggcaggtgatctctgtgcccatctggcccttccagtgctacaactacggcgtgctgggcagccagtacttcagcagcggcaagcactactgggaggtggatgtgtccaagaagacagcctggatcctgggcgtgtactgcaggacctacagccgccacatgaagtatgtggtgagaagatgtgccaaccggcagaacctgtacaccaagtaccggcccctgtttggctactgggtgattggcctgcagaacaagtgcaagtatggagtgtttgaggagagcctgagcagtgaccctgaggtgctgaccctgtccatggctgtgcccccctgccgggtgggcgtcttcctggactatgaagctggcatcgtgtccttcttcaacgtgaccagccacggcagcctcatctacaagttcagcaagtgctgcttcagccagcctgtgtacccctacttcaacccctggaactgcccagcccccatgaccctgtgcccccccagcagctag

SEQ ID NO: 20212 - DNA, 2529 bp, Artificial Sequence
  derived and/or modified sequence
atgtgcggcagcgagcggatcctgcaggccggcaacatcctggagatccgtgtcggccaggcaggcgcccggcgggtcgccaccatgactagccccgtcttagtggatatccgggaggaggtcacctgccctatttgtttggagctgttaactgagcctctttccattgattgtgggcacagcttttgccaggcctgcattacccccaacggaagggaaagtgtcattggtcaggaaggggagagatcctgtcccgtgtgtcaaacttcttaccaaccgggcaacctgcgacctaaccggcacctggccaatatcgttcggagattacgcgaagtggtgttaggccctgggaaacagctgaaggccgtgctgtgcgccgaccatggggaaaagctgcagcttttttgtcaggaggatgggaaagttatctgctggctgtgtgaaaggtcacaggagcaccgggggcatcacacatttttagtggaggaggtggctcaggaataccaagagaaattccaggagtctctgaaaaaactgaagaatgaggagcaggaggccgaaaaactgacagctttcatacgcgaaaagaaaaccagctggaagaaccagatggaacctgagcggtgccgcattcaaactgagttcaaccagctccgaaatatcttagaccgcgtcgaacagagagaattgaagaaactggagcaggaggagaaaaagggacttcgaatcatagaggaggccgaaaacgatctggtacaccagacacagtccctacgggaattgatttccgatctggagcgcagatgtcaaggctccaccatggaattgctgcaggatgtttccgacgttaccgagcgttccgagttctggacacttcgaaagccagaggccctccctacaaagttaagaagcatgtttcgtgcccctgacctaaaacggatgcttagagtatgtcgggagcttaccgacgttcaatcctactgggcaatccaggggagcctcactagacgggaacgtcgagcttccggtgtgcgcacaagacgctctcagggtagctcagccatggcctctaagattctgctgaatgtccaagaagaggtgacttgccccatttgcctcgagttgctgaccgaaccattatccctggattgtggccattccctttgcagggcatgcatcactgttagtaacaaagaggctgtcacaagtatgggcgggaagagttcttgcccagtctgcggaatcagctattctttcgaacacttgcaggccaatcagcacctggcaaacatagtggaaagattgaaggaagtgaagctttcacccgacaacggaaagaaacgagacctgtgtgaccaccatggtgagaaactcctcctcttttgcaaggaggaccggaaagttatttgttggttatgtgaacggtcgcaagagcacagaggccatcacacagtgctaaccgaagaggtgtttaaggaatgtcaagaaaaactgcaggccgtccttaagcgtttaaaaaaggaagaggaagaggcagagaagctggaagccgatattagagaggagaaaacctcctggaaatatcaagtgcaaacagagcgtcagcgcatacagaccgaattcgaccaactgcgtagcatcctcaataacgaggagcagcgtgagctgcagcgcctggaggaagaagagaagaagaccttggacaaatttgcggaggcggaggacgaactggtccagcagaaacaactggtcagggagctcattagcgatgtggaatgccgaagccagtggtcgaccatggaactgctgcaagacatgtccggaataatgaagtggagcgaaatttggaggttgaagaaacccaaaatggtgagtaagaagcttaagaccgtattccacgctcctgacctgagtcgcatgctccagatgttccgggagttgactgcggtacgctgttactgggtcgacgtgacgctgaacagcgttaacttaaatttaaacctcgtgctatcagaggaccaacgacaggtcatttccgtgccaatctggccatttcaatgttataactatggagtcttaggttcacagtacttctccagcggaaagcattactgggaagtcgatgtcagcaagaaaactgcatggattctcggagtttattgccgcacttattcccgccacatgaaatatgtcgtcagacgttgcgcaaaccgacagaacttgtacacgaaatacaggccgttattcggctactgggtgattgggctgcagaataagtgcaagtacggtgtgtttgaggagagtctgtcatctgatccggaggtcctcacgctgtcgatggccgtgccgccctgtcgggtcggcgttttcctcgattacgaagctggtatagtgtcattctttaatgtgacatctcacgggtctcttatttataagttttccaaatgttgcttttcacagccagtctatccttactttaatccctggaactgtcccgctccaatgaccctctgccccccctcctcctag

SEQ ID NO: 20213 - DNA, 2529 bp, Artificial Sequence
  derived and/or modified sequence
atgtgcgggagcgagcgcattctccaagccggaaatattctagagattagggtgggccaggccggagctcggagggtcgctacaatgacctcccctgtgctggtggatattagggaggaagtgacttgccccatctgcctggagctgctaactgagccactctctattgactgtggccactcattttgccaggcatgtattacccccaatggaagggagtctgtgatcggccaggagggggagaggagttgccccgtttgccaaacatcctaccaaccagggaatttaagacccaaccgtcacctggcaaacatcgttagacgactcagggaggttgttcttggtccgggaaaacagcttaaagcagtcctctgtgccgatcatggggagaagctgcaactgttctgccaagaggacggaaaagttatctgctggttatgtgaacgttcccaggaacatagagggcatcataccttcctggtggaggaggtcgcccaggagtatcaggagaaattccaggagagccttaaaaaattgaaaaacgaggagcaagaggctgaaaagctcacggctttcatccgcgagaagaaaacttcttggaagaatcagatggagccggagcgctgtaggattcagaccgagttcaatcagctgcgaaatatactggatagggtcgaacagcgcgagctgaagaagctggaacaggaggagaagaaaggccttaggatcatcgaggaggcggagaatgacttggttcaccagacccagagcctgagggagctgattagcgatctggaacgaaggtgccagggctccacgatggagttgctgcaggacgtgtcggatgtcactgagcgcagcgaattctggacattacggaaaccagaagccctgcccactaaactgagatccatgtttcgggcacccgacctcaagagaatgttgcgggtttgtagggagctgactgacgttcaatcctactgggccatccagggatctcttacaaggagggagaggcgggcttccggggtaaggacacggaggagccaaggtagctccgctatggccagcaaaattttgctgaacgttcaggaggaggtgacatgccctatatgcctggagctgttgaccgaaccactatccctggattgtggccattcactatgtagagcatgcattactgtgtcaaataaggaggcagtgaccagtatgggaggcaaatcatcttgtcctgtgtgcgggatcagttacagctttgagcacctgcaggccaaccagcaccttgcaaatattgtcgagcgcctcaaggaggtaaaactgagtccagacaacggaaaaaaacgtgacctctgcgatcatcacggagagaaactcctgctgttttgtaaggaggatagaaaggtgatttgttggctgtgtgaaagatctcaggagcaccgcggacaccatacggtgctgactgaggaggtgttcaaggagtgccaggagaagctgcaggccgtactgaagaggctgaaaaaagaggaggaagaggcagaaaagctagaggccgacatacgtgaagaaaagacatcatggaaataccaggtgcagacagagcgccagagaatccaaacagaattcgatcagctcaggtcaatcctcaataacgaggagcagagagaattgcagcggttggaggaggaggagaaaaagacccttgataaattcgcggaggcggaagatgagctggtgcagcagaagcagctggtgagagagcttatttccgacgtcgagtgtcgctcccagtggtccacaatggaactgctgcaggatatgagtggcatcatgaagtggagcgaaatctggcgactgaagaagcctaagatggtgtcaaaaaaactgaagaccgtcttccacgcgccagatctctctcgtatgctgcaaatgtttagggagctcacagccgttaggtgctattgggtggatgtgaccctcaattcagtgaacctgaacttgaatctggtgctgtctgaagatcaacgccaggtgatctctgtaccaatttggccctttcagtgttataactacggagttcttgggtcacaatatttctcttccgggaaacattactgggaggtggatgtgagtaagaagacggcctggattctgggagtgtattgtaggacatattcaagacacatgaagtatgttgtcaggcggtgcgctaataggcaaaacctttacaccaaatacagacctttattcggttactgggtaattggcctgcagaataaatgtaagtacggagtgttcgaggagtccttgagctcagatccagaggtccttaccctcagtatggccgttcctccatgtagagtaggcgtcttcttggattacgaggccggaatagtgagttttttcaacgtgacgagccatggtagcctcatctacaagttttctaagtgttgtttctcccagcccgtctacccgtatttcaacccctggaattgtcctgcccctatgactctgtgcccaccttcatcatag

SEQ ID NO: 20214 - DNA, 2529 bp, Artificial Sequence
  derived and/or modified sequence
atgtgtgggtcagaacggatattgcaggctggtaatattttagagatccgggtcgggcaagctggggctaggcgtgtcgcaacaatgacctcacccgtgctagtcgacatccgggaggaagttacatgtcccatttgtctggagctcctgaccgaacccctttctatcgactgtggccattcattctgccaagcatgtatcacccctaatggcagagagtccgtgatcggccaggagggggagagatcttgcccggtgtgccaaacgtcctaccagcccggcaaccttaggccaaatagacacttagcaaatattgtccgccggctgcgcgaggtggtcttgggtcccggcaagcagctcaaggccgtgctgtgtgccgatcatggtgaaaagctacaactcttttgccaggaggacggcaaagtcatttgctggctgtgtgagcgctcccaggagcacaggggacaccacacatttttagttgaggaagtggcacaggagtaccaggagaagttccaggaaagcttgaaaaaactgaagaacgaggagcaagaagccgagaagcttactgcattcattcgtgagaagaaaacatcttggaagaaccagatggaacccgagcggtgcagaattcagactgagttcaaccaactgcgtaacatccttgatcgcgttgaacagcgggaattgaaaaagttggagcaggaagagaaaaaaggactgcgcatcatagaagaggccgagaacgacctcgtgcaccaaacccagagcttaagggagctgatcagcgacctggagcgcagatgtcaggggtcaacgatggaactcctgcaggacgtgtccgacgtgactgaaagatccgagttctggacgctgcggaagcctgaagccctccctaccaagctcagaagcatgttccgtgcccccgacctgaagcggatgttacgcgtctgtagagagttgacagatgtacagagctattgggctatacagggtagccttacaaggcgggagcggagagcaagcggcgttaggactagaagatcccaggggtctagcgccatggccagcaagatccttctgaacgtgcaggaggaggttacttgcccaatctgtcttgagctgcttaccgaacctctcagtctcgattgtgggcattctctatgtagggcgtgcatcacagtgtctaataaagaagccgttacgagcatgggcggcaagtcatcttgtcctgtttgtggtatctcctactcctttgaacacctgcaggctaaccagcacctcgccaacattgtagagcgactgaaggaagtcaagctgagccccgataacgggaagaaaagagatctgtgcgaccaccacggtgagaagctgttgctcttctgcaaggaggaccgtaaagtaatctgttggctgtgtgaaaggagccaggaacacaggggccaccataccgtcctgaccgaggaagtcttcaaggagtgccaggaaaaattacaagcagtattaaaacggcttaaaaaagaggaggaggaggccgagaaactcgaagccgacatccgggaagagaaaactagctggaagtaccaggtccagactgaaaggcagcgtattcagacggagttcgatcaattgcgctccattcttaataatgaggaacaaagggagctgcagaggcttgaggaggaagaaaagaaaacgctggataagttcgccgaggccgaagacgaactggtccagcagaagcagttggttagggagctgatcagcgacgtggagtgccgttcacagtggtcaaccatggaactgcttcaggatatgtctggcattatgaagtggagcgagatctggagactaaagaaaccaaaaatggtgtctaagaaattaaagactgtttttcacgctcccgatctgagtcggatgctacagatgttcagggagctcaccgcagtgcggtgttactgggtggacgtgacactgaactcggtcaatctgaatttaaatttagtattgtccgaggatcagcgccaggtgatcagcgtgcctatttggccctttcagtgctacaattacggggttttgggctcccagtacttttcctccgggaagcactattgggaagtggacgtttcgaaaaaaactgcctggatcttaggtgtgtattgcagaacttattccagacatatgaaatatgttgttagacgctgcgccaaccgacaaaatctgtacaccaagtatcgcccacttttcggttactgggtgattggcttacagaataagtgtaaatacggcgtgtttgaggagagcctgtcaagcgacccggaggtgctcaccttgagcatggccgttccgccctgccgcgttggggtttttttggactacgaagccggaatcgtctcctttttcaacgtcacttcccacgggagcctcatttataagttctctaagtgctgcttctctcagcctgtgtatccatacttcaacccatggaattgtccagctccaatgacactgtgtcctccgtcaagctag

SEQ ID NO: 20215 - DNA, 2529 bp, Artificial Sequence
  derived and/or modified sequence
atgtgcggcagcgagcggatcctgcaggccggcaacatcctggagattagggttggacaagccggagctagaagggtagcgacaatgacctctcccgtgctggtggatattagagaggaagtcacttgtccaatctgtctagaactccttacggaaccgcttagtatagattgcggccattcattctgtcaggcgtgtattactcccaacggccgcgaaagtgtaatcggtcaggaaggggaaaggtcttgtccagtgtgccagacgagttatcagcctggcaatttacgtccgaaccggcacctggctaatattgtacggcgcctgcgggaggttgtgctcggtcccggcaaacagctcaaggccgtgctctgtgccgatcatggagagaagctgcagcttttttgccaggaggacggcaaggttatatgctggctgtgtgagagatcgcaggagcatcggggacatcacaccttcctcgtggaagaggttgcccaggaataccaggaaaagtttcaggaaagtttgaagaaactcaaaaacgaagaacaggaagctgagaagctaaccgcgtttatccgggaaaaaaaaaccagctggaagaaccagatggagcccgaacgttgccgcatccagacggaattcaatcaactgcgaaatattctggacagggtagagcaacgtgaactgaagaaattggaacaggaagagaaaaagggcctgcgcatcatcgaggaggctgaaaatgacctagtccaccaaacccaatctctgagagagctcattagtgatctggagagaaggtgtcaggggtctacgatggagctccttcaagacgtgtccgatgtgaccgagcgaagcgagttctggactctcaggaagcctgaggctctgcccaccaagcttagatccatgttcagggcccccgaccttaagcgcatgttacgagtgtgtagggagctcaccgacgtgcaaagttactgggcaatccaggggtcactgacacgtagggaaaggcgcgcttcaggagtccgtacacgcagatctcagggtagtagtgctatggcctccaagatactcctgaacgtccaggaggaagtcacatgtcccatctgcctggaactgctgacggagcctctgagtctcgactgtggccactctctctgtcgcgcctgcattactgtgtcgaataaggaagcagtgacatccatgggcggcaaaagctcctgtcccgtatgcggaatatcctattcatttgagcacttacaagctaatcaacacctggccaacattgttgaaaggctcaaggaggtaaagctgtctccagataacggaaagaaaagggacctgtgcgaccatcatggagaaaagttattgctgttttgtaaggaggataggaaagtaatttgttggctctgtgaaaggtcacaggagcaccgggggcatcacacagtgctaacagaagaagtgttcaaggagtgtcaggagaagctacaggccgtgttgaagcggcttaagaaggaggaggaagaggccgagaaactggaagcagatatccgagaggaaaagaccagctggaaataccaggtgcagacagagcgacagaggatccagacggaattcgaccagctgcgatctatcctgaataacgaagagcagcgagaactgcagcgtcttgaggaggaagaaaagaaaaccctcgataaattcgcagaagctgaggacgagctcgtgcagcagaagcaactggtcagggagctgattagcgacgtcgaatgccgctcccagtggtcaacaatggagctgctgcaggacatgagcggaatcatgaagtggtccgaaatatggcgcttgaagaagcccaagatggttagtaaaaagcttaaaactgtgtttcacgcacctgatctgtcccggatgcttcagatgttcagggaattaacagccgtacgctgttattgggttgatgtgacactgaacagtgttaacctgaatcttaaccttgtactgagtgaggatcagcgccaagtgatctccgtgccgatctggccgtttcagtgttataattatggagtgttaggttcacaatattttagctccggcaagcactactgggaagtagatgtttctaaaaaaaccgcgtggatcctaggggtttactgtagaacctatagccgccacatgaaatacgtcgtgagacggtgcgccaacagacagaacctgtacactaagtataggcccctcttcggctactgggttatcgggttgcagaataagtgcaagtatggagtctttgaagaaagcctgtccagcgacccagaagtgctgaccctgtctatggccgtgccaccttgtcgggtgggcgttttcctggactacgaggccgggatcgtctccttcttcaacgtcaccagccatggcagcctgatctacaagttctcgaagtgctgtttttcacagcctgtgtacccttatttcaatccatggaactgtcctgctcctatgaccttatgccccccttcttcctag

SEQ ID NO: 20216 - DNA, 2529 bp, Artificial Sequence
  derived and/or modified sequence
atgtgtggaagtgaacgtatattgcaagccggtaatattttggaaatcagagttgggcaggccggagccaggcgagttgcgactatgacaagcccagtcttggtcgatattcgcgaagaagtgacatgtcctatttgcctggaactcctaacagagcccctgtctattgactgcggacactccttctgccaggcgtgcatcaccccgaatggtcgcgaaagcgtgataggacaggagggagaaaggtcttgtccagtgtgtcagacctcttaccagccagggaatctcaggccaaacaggcacctggctaatatcgtcaggcgcctgcgggaggtggtcctggggccaggaaaacaattgaaggcagtcctatgtgccgaccacggggaaaagttgcagcttttctgtcaggaggacgggaaagtgatctgctggctatgcgagaggagtcaggagcacaggggacaccacaccttcctggttgaggaagtggcccaagaatatcaggaaaagttccaggagagtctgaagaagctgaagaacgaggaacaagaggccgaaaagctgacagcattcatccgagagaaaaaaacctcatggaaaaatcagatggaaccagaaagatgtcgcatccagacagaattcaaccagctgcggaatatacttgatcgggtggaacagcgtgagctgaagaagcttgaacaggaggaaaaaaaggggctgcggataattgaggaggctgagaatgacctggtgcaccagacccagtctctgcgggaattgatctcagacctggagcggaggtgccaaggcagcaccatggagctgctgcaggacgtctccgacgtgactgaaagaagtgagttttggactttgagaaagcccgaagccctgccgactaagctgcgctcaatgttcagggcaccagacctgaagaggatgttgcgggtgtgtcgagaactgactgacgtgcagagctactgggcgattcaaggctctttgacacgccgtgagaggcgcgcttctggcgtgcgcactcggcgttcccagggatctagcgccatggccagcaagatcctcctcaacgtgcaggaggaggtgacgtgcccaatctgcctggaattgttgactgaaccattgtctctcgattgtggacactcgctatgcagagcttgtataacagtgagcaataaggaagcagtgacttccatgggtgggaaaagcagctgtccagtctgcgggatctcatattcctttgaacacctacaggcgaatcagcatctcgcaaatattgtggaacggttgaaagaagtgaagttaagtcccgacaatggcaaaaagagggacctttgtgatcaccacggcgaaaaactgcttttattttgtaaagaggatcggaaagttatctgttggctctgcgaacggtcccaagagcatcggggacatcacaccgtgcttaccgaggaagtgttcaaagagtgtcaggagaaacttcaagctgtactgaaaaggctaaagaaagaggaagaagaggccgagaagcttgaagccgacattagagaagaaaaaacttcatggaaataccaggtgcagactgagaggcagagaattcagacagagttcgatcaactgagaagcatccttaataacgaagaacagcgggaattgcagcgccttgaagaagaggaaaagaaaactcttgacaaatttgccgaggcagaggatgaattggttcagcagaagcagcttgtcagagaacttattagtgacgtcgagtgtagaagccagtggagcaccatggagctgttgcaagacatgtctggcatcatgaaatggtcggaaatttggcgccttaaaaagcccaagatggtgtcaaagaaattaaaaacagttttccatgcaccagatctttcccgaatgctgcagatgtttcgcgaattgacggccgtgaggtgttattgggttgatgtgactctcaactcggtgaacctgaacttaaatctcgtgctgagcgaagatcagaggcaggtgattagtgtgcctatttggccttttcagtgttacaactacggcgtcctcggcagccaatatttttcgtctggcaaacattattgggaagtggatgtctcaaaaaagactgcctggattctgggtgtatactgccgaacctattcacgccacatgaagtacgtggtacgccgttgtgccaatagacagaatctttacacaaagtataggcctctatttgggtattgggtcatcgggcttcagaacaaatgtaaatacggtgtgtttgaagagtctttaagctcagatcctgaagtcctgacattgtctatggccgtacctccgtgtcgcgttggagtcttcctagactatgaggctgggattgtgtcgtttttcaatgtgacctcacatgggtcactgatctataagttcagcaaatgctgcttcagccagcccgtttatccatacttcaatccttggaattgtccagccccaatgaccctgtgtcccccatcgtcatag

SEQ ID NO: 20217 - DNA, 3025 bp, Artificial Sequence
  derived and/or modified sequence
agggatcccctgcctttctcggaacggaacggagcagagtcgtgcgtggttgagtttagataaaagccgagtgagcgcgctctgttccttaagattagtttaaggtgccttggattgctctgaagagctttgaccacctgatattgcttacatctggaacttcttggcttctcattccccagatgtgcgggtcagagaggattctacaggcaggaaacatcttagaaatcagggttgggcaggcaggagccaggagagtagctacaatgacttcaccagtactggtggacatacgagaagaggtgacctgccctatctgcctggagctcctaacagaacccctgagcatagactgtggccacagcttctgccaagcctgcatcacaccaaatggcagggaatcagtgattggtcaagaaggggaaagaagctgccctgtgtgccagaccagctaccagccagggaacctgcggcctaatcggcatctggccaacatagtgaggcggctcagagaggtagtgttgggccctgggaagcagctgaaagcagttctttgtgcagaccatggagaaaaactgcagctcttctgtcaggaggatgggaaggtcatttgctggctttgtgagcggtctcaggagcaccgtggtcaccacacgttcctcgtggaggaggttgcccaggagtaccaggagaagtttcaggagtctctaaagaagctgaagaacgaggagcaggaagctgagaagctaacagcttttatcagagagaagaaaacatcctggaagaatcagatggagcctgagagatgcaggatccagacagagtttaatcagctgcgaaatatcctagacagagtggagcaacgggagctgaaaaagctggaacaggaagagaagaaggggctacgaattatagaagaggctgagaatgatctggtccaccagacccagtcgctgcgagagctcatctcggatctggagcgtcgatgtcaggggtcaacaatggagctgctgcaggatgtgagtgatgtcacagaaaggagtgagttctggaccctgaggaagccagaagctctccctacaaagctgagaagtatgttccgagccccagatctgaaaaggatgctgcgagtgtgtagagagctgacagatgtccaaagctactgggccatccaggggtctttaaccagaagagagaggagagcctcaggagttaggaccagaagaagccagggaagcagtgcaatggcttcaaaaatcttgcttaacgtacaagaggaggtgacctgtcccatctgcctggagctgttgacagaacccttgagtctagactgtggccacagcctctgccgagcctgcatcactgtgagcaacaaggaggcagtgaccagcatgggaggaaaaagcagctgtcctgtgtgtggtatcagttactcatttgaacatctacaggctaatcagcatctggccaacatagtggagagactcaaggaggtcaagttgagcccagacaatgggaagaagagagatctctgtgatcatcatggagagaaactcctactcttctgtaaggaggataggaaagtcatttgctggctttgtgagcggtctcaggagcaccgtggtcaccacacagtcctcacggaggaagtattcaaggaatgtcaggagaaactccaggcagtcctcaagaggctgaagaaggaagaggaggaagctgagaagctggaagctgacatcagagaagagaaaacttcctggaagtatcaggtacaaactgagagacaaaggatacaaacagaatttgatcagcttagaagcatcctaaataatgaggagcagagagagctgcaaagattggaagaagaagaaaagaagacgctggataagtttgcagaggctgaggatgagctagttcagcagaagcagttggtgagagagctcatctcagatgtggagtgtcggagtcagtggtcaacaatggagctgctgcaggacatgagtggaatcatgaaatggagtgagatctggaggctgaaaaagccaaaaatggtttccaagaaactgaagactgtattccatgctccagatctgagtaggatgctgcaaatgtttagagaactgacagctgtccggtgctactgggtggatgtcacactgaattcagtcaacctaaatttgaatcttgtcctttcagaagatcagagacaagtgatatctgtgccaatttggccttttcagtgttataattatggtgtcttgggatcccaatatttctcctctgggaaacattactgggaagtggacgtgtccaagaaaactgcctggatcctgggggtatactgtagaacatattcccgccatatgaagtatgttgttagaagatgtgcaaatcgtcaaaatctttacaccaaatacagacctctatttggctactgggttatagggttacagaataaatgtaagtatggtgtctttgaagagtctttgtcctctgatcccgaggttttgactctctccatggctgtgcctccctgccgtgttggggttttcctcgactatgaagcaggcattgtctcatttttcaatgtcacaagccatggctccctcatttacaagttctctaaatgttgcttttctcagcctgtttatccatatttcaatccttggaactgtccagctcccatgactctatgcccaccaagctcttgaattttctcatttcttcacctacaaccctttgtcttgacttatctcctgcaactgactcatctgcaacattcacaccattgcttccttgtggtttcccttctttagaacttttactcatccttgagatgtatggtgtatttggcttgagttatgagagatgcttatttattcatttactctttttcatattttcagagaaagttacctaatccctcctaaagacacagcagtatgggtataacatccttgccttcccatttatccatgtttcactttatcactgatatgaagaggcccaaagcctgttagccacc

SEQ ID NO: 20218 - DNA, 2311 bp, Artificial Sequence
  derived and/or modified sequence
tgaatgaatcctgaccacacccaccctggcttttcttcacctcttcaaccaggagccgagatttctgttgctctgaagccatccaggggtctttaaccagaagagagaggagagcctcaggagttaggaccagaagaagccagggaagcagtgcaatggcttcaaaaatcttgcttaacgtacaagaggaggtgacctgtcccatctgcctggagctgttgacagaacccttgagtctagactgtggccacagcctctgccgagcctgcatcactgtgagcaacaaggaggcagtgaccagcatgggaggaaaaagcagctgtcctgtgtgtggtatcagttactcatttgaacatctacaggctaatcagcatctggccaacatagtggagagactcaaggaggtcaagttgagcccagacaatgggaagaagagagatctctgtgatcatcatggagagaaactcctactcttctgtaaggaggataggaaagtcatttgctggctttgtgagcggtctcaggagcaccgtggtcaccacacagtcctcacggaggaagtattcaaggaatgtcaggagaaactccaggcagtcctcaagaggctgaagaaggaagaggaggaagctgagaagctggaagctgacatcagagaagagaaaacttcctggaagtatcaggtacaaactgagagacaaaggatacaaacagaatttgatcagcttagaagcatcctaaataatgaggagcagagagagctgcaaagattggaagaagaagaaaagaagacgctggataagtttgcagaggctgaggatgagctagttcagcagaagcagttggtgagagagctcatctcagatgtggagtgtcggagtcagtggtcaacaatggagctgctgcaggacatgagtggaatcatgaaatggagtgagatctggaggctgaaaaagccaaaaatggtttccaagaaactgaagactgtattccatgctccagatctgagtaggatgctgcaaatgtttagagaactgacagctgtccggtgctactgggtggatgtcacactgaattcagtcaacctaaatttgaatcttgtcctttcagaagatcagagacaagtgatatctgtgccaatttggccttttcagtgttataattatggtgtcttgggatcccaatatttctcctctgggaaacattactgggaagtggacgtgtccaagaaaactgcctggatcctgggggtatactgtagaacatattcccgccatatgaagtatgttgttagaagatgtgcaaatcgtcaaaatctttacaccaaatacagacctctatttggctactgggttatagggttacagaataaatgtaagtatggtgtctttgaagagtctttgtcctctgatcccgaggttttgactctctccatggctgtgcctccctgccgtgttggggttttcctcgactatgaagcaggcattgtctcatttttcaatgtcacaagccatggctccctcatttacaagttctctaaatgttgcttttctcagcctgtttatccatatttcaatccttggaactgtccagctcccatgactctatgcccaccaagctcttgaattttctcatttcttcacctacaaccctttgtcttgacttatctcctgcaactgactcatctgcaacattcacaccattgcttccttgtggtttcccttctttagaacttttactcatccttgagatgtatggtgtatttggcttgagttatgagagatgcttatttattcatttactctttttcatattttcagagaaagttacctaatccctcctaaagacacagcagtatgggtataacatccttgccttcccatttatccatgtttcactttatcactgatatgaagaggcccaaagcctgttagccaccatccatgctacctaggtagtccataggaaccacccccatgaccaccaccaacatcaactaaaggttcttggagggtatgtcagtgtgttgctcaggataccccaggtacatcaaggaatcaaggagaggaaaatatgagcaatatgtgtattcagagtgaagattttatgtccagagtatttgagctcaaaccttgcctgttgttttctaatcatgatgaatactttctcagtttctttttcctgaaatataaattgggatttaagactgtacctaactattaagatcactgtgtaaaactaagtgtctctaaatgtaatgcatcgatttagtgtctggaacataataaatatttgctctcatgattgctaaaaa

SEQ ID NO: 20219 - DNA, 2493 bp, Artificial Sequence
  derived and/or modified sequence
gtgatctcggctcactgcaacctctgtctcctgggttcaagcgatcctcctgtctcagcctcccgagtaactgggattacaggcgcccaccaccatgcccggctaatttttgtatttttgtagacagggtttcgacatgttggccaggctggtctcaaactcctgacctcaagtgatccacccgcctcagcctcccaaagtgctgggattacaggtgtgagccactgcgcccgtcctgactcatgcaacttctgcttcagccatccaggggtctttaaccagaagagagaggagagcctcaggagttaggaccagaagaagccagggaagcagtgcaatggcttcaaaaatcttgcttaacgtacaagaggaggtgacctgtcccatctgcctggagctgttgacagaacccttgagtctagactgtggccacagcctctgccgagcctgcatcactgtgagcaacaaggaggcagtgaccagcatgggaggaaaaagcagctgtcctgtgtgtggtatcagttactcatttgaacatctacaggctaatcagcatctggccaacatagtggagagactcaaggaggtcaagttgagcccagacaatgggaagaagagagatctctgtgatcatcatggagagaaactcctactcttctgtaaggaggataggaaagtcatttgctggctttgtgagcggtctcaggagcaccgtggtcaccacacagtcctcacggaggaagtattcaaggaatgtcaggagaaactccaggcagtcctcaagaggctgaagaaggaagaggaggaagctgagaagctggaagctgacatcagagaagagaaaacttcctggaagtatcaggtacaaactgagagacaaaggatacaaacagaatttgatcagcttagaagcatcctaaataatgaggagcagagagagctgcaaagattggaagaagaagaaaagaagacgctggataagtttgcagaggctgaggatgagctagttcagcagaagcagttggtgagagagctcatctcagatgtggagtgtcggagtcagtggtcaacaatggagctgctgcaggacatgagtggaatcatgaaatggagtgagatctggaggctgaaaaagccaaaaatggtttccaagaaactgaagactgtattccatgctccagatctgagtaggatgctgcaaatgtttagagaactgacagctgtccggtgctactgggtggatgtcacactgaattcagtcaacctaaatttgaatcttgtcctttcagaagatcagagacaagtgatatctgtgccaatttggccttttcagtgttataattatggtgtcttgggatcccaatatttctcctctgggaaacattactgggaagtggacgtgtccaagaaaactgcctggatcctgggggtatactgtagaacatattcccgccatatgaagtatgttgttagaagatgtgcaaatcgtcaaaatctttacaccaaatacagacctctatttggctactgggttatagggttacagaataaatgtaagtatggtgtctttgaagagtctttgtcctctgatcccgaggttttgactctctccatggctgtgcctccctgccgtgttggggttttcctcgactatgaagcaggcattgtctcatttttcaatgtcacaagccatggctccctcatttacaagttctctaaatgttgcttttctcagcctgtttatccatatttcaatccttggaactgtccagctcccatgactctatgcccaccaagctcttgaattttctcatttcttcacctacaaccctttgtcttgacttatctcctgcaactgactcatctgcaacattcacaccattgcttccttgtggtttcccttctttagaacttttactcatccttgagatgtatggtgtatttggcttgagttatgagagatgcttatttattcatttactctttttcatattttcagagaaagttacctaatccctcctaaagacacagcagtatgggtataacatccttgccttcccatttatccatgtttcactttatcactgatatgaagaggcccaaagcctgttagccaccatccatgctacctaggtagtccataggaaccacccccatgaccaccaccaacatcaactaaaggttcttggagggtatgtcagtgtgttgctcaggataccccaggtacatcaaggaatcaaggagaggaaaatatgagcaatatgtgtattcagagtgaagattttatgtccagagtatttgagctcaaaccttgcctgttgttttctaatcatgatgaatactttctcagtttctttttcctgaaatataaattgggatttaagactgtacctaactattaagatcactgtgtaaaactaagtgtctctaaatgtaatgcatcgatttagtgtctggaacataataaatatttgctctcatgattgctaaaaa

SEQ ID NO: 20220 - protein, 397 aa, Artificial Sequence
  derived and/or modified sequence
MHHVFKDHQRGEKRGFLSPENKNCRRLELRRGCSCSWGLCSQALMASLAGSLLPGSDRSGVETSEYAQGGVSDLQEEGKNAINSPMSPALVDVHPEDTQLEENEERTMIDPTSKEDPKFKELVKVLLDWINDVLVEERIIVKQLEEDLYDGQVLQKLLEKLAGCKLNVAEVTQSEIGQKQKLQTVLEAVHDLLRPRGWALRWSVDSIHGKNLVAILHLLVSLAMHFRAPIRLPEHVTVQVVVVRKREGLLHSSHISEELTTTTEMMMGRFERDAFDTLFDHAPDKLSVVKKSLITFVNKHLNKLNLEVTELETQFADGVYLVLLMGLLEDYFVPLHHFYLTPESFDQKVHNVSFAFELMLDGGLKKPKARPEDVVNLDLKSTLRVLYNLFTKYKNVE

SEQ ID NO: 20221 - DNA, 1194 bp, Artificial Sequence
  derived and/or modified sequence
atgcatcatgtttttaaagaccaccagcgaggggaaaagaggggattcctgtcccctgagaacaaaaactgccggaggttagagctaagaagaggctgttcgtgtagttgggggctttgctcccaagcactgatggcctctcttgcggggtctctactgccaggtagcgaccggtcgggggtcgagacttcagaatacgcacagggcggggtgtccgatctgcaggaggaaggcaagaatgccattaattctccgatgagcccggcactagtcgacgttcacccagaagatacccagctggaagagaacgaggagaggacaatgattgacccaacgtctaaagaagatcccaaatttaaggagttagtgaaggtgcttttagactggattaatgatgtgctagttgaggaaaggatcattgtgaagcagctggaggaagacctctacgacggacaggtgctgcaaaaattgctggaaaagctggccgggtgtaaactcaacgtggctgaggtgacccagtccgagatcgggcagaagcaaaagctccagacggtgctagaggccgtgcatgacctcctgagacccaggggttgggccttgcggtggagcgtagattccatccacgggaagaatctggttgccatactgcatcttctcgtctccctggcaatgcacttccgcgctccaatcaggctacccgagcacgtaaccgttcaggtcgtggtcgtgaggaagcgggagggactcctccactccagccatatcagcgaggagttgacaaccacgacggagatgatgatgggtagattcgaacgggacgcctttgacacccttttcgatcatgcccctgataagctctcagtcgttaaaaagtcattgatcactttcgtcaacaagcaccttaataagctgaacctggaggtcacagagctggagacgcagtttgccgacggggtgtaccttgttctcctaatgggcctgctggaggactacttcgtgcccctgcaccacttctatttgacacccgagtctttcgatcagaaggtgcacaatgtatctttcgctttcgaactgatgcttgacggcggtctgaagaaacctaaagctaggcccgaagacgtggtcaacttggatctgaagtctaccctgagagtactgtataacctgtttactaagtataaaaacgtagaatag

SEQ ID NO: 20222 - DNA, 1194 bp, Artificial Sequence
  derived and/or modified sequence
atgcaccacgtgttcaaggaccaccagagaggagagaagaggggcttcctgagccctgagaacaagaactgccggcggctggagctgcggcggggctgcagctgctcctggggcctgtgcagccaggccctgatggccagcctggccggcagcctgctgcccggcagtgacagaagtggagtggagaccagtgaatatgcccagggcggcgtgtctgacctgcaggaggagggcaagaatgccatcaacagccccatgagccctgccctggtggatgtgcaccctgaggacacccagctggaggagaatgaggagaggaccatgattgaccccaccagcaaagaagaccccaagttcaaggagctggtgaaggtgctgctggactggatcaatgatgtgctggtggaggagcgcatcatcgtgaagcagctggaggaggacctgtatgatggccaggtgctgcagaagctgctggagaagctggccggctgcaagctgaatgtggccgaggtgacccagagcgagatcggccagaagcagaagctgcagacagtgctggaggccgtgcatgacctgctgcggccccggggctgggccctgcgctggagcgtggacagcatccacggcaagaacctggtggccatcctgcacctgctggtgtccctggccatgcacttccgggcccccatccggctgcctgagcacgtgacagtgcaggtggtggtggtgaggaagcgggagggcctgctgcacagcagccacatcagcgaggagctgaccaccaccacagagatgatgatgggccgctttgaaagagatgcctttgacaccctgtttgaccacgccccagacaagctgtctgtggtgaagaagagcctcatcacctttgtgaacaagcacctgaacaagctgaacctggaggtgacagagctggagacccagtttgctgatggagtgtacctggtgctgctgatgggcctgctggaggactactttgtgcccctgcaccacttctacctgaccccagagagctttgaccagaaggtgcacaacgtgtcctttgcctttgagctgatgctggatggcggcctgaagaagcccaaggcccggccagaagatgtggtgaacctggacctgaagagcaccctgcgggtgctgtacaacctcttcaccaagtacaagaatgtggagtag

SEQ ID NO: 20223 - DNA, 1194 bp, Artificial Sequence
  derived and/or modified sequence
atgcaccacgtgttcaaggaccaccagcggggcgagaagcggggctttctgtccccggaaaacaaaaactgccggcggctcgaactgaggcgtggctgctcctgcagctggggcctgtgctcccaggctctcatggcgagtctggccggatcacttctcccgggctccgacagatccggcgtggagacatccgagtacgcccagggaggtgtatccgatctgcaagaggaaggcaaaaacgctatcaatagtcccatgtctccagcactcgtcgacgtccaccccgaggacacacagctggaagaaaacgaagagaggacgatgattgaccctaccagcaaggaggaccctaaattcaaggaactcgtaaaggtgctgttggactggatcaatgacgtcctggtcgaagagcgcattatagttaaacagttggaggaggatctctatgacgggcaggtcctccagaagctcctggaaaagctagctgggtgcaaactcaacgtcgctgaagtgacacagtcggaaatcggccaaaagcagaagctgcaaactgtcttagaggctgtgcacgatctcttgcgcccacggggatgggccctgcgctggagcgttgattctatacacggcaagaacctcgtggctatcctacacttgcttgtctccctagcaatgcatttccgggccccaattcggttgccagagcatgtgaccgtccaggtggtggtcgtccggaagagagagggcctccttcactcttcacacatcagtgaagagctgacgacaacgactgagatgatgatgggtcgattcgagcgggacgccttcgacacgttattcgatcatgcgcctgataaactgtccgtagtgaagaaaagcctcatcaccttcgtgaataagcacctcaataagcttaaccttgaagtgacggagcttgagacgcagttcgcagacggagtctatctcgtcctactcatggggctcctggaagattacttcgtacccctgcatcacttttacctcaccccagaaagctttgaccaaaaggtgcacaatgtatcctttgccttcgaactgatgctcgatggtggattgaagaagcccaaggctagacccgaggatgtagttaatcttgacctaaagagtactctgagagtcctgtataatctctttactaagtacaagaacgtcgagtag

SEQ ID NO: 20224 - DNA, 1569 bp, Artificial Sequence
  derived and/or modified sequence
caaaggccctacactttgacgtcctccccatctccggcagctccttaaactaagaactcattttaatttctgaattctccctttttaaagaccagataaatttacctttgggacagttagatgtgcacaaatgcaccatgtgtttaaagatcaccaaagaggagagaaaaggggattccttagtccagagaacaaaaactgcaggaggctggagctgagacgtgggtgttcctgcagctggggcctgtgctcccaggcactcatggcttctctggctggttcacttctccctggctcagacagatcaggagtggaaacatctgaatatgctcaaggaggagtgagtgacctgcaggaagaaggcaagaatgccatcaactcaccgatgtcccccgccctggtggatgttcaccctgaagacacccagcttgaggagaacgaggagcgcacgatgattgaccccacttccaaggaagaccccaagttcaaggaactggtcaaggtcctcctcgactggattaatgacgtgctggtggaggagaggatcattgtgaagcagctggaggaagacctgtatgacggccaggtgctgcagaagctcttggaaaaactggcagggtgcaagctgaatgtggctgaggtgacacagtccgaaatagggcagaaacagaagctgcagacggtgctggaagcagtacatgacctgctgcggccccgaggctgggcgctccggtggagcgtggactcaattcacgggaagaacctggtggccatcctccacctgctggtctctctggccatgcacttcagggcccccatccgccttcctgagcatgtaacggtgcaggtggtggtcgtgcggaaacgggaaggcctgctgcattccagccacatctcggaggagctgaccacaactacagagatgatgatgggccggttcgagcgggatgccttcgacacgctgttcgaccacgccccggataagctcagcgtggtgaagaagtctctcatcacttttgtgaacaagcacctgaacaagctgaatttggaggtgacggaactggagacccagtttgcagatggcgtgtacctggttctgctcatgggccttctggaagactactttgttcctctccaccacttctacctgactccggaaagcttcgatcagaaggtccacaatgtgtccttcgcctttgagctgatgctggacggaggcctcaagaaacccaaggctcgtcctgaagacgtggttaacttggacctcaaatccaccctgagggttctttacaacctgttcaccaagtacaagaacgtggagtgacgggggagctgtggatggtggcaggagtgtcccagcaagaaaggcggcatccgtctgtgccctgtgcctttccagggagccaggcgccatgggcttctggtccaagctgtgttgactgtcatccccaccccacccctacctcacgcctgccccaccccctgcctcttttggttgttgttcttaatctcctctccatgtagttcccagtgggcaagagcctttgaaaatgcaggattctaaacact

SEQ ID NO: 20225 - DNA, 1194 bp, Artificial Sequence
  derived and/or modified sequence
atgcaccatgtgtttaaggaccatcagcgaggcgaaaaaagggggttcctgtcaccagagaataaaaattgccgacggctcgagctgcggaggggatgcagttgcagctggggcctatgcagtcaggcgcttatggcttctctcgccggtagtctgctccccggaagtgacagatccggcgtcgaaacctccgaatacgcccaaggcggtgtatcagatcttcaggaggaaggcaagaatgctatcaacagtccaatgagcccagccctagttgacgttcacccagaagatacacaacttgaggaaaatgaggagcgaacaatgatcgatccgaccagcaaggaggacccaaagttcaaagaattggtgaaggtcctgctcgactggatcaacgatgtattagtggaggagcggatcatcgtgaaacagctggaagaagacctatatgacgggcaggtgctccagaagttgctagaaaagctcgctgggtgtaaactgaatgtggctgaggtgacccagtccgaaatcggtcagaagcagaaactgcagacagtgcttgaggccgtgcatgacctccttagacccaggggctgggctctgagatggagcgtagatagtatccacggtaaaaaccttgtggccatactgcacctcctcgtgtcccttgcaatgcatttcagggcaccaataaggctcccagagcacgtgaccgtgcaggtcgtggtcgtgagaaaacgagaaggcctcctgcactctagtcatatatccgaggagcttacaactacaaccgaaatgatgatgggtagattcgagcgcgatgcctttgacaccctcttcgatcacgcaccagacaagctgtcggttgtgaaaaaaagcctgatcaccttcgtgaataaacacttgaataaactcaatctcgaagtgaccgagctcgagactcagttcgccgacggcgtgtatctggtcctgttgatgggactactggaggactacttcgtccccctgcaccatttctatctgacgcctgagtcgttcgaccagaaggtgcacaatgtaagtttcgcctttgagctgatgctggacggtggtcttaagaagcccaaggccaggcccgaggacgttgttaatctggacctgaagagtacactgagagtgctgtataacttgtttaccaaatacaagaacgtcgagtag

SEQ ID NO: 20226 - DNA, 1194 bp, Artificial Sequence
  derived and/or modified sequence
atgcaccacgtgttcaaggaccaccagagaggcgagaagagaggcttcctgagccccgagaacaagaactgcagaagactggagctgagaagaggctgcagctgcagctggggcctgtgcagccaggccctgatggccagcctggccggcagcctgctgcccggcagcgacagaagcggcgtggagaccagcgagtacgcccagggcggcgtgagcgacctgcaggaggagggcaagaacgccatcaacagccccatgagccccgccctggtggacgtgcaccccgaggacacccagctggaggagaacgaggagagaaccatgatcgaccccaccagcaaggaggaccccaagttcaaggagctggtgaaggtgctgctggactggatcaacgacgtgctggtggaggagagaatcatcgtgaagcagctggaggaggacctgtacgacggccaggtgctgcagaagctgctggagaagctggccggctgcaagctgaacgtggccgaggtgacccagagcgagatcggccagaagcagaagctgcagaccgtgctggaggccgtgcacgacctgctgagacccagaggctgggccctgagatggagcgtggacagcatccacggcaagaacctggtggccatcctgcacctgctggtgagcctggccatgcacttcagagcccccatcagactgcccgagcacgtgaccgtgcaggtggtggtggtgagaaagagagagggcctgctgcacagcagccacatcagcgaggagctgaccaccaccaccgagatgatgatgggcagattcgagagagacgccttcgacaccctgttcgaccacgcccccgacaagctgagcgtggtgaagaagagcctgatcaccttcgtgaacaagcacctgaacaagctgaacctggaggtgaccgagctggagacccagttcgccgacggcgtgtacctggtgctgctgatgggcctgctggaggactacttcgtgcccctgcaccacttctacctgacccccgagagcttcgaccagaaggtgcacaacgtgagcttcgccttcgagctgatgctggacggcggcctgaagaagcccaaggccagacccgaggacgtggtgaacctggacctgaagagcaccctgagagtgctgtacaacctgttcaccaagtacaagaacgtggagtag

SEQ ID NO: 20227 - protein, 634 aa, Artificial Sequence
  derived and/or modified sequence
MVRLVLPNPGLDARIPSLAELETIEQEEASSRPKWDNKAQYMLTCLGFCVGLGNVWRFPYLCQSHGGGAFMIPFLILLVLEGIPLLYLEFAIGQRLRRGSLGVWSSIHPALKGLGLASMLTSFMVGLYYNTIISWIMWYLFNSFQEPLPWSDCPLNENQTGYVDECARSSPVDYFWYRETLNISTSISDSGSIQWWMLLCLACAWSVLYMCTIRGIETTGKAVYITSTLPYVVLTIFLIRGLTLKGATNGIVFLFTPNVTELAQPDTWLDAGAQVFFSFSLAFGGLISFSSYNSVHNNCEKDSVIVSIINGFTSVYVAIVVYSVIGFRATQRYDDCFSTNILTLINGFDLPEGNVTQENFVDMQQRCNASDPAAYAQLVFQTCDINAFLSEAVEGTGLAFIVFTEAITKMPLSPLWSVLFFIMLFCLGLSSMFGNMEGVVVPLQDLRVIPPKWPKEVLTGLICLGTFLIGFIFTLNSGQYWLSLLDSYAGSIPLLIIAFCEMFSVVYVYGVDRFNKDIEFMIGHKPNIFWQVTWRVVSPLLMLIIFLFFFVVEVSQELTYSIWDPGYEEFPKSQKISYPNWVYVVVVIVAGVPSLTIPGYAIYKLIRNHCQKPGDHQGLVSTLSTASMNGDLKY

SEQ ID NO: 20228 - DNA, 1905 bp, Artificial Sequence
  derived and/or modified sequence
atggtgagactggtgctgcccaaccccggcctggacgccagaatccccagcctggccgagctggagaccatcgagcaggaggaggccagcagcagacccaagtgggacaacaaggcccagtacatgctgacctgcctgggcttctgcgtgggcctgggcaacgtgtggagattcccctacctgtgccagagccacggcggcggcgccttcatgatccccttcctgatcctgctggtgctggagggcatccccctgctgtacctggagttcgccatcggccagagactgagaagaggcagcctgggcgtgtggagcagcatccaccccgccctgaagggcctgggcctggccagcatgctgaccagcttcatggtgggcctgtactacaacaccatcatcagctggatcatgtggtacctgttcaacagcttccaggagcccctgccctggagcgactgccccctgaacgagaaccagaccggctacgtggacgagtgcgccagaagcagccccgtggactacttctggtacagagagaccctgaacatcagcaccagcatcagcgacagcggcagcatccagtggtggatgctgctgtgcctggcctgcgcctggagcgtgctgtacatgtgcaccatcagaggcatcgagaccaccggcaaggccgtgtacatcaccagcaccctgccctacgtggtgctgaccatcttcctgatcagaggcctgaccctgaagggcgccaccaacggcatcgtgttcctgttcacccccaacgtgaccgagctggcccagcccgacacctggctggacgccggcgcccaggtgttcttcagcttcagcctggccttcggcggcctgatcagcttcagcagctacaacagcgtgcacaacaactgcgagaaggacagcgtgatcgtgagcatcatcaacggcttcaccagcgtgtacgtggccatcgtggtgtacagcgtgatcggcttcagagccacccagagatacgacgactgcttcagcaccaacatcctgaccctgatcaacggcttcgacctgcccgagggcaacgtgacccaggagaacttcgtggacatgcagcagagatgcaacgccagcgaccccgccgcctacgcccagctggtgttccagacctgcgacatcaacgccttcctgagcgaggccgtggagggcaccggcctggccttcatcgtgttcaccgaggccatcaccaagatgcccctgagccccctgtggagcgtgctgttcttcatcatgctgttctgcctgggcctgagcagcatgttcggcaacatggagggcgtggtggtgcccctgcaggacctgagagtgatcccccccaagtggcccaaggaggtgctgaccggcctgatctgcctgggcaccttcctgatcggcttcatcttcaccctgaacagcggccagtactggctgagcctgctggacagctacgccggcagcatccccctgctgatcatcgccttctgcgagatgttcagcgtggtgtacgtgtacggcgtggacagattcaacaaggacatcgagttcatgatcggccacaagcccaacatcttctggcaggtgacctggagagtggtgagccccctgctgatgctgatcatcttcctgttcttcttcgtggtggaggtgagccaggagctgacctacagcatctgggaccccggctacgaggagttccccaagagccagaagatcagctaccccaactgggtgtacgtggtggtggtgatcgtggccggcgtgcccagcctgaccatccccggctacgccatctacaagctgatcagaaaccactgccagaagcccggcgaccaccagggcctggtgagcaccctgagcaccgccagcatgaacggcgacctgaagtactag

SEQ ID NO: 20229 - DNA, 1905 bp, Artificial Sequence
  derived and/or modified sequence
atggtgcgcctggtgctcccaaatcctggtcttgatgcacgcatcccctctctagccgagctggagacgatcgagcaagaagaagcctcgagcaggcctaaatgggacaacaaggcgcaatacatgttgacatgcctgggtttttgtgtaggcctcggtaacgtctggcgctttccttacctgtgtcagagtcatggcgggggggcctttatgataccttttctgattctcttagtgctggaaggaattccactgctgtacctggaatttgctatcgggcagaggcttaggcgcggatcactcggggtgtggtcaagcattcaccccgcactgaagggtctggggcttgcctccatgctgaccagcttcatggtaggactgtactataacaccatcatctcttggattatgtggtaccttttcaacagtttccaggaaccgttgccttggtctgactgcccgttgaatgagaaccaaactggttatgttgacgagtgcgccaggtcctcaccggtcgattacttttggtatagggagacccttaatatcagtacaagcatctctgacagcggcagcattcaatggtggatgctgctttgcctcgcatgcgcctggtctgtattgtatatgtgtaccatcaggggaattgaaacgaccggtaaggcggtgtacattacgagcacccttccctatgtagtccttaccatcttcctcatccgaggactaaccttaaaaggcgccaccaatggcatcgttttcttgttcacaccaaatgtgactgagttagcccagccagatacctggttggacgcaggggctcaggtgttcttctcatttagcctggcattcgggggtcttatctccttcagttcctacaatagcgtccataacaactgcgaaaaagattccgttatcgtcagtatcattaacgggttcacgtccgtttacgtggccatagtggtgtactcagtcataggcttcagagccacacagcggtacgacgattgttttagcaccaacattctgacactgattaatggctttgacctccccgaggggaacgtgacccaggaaaacttcgtggacatgcagcagaggtgcaatgctagcgaccccgccgcctacgcccagctcgtgtttcagacgtgcgacattaacgcctttctttcagaggctgtggaagggacagggctcgcattcatcgttttcaccgaagccatcacaaagatgcctctctcaccactgtggtctgttctgttcttcattatgttattttgtctcggactttcgtccatgttcggaaacatggaaggagtggtcgtgccactccaagatctgagagttattccaccgaagtggccaaaagaggtcctcaccggactcatatgtctcggaacattcctgataggctttatcttcacgttgaatagtggacagtactggctcagcctgttggacagttatgcaggcagtatcccattacttattatagcattttgcgaaatgttttcggtcgtgtatgtgtatggagtggatcgattcaataaagacattgagttcatgattgggcataagcccaatattttctggcaggtgacctggcgggtcgtttccccactcctaatgcttattatttttctgtttttttttgtcgttgaggtttcacaggaactgacatattcaatctgggaccctggctacgaggagtttccgaagtcccagaagatctcatacccaaattgggtttacgttgttgtcgtgatagtggccggtgtacctagcttgactataccggggtatgccatctataaactcattaggaaccactgccagaaaccgggcgaccaccagggactggttagcaccctgtccactgccagtatgaacggggacctgaagtactag

SEQ ID NO: 20230 - DNA, 1905 bp, Artificial Sequence
  derived and/or modified sequence
atggtgcggctggtgctgcccaaccctggcctggatgcccgcatccccagcctggccgagctggagaccatcgagcaggaggaggccagcagccggcccaagtgggacaacaaggcccagtacatgctgacctgcctgggcttctgtgtgggcctgggcaatgtgtggaggttcccctacctgtgccagagccatggaggaggagccttcatgatccccttcctgatcctgctggtgctggagggcatccccctgctgtacctggagtttgccatcggccagaggctgcggcggggcagcctgggcgtgtggagcagcatccacccagccctgaagggcctgggcctggcctccatgctgaccagcttcatggtgggcctgtactacaacaccatcatctcctggatcatgtggtacctgttcaacagcttccaggagcccctgccctggagcgactgccccctgaatgaaaaccagacaggctacgtggatgaatgtgcccggagcagccctgtggactacttctggtaccgggagaccctgaacatcagcaccagcatcagtgacagcggcagcatccagtggtggatgctgctgtgcctggcctgtgcctggagcgtgctgtacatgtgcaccatccggggcatcgagaccaccgggaaggctgtgtacatcaccagcaccctgccctacgtggtgctgaccatcttcctgatccggggcctgaccctgaagggggccaccaatggaattgtgttcctgttcacccccaacgtgacagagctggcccagcctgacacctggctggatgctggggcccaggtgttcttctccttcagcctggcctttggaggcctcatctccttcagcagctacaacagcgtgcacaacaactgtgagaaggacagcgtgattgtgtccatcatcaatggcttcacctctgtgtatgtggccatcgtggtgtacagcgtgattggcttccgggccacccagagatatgatgactgcttcagcaccaacatcctgaccctcatcaatggatttgacctgcctgagggcaatgtgacccaggagaactttgtggacatgcagcagcgctgcaatgccagtgaccctgctgcctatgcccagctggtgttccagacctgtgacatcaatgccttcctgtctgaggccgtggagggcaccggcctggccttcatcgtgttcacagaggccatcaccaagatgcccctgagccccctgtggagcgtgctcttcttcatcatgctgttctgcctgggcctgagctccatgtttggaaacatggagggcgtggtggtgcccctgcaggacctgcgggtcatcccccccaagtggcccaaggaggtgctgaccggcctcatctgcctgggcaccttcctgattggcttcatcttcaccctgaacagcggccagtactggctgagcctgctggacagctatgccggcagcatccccctgctgatcatcgccttctgtgagatgttttctgtggtgtatgtgtatggagtggaccgcttcaacaaggacatcgagttcatgattggccacaagcccaacatcttctggcaggtgacctggagggtggtgagccccctgctgatgctgatcatcttcctgttcttctttgtggtggaggtgtcccaggagctgacctacagcatctgggaccccggctatgaggagttccccaagagccagaagatctcctaccccaactgggtgtatgtggtggtggtgattgtggccggcgtgcccagcctgaccatccctggctacgccatctacaagctgatccggaaccactgccagaagccaggggaccaccagggcctggtgtccaccctgagcacagcctccatgaatggagacctgaagtactag

SEQ ID NO: 20231 - DNA, 1905 bp, Artificial Sequence
  derived and/or modified sequence
atggtgcggctggtgctgcccaaccccggcctggacgcccggatcccaagtctcgctgaactggagacaattgagcaagaagaggcttcttctcgaccgaaatgggataataaggctcagtacatgctcacttgcctcggattctgtgtcggcctgggtaatgtatggcggttcccgtatctatgtcagagccatggcggtggagcattcatgataccatttctaattctgttagtcctggaaggaatcccactcctctaccttgaatttgccatcggacagcgcctaagaaggggctccctgggcgtgtggtcgtcaatccaccctgccctgaagggcctggggttggcttccatgctcacctcgttcatggtagggctatactataataccatcattagctggatcatgtggtaccttttcaatagcttccaagaaccgctaccgtggtccgattgcccattaaatgagaatcagaccggctacgtggatgagtgtgcacggtcctcaccggtcgactacttttggtacagagaaaccttgaacatctctacctcaatcagtgactctggtagtatacagtggtggatgctcctttgtctggcatgcgcatggagtgttttgtatatgtgtacaatcagaggaattgaaacaaccggcaaggcggtctacattactagtactctgccatatgtagttctcaccatctttctcataaggggattgacgctcaaaggtgccacaaatggtattgtgttcctgtttacccccaacgtcactgaactggcgcagcccgatacctggctggacgcaggggctcaagtgtttttctccttttccctggcgttcgggggtctgatatcattttcttcctacaacagtgtgcataataactgtgaaaaggactcagtaattgttagcatcatcaacggattcacatccgtgtatgttgctatcgtggtctattctgttatcggatttcgcgcgacccagcgatacgacgattgtttttccacgaatattttgaccctcatcaacggcttcgacctgccagagggtaatgttacccaggagaattttgtcgacatgcagcagaggtgcaatgcttcagaccccgccgcatacgcacagctggtgtttcagacctgtgatattaatgcattcttgagcgaggccgttgaaggtacaggcctggcttttatcgtcttcaccgaggccatcaccaagatgcctctctccccactctggtccgtcctgttctttatcatgctgttctgtctgggtctgagctctatgttcgggaacatggaaggcgtcgttgttcctttgcaagatttacgggtgataccgccgaaatggcccaaggaggtgctgaccggtctcatttgtctgggaactttcttaattggattcatcttcaccttgaacagtggccagtattggctgtctttgctcgactcctatgctggttcaatcccactgctcatcatcgctttctgcgagatgtttagcgtagtttatgtgtatggcgtggaccgattcaataaggacatagagtttatgattggccataagccgaacattttttggcaggtgacatggcgcgtggtgtcaccccttctgatgctgattatctttctctttttctttgtggttgaagtctctcaggagctcacttactcaatctgggatcctggatacgaggaattccctaagtctcagaagatctcatatcccaactgggtatacgtggttgtcgtcattgtggcgggcgtgccttccctcaccatccctggatatgccatttataagctaattaggaaccattgccaaaagccaggcgatcaccaagggctagtgtctacattatctaccgcaagcatgaatggtgatctgaaatactag

SEQ ID NO: 20232 - DNA, 1905 bp, Artificial Sequence
  derived and/or modified sequence
atggtgcggctggttttgcctaatcccggtttggacgcgcgaatcccttcccttgccgagctcgagaccattgaacaggaggaggcctcttctcggcctaagtgggacaataaggcacagtacatgctgacctgcctgggcttttgtgtgggattgggcaacgtctggcggtttccctacttgtgccagagccatggtggaggagctttcatgattcccttcttgatactgctcgtgctggagggaattcctctgctgtatttggaattcgcaataggtcagcgcttgcggagggggtccctaggagtctggtcgagcatacatcctgctctgaagggtctgggcctggccagtatgctgacttcatttatggtgggattgtactacaatactatcattagttggatcatgtggtatctattcaactcattccaggagccgctcccctggagcgactgtccgctcaacgagaaccagaccggatacgtcgatgaatgcgccagatcatctcccgtggactatttttggtaccgggaaactctgaatatctctactagtattagcgatagtggttcaatccagtggtggatgctgctgtgcttggcctgcgcatggagcgttctgtatatgtgtacaataagagggattgaaacaacaggtaaggccgtctacatcactagtacgctcccttatgtcgtcttaacaatcttccttatacgtggtcttactcttaagggcgctacgaatggaattgtgtttttattcacccccaacgtgactgaattggcccagcctgacacttggctggatgccggagcccaagtttttttcagtttcagccttgcgttcggcggtctcatcagcttcagcagctataattccgttcacaacaattgcgagaaggacagtgtgattgtgagtatcatcaatggcttcacctcagtgtacgtcgccattgtagtatatagcgtaataggtttccgagccacccaacggtacgacgactgtttcagtacaaacatcttaacccttattaatggcttcgatctgcccgagggcaacgttacccaggagaattttgtggatatgcagcagaggtgcaacgcatcagatcccgctgcttatgcccagttagtgttccagacatgtgacattaatgcctttctctccgaagctgttgagggtacaggcctcgcatttatcgtgttcaccgaggccatcaccaaaatgccactttctcctctctggtccgtactcttcttcataatgctgttttgcctcggcctctcttcaatgttcgggaacatggaaggggttgtcgtgccacttcaagatctccgtgtgataccccctaaatggcccaaagaggtgctgactggcctgatctgcctgggaaccttccttattgggtttatctttacactgaactcagggcaatattggctaagcctgttggattcttacgccggtagcatacctctgctcataattgccttctgcgagatgtttagcgtggtgtatgtgtatggtgttgaccgttttaacaaggatatcgagttcatgataggccataagcctaacatcttctggcaagtgacctggcgggtggtgtctcccctgctaatgcttatcatcttcctctttttcttcgtggtggaagtgtctcaagaactgacttacagcatttgggatcccggttacgaggaatttcctaagtcgcagaagatctcataccctaattgggtgtacgttgtagtggtcatcgttgccggagtgccttcgctgaccatccccggttacgcaatatataagctcatacgcaatcattgccagaagcctggcgaccatcaaggcctagtcagtacattgtcaaccgcatcaatgaatggcgacttgaaatattag

SEQ ID NO: 20233 - DNA, 5174 bp, Artificial Sequence
  derived and/or modified sequence
actcgccctccagcttctgccctgcctgctgtgtgcggagccgtccagcgaccaccatggtgaggctcgtgctgcccaaccccggcctagacgcccggatcccgtccctggctgagctggagaccatcgagcaggaggaggccagctcccggccgaagtgggacaacaaggcgcagtacatgctcacctgcctgggcttctgcgtgggcctcggcaacgtgtggcgcttcccctacctgtgtcagagccacggaggaggagccttcatgatcccgttcctcatcctgctggtcctggagggcatccccctgctgtacctggagttcgccatcgggcagcggctgcggcggggcagcctgggtgtgtggagctccatccacccggccctgaagggcctaggcctggcctccatgctcacgtccttcatggtgggactgtattacaacaccatcatctcctggatcatgtggtacttattcaactccttccaggagcctctgccctggagcgactgcccgctcaacgagaaccagacagggtatgtggacgagtgcgccaggagctcccctgtggactacttctggtaccgagagacgctcaacatctccacgtccatcagcgactcgggctccatccagtggtggatgctgctgtgcctggcctgcgcatggagcgtcctgtacatgtgcaccatccgcggcatcgagaccaccgggaaggccgtgtacatcacctccacgctgccctatgtcgtcctgaccatcttcctcatccgaggcctgacgctgaagggcgccaccaatggcatcgtcttcctcttcacgcccaacgtcacggagctggcccagccggacacctggctggacgcgggcgcacaggtcttcttctccttctccctggccttcgggggcctcatctccttctccagctacaactctgtgcacaacaactgcgagaaggactcggtgattgtgtccatcatcaacggcttcacatcggtgtatgtggccatcgtggtctactccgtcattgggttccgcgccacacagcgctacgacgactgcttcagcacgaacatcctgaccctcatcaacgggttcgacctgcctgaaggcaacgtgacccaggagaactttgtggacatgcagcagcggtgcaacgcctccgaccccgcggcctacgcgcagctggtgttccagacctgcgacatcaacgccttcctctcagaggccgtggagggcacaggcctggccttcatcgtcttcaccgaggccatcaccaagatgccgttgtccccactgtggtctgtgctcttcttcattatgctcttctgcctggggctgtcatctatgtttgggaacatggagggcgtcgttgtgcccctgcaggacctcagagtcatccccccgaagtggcccaaggaggtgctcacaggcctcatctgcctggggacattcctcattggcttcatcttcacgctgaactccggccagtactggctctccctgctggacagctatgccggctccattcccctgctcatcatcgccttctgcgagatgttctctgtggtctacgtgtacggtgtggacaggttcaataaggacatcgagttcatgatcggccacaagcccaacatcttctggcaagtcacgtggcgcgtggtcagccccctgctcatgctgatcatcttcctcttcttcttcgtggtagaggtcagtcaggagctgacctacagcatctgggaccctggctacgaggaatttcccaaatcccagaagatctcctacccgaactgggtgtatgtggtggtggtgattgtggctggagtgccctccctcaccatccctggctatgccatctacaagctcatcaggaaccactgccagaagccaggggaccatcaggggctggtgagcacactgtccacagcctccatgaacggggacctgaagtactgagaaggcccatcccacggcgtgccatacactggtgtcagggaaggaggaaccagcaagacctgtggggtgggggccgggctgcacctgcatgtgtgtaagcgtgagtgtatgctcgtgtgtgagtgtgtgtattgtacacgcatgtgccatgtgtgcagatatgtatcgtgtgtgcatgtacatgcatgggcactgtgtgagtgtgcacgtgtatgcacacatatacatgtgtgtgggtgtgtgtattgtatgtgcatgtgccatgtgtgcagatgtgtcatgttgtgtgtgtgcatgtacatgtatggacattgtgtgagtgtgcaagtgtgcatgcatatacatgtgtgcgatatttgctgcccgtgtgtgtgcatgtatatatagacatacatgcctatgttgtgtgtggtgtgcatatgtgtgaacacacacgtgtatacatgcatgcacatgtgctcgtacaatgggtgtccacatgcacgtgtatatgtatatctgtgagtgtatatacatgcatgcaattgtgtgtatgtgtgttctgtgtgtgcgtttgcaagtatatatgcacatgtgtatatgtacatgtatgcctgtgtgacgtgtgtatatgtgagcatgtgtacgtgtgtgtatacgtgtgttgtgtatatgtgtgtgtctgtacctgtttgtgtatatgtgtgtgatgtgtgctcgtgtgtgtgcatattcaggcaggtgtgcatttgtgcatgccagtgtgtatgtatgtgcgcatatggacacgcatggacacgcatatggacacatatggacacacatatggacacgtgtggatatgtgtgcgtacacgtcgctgggacacatgcctgccactcggggcccagctgccctctgtgtttgtccttgccacagtcacggggtgcatgtgcagaggggagcagaccactggggacgtgctgtgccctgcacgtgcccgggggaagcggaagctgcagctggggtgggggcagcacctctatgcttcatctctgtgggtggcaggagacaaaagcacagggtactatcttggctcctgggagcgactcttgctacccacccccacccatccccttccccttggtgttgacctttgacctgggggttcccagagccctgtagccctcgacccggagcagcctctcggaagccggagtgggcagttgctggcgattctgagaaaacttggccgcatccaccggggccctgcctccagtcggccgctgccgagtctctgcgttctggccgcttcccggcttaatgaatgccagccatttaatcattgctcctgccaccacaaatagatgagcagttaaataaaactcaacttggcataattcaaggcaaataccactctgtgcattttcttaagaggacatgagctgtgtgaatttttagccagcctttggaaaagatgggttacagggtaactcaaccctggctgccatccttgggcactgtgtgtgtccagggcaccttggaggaccgtgcagcccccagaagcttccagctcccgcaccactcagtgaagcccagcctggcgcctgccctgcccccgtcacgggatgggcccccattggggttcaacattccatcgcagccaaaggcagtcggcacttgggacatctgcttccacggacaggtcacctccgctttgcacggaagaatctggatgcttacattaaactggtgttctgagagttcctacggacaggtcacctccgctttgcatggaagaatctggatgcttacattaaactggtgttctgagagttcctacggacaggtcacctctgctttccatagaagaatctggacgcttacattaaactgatgttctgagaattcctacaggcaggactgaaagcctggtgtgtgccagtatgatgttccacccacagaaacctggtcacaatcgtcccttccagcaccccatccagcagtgactgcacacactgagtcccctaccagcccctttcaccctgctgactgtcactgggccctgggatgcgcaagactccacagcagcagaggtggggggacatatcacagcctctgcccccggctgtgatgccaccgaggggctcgcctgctgatggcttcaacagggtctcacctcatcttttcctgctctttggccctggatcgagaaaatttccatcagtgccccattaatatgctgccctgtggcatctgcccaggaggccctgccaggcgtgcacaggtgtgcattggtgtaccctggcatgcacaggtgtgcactgatgtgccctggcatccattggtgtaccctggtgtgcctgccataggaccctgggcgggagctcccatctcatctacatctcctgattcatgcgttgtttcataggtttcaatgtctctgtaaatgtggtagaaatgcaggctttatgggcataaagtgtacatttctaaataaatcccttctattgagtatgctcaccctagaagttactgttgtccagacgtagagggatgagtgagccagtgacctcagacgggatggtggggacggcaggtccagctcctgcctcctcctggggggtctggctttgggggcttgctccgaagaggccatggcccaggcctgtggcctcacaatggggaccaaccagctcttctcatcttcttccctcacacttcctctcactcaaataagaaccttccaaaaatgtgtccacctgggcccctgccctgggactcatggatttggagttgtggccacacggttgaggggtgcagtgtccagtggaatggggcaattgcgggcctgggggcccttggcctgtccgtggcgggagcatctgcaaggaggagccccagagtccagggagcactgtggggagctccttagagctgaactcacccggcgtcaactcatcaaccctccacccatggacaggggtgcccccagcacaggagaggactcagccctctgcccccacgcacggtgggtgcctgtcaccctgtcctgcccagcggcccgagggcagcagtgggtgtgagggcagcccccggcctcccaagagcagctgagaggatccctgcgggaatccgggcttcgggtgcatgcgatctgatctgagttgtttctgacagtgacagagtgacaatctataagtatctcaagatcaaatggttaaataaaacataagaaatttaaaacgattaaaa

SEQ ID NO: 20234 - protein, 398 aa, Artificial Sequence
  derived and/or modified sequence
MAAVAVLRNDSLQAFLQDRTPSASPDLGKHSPLALLAATCSRIGQPGAAAPPDFLQVPYDPALGSPSRLFHPWTADMPAHSPGALPPPHPSLGLTPQKTHLQPSFGAAHELPLTPPADPSYPYEFSPVKMLPSSMAALPASCAPAYVPYAAQAALPPGYSNLLPPPPPPPPPPTCRQLSPNPAPDDLPWWSIPQAGAGPGASGVPGSGLSGACAGAPHAPRFPASAAAAAAAAAALQRGLVLGPSDFAQYQSQIAALLQTKAPLAATARRCRRCRCPNCQAAGGAPEAEPGKKKQHVCHVPGCGKVYGKTSHLKAHLRWHTGERPFVCNWLFCGKSFTRSDELQRHLRTHTGEKRFACPECGKRFMRSDHLAKHVKTHQNKKLKVAEAGVKREDARDL

SEQ ID NO: 20235 - DNA, 1197 bp, Artificial Sequence
  derived and/or modified sequence
atggcagctgtggctgtgctccgtaatgattccctgcaggcctttcttcaggaccgaacgccatcagcatccccggatctgggaaagcatagcccacttgccctgttagccgccacatgctcccgtattgggcagcccggcgctgcggctccacccgactttctgcaagtgccttacgaccccgccttgggcagcccatcccgtctgtttcacccgtggaccgccgatatgcctgctcatagcccaggcgccttacctccaccccatccttcccttggcttgacccctcagaagacacatttgcagccaagctttggtgccgcgcatgaactcccgctgaccccccctgccgatccatcctacccgtacgagttctcaccggtgaaaatgctcccaagtagtatggccgcacttccagcctcctgtgcccccgcatacgtgccctatgctgcacaagctgcactgccaccgggatattctaatctgctaccccctccacctcccccaccacccccacctacatgtagacagttatcacccaaccccgcccccgacgacctaccttggtggagtatcccacaggccggagcaggtcccggcgctagcggagtccctggcagcggtctctcgggcgcatgtgccggcgctcctcacgcccctagattccccgcctctgctgcggcggcagcagctgcggcagctgctctgcaaaggggtctggttttaggcccaagcgatttcgctcagtaccaatcccagatcgcagcactgttacaaacgaaggcccctctcgcagctaccgcaaggaggtgtcgcagatgtaggtgtccaaactgccaggctgctgggggggctccagaggcagaaccgggaaagaagaagcaacacgtttgccacgtccccgggtgtgggaaggtttatggtaagactagtcacctgaaagcccacctgaggtggcacactggcgaacggccgttcgtgtgtaattggttattttgtggtaagtcctttactcgtagcgatgagctgcaacggcatctgagaacccacacaggagagaagcggtttgcttgtccagagtgcggaaagcgcttcatgagaagcgaccaccttgctaaacatgtgaaaacacaccagaacaaaaagttaaaagtggcagaagcaggggtgaaacgagaggatgctcgggacttgtag

SEQ ID NO: 20236 - DNA, 1197 bp, Artificial Sequence
  derived and/or modified sequence
atggctgctgtggccgtgctgagaaatgacagcctgcaggccttcctgcaggacaggacccccagcgccagcccagacctgggcaagcacagccccctggccctgctggccgccacctgcagcagaattggccagcccggggctgctgcccccccagacttcctgcaggtgccctatgaccctgccctgggcagccccagccgcctcttccacccctggacagctgacatgcctgcccacagccctggggccctgcccccaccccaccccagcctgggcctgaccccccagaagacccacctgcagcccagctttggagctgcccacgagctgcccctgaccccacctgctgaccccagctacccctatgagttcagccctgtgaagatgctgcccagctccatggccgccctgcctgccagctgtgccccagcctacgtgccctatgctgcccaggccgccctgcccccaggctacagcaacctgctgcccccacctcctcctcctcctcctccacccacctgccggcagctgagccccaacccagccccagatgacctgccctggtggagcatcccccaggccggggccggccctggggccagcggcgtgcccggcagcggcctgagcggggcctgtgccggggccccccacgccccccgcttccctgccagcgctgctgctgctgctgctgctgctgctgccctgcagaggggcctggtgctgggccccagcgactttgcccagtaccagagccagattgctgccctgctgcagaccaaggcccccctggccgccacagcccggcgctgccgccgctgccgctgccccaactgccaggccgccggcggggcccctgaggccgagcccgggaagaagaagcagcacgtgtgccacgtgcccggctgcggcaaggtgtatggcaagaccagccacctgaaggcccacctgcgctggcacactggagagcggccctttgtgtgcaactggctgttctgtgggaagagcttcaccaggagtgatgagctgcagaggcacctgcggacccacactggagagaagagatttgcctgcccagaatgtgggaagcgcttcatgagaagtgaccacctggccaagcacgtgaagacccaccagaacaagaagctgaaggtggccgaggccggcgtgaagagagaagatgcccgggacctgtag

SEQ ID NO: 20237 - DNA, 1197 bp, Artificial Sequence
  derived and/or modified sequence
atggccgccgtggccgtgctgcggaacgacagcctgcaggccttcctccaggaccgcacacccagcgcgagccccgatctgggcaagcactcacccttggccctgctcgccgccacctgcagcagaattggtcagccaggggctgctgctcctccggatttcctacaggtgccctacgaccctgcccttggtagtccctccagactattccatccatggaccgctgacatgcccgcccatagtcccggcgccctgcccccccctcatccatcccttgggcttactccccagaaaacccacctccaaccatcctttggagcagcacacgaactccctcttacaccccccgccgacccttcttacccgtacgagttcagtccagtgaaaatgcttcccagctcaatggccgcgctgcctgccagttgtgcaccagcttatgtcccctacgcagcccaggccgctctgcctcctggttactcaaatttgttgccccctccacccccacctcctccacctcctacctgcaggcagttatccccaaacccagctccagatgacttaccatggtggtctattccgcaggcaggagccggacccggtgcctccggagtccctgggagcgggctgtcaggcgcgtgtgcgggggcaccacatgccccacgcttcccagcatccgctgctgcggcagcagcagcagcagcagcactgcagcgcggccttgtccttgggccatctgacttcgcacagtatcaaagtcagattgcggctctgctccagaccaaagcccctcttgccgctacggccagacgatgccgaaggtgcagatgccccaactgtcaggcagcagggggcgcccccgaagccgagcccggtaagaagaaacagcacgtgtgccacgttcctgggtgcggaaaagtttacggaaagacttcacacctgaaagcccacctaaggtggcataccggcgagcgacctttcgtctgcaactggctgttctgtgggaaatcatttactagaagtgatgagctccagcggcatctccggactcataccggcgagaaacgatttgcctgtccagaatgcggcaaacgatttatgagaagtgaccatctagcgaagcacgtcaaaacccatcaaaacaagaaactcaaagttgccgaagccggggtcaagcgggaggatgccagggatctgtag

SEQ ID NO: 20238 - DNA, 2033 bp, Artificial Sequence
  derived and/or modified sequence
gcgagcgagcggggcgcggcgaggggcaagggcggggagggccccggcgctcagagcaggcgccagggaggcaggctgggcggcccttcgtcctcgccttcgggtgtccatgcctcggcggcggcgtcccgctccgcagccaggggcctgcaagccgtagccatggccgcggtggccgtcctccggaacgactcgctgcaggcctttctccaggaccgcacccccagcgcctccccggacctgggcaagcactcgcccctggcattgctggccgccacctgtagccgcatcggccagccgggcgcggcggcgcccccggacttcctgcaggtgccctacgaccccgcgctgggctcaccctccaggctcttccacccgtggaccgccgacatgccggcgcactcgccaggcgcactgccgcccccgcatcccagcttggggctgacgccgcagaagacgcacctgcagccgtccttcggggctgcgcacgagcttccccttacaccccccgccgacccctcgtacccctacgagttctcgccggtcaagatgctgccctcgagcatggcggctctgcccgccagctgcgcgcccgcctacgtgccctacgcggcgcaggccgcgctgccgccaggctactccaacctgctgcctccgccgccgccaccgcccccgccgcccacctgccgccagttgtcacccaacccggcccccgacgacctcccgtggtggagcatcccgcaggcgggcgccgggccgggggcctccggggttccgggaagcggcctctccggcgcctgtgccggggccccccacgcgccccgcttccccgcctctgcggccgctgctgctgcggccgccgccgccctacaaagaggcctggtgttgggcccgtcggactttgcgcagtaccagagccagatcgccgcgctgctgcagaccaaggcccccctggcggccacggccaggaggtgccgccgctgccgctgtcccaactgccaggcggcgggcggcgcccccgaggcggagccggggaagaagaagcagcacgtgtgccacgtgccgggctgcggcaaggtgtacgggaagacgtcgcacctgaaggcgcacctgcgctggcacacgggcgagcgacccttcgtgtgcaactggctcttctgcgggaagagcttcacgcgctcggacgagctgcagcggcacctgcggactcacacgggcgagaagcgctttgcctgtcccgagtgcggcaagcgcttcatgcgcagcgaccacctcgcgaagcacgtcaagactcaccagaataagaagctcaaagtcgctgaggccggggttaagcgggaggacgcgcgggacctgtgagccctcccggaggtggacccccttcccagcacctctgcgagagatccggggacctgtgggcagctggcggaggggagactcagcagacggaccctctccgttgcctgcctcccaaaatggagccaggcttccaacttccgctgccttcggacatagggacccagttcccaggagcggggaggtagggttggggctggggcatttggattgtaattgggagctctgccgtacgccagggcggttccaaactctaaaccgttcccaccgtcagggagacctacagtttcgggggaccaccctggtctggccttgtatataggaaatgctgctgaactgaatagaaaggaacttgggagatttgaaacagtgctcgggttttcgctaggaccggtttgggctttgtacaggttatttaatagctttgttaaagataattataataattataacattaataaaaatgttgcttttgtcttcagctccatgcagagctacagcatgatatgtctctgtaaagtgatcagcagttgcagcgtgaaaataaatactttaactcaggggtcactacaggaagaccccgttgagccggtctcatttgatcttttcttcttctgggtggctgtactaagcggtcgggtttccccgggaatttgatggttcctatagtctgcctg

SEQ ID NO: 20239 - DNA, 1197 bp, Artificial Sequence
  derived and/or modified sequence
atggccgctgttgctgtattgcgaaacgattccctgcaagcctttctgcaggatcggactccatcagccagtcccgatttgggtaaacattccccactggccctactcgcggctacctgttcaaggataggccagcctggagccgcagctccccctgattttctccaggtgccatacgaccccgcactgggtagcccatcccggctgtttcacccatggaccgccgacatgcccgctcactctcctggcgctctaccccctccacacccatcacttggcctcactccccaaaagactcacctccagccatcatttggggctgctcacgagctgcccctgaccccgcctgctgacccatcatatccttacgaattctcacccgtcaaaatgcttcccagcagcatggccgctcttcctgcctcctgcgccccagcatacgttccctacgcagcacaggcagctctgcctccaggttacagtaacctgctcccaccgcctccacctccgccaccaccacccacatgtcgccaactgtcccctaatccagctcccgatgacctcccctggtggagtatcccgcaggccggtgcagggcctggcgcttctggcgttccgggaagtggattgtcaggcgcttgcgccggagctccccatgcacctcgctttcctgccagtgctgccgctgcagcagccgctgcggctgcactgcagcgagggctggtcctgggtccttcagacttcgcacagtatcagtctcagatagcagctttgctgcagacgaaagctccactcgctgcaactgcccgtagatgcaggagatgtcgatgtcctaattgccaggccgcaggcggtgccccagaagcagagcctggcaagaaaaagcaacacgtgtgtcacgtgcccggttgcggcaaggtctacgggaagacatcccacctaaaagcacacctgcgttggcacacgggagaacggccattcgtctgcaattggttattttgtggtaagagcttcacgagaagcgatgagttacagagacacctgagaacacacacaggggagaagagatttgcctgcccagaatgcggcaagcgctttatgaggtcagaccacttagcaaaacatgttaaaacacaccagaataagaagttgaaggttgcggaggcaggcgtgaaaagagaggacgcacgtgacctctag

SEQ ID NO: 20240 - DNA, 1197 bp, Artificial Sequence
  derived and/or modified sequence
atggccgccgtggccgtgctgagaaacgacagcctgcaggccttcctgcaggacagaacccccagcgccagccccgacctgggcaagcacagccccctggccctgctggccgccacctgcagcagaatcggccagcccggcgccgccgccccccccgacttcctgcaggtgccctacgaccccgccctgggcagccccagcagactgttccacccctggaccgccgacatgcccgcccacagccccggcgccctgccccccccccaccccagcctgggcctgaccccccagaagacccacctgcagcccagcttcggcgccgcccacgagctgcccctgaccccccccgccgaccccagctacccctacgagttcagccccgtgaagatgctgcccagcagcatggccgccctgcccgccagctgcgcccccgcctacgtgccctacgccgcccaggccgccctgccccccggctacagcaacctgctgccccccccccccccccccccccccccccccacctgcagacagctgagccccaaccccgcccccgacgacctgccctggtggagcatcccccaggccggcgccggccccggcgccagcggcgtgcccggcagcggcctgagcggcgcctgcgccggcgccccccacgcccccagattccccgccagcgccgccgccgccgccgccgccgccgccgccctgcagagaggcctggtgctgggccccagcgacttcgcccagtaccagagccagatcgccgccctgctgcagaccaaggcccccctggccgccaccgccagaagatgcagaagatgcagatgccccaactgccaggccgccggcggcgcccccgaggccgagcccggcaagaagaagcagcacgtgtgccacgtgcccggctgcggcaaggtgtacggcaagaccagccacctgaaggcccacctgagatggcacaccggcgagagacccttcgtgtgcaactggctgttctgcggcaagagcttcaccagaagcgacgagctgcagagacacctgagaacccacaccggcgagaagagattcgcctgccccgagtgcggcaagagattcatgagaagcgaccacctggccaagcacgtgaagacccaccagaacaagaagctgaaggtggccgaggccggcgtgaagagagaggacgccagagacctgtag

SEQ ID NO: 20241 - protein, 788 aa, Artificial Sequence
  derived and/or modified sequence
MDVSGQETDWRSTAFRQKLVSQIEDAMRKAGVAHSKSSKDMESHVFLKAKTRDEYLSLVARLIIHFRDIHNKKSQASVSDPMNALQSLTGGPAAGAAGIGMPPRGPGQSLGGMGSLGAMGQPMSLSGQPPPGTSGMAPHSMAVVSTATPQTQLQLQQVALQQQQQQQQFQQQQQAALQQQQQQQQQQQFQAQQSAMQQQFQAVVQQQQQLQQQQQQQQHLIKLHHQNQQQIQQQQQQLQRIAQLQLQQQQQQQQQQQQQQQQALQAQPPIQQPPMQQPQPPPSQALPQQLQQMHHTQHHQPPPQPQQPPVAQNQPSQLPPQSQTQPLVSQAQALPGQMLYTQPPLKFVRAPMVVQQPPVQPQVQQQQTAVQTAQAAQMVAPGVQMITEALAQGGMHIRARFPPTTAVSAIPSSSIPLGRQPMAQVSQSSLPMLSSPSPGQQVQTPQSMPPPPQPSPQPGQPSSQPNSNVSSGPAPSPSSFLPSPSPQPSQSPVTARTPQNFSVPSPGPLNTPVNPSSVMSPAGSSQAEEQQYLDKLKQLSKYIEPLRRMINKIDKNEDRKKDLSKMKSLLDILTDPSKRCPLKTLQKCEIALEKLKNDMAVPTPPPPPVPPTKQQYLCQPLLDAVLANIRSPVFNHSLYRTFVPAMTAIHGPPITAPVVCTRKRRLEDDERQSIPSVLQGEVARLDPKFLVNLDPSHCSNNGTVHLICKLDDKDLPSVPPLELSVPADYPAQSPLWIDRQWQYDANPFLQSVHRCMTSRLLQLPDKHSVTALLNTWAQSVHQACLSAA

SEQ ID NO: 20242 - DNA, 2149 bp, Artificial Sequence
  derived and/or modified sequence
gggcctggctctgtgactgaggcggcggcggtggcggccaagcgggatacgggcggcgggagctggggaacaggcatggacgtttccgggcaagagaccgactggcggagcaccgccttccggcagaagctggtcagtcaaatcgaggatgccatgaggaaagctggtgtggcacacagtaaatccagcaaggatatggagagccatgttttcctgaaggccaagacccggcccagctgcagctccagcaggtggcgctgcagcagcagcagcaacagcagcagttccagcagcagcagcaggcggcgctacagcagcagcagcagcagcagcaacagcagcagttccaggctcagcagagtgccatgcagcagcagttccaagcagtagtgcagcagcagcagcagctccagcagcagcagcagcagcagcagcatctaattaaattgcatcatcaaaatcagcaacagatacagcagcagcaacagcagctgcagcgaatagcacagctgcagctccaacaacagcaacagcagcagcagcagcagcagcagcagcagcagcaggctttgcaggcccagccaccaattcagcagccaccgatgcagcagccacagcctccgccctcccaggctctgccccagcagctgcagcagatgcatcacacacagcaccaccagccgccaccacagccccagcagcctccagttgctcagaaccaaccatcacaactcccgccacagtcgcagacccagcctttggtgtcacaggcgcaagctctccctggacaaatgttgtatacccaaccaccactgaaatttgtccgagctccgatggtggtgcagcagcccccagtgcagccccaggtgcagcagcagcagacagcagtacagacagctcaggctgcccagatggtggctcccggagtccagtgaaccccagctctgtcatgagcccagctggctccagccaggctgaggagcagcagtacctggacaagctgaagcagctgtcgaagtacatcgagcccctgcgccgcatgatcaacaagatcgacaagaacgaagacagaaaaaaggacctgagtaagatgaagagccttctggacattctgacagacccctcgaagcggtgtcccctgaagaccttgcaaaagtgtgagatcgccctggagaaactcaagaatgacatggcggtgcccactcccccaccgcccccggtgccaccgaccaaacagcagtacctatgccagccgctcctggatgccgtcctggccaacatccgctcacctgtcttcaaccattccctgtaccgcacattcgttccagccatgaccgccattcacggcccacccatcacgtatgtccagctgggctgggctttgcggagggcggccagccctgggccgcgtgtgccaggtgtggtcaccatgccgcctccccagggccccagtggtgtgcacccggaagcgcaggcttgaggatgatgagcggcagagcatccccagtgtgctccagggtgaggtggccaggctggaccccaagttcctggtaaacctggacccttctcactgcagcaacaatggcactgtccacctgatctgcaagctggatgacaaggacctcccaagtgtgccaccactggagctcagtgtgcccgctgactatcctgcccaaagcccgctgtggatagaccggcagtggcagtacgacgccaaccccttcctccagtcggtgcaccgctgcatgacctccaggctgctgcagctcccggacaagcactcggtcaccgccttgctcaacacctgggcccagagcgtccaccaggcctgcctctcagccgcctagccaagactgcagggatggcccgcagcctcatcggggccaaggacacacgcctcctgtcagacacttctaggtgttggcttccttagagagcctggggttaggttagctttcctgcttttatcttctgccttggggacctgccaaacgaaatcccacacctgtacagaactgggataggcgcagtggagcgggttgcttggggggcgttggccgacttcttagagaaggccctccatgtgacttcctcccaggagccagatgcgatcctcaggctgctctcaccgtggcctgtccacggtcca

SEQ ID NO: 20243 - protein, 220 aa, Artificial Sequence
  derived and/or modified sequence
MTSGEVKTSLKNAYSSAKRLSPKMEEEGEEEDYCTPGAFELERLFWKGSPQYTHVNEVWPKLYIGDEATALDRYRLQKAGFTHVLNAAHGRWNVDTGPDYYRDMDIQYHGVEADDLPTFDLSVFFYPAAAFIDRALSDDHSKILVHCVMGRSRSATLVLAYLMIHKDMTLVDAIQQVAKNRCVLPNRGFLKQLRELDKQLVQQRRRSQRQDGEEEDGREL

SEQ ID NO: 20244 - DNA, 663 bp, Artificial Sequence
  derived and/or modified sequence
atgaccagcggcgaggtgaagaccagcctgaagaacgcctacagcagcgccaagagactgagccccaagatggaggaggagggcgaggaggaggactactgcacccccggcgccttcgagctggagagactgttctggaagggcagcccccagtacacccacgtgaacgaggtgtggcccaagctgtacatcggcgacgaggccaccgccctggacagatacagactgcagaaggccggcttcacccacgtgctgaacgccgcccacggcagatggaacgtggacaccggccccgactactacagagacatggacatccagtaccacggcgtggaggccgacgacctgcccaccttcgacctgagcgtgttcttctaccccgccgccgccttcatcgacagagccctgagcgacgaccacagcaagatcctggtgcactgcgtgatgggcagaagcagaagcgccaccctggtgctggcctacctgatgatccacaaggacatgaccctggtggacgccatccagcaggtggccaagaacagatgcgtgctgcccaacagaggcttcctgaagcagctgagagagctggacaagcagctggtgcagcagagaagaagaagccagagacaggacggcgaggaggaggacggcagagagctgtag

SEQ ID NO: 20245 - DNA, 663 bp, Artificial Sequence
  derived and/or modified sequence
atgacatctggagaagtgaagacaagcctcaagaatgcctactcatctgccaagaggctgtcgccgaagatggaggaggaaggggaggaggaggactactgcacccctggagcctttgagctggagcggctcttctggaagggcagtccccagtacacccacgtcaacgaggtctggcccaagctctacattggcgatgaggcgacggcgctggaccgctataggctgcagaaggcggggttcacgcacgtgctgaacgcggcccacggccgctggaacgtggacactgggcccgactactaccgcgacatggacatccagtaccacggcgtggaggccgacgacctgcccaccttcgacctcagtgtcttcttctacccggcggcagccttcatcgacagagcgctaagcgacgaccacagtaagatcctggttcactgcgtcatgggccgcagccggtcagccaccctggtcctggcctacctgatgatccacaaggacatgaccctggtggacgccatccagcaagtggccaagaaccgctgcgtcctcccgaaccggggctttttgaagcagctccgggagctggacaagcagctggtgcagcagaggcgacggtcccagcgccaggacggtgaggaggaggatggcagggagctgtag

SEQ ID NO: 20246 - DNA, 663 bp, Artificial Sequence
  derived and/or modified sequence
atgacttcaggtgaggttaagacctccctgaaaaacgcctatagttcagccaaacggttgtcacccaagatggaagaggagggcgaagaggaggactattgtacccccggcgcatttgagttagagcgacttttttggaagggcagccctcaatacacacacgtcaacgaggtttggcccaaactctacataggggacgaggctacggcccttgatcgatataggctgcagaaggcggggttcacccacgtgctgaatgcggctcacggccgttggaacgtagacactggacctgattattatcgcgatatggatatccaataccacggcgtggaggcagatgaccttcccaccttcgacctcagtgtgttcttttaccccgctgccgcgttcatagaccgggcacttagcgacgaccatagtaagatcttggtgcactgtgttatggggagaagcagatctgccaccctggttttggcgtatctcatgattcataaagatatgactctagtggacgctattcaacaggtggctaaaaacagatgcgttctgcccaaccgaggctttcttaaacagctacgcgagctggacaaacagctggtacagcagagaagaagaagccagagacaggacggcgaagaggaagacggccgggagttgtag

SEQ ID NO: 20247 - DNA, 663 bp, Artificial Sequence
  derived and/or modified sequence
atgaccagcggggaggtgaagaccagcctgaagaatgcctacagcagcgccaagaggctgagccccaagatggaggaggagggggaggaggaggactactgcacccctggggcctttgagctggagcggctcttctggaagggcagcccccagtacacccacgtgaatgaggtgtggcccaagctgtacatcggagatgaggccacagccctggaccgctaccgcctgcagaaggccggcttcacccacgtgctgaatgctgcccacggccgctggaatgtggacaccggccctgactactacagagacatggacatccagtaccatggagtggaggctgatgacctgcccacctttgacctgagcgtcttcttctacccagctgctgccttcatcgaccgggccctgagtgatgaccacagcaagatcctggtgcactgtgtgatgggccgcagccgcagcgccaccctggtgctggcctacctgatgatccacaaggacatgaccctggtggatgccatccagcaggtggccaagaacagatgtgtgctgcccaacagaggcttcctgaagcagctgcgggagctggacaagcagctggtgcagcagaggagaagaagccagaggcaggatggagaggaggaggatggccgggagctgtag

SEQ ID NO: 20248 - DNA, 663 bp, Artificial Sequence
  derived and/or modified sequence
atgaccagcggcgaggtgaagaccagcctgaagaacgcctacagctccgccaaaaggctctctcccaagatggaggaagagggtgaggaagaagactactgcaccccaggcgcttttgaactcgaacggctgttctggaaaggcagcccgcagtacacccacgtaaatgaagtgtggccaaagctctacataggcgacgaggctacagcactggatcgttatcggctccagaaggccgggtttacccacgtcttaaacgctgcacacggccggtggaacgttgatactggaccggactattatagggatatggacattcagtatcacggtgtggaggccgatgatctgcctacattcgatttatccgtgttcttttatccagccgccgctttcatcgacagagccctctccgacgaccacagcaaaatcctggtgcattgtgttatgggtcggagcagaagcgcgacacttgtgcttgcctatttgatgatccacaaagacatgaccttagtcgatgctatacagcaggtggccaagaatagatgcgtgttgcccaaccggggatttctcaagcaactgagggagttagacaagcagctggtgcaacagcggcgtagaagtcagcgccaggacggcgaagaggaggatggaagggaactatag

SEQ ID NO: 20249 - DNA, 663 bp, Artificial Sequence
  derived and/or modified sequence
atgacatcaggtgaagttaagacatccttgaagaacgcttactccagcgctaaacgcctatctccaaagatggaggaagagggggaagaggaagattattgcactccaggtgcgtttgagttagaaagactgttttggaagggcagccctcagtacactcacgttaacgaagtctggccaaaactctacataggggatgaagcgaccgctctcgacagataccgcctgcagaaggccggatttacccacgtcctcaacgccgcacacgggagatggaacgtggataccggccctgactactatcgggacatggatattcagtaccacggggtggaggccgatgacctgcctacgttcgatctgtctgtcttcttctatccagctgccgctttcatcgatagagctctgtctgacgatcactccaaaatcctggtgcattgcgtcatgggtaggtcgaggtctgccacactggttctggcttatctgatgatccataaggacatgacactggtagacgccattcagcaggtagcaaagaatcggtgtgtacttcccaaccggggattcctaaaacagctgagggagctggataagcaactggtgcagcaaaggcgcaggagccagagacaggacggggaggaggaagacggtagggagttatag

SEQ ID NO: 20250 - protein, 540 aa, Artificial Sequence
  derived and/or modified sequence
MASQEFEVEAIVDKRQDKNGNTQYLVRWKGYDKQDDTWEPEQHLMNCEKCVHDFNRRQTEKQKKLTWTTTSRIFSNNARRRTSRSTKANYSKNSPKTPVTDKHHRSKNRKLFAASKNVRRKAASILSDTKNMEIINSTIETLAPDSPFDHKTVSGFQKLEKLDPIAADQQDTVVFKVTEGKLLRDPLSRPGAEQTGIQNKTQIHPLMSQMSGSVTASMATGSATRKGIVVLIDPLAANGTTDMHTSVPRVKGGQRNITDDSRDQPFIKKMHFTIRLTESASTYRDIVVKKEDGFTQIVLSTRSTEKNALNTEVIKEIVNALNSAAADDSKLVLFSAAGSVFCCGLDFGYFVKHLRNNRNTASLEMVDTIKNFVNTFIQFKKPIVVSVNGPAIGLGASILPLCDLVWANEKAWFQTPYTTFGQSPDGCSSITFPKMMGKASANEMLIAGRKLTAREACAKGLVSQVFLTGTFTQEVMIQIKELASYNPIVLEECKALVRCNIKLELEQANERECEVLRKIWSSAQGIESMLKYVENKIDEF

SEQ ID NO: 20251 - DNA, 1623 bp, Artificial Sequence
  derived and/or modified sequence
atggcatcacaggaattcgaagtagaggccatcgtcgacaaacgccaggacaaaaatggtaatacccagtacttagtcaggtggaagggctacgacaagcaagacgacacatgggaacctgaacagcatctgatgaattgcgagaaatgtgtgcatgatttcaatcgccggcagactgagaaacagaagaaactgacctggactaccacatcccgtatcttctcaaataatgctcgcagacggacgtcacggtccaccaaggccaactactcgaagaacagtcccaaaactcctgtgacagataagcatcaccgctctaagaacagaaagctgttcgcggcaagcaagaacgtacggcgcaaggccgccagtattctgagcgacactaaaaacatggagattatcaacagcaccatcgaaaccctggctcccgatagtccatttgatcacaagactgtgtcagggtttcagaaactggaaaaacttgaccccattgcagctgatcaacaggataccgtggtcttcaaagtgacagaaggcaaactgttgcgggaccccttaagccgtccaggcgccgaacagactggtatacagaataagacacagatccatccgctcatgtctcaaatgagcgggagcgttacagcatcaatggctactggtagcgctacacggaagggcatcgtggttctaatcgaccctctggcggcaaacggtacgaccgacatgcatacttctgtaccacgggtaaaggggggccagcggaatatcactgatgatagtcgcgaccagcccttcattaaaaagatgcacttcaccatcagactgaccgagagtgctagcacctatcgcgacattgtagtaaaaaaggaagatgggtttacccagatcgtactgtctacgcgcagcacggagaagaacgctcttaatacggaagtcatcaaagagatagtgaacgcactgaattctgcagcagctgatgattctaagttggtgcttttttctgcggctggaagcgtgttctgttgcgggctggacttcggctactttgtgaagcatttacggaacaaccggaatactgcctctctagagatggttgacacaatcaaaaattttgttaatacattcattcagttcaaaaaaccaattgtggtgagcgttaatggcccggcaattggcctaggcgcatccatcttgcctctttgcgacctggtttgggcaaatgaaaaggcctggtttcaaacaccctacacaaccttcggccagagcccggacggatgctcatcaataacatttcctaaaatgatgggcaaggcaagtgcaaacgagatgctgattgcgggaagaaaattgacagcgagagaagcatgcgccaagggtctggtgagtcaggtgtttctaaccggaacctttacacaggaggtcatgattcaaatcaaggaactggcctcttataaccccatcgtgctagaggaatgtaaggccctagtgcgctgtaacattaaactcgagctggagcaggcaaatgagcgtgaatgcgaagtgctgaggaaaatatggtcctcagctcaggggatcgagtccatgctcaaatacgtcgaaaacaaaatcgacgagttctag

SEQ ID NO: 20252 - DNA, 1623 bp, Artificial Sequence
  derived and/or modified sequence
atggccagccaggagtttgaggtggaggccatcgtggacaagaggcaggacaagaatggaaacacccagtacctggtgcgctggaagggctatgacaagcaggatgacacctgggagcctgagcagcacctgatgaactgtgagaagtgtgtgcatgacttcaacagacggcagacagagaagcagaagaagctgacctggaccaccaccagccgcatcttcagcaacaatgcccggcggaggaccagccgcagcaccaaggccaactacagcaagaacagccccaagacccctgtgacagacaagcaccacaggagcaagaacaggaagctgtttgctgccagcaagaatgtgcggaggaaggccgccagcatcctgagtgacaccaagaacatggagatcatcaacagcaccatcgagaccctggccccagacagcccctttgaccacaagacagtgtctggcttccagaagctggagaagctggaccccatcgctgctgaccagcaggacacagtggtgttcaaggtgacagagggcaagctgctgcgggaccccctgagcaggcctggagctgagcagacaggcatccagaacaagacccagatccaccccctgatgagccagatgagcggctctgtgacagcctccatggccaccggcagcgccaccaggaagggcatcgtggtgctgattgaccccctggccgccaacggcaccacagacatgcacacctctgtgccccgggtgaagggcggccagaggaacatcacagatgacagccgggaccagcccttcatcaagaagatgcacttcaccatccggctgacagaaagtgccagcacctacagagacatcgtggtgaagaaggaggatggcttcacccagatcgtgctgagcaccaggagcacagagaagaatgccctgaacacagaggtgatcaaggagatcgtgaatgccctgaacagcgctgctgctgatgacagcaagctggtgctcttctctgctgctggctctgtgttctgctgcggcctggactttggctactttgtgaagcacctgaggaacaacagaaacacagccagcctggagatggtggacaccatcaagaactttgtgaacaccttcatccagttcaagaagcccatcgtggtgtctgtgaatggacctgccatcggcctgggcgccagcatcctgcccctgtgtgacctggtgtgggccaatgagaaggcctggttccagaccccctacaccaccttcggccagagcccagatggctgcagcagcatcaccttccccaagatgatgggcaaggccagcgccaatgagatgctgattgctggcaggaagctgacagcccgggaggcctgtgccaagggcctggtgtcccaggtgttcctgaccggcaccttcacccaggaggtgatgatccagatcaaggagctggccagctacaaccccatcgtgctggaggagtgcaaggccctggtgcgctgcaacatcaagctggagctggagcaggccaatgaaagagaatgtgaggtgctgaggaagatctggagcagcgcccagggcatcgagagcatgctgaagtatgtggagaacaagattgatgagttctag

SEQ ID NO: 20253 - DNA, 1623 bp, Artificial Sequence
  derived and/or modified sequence
atggccagccaggagttcgaggtggaggccatcgtggacaagcggcaggacaaaaatggaaacacacagtatcttgtccgatggaaaggatacgataagcaggatgacacatgggagcccgaacagcacctgatgaactgcgagaagtgtgttcatgattttaatcgcaggcagactgaaaaacaaaagaagctgacctggactacaacgtcccggatcttcagcaacaacgctcgccggaggacttcccgtagcactaaagccaactactctaaaaacagtccaaagactccggtgaccgataagcatcacagatctaagaataggaagttgtttgctgctagtaagaatgtgcgccggaaggcagcttccattctcagtgataccaagaatatggagattatcaacagtaccatcgaaacccttgcacccgattcgccttttgaccacaagaccgtcagcggattccaaaagcttgaaaagctcgatcctatcgcagccgaccagcaggacaccgtagtcttcaaggttacggaaggaaagctgttgcgggaccctctgtccagacctggcgcagaacaaacgggcatccagaacaagacccaaatccatccactcatgagccaaatgtccgggtcagttaccgcttcgatggccactggcagcgctacgcggaagggtatcgtagtactgatagaccccttggcagcaaatggaactaccgatatgcacacgtcggtaccacgagtgaaagggggccagaggaacatcacagatgactctagagaccagccgttcatcaaaaagatgcatttcacaattaggcttaccgagagcgcaagcacttatcgggacatagttgtgaaaaaggaggacgggttcacacagattgtattgagtacccgaagtacggaaaaaaacgcgctcaacacagaggtcattaaggaaatagttaacgctctcaattcagcggcggccgacgatagcaagctagtgttattctcagccgcaggttctgtattctgttgtggactagacttcgggtactttgtgaagcacctgcgaaacaacagaaacacagcctctctggagatggtcgacaccataaagaatttcgtgaatactttcatacagtttaaaaagcctattgtcgtgtctgtgaatggcccagcgatcggattgggggcctccatcctgcctctgtgtgaccttgtgtgggcaaacgaaaaagcttggtttcagaccccttacacaacgtttgggcagagccccgatggatgttcaagtattacattccccaaaatgatgggaaaggcatctgccaatgagatgctgatcgcgggtagaaaattgaccgccagggaagcctgcgccaagggccttgtttcacaggtgtttctcaccggcacctttacacaggaggtgatgattcagataaaagaactcgctagttacaatcccatcgttctggaagagtgcaaagcgctggtccggtgtaatattaagctggaattggagcaggctaatgagcgagaatgcgaggtgctgaggaagatctggagtagtgcacagggtatcgaatcaatgttaaagtacgtggagaataaaatcgatgagttctag

SEQ ID NO: 20254 - DNA, 1623 bp, Artificial Sequence
  derived and/or modified sequence
atggccagccaggagtttgaggtggaggccatagtcgataagaggcaggataagaacggcaacactcagtatctggtgcgctggaagggctatgacaagcaggacgacacatgggaaccggagcagcatttgatgaactgcgagaaatgtgttcatgattttaaccgccgtcagactgaaaaacagaaaaaacttacatggactacaacttctagaattttttctaacaatgctcggaggagaacaagtaggagcactaaggctaattatagcaaaaattctcccaagacacccgtgactgataagcaccacagatctaagaacaggaagctttttgccgcttcaaaaaacgttcgccgtaaggccgcatcaatcctgagtgacaccaaaaatatggagatcatcaattcaaccattgaaacacttgcccctgattctcctttcgatcataagaccgtgtcaggttttcaaaagctggagaagcttgaccctatcgcagccgatcaacaagacactgtggtgtttaaagtgaccgaaggaaagttactgagggatccactttctaggcctggcgcagagcagacaggcatccaaaataagactcagatccacccactgatgtctcagatgtctgggagcgtgaccgcatcgatggccactggaagtgctacacggaagggcatcgtggttctgattgaccctctggctgccaatgggaccaccgatatgcacacatcagtgccgagagtcaagggagggcagcggaacattactgacgatagcagggatcagccattcattaagaaaatgcacttcactattaggttgaccgagtcagcttctacatatcgggacatcgtggtcaagaaagaagacggtttcacccagattgtcctgagtacaagaagtaccgagaagaatgccctcaatactgaggtcattaaagagatcgtaaatgcactcaattcagctgccgctgacgacagtaagctcgttcttttctctgcggctgggtcggtcttttgctgcggcctggactttgggtacttcgtaaagcacctgcgcaacaacaggaacaccgcgagccttgaaatggtggacactataaaaaactttgtgaacacattcattcaattcaagaagcccattgttgtgagtgttaatggtccggcaatcggcctgggtgccagcatcctccccctctgtgatttggtgtgggctaatgagaaagcttggttccagactccctacacaactttcgggcagagccccgacgggtgtagctccatcacatttcccaagatgatgggcaaggcgagcgctaacgaaatgttgattgctgggaggaagctcactgccagggaagcctgtgcgaagggactggtgagtcaggtttttttaacaggaactttcacacaggaggtgatgatccagataaaagagcttgccagttacaacccgattgtgctcgaggagtgcaaggccctcgtacggtgtaacatcaagcttgaattggaacaggctaatgaaagagagtgtgaggtactgcggaaaatttggtccagcgctcaaggaattgagtctatgctgaagtatgtggagaataaaattgatgagttctag

SEQ ID NO: 20255 - DNA, 2227 bp, Artificial Sequence
  derived and/or modified sequence
agagtaacaggcaggaagaaagctttctgtactacaccagagggttggggctgtggatttagctactctcacctgaggctactgagcaagttgtcatgcaccatgagacaaagcccaagctgtcccaccaggcagtaagtatggagaggttcaggcacatggcatagctgctatttcgcacaattttcactacaccagtggtgacaaaatagaagaggttcatccatacacagaacctggtgaagagctggaggcagaaagaagtgtctatgtggagacgcaactgaaacaaaggtggcacagcaactgttccaatcccgtgtctttcctcatggcttcccaggagtttgaggttgaagctattgttgacaaaagacaggataaaaatgggaatacacagtatttggttcggtggaaaggttatgacaaacaggatgacacttgggaaccagagcagcacctcatgaactgtgaaaaatgtgtacatgattttaatagacgacagactgaaaaacagaaaaaactgacatggactacaaccagtagaattttttcaaacaatgccagaagaagaacttccagatctacaaaagcaaactattctaagaactctcctaaaacgccagtgactgataaacaccacaggtccaaaaaccgcaagttatttgctgccagcaagaacgttaggagaaaggcagcttcaattctctccgacacaaagaatatggagataataaattcaactattgagacccttgcacctgacagcccctttgaccacaaaactgtgagtggctttcagaaacttgagaaactggaccctattgcagcagatcagcaggacacggtggtcttcaaggtgacagaagggaaactcctccgggaccctttgtcacgtcctggtgcagaacagactggaatacagaacaagactcagatacacccactaatgtcgcagatgtctggctcagttactgcttctatggccacaggttcagctacccgaaagggtatagtggtattaatagacccattagcagccaatgggacaacagacatgcatacctcagttccaagagtgaaaggtgggcaaagaaatattactgatgacagcagagaccagccttttatcaagaagatgcacttcaccataaggctaacagaaagtgccagcacatacagagacattgtagtgaagaaagaggatggattcacccagatagtgctatcaactagatcgacagaaaaaaatgcactgaatacagaagtaattaaagaaatagttaatgctctgaatagcgctgctgcagatgacagcaagctcgtgctgttcagtgcagctggaagtgtcttttgctgcggtcttgattttgggtactttgtgaagcacttaaggaataacagaaacacagcaagccttgaaatggtggacaccatcaagaactttgtgaatacttttattcaatttaaaaagcctattgttgtatcagtcaatggccctgcgattggactaggtgcatccatcctgcctctttgtgatctcgtgtgggctaatgaaaaggcttggttccaaaccccttatacgacctttggacagagtccagatggctgttcttctattacattccccaaaatgatgggtaaagcatctgccaatgaaatgttaattgctgggcgaaagctgacagcaagggaggcatgcgccaaaggcctggtctctcaggtatttttgactggaactttcacccaagaggttatgattcaaattaaggagcttgcctcatacaatccaattgtactggaagaatgtaaggccctcgttcgctgtaatattaagttggagttggaacaggccaatgagagagagtgtgaggtgctgaggaagatctggagctcagcccaagggatagaatccatgttaaagtatgttgaaaataaaattgatgagttttaattgtcagtctgtctgctcaggacacaagaactaaggggcaacaaatgcatcatgagttgcaagatgccctaatccatcttcatagcccaaaacaatttcacccatagctaaggcttggaaacagaactggaaatgtccaagctatgtatttaaattatcacatcatttttaagcactgtagctttacaaggagtaacaaaacagcctctttgcccaaatgtgattattttatgcacacctaagcccaaatataaaaacagactcttcttgcaa

SEQ ID NO: 20256 - DNA, 1623 bp, Artificial Sequence
  derived and/or modified sequence
atggccagccaggagttcgaggtggaggccatcgtggacaagagacaggacaagaacggcaacacccagtacctggtgagatggaagggctacgacaagcaggacgacacctgggagcccgagcagcacctgatgaactgcgagaagtgcgtgcacgacttcaacagaagacagaccgagaagcagaagaagctgacctggaccaccaccagcagaatcttcagcaacaacgccagaagaagaaccagcagaagcaccaaggccaactacagcaagaacagccccaagacccccgtgaccgacaagcaccacagaagcaagaacagaaagctgttcgccgccagcaagaacgtgagaagaaaggccgccagcatcctgagcgacaccaagaacatggagatcatcaacagcaccatcgagaccctggcccccgacagccccttcgaccacaagaccgtgagcggcttccagaagctggagaagctggaccccatcgccgccgaccagcaggacaccgtggtgttcaaggtgaccgagggcaagctgctgagagaccccctgagcagacccggcgccgagcagaccggcatccagaacaagacccagatccaccccctgatgagccagatgagcggcagcgtgaccgccagcatggccaccggcagcgccaccagaaagggcatcgtggtgctgatcgaccccctggccgccaacggcaccaccgacatgcacaccagcgtgcccagagtgaagggcggccagagaaacatcaccgacgacagcagagaccagcccttcatcaagaagatgcacttcaccatcagactgaccgagagcgccagcacctacagagacatcgtggtgaagaaggaggacggcttcacccagatcgtgctgagcaccagaagcaccgagaagaacgccctgaacaccgaggtgatcaaggagatcgtgaacgccctgaacagcgccgccgccgacgacagcaagctggtgctgttcagcgccgccggcagcgtgttctgctgcggcctggacttcggctacttcgtgaagcacctgagaaacaacagaaacaccgccagcctggagatggtggacaccatcaagaacttcgtgaacaccttcatccagttcaagaagcccatcgtggtgagcgtgaacggccccgccatcggcctgggcgccagcatcctgcccctgtgcgacctggtgtgggccaacgagaaggcctggttccagaccccctacaccaccttcggccagagccccgacggctgcagcagcatcaccttccccaagatgatgggcaaggccagcgccaacgagatgctgatcgccggcagaaagctgaccgccagagaggcctgcgccaagggcctggtgagccaggtgttcctgaccggcaccttcacccaggaggtgatgatccagatcaaggagctggccagctacaaccccatcgtgctggaggagtgcaaggccctggtgagatgcaacatcaagctggagctggagcaggccaacgagagagagtgcgaggtgctgagaaagatctggagcagcgcccagggcatcgagagcatgctgaagtacgtggagaacaagatcgacgagttctag

SEQ ID NO: 20257 - DNA, 1623 bp, Artificial Sequence
  derived and/or modified sequence
atggcctctcaagaattcgaagtggaagcaattgtcgataagaggcaggacaaaaatggcaacacccagtaccttgttaggtggaagggctacgacaagcaggatgatacctgggagcctgagcaacacttaatgaactgtgagaagtgtgtgcacgacttcaaccgcaggcagacagaaaagcagaagaaattgacatggacaaccacttctcggatcttctcgaataatgctaggcgaagaacaagtagatccacaaaagccaattactccaaaaattcgcccaaaaccccggtcaccgacaaacaccaccgttccaagaatcgcaagctgttcgcagctagcaaaaacgtccgtcgcaaggccgctagcatcctgtccgacacgaaaaacatggagatcataaattccacgattgaaactctggctcccgactctccgtttgaccacaaaacagtatctggatttcagaaattggagaagttggatccaatcgccgctgatcagcaagataccgtagtcttcaaggtaactgaaggcaaacttttgagggacccattatcccggccaggagcagaacaaacaggaatccagaacaaaactcaaatccaccccctgatgagccagatgagtggatccgtgactgctagtatggcaacagggagtgccacacggaaaggaatagttgtgctgatagaccccctggctgccaatggaaccacggacatgcatacaagtgtccccagagtaaagggcggccaaaggaatattaccgacgactcacgggaccagccgtttattaagaaaatgcacttcactattcgcctaaccgagagtgcttctacctaccgagacatcgtggtgaagaaagaagacggatttacacagatagtcctgtcaacccgtagcacagagaagaatgccctcaacacggaggtgatcaaggagattgtcaacgcgctcaactctgcagcagcagacgacagtaaactggtgctgttttcagcagccgggtcagttttttgctgcgggctggatttcggctactttgttaagcacctgcgaaataatcggaacactgcttctctcgaaatggtagacaccataaaaaattttgtgaacaccttcattcaattcaagaaacctattgttgtatcagtgaatgggccagctattggactgggagcctcgatcctcccgctgtgtgatctggtctgggcaaacgaaaaggcctggtttcagaccccttatacaacatttggacagtccccagatggctgcagctcaatcacgttcccgaagatgatgggcaaagcttcagcaaatgagatgctcatcgctggtcggaagctgacagcccgcgaagcttgcgcgaaagggttggtttcccaggtatttctgacgggcactttcacgcaggaagtgatgatccaaattaaagagctcgccagttataaccctatcgtgctggaagagtgcaaagcgttggtcaggtgtaatatcaagctcgagctcgaacaggcaaatgagcgtgagtgtgaggtgcttcggaagatctggagctcagctcaagggattgaaagcatgcttaaatacgtcgaaaataaaatcgacgagttctag

SEQ ID NO: 20258 - DNA, 1623 bp, Artificial Sequence
  derived and/or modified sequence
atggccagccaggagttcgaggtggaggccatcgtggacaagcggcaagataagaatgggaacacacagtatctcgtgaggtggaagggatacgacaaacaggatgatacttgggaacccgaacagcacctgatgaattgtgagaagtgtgtgcacgactttaatcggcgccagaccgagaaacagaagaaattgacctggactaccacatctaggatattttctaacaatgccaggcggaggacatcgcgcagcaccaaggccaattatagtaaaaacagtcccaaaacaccagttacagataaacaccatagatctaaaaaccgcaagttgtttgctgcttccaagaatgtacgcagaaaggctgcaagcatactttccgacacaaagaatatggagattataaattctactattgagacactggcaccggatagccctttcgaccataagactgtctcgggtttccaaaaactagagaagctggaccccattgctgcagatcagcaggatacagtggttttcaaggtgaccgagggaaaattgctgcgtgaccctttaagccggccaggtgcagaacaaaccggaatccagaataaaactcagatccaccctctgatgagccagatgtcggggtctgtgaccgcctctatggccacggggtcagctactcggaagggcattgtcgtgctcatcgacccccttgccgcgaacgggaccacagacatgcacacctctgtaccccgtgtcaaaggaggccaacgtaatattacagatgattcgcgggatcagccattcattaagaagatgcatttcacaatacgtctcacggagtccgcaagtacctatcgtgatattgtggtgaagaaggaggacggattcacacagatagtgctttcaacccgcagtactgagaagaatgctttgaacactgaagtaatcaaggaaatagttaacgcactgaacagcgccgccgcagatgactccaaactggtgcttttcagtgcggccggctccgtcttttgttgcggactcgatttcgggtatttcgtgaaacacctgcgaaataaccgcaataccgccagcctggagatggtggataccatcaaaaattttgtgaacacctttattcagtttaaaaaaccaatcgttgtgtctgtgaatggtccagccattggcctgggagcttctatactccccctctgcgacctggtctgggcaaatgaaaaagcatggttccagaccccatatacaacgtttggacaatcccctgacggctgttcttctatcactttcccaaagatgatgggcaaggctagcgccaatgaaatgctgatagcaggccggaaactgacagccagggaggcttgtgcaaaaggtctggtaagccaggtattcttgaccggaactttcacccaggaggtgatgatccagattaaggaactagcaagctataaccccattgtacttgaggagtgcaaagcattagtaagatgtaatatcaagttagagctggagcaggctaatgaaagggagtgcgaggtgctgaggaagatttggtctagtgcgcagggaattgaaagcatgcttaaatacgtggaaaataagattgatgagttctag

SEQ ID NO: 20259 - DNA, 1623 bp, Artificial Sequence
  derived and/or modified sequence
atggcatcacaggagtttgaggttgaagctattgtggataaacgacaagacaagaacgggaatacacagtacctagtaagatggaaaggctatgacaaacaggacgacacctgggaaccagagcagcacctcatgaactgtgagaaatgtgttcatgacttcaacagacgacagacagagaaacaaaaaaagctgacatggacaacgacttcgcggatattctctaataacgcccgtagaagaacctcacgtagcacaaaggcgaattacagcaagaactcccccaagacacccgtcacggacaaacatcataggagcaaaaacaggaagttatttgcagcctctaagaatgtccggagaaaggctgctagcatactgagcgatacaaagaatatggaaattatcaattccactatcgagacattggctcctgatagtcccttcgatcacaaaacggtatctggcttccagaagttggagaagctggatccaatcgccgctgatcagcaggacacggtagttttcaaagtcacagagggtaaacttcttcgagaccctctcagcaggccgggtgccgaacagaccgggattcagaacaagactcagatccaccctctgatgagtcagatgtctgggtctgtcacagccagtatggccaccggcagcgccactcgaaaaggtattgtcgtcctcatcgacccacttgccgctaacgggactacggacatgcacacatctgtacccagggtgaaagggggtcaacgaaacatcaccgatgactccagggatcagcccttcatcaagaaaatgcactttactattaggctgacagaatccgcctccacgtaccgggacatagtcgtcaaaaaagaagacgggttcacacaaatcgtgttgagcacaaggagtaccgagaagaacgctctgaatacggaagtgattaaggagattgtgaacgccctgaatagcgccgcagcagatgactccaagctcgtactcttcagtgccgctggcagtgtgttttgttgtggcctggactttgggtactttgtgaaacacctccgaaacaatcgcaacactgcttccctggagatggttgacaccatcaagaactttgtgaatacatttatacaattcaaaaagccaatcgtagtatccgttaacggtccggctatcggactaggcgctagcatactgcccctgtgtgacctggtgtgggcgaatgagaaagcttggtttcagaccccatatacgaccttcggacaaagccctgacggctgctcatccattacttttcccaaaatgatgggtaaggcttccgcaaatgagatgttgatcgctgggagaaaactgacagcaagggaggcttgtgctaaagggctggttagccaggtgtttctaaccgggacttttactcaagaggtaatgatccagattaaggagctcgcatcatacaacccaattgtgctcgaggaatgtaaggctttggtaaggtgtaatattaaactggagctagagcaggccaacgagagagagtgcgaggtgcttcgtaaaatctggagtagtgcccagggtatcgagtctatgctgaaatatgttgagaacaagatagacgaattctag

SEQ ID NO: 20260 - DNA, 2220 bp, Artificial Sequence
  derived and/or modified sequence
aacaggcaggaagaaagctttctgtactacaccagagggttggggctgtggatttagctactctcacctgaggctactgagcaagttgtcatgcaccatgagacaaagcccaagctgtcccaccaggcagtaagtatggagaggttcaggcacatggcatagctgctatttcgcacaattttcactacaccagtggtgacaaaatagaagaggttcatccatacacagaacctggtgaagagctggaggcagaaagaagtgtctatgtggagacgcaactgaaacaaaggtggcacagcaactgttccaatcccgtgtctttcctcatggcttcccaggagtttgaggttgaagctattgttgacaaaagacaggataaaaatgggaatacacagtatttggttcggtggaaaggttatgacaaacaggatgacacttgggaaccagagcagcacctcatgaactgtgaaaaatgtgtacatgattttaatagacgacagactgaaaaacagaaaaaactgacatggactacaaccagtagaattttttcaaacaatgccagaagaagaacttccagatctacaaaagcaaactattctaagaactctcctaaaacgccagtgactgataaacaccacaggtccaaaaaccgcaagttatttgctgccagcaagaacgttaggagaaaggcagcttcaattctctccgacacaaagaatatggagataataaattcaactattgagacccttgcacctgacagcccctttgaccacaaaactgtgagtggctttcagaaacttgagaaactggaccctattgcagcagatcagcaggacacggtggtcttcaaggtgacagaagggaaactcctccgggaccctttgtcacgtcctggtgcagaacagactggaatacagaacaagactcagatacacccactaatgtcgcagatgtctggctcagttactgcttctatggccacaggttcagctacccgaaagggtatagtggtattaatagacccattagcagccaatgggacaacagacatgcatacctcagttccaagagtgaaaggtgggcaaagaaatattactgatgacagcagagaccagccttttatcaagaagatgcacttcaccataaggctaacagaaagtgccagcacatacagagacattgtagtgaagaaagaggatggattcacccagatagtgctatcaactagatcgacagaaaaaaatgcactgaatacagaagtaattaaagaaatagttaatgctctgaatagcgctgctgcagatgacagcaagctcgtgctgttcagtgcagctggaagtgtcttttgctgcggtcttgattttgggtactttgtgaagcacttaaggaataacagaaacacagcaagccttgaaatggtggacaccatcaagaactttgtgaatacttttattcaatttaaaaagcctattgttgtatcagtcaatggccctgcgattggactaggtgcatccatcctgcctctttgtgatctcgtgtgggctaatgaaaaggcttggttccaaaccccttatacgacctttggacagagtccagatggctgttcttctattacattccccaaaatgatgggtaaagcatctgccaatgaaatgttaattgctgggcgaaagctgacagcaagggaggcatgcgccaaaggcctggtctctcaggtatttttgactggaactttcacccaagaggttatgattcaaattaaggagcttgcctcatacaatccaattgtactggaagaatgtaaggccctcgttcgctgtaatattaagttggagttggaacaggccaatgagagagagtgtgaggtgctgaggaagatctggagctcagcccaagggatagaatccatgttaaagtatgttgaaaataaaattgatgagttttaattgtcagtctgtctgctcaggacacaagaactaaggggcaacaaatgcatcatgagttgcaagatgccctaatccatcttcatagcccaaaacaatttcacccatagctaaggcttggaaacagaactggaaatgtccaagctatgtatttaaattatcacatcatttttaagcactgtagctttacaaggagtaacaaaacagcctctttgcccaaatgtgattattttatgcacacctaagcccaaatataaaaacagactcttcttgc

SEQ ID NO: 20261 - protein, 555 aa, Artificial Sequence
  derived and/or modified sequence
MASQEFEVEAIVDKRQDKNGNTQYLVRWKGYDKQDDTWEPEQHLMNCEKCVHDFNRRQTEKQKKLTWTTTSRIFSNNARRRTSRSTKANYSKNSPKTPVTDKHHRSKNCKLFAASKNVRRKAASTLSDTKNMEIINSTIETLAPDSPFDHKKTVSGFQKLEKLDPIAADQQDTVVFKVTEGKLLRDPLSHPGAEQTGIQNKTQMHPLMSQMSGSVTASMATGSATRKGIVVLIDPLAANGTTDMHTSVPRVKGGQRNITDDSRGQPFIKKMHFTIRLTESAITYRDIVVKKEDGFTQIVLSTRSTEKNALNTEVIKEMVNALNSAAADDSKLVLFSAAGSVFCCGLDFGYFVRHLRNDRNTASLEMVDTIKNFVNTFIQFKKPIVVSVNGPAIGLGASILPLCDLVWANEKAWFQTPYTTFGQSPDGCSSITFPKMMGKASANEMLIAGRKLTAREACAKGLVSQVFLTGTFTQEVMIQIKELASYNAIVLEECKALVRCNIKLELEQANERECEVLRKIWSSAQGIESMLKIPLLGYKAAFPPRKTQNDQRWCP

SEQ ID NO: 20262 - protein, 554 aa, Artificial Sequence
  derived and/or modified sequence
MASQEFEVEAIVDKRQDKNGNTQYLVRWKGYDKQDDTWEPEQHLMNCEKCVHDFNRRQTEKQKKLTWTTTSRIFSNNARRRTSRSTKANYSKNSPKTPVTDKHHRSKNRKLFAASKNVRRKAASILSDTKNMEIINSTIETLAPDSPFDHKTVSGFQKLEKLDPIAADQQDTVVFKVTEGKLLRDPLSRPGAEQTGIQNKTQIHPLMSQMSGSVTASMATGSATRKGIVVLIDPLAANGTTDMHTSVPRVKGGQRNITDDSRDQPFIKKMHFTIRLTESASTYRDIVVKKEDGFTQIVLSTRSTEKNALNTEVIKEIVNALNSAAADDSKLVLFSAAGSVFCCGLDFGYFVKHLRNNRNTASLEMVDTIKNFVNTFIQFKKPIVVSVNGPAIGLGASILPLCDLVWANEKAWFQTPYTTFGQSPDGCSSITFPKMMGKASANEMLIAGRKLTAREACAKGLVSQVFLTGTFTQEVMIQIKELASYNPIVLEECKALVRCNIKLELEQANERECEVLRKIWSSAQGIESMLKIPLLGYKAAFPPRKTQNDQRWCP

SEQ ID NO: 20263 - DNA, 2369 bp, Artificial Sequence
  derived and/or modified sequence
aacaggcaggaagaaagctttctgtactacaccagagggttggggctgtggatttagctactctcacctgaggctactgagcaagctgtcatgcaccatgagacaaagcccaagctgtcccaccaggcagtaagtgtggagaggttcaggcacatggcatagctgctatttcgcacaattttcactacaccagtggtgaccaaatagaagaggttcatccatacacagaacctggtgaagagctggaggcagaaagaagtgtctatgtggagacgcaactgaaacaaaggtggcacagcaactgttccaatcccgtgtctttcctcatggcttcccaggagtttgaggttgaagctattgttgacaaaagacaggataaaaatgggaatacacagtatttggttcggtggaaaggttatgacaaacaggatgacacttgggaaccagagcagcacctcatgaactgtgaaaaatgtgtacatgattttaatagacgacagactgaaaaacagaaaaaactgacatggactacaaccagtagaattttttcaaacaatgccagaagaagaacttccagatctacaaaagcaaactattctaagaactctcctaaaactccagtgactgataaacaccacaggtccaaaaactgcaagttatttgctgccagcaagaacgttaggagaaaggcagcttcaactctctccgacacaaagaatatggagataataaattcaactattgagacccttgcacctgacagcccctttgaccacaagaaaactgtgagtggctttcagaaacttgagaaactggaccctattgcagcagatcagcaggacacggtggtcttcaaggtgacagaagggaaactcctccgggaccctttgtcacatcctggtgcagaacagactggaatacagaacaagactcagatgcacccactaatgtcgcagatgtctggctcagttactgcttctatggccacaggttcagctacccgaaagggtatagtggtattaatagacccattagcagccaatgggacaacagacatgcatacctcagttccaagagtgaaaggtgggcaaagaaatattactgatgacagcagaggccagccttttatcaagaagatgcacttcaccataaggctaacagaaagtgccatcacatacagagacattgtagtgaagaaagaggatggattcacccagatagtgctatcaactagatcgacagaaaaaaatgcactgaatacagaagtaattaaagaaatggttaatgctctgaatagcgctgctgcagatgacagcaagctcgtgctgttcagtgcagctggaagtgtcttttgctgcggtcttgattttgggtactttgtgaggcacttaaggaatgacagaaacacagcaagccttgaaatggtggacaccatcaagaactttgtgaatacttttattcaatttaaaaagcctattgttgtatcagtcaatggccctgccattggactaggtgcatccatcctgcctctttgtgatctcgtgtgggctaatgaaaaggcttggttccaaaccccttatacgacctttggacagagtccagatggctgttcttctattacattccccaaaatgatgggtaaagcatctgccaatgaaatgttaattgctgggcgaaagctgacagcacgggaggcatgcgccaaaggcctggtctctcaggtatttttgactggaactttcacccaagaggttatgattcaaattaaggagcttgcctcatacaatgcaattgtactggaagaatgtaaggccctcgttcgctgtaatattaagttggagttggaacaggccaatgagagagagtgtgaggtgctgaggaagatctggagctcagcccaagggatagaatccatgttaaaaatacctctattgggatataaagcagccttccctcccagaaagacacagaacgatcagagatggtgcccttgactttatagtggcacaaacacttcagagacacacaattataagagacttatcttttagcataaatacttatggcacaaaatccactgacgatcattctcctaaactgaacacatgactagaattggtggtgagatatcgcttgattttcttttcctttataaatgtctagttcttacccagttaacaaaagaaaactttatcgctctaaagtaaaacttgttacaccacattagtgaattatggaatcattttggtggaaatatccaggttctaatgtgtggaatgtgcagatttaggttactttagtgtatgttctagttaataagttaaaattctggacacattattaaaggcagaaacttctttcaaaacaaa

SEQ ID NO: 20264 - DNA, 1668 bp, Artificial Sequence
  derived and/or modified sequence
atggccagccaggagttcgaggtggaggccatcgtggacaagagacaggacaagaacggcaacacccagtacctggtgagatggaagggctacgacaagcaggacgacacctgggagcccgagcagcacctgatgaactgcgagaagtgcgtgcacgacttcaacagaagacagaccgagaagcagaagaagctgacctggaccaccaccagcagaatcttcagcaacaacgccagaagaagaaccagcagaagcaccaaggccaactacagcaagaacagccccaagacccccgtgaccgacaagcaccacagaagcaagaactgcaagctgttcgccgccagcaagaacgtgagaagaaaggccgccagcaccctgagcgacaccaagaacatggagatcatcaacagcaccatcgagaccctggcccccgacagccccttcgaccacaagaagaccgtgagcggcttccagaagctggagaagctggaccccatcgccgccgaccagcaggacaccgtggtgttcaaggtgaccgagggcaagctgctgagagaccccctgagccaccccggcgccgagcagaccggcatccagaacaagacccagatgcaccccctgatgagccagatgagcggcagcgtgaccgccagcatggccaccggcagcgccaccagaaagggcatcgtggtgctgatcgaccccctggccgccaacggcaccaccgacatgcacaccagcgtgcccagagtgaagggcggccagagaaacatcaccgacgacagcagaggccagcccttcatcaagaagatgcacttcaccatcagactgaccgagagcgccatcacctacagagacatcgtggtgaagaaggaggacggcttcacccagatcgtgctgagcaccagaagcaccgagaagaacgccctgaacaccgaggtgatcaaggagatggtgaacgccctgaacagcgccgccgccgacgacagcaagctggtgctgttcagcgccgccggcagcgtgttctgctgcggcctggacttcggctacttcgtgagacacctgagaaacgacagaaacaccgccagcctggagatggtggacaccatcaagaacttcgtgaacaccttcatccagttcaagaagcccatcgtggtgagcgtgaacggccccgccatcggcctgggcgccagcatcctgcccctgtgcgacctggtgtgggccaacgagaaggcctggttccagaccccctacaccaccttcggccagagccccgacggctgcagcagcatcaccttccccaagatgatgggcaaggccagcgccaacgagatgctgatcgccggcagaaagctgaccgccagagaggcctgcgccaagggcctggtgagccaggtgttcctgaccggcaccttcacccaggaggtgatgatccagatcaaggagctggccagctacaacgccatcgtgctggaggagtgcaaggccctggtgagatgcaacatcaagctggagctggagcaggccaacgagagagagtgcgaggtgctgagaaagatctggagcagcgcccagggcatcgagagcatgctgaagatccccctgctgggctacaaggccgccttcccccccagaaagacccagaacgaccagagatggtgcccctag

SEQ ID NO: 20265 - DNA, 1668 bp, Artificial Sequence
  derived and/or modified sequence
atggcgagtcaagagttcgaagtagaggcaatcgtggataaaagacaggacaagaatggaaatacccagtatttggtgcgctggaaagggtatgataagcaggatgatacttgggaacctgagcagcatttaatgaattgcgagaagtgtgtccacgatttcaatcggcgtcagacagaaaagcaaaagaaactgacttggactactacttccaggattttttccaacaacgcacgacgccgcacatcccgaagtacgaaagcaaactatagcaagaattcgcccaagactccagtaacagacaagcaccaccgcagtaaaaattgtaagctgtttgcagctagcaaaaatgtcagacgcaaggctgcatcaactctgagcgacactaaaaacatggagatcattaattctaccatcgagacactggcccccgacagtccattcgaccataagaagacggtctccggatttcaaaagctggagaagctggatccaattgcagccgaccagcaagataccgttgtgttcaaagtcactgagggcaagctgctgcgggaccctttgagccatcccggtgcagagcagacagggatccagaacaagacgcagatgcatccattgatgagccaaatgtccggctctgtgacagccagcatggccaccggttccgctacccgcaaaggcatagtggtcctgattgatcctctggccgccaacgggacaactgatatgcatacttctgttccacgcgtcaaggggggacagcgcaatatcaccgacgacagtcgcggccaacccttcatcaagaagatgcatttcaccatccgactgaccgagtccgccattacttatagggatattgtcgtgaagaaagaggacggctttacccagatagtgttatcaacccggtcaaccgaaaagaatgccctgaacactgaggttataaaggaaatggtgaatgccctaaacagcgctgcagcggatgactcaaagctcgtgctcttctctgccgcaggctcagttttctgttgcggactggacttcggatatttcgtgaggcatctgcgcaatgacaggaataccgcaagtttggaaatggtagacactatcaaaaattttgttaatacattcatccagttcaagaaacccattgtcgtctctgtcaacggaccagccattggactcggggcctccatacttccgctctgtgatctggtgtgggccaacgagaaggcctggtttcagacaccttacacaacgtttggccagtcccctgacggatgctctagcattactttccccaagatgatggggaaggcatccgcaaacgagatgctcatcgccggcaggaaacttaccgctcgcgaggcctgtgctaaggggctggtgtcacaggtgttcttaacgggtacctttactcaggaggttatgatacagattaaagagcttgccagctataacgcaatcgtactcgaggagtgtaaagccctcgtgcgctgcaacataaagttagagctggaacaggccaacgagcgcgagtgcgaagttctgcggaaaatctggtccagtgcccagggcattgaatccatgctcaaaataccactgctagggtacaaagcagccttcccgccgcgcaagacacagaatgaccagcggtggtgtccttag

SEQ ID NO: 20266 - DNA, 1668 bp, Artificial Sequence
  derived and/or modified sequence
atggccagccaggagtttgaggtggaggccatcgtggacaagaggcaggacaagaatggaaacacccagtacctggtgcgctggaagggctatgacaagcaggatgacacctgggagcctgagcagcacctgatgaactgtgagaagtgtgtgcatgacttcaacagacggcagacagagaagcagaagaagctgacctggaccaccaccagccgcatcttcagcaacaatgcccggcggaggaccagccgcagcaccaaggccaactacagcaagaacagccccaagacccctgtgacagacaagcaccacaggagcaagaactgcaagctgtttgctgccagcaagaatgtgcggaggaaggccgccagcaccctgagtgacaccaagaacatggagatcatcaacagcaccatcgagaccctggccccagacagcccctttgaccacaagaagacagtgtctggcttccagaagctggagaagctggaccccatcgctgctgaccagcaggacacagtggtgttcaaggtgacagagggcaagctgctgcgggaccccctgagccaccctggagctgagcagacaggcatccagaacaagacccagatgcaccccctgatgagccagatgagcggctctgtgacagcctccatggccactggaagtgccaccaggaaaggaattgtggtgctgattgaccccctggccgccaacggcaccacagacatgcacacctctgtgccccgggtgaagggcggccagaggaacatcacagatgacagccggggccagcccttcatcaagaagatgcacttcaccatccggctgacagagagcgccatcacctacagagacatcgtggtgaagaaggaggatggcttcacccagatcgtgctgagcaccaggagcacagagaagaatgccctgaacacagaggtgatcaaggagatggtgaatgccctgaacagcgctgctgctgatgacagcaagctggtgctcttctctgctgctggcagcgtcttctgctgcggcctggactttggctactttgtgcgccacctgagaaatgacaggaacacagccagcctggagatggtggacaccatcaagaactttgtgaacaccttcatccagttcaagaagcccatcgtggtgtctgtgaatggacctgccatcggcctgggcgccagcatcctgcccctgtgtgacctggtgtgggccaatgagaaggcctggttccagaccccctacaccaccttcggccagagcccagatggctgcagcagcatcaccttccccaagatgatgggcaaggccagcgccaatgagatgctgattgctggcaggaagctgacagcccgggaggcctgtgccaagggcctggtgtcccaggtgttcctgaccggcaccttcacccaggaggtgatgatccagatcaaggagctggccagctacaatgccatcgtgctggaggagtgcaaggccctggtgcgctgcaacatcaagctggagctggagcaggccaatgaaagagaatgtgaggtgctgaggaagatctggagcagcgcccagggcattgaatccatgctgaagatccccctgctgggctacaaggccgccttcccccccaggaagacccagaatgaccagcgctggtgcccctag

SEQ ID NO: 20267 - DNA, 1668 bp, Artificial Sequence
  derived and/or modified sequence
atggccagccaggagttcgaggtggaggccatcgtggacaagcggcaggacaagaatggcaacacgcagtacctggttagatggaagggctatgataaacaagacgatacctgggagccagagcagcatcttatgaactgtgagaagtgtgtgcatgatttcaaccggcgacagactgagaagcagaagaagctgacatggacaaccacaagccgaatcttcagcaataatgccagaaggcggacgtcccgctctaccaaggccaactactccaaaaacagtcctaagactcctgtaacagataagcatcacaggtcgaagaattgtaaattatttgcggcttcaaaaaatgtaaggagaaaggcagcaagcaccctttccgacaccaagaatatggagattatcaactctactatagaaacactcgcgcccgattcaccctttgatcacaaaaagactgtaagcggcttccagaagctggagaaactcgatccaatcgccgcagaccagcaggataccgtggtgttcaaggttactgaggggaagctgctccgcgacccattgtcgcaccccggggcagagcaaacagggatccaaaacaagacccagatgcatcccctgatgagtcagatgtctggctcagtgacagcctcaatggccaccggctccgccacaagaaaaggaattgtggtcctgatagatccactggctgccaatgggactacagatatgcacacatccgtgcctcgggtcaaaggcggccagcgtaacatcactgacgactccagggggcagcccttcataaaaaaaatgcatttcacgatcaggctcacagaatcagcaatcacctatcgggacatcgtggtaaaaaaggaagacggtttcactcagattgttctgtccaccaggagcacagagaaaaacgccctcaataccgaggtgatcaaagagatggttaatgcactcaattccgccgctgccgacgattccaagctggtgttgtttagtgcagctgggtccgtgttttgttgtgggctagattttggatacttcgttagacaccttcggaatgaccgtaacaccgctagcttggaaatggtggacactatcaaaaactttgtgaatacattcatccagttcaaaaagcccattgtcgtgtctgttaacggcccggccattgggctgggggctagtatactgccattgtgcgacctggtgtgggccaatgagaaggcctggttccagacgccttatacaacatttggccagtctcccgacggttgttcctctatcacattccccaagatgatgggaaaggcctctgccaacgaaatgctgatcgctggccggaagctgaccgcccgtgaagcctgtgctaaaggtctcgtgtctcaggtgtttctcacaggcactttcacccaggaagtgatgatacagattaaggagttagccagctataacgctattgttctagaggaatgcaaagctctggttcgctgtaatatcaaattggagctggagcaggctaatgaaagagagtgtgaggtactgcggaagatctggagcagcgcacagggaatagaaagcatgctgaagatccctttattgggctacaaggcagccttccctccacgaaagactcagaatgatcagaggtggtgcccatag

SEQ ID NO: 20268 - DNA, 1668 bp, Artificial Sequence
  derived and/or modified sequence
atggcctcccaggagttcgaggtggaagcgatcgtggacaagcggcaggacaaaaatggaaatacgcagtatttggtgcggtggaaggggtacgataagcaggacgacacatgggaaccagaacagcacctaatgaactgtgagaagtgtgtgcatgactttaatagaaggcagactgagaagcagaagaaactgacatggaccaccacttcacgtatcttcagcaataatgctcggagacgcacctcaaggtccaccaaagccaattacagcaagaactctcctaagactccggtgacagacaaacaccatcgcagcaaaaattgtaaattgtttgccgcaagcaagaatgttcggaggaaagcagcttcaacactgagcgacaccaaaaacatggaaattatcaatagcacgatcgaaactttggcacctgactcacctttcgatcacaagaagaccgttagcggctttcagaagctggagaagttggatccaattgccgcagatcagcaggataccgtggtatttaaggtgaccgagggtaaacttttacgggaccctctgtcccatcctggtgcggaacagactggcatccagaataagacccaaatgcatccattgatgagtcagatgagcggatccgtaacggcttctatggccactggatcggccacccgcaagggcatcgtggttctaatagatcctctcgcagccaatgggactacagatatgcatactagcgtccctcgtgtgaagggaggccagcgaaatatcacggatgattcacgcggtcaaccctttatcaagaaaatgcacttcaccatccgtctgacggagagcgcgattacttacagagatattgtcgtgaaaaaagaagatgggttcacgcagatcgtgctctccacgcgcagcactgagaagaacgcactcaacactgaggtcattaaagaaatggtgaacgccctgaacagtgctgctgccgatgactccaagcttgtgctgttctctgccgcaggctcagtcttttgctgtgggttggactttggatactttgtacggcatctcaggaacgaccggaacactgcctccctggaaatggttgatactattaaaaactttgtcaatactttcatacagtttaaaaagcctatcgttgtctctgtaaatggtccagcgatcggacttggcgcatccattttgcccttatgtgatcttgtgtgggcgaacgagaaagcctggttccaaacaccttataccacctttggacagagccctgacgggtgcagttctattaccttccctaagatgatgggaaaggctagcgcgaatgaaatgctgatcgcaggcagaaagctgacagctcgggaggcttgcgccaaagggttggtgtcacaggtgtttctgaccggtacttttacacaggaagtcatgattcaaattaaagagctggcatcatacaatgccatagtgttagaggaatgtaaggccctcgtgaggtgcaatattaaattggagctagagcaggcaaatgaacgcgagtgcgaggtgctccggaaaatttggtcttccgcccaggggatcgagtcaatgcttaaaatcccccttcttgggtacaaggccgcttttcctcccagaaagacacagaacgaccagcgctggtgtccgtag

SEQ ID NO: 20269 - DNA, 1665 bp, Artificial Sequence
  derived and/or modified sequence
atggctagccaagagttcgaagtggaagccatcgtcgataaacggcaggacaagaacggaaacacacaatacttggtcaggtggaaaggctacgacaagcaggatgacacttgggagcccgagcagcatctgatgaactgtgaaaagtgcgtccatgacttcaacagacgacagactgagaaacaaaagaagctgacatggacaactacatctagaatattcagcaacaacgctcgacgaagaactagtagatctacaaaggcaaactattccaagaactctcccaagacccctgttacggacaaacaccacagaagtaagaatagaaagttgtttgcggcatctaaaaatgtgagacgcaaggcagcgagtattctttcagatacaaaaaatatggaaatcatcaactctactattgagactctggcacccgactctccgttcgatcacaaaacagtctccggatttcaaaagcttgagaaactcgatccaatcgcagcagaccagcaagatacagtggtgtttaaagtaacggaaggtaaattgctccgggaccctttgtcacgcccgggagctgagcagactgggattcaaaacaaaactcagattcatcccttgatgagtcagatgtctggctcagtgaccgcctcaatggccaccggttctgctacgcgcaaaggaatagtcgtgctgattgatcccctggccgctaatggaaccaccgacatgcatacttctgtgcctcgggtgaaaggcggtcagcgtaatattaccgacgattctcgggaccagccctttattaagaaaatgcacttcaccatacgcctgaccgagtcagcctccacctatcgcgacatcgtggtgaaaaaagaggacggattcacacagattgtcttgtccactcgctctaccgaaaagaatgcactgaacacagaggttattaaggagatagttaacgccctgaactcagccgctgctgatgactctaaactcgtgttattttccgcagcaggatcggtattttgctgcgggctggattttggctatttcgtgaagcatttgcggaacaataggaatacagctagcctcgagatggtcgacactatcaagaactttgtgaacacgttcattcagttcaagaagcccatcgtcgttagtgtcaatgggcccgctatcggcctgggcgcaagtatactgcccctgtgtgaccttgtgtgggcaaatgagaaggcatggttccagacaccttataccacatttggacaaagcccggacgggtgtagctccattacatttcctaagatgatgggaaaagccagcgctaatgaaatgctgattgctggtcgcaaactgacagcccgcgaagcatgcgccaaagggcttgtttcacaggttttcttaaccggtacgttcacacaggaggtaatgatccaaatcaaagagctggcctcctataatcctatcgtgttggaagaatgtaaagctctggtcaggtgcaatattaaactggaactggagcaggccaatgaaagagaatgtgaagtgctccgcaagatctggtcatccgcacagggaattgagtcaatgctgaaaattcctttgctcggttataaggccgcattccctcccagaaaaacccagaacgaccagcggtggtgtccatag

SEQ ID NO: 20270 - DNA, 1668 bp, Artificial Sequence
  derived and/or modified sequence
atggcatcacaagagtttgaggtcgaggccattgtcgacaagcgacaagataagaacggcaacacccagtatctagtgaggtggaagggctacgacaaacaagatgacacatgggaacccgagcagcacctgatgaattgcgaaaaatgcgtacatgatttcaatcggagacaaaccgagaaacagaagaaactgacctggacgacgaccagcagaatcttctccaacaatgcccgccggcgaacctcacgctccacgaaagcaaactattccaaaaattcaccgaaaactcctgtgaccgacaagcaccaccgatccaagaattgtaagttgttcgccgcctctaagaatgtacggagaaaagcggcctcaaccctgtctgatacaaagaatatggagatcattaacagcactatagagacgctagctccagacagccccttcgatcataagaaaactgtaagcgggttccaaaagctggaaaagctcgatcctattgcagccgatcaacaggatacagtcgtatttaaggtaacggagggcaaactcttgagagacccactcagccacccaggcgcagagcagactggtatacagaacaagactcagatgcatcctctgatgagccagatgagcgggagcgtgactgcatctatggccacaggttccgcgacgcggaaaggcattgtggttctgattgatcccttggctgcaaacggaactacagacatgcacacgtccgtgccaagggtcaagggaggtcagagaaacattacggatgattcccgcgggcaaccctttataaaaaaaatgcattttacgatacgtctaaccgagtccgcaatcacttatagggatatagtggttaaaaaagaagatggcttcacacagatcgtgctctccacaagaagcacggaaaagaatgccctgaacactgaggtgatcaaggagatggttaacgccctgaattccgccgctgccgacgactccaaactggttcttttttcagcggcagggagtgttttctgctgcggacttgactttggctacttcgtacgtcatctccgcaacgacagaaacactgctagcctcgaaatggttgacacaatcaaaaatttcgttaatacctttatccagtttaagaaacctatcgtcgtcagcgtgaatggccccgccatcgggctgggggcttccatcctgccgttgtgcgacctggtatgggccaacgaaaaagcatggtttcagactccgtacacaacatttggacagagccctgatggctgctcctccatcaccttccccaaaatgatgggcaaggccagcgccaacgaaatgctgatcgcgggacggaaactgacagcccgggaggcatgtgcgaagggattagtgtcacaggtgttcctgacagggactttcacacaggaagtcatgatacagattaaggagctggcatcttataacgccattgtcctcgaagaatgcaaggccctggtgaggtgtaatatcaaactggagctagagcaggcaaacgagagggaatgtgaagtgttaagaaagatctggtcctccgctcaggggatagaaagtatgctcaagatccccctgttgggctataaggccgcatttcctccacgtaagacccagaacgaccagagatggtgtccctag

SEQ ID NO: 20271 - DNA, 1665 bp, Artificial Sequence
  derived and/or modified sequence
atggccagccaggagtttgaggtggaggccatcgtggacaagaggcaggacaagaatggaaacacccagtacctggtgcgctggaagggctatgacaagcaggatgacacctgggagcctgagcagcacctgatgaactgtgagaagtgtgtgcatgacttcaacagacggcagacagagaagcagaagaagctgacctggaccaccaccagccgcatcttcagcaacaatgcccggcggaggaccagccgcagcaccaaggccaactacagcaagaacagccccaagacccctgtgacagacaagcaccacaggagcaagaacaggaagctgtttgctgccagcaagaatgtgcggaggaaggccgccagcatcctgagtgacaccaagaacatggagatcatcaacagcaccatcgagaccctggccccagacagcccctttgaccacaagacagtgtctggcttccagaagctggagaagctggaccccatcgctgctgaccagcaggacacagtggtgttcaaggtgacagagggcaagctgctgcgggaccccctgagcaggcctggagctgagcagacaggcatccagaacaagacccagatccaccccctgatgagccagatgagcggctctgtgacagcctccatggccaccggcagcgccaccaggaagggcatcgtggtgctgattgaccccctggccgccaacggcaccacagacatgcacacctctgtgccccgggtgaagggcggccagaggaacatcacagatgacagccgggaccagcccttcatcaagaagatgcacttcaccatccggctgacagaaagtgccagcacctacagagacatcgtggtgaagaaggaggatggcttcacccagatcgtgctgagcaccaggagcacagagaagaatgccctgaacacagaggtgatcaaggagatcgtgaatgccctgaacagcgctgctgctgatgacagcaagctggtgctcttctctgctgctggctctgtgttctgctgcggcctggactttggctactttgtgaagcacctgaggaacaacagaaacacagccagcctggagatggtggacaccatcaagaactttgtgaacaccttcatccagttcaagaagcccatcgtggtgtctgtgaatggacctgccatcggcctgggcgccagcatcctgcccctgtgtgacctggtgtgggccaatgagaaggcctggttccagaccccctacaccaccttcggccagagcccagatggctgcagcagcatcaccttccccaagatgatgggcaaggccagcgccaatgagatgctgattgctggcaggaagctgacagcccgggaggcctgtgccaagggcctggtgtcccaggtgttcctgaccggcaccttcacccaggaggtgatgatccagatcaaggagctggccagctacaaccccatcgtgctggaggagtgcaaggccctggtgcgctgcaacatcaagctggagctggagcaggccaatgaaagagaatgtgaggtgctgaggaagatctggagcagcgcccagggcatcgagagcatgctgaagatccccctgctgggctacaaggccgccttcccccccaggaagacccagaatgaccagcgctggtgcccctag

SEQ ID NO: 20272 - DNA, 1665 bp, Artificial Sequence
  derived and/or modified sequence
atggccagccaggagttcgaggtggaggccatcgtggacaagcggcaggataagaatggcaatactcagtatctcgtgcgatggaagggttatgataagcaagacgacacatgggagccggagcaacacctcatgaattgtgagaaatgcgttcatgacttcaacaggcgccagactgagaaacagaagaaactgacttggacgactacctcacgcattttcagtaacaatgcaagaagacgaacgagtcggtcgacaaaggcaaattattcaaaaaactcaccaaagacaccggtgacagataagcaccatcgttctaagaatagaaaactcttcgcagctagtaaaaacgttcggcggaaagccgcaagcattctcagcgacacaaagaacatggaaattatcaatagtaccatcgagacactggcacctgatagtcccttcgaccacaagacggtctctgggtttcaaaagttggagaaattagaccctatcgccgcagatcagcaggatacagtagtttttaaggtgaccgagggtaagctgctgcgtgatccactctccaggcctggggcagaacaaactggtattcagaataaaactcagatacatcccttgatgtctcagatgtcaggtagcgttacagcctctatggctaccggatccgccacgcgaaaagggatcgtggtgctaatcgacccactagcggccaatggcactacggatatgcacacaagcgtgcctcgcgtgaaaggaggacaacggaatatcactgatgacagccgtgaccagccatttattaagaaaatgcacttcacaatccgactgacggagagcgccagtacctaccgcgacatcgtggtcaagaaggaagatgggtttacgcaaatcgtactaagcacacgttcaacagagaagaacgctctgaatactgaggttattaaagagattgtgaatgcacttaattctgcggctgccgatgattctaagcttgtgctgttttccgccgcaggcagtgtattctgttgcggtctcgacttcggatattttgttaagcaccttcggaataacagaaacactgcctcgttagagatggtggataccataaaaaattttgtcaatacattcatacaattcaagaaacctatcgtggtctccgtgaacgggccagccatcgggctgggggcctcaatcctgcctctgtgtgacctcgtctgggctaatgaaaaggcctggtttcagaccccctatacaacgttcggtcagtccccagacggatgtagtagtattacattcccaaaaatgatgggcaaagcatccgcaaatgagatgttgatcgctggtcgtaagctgaccgcgcgggaagcctgtgccaagggactggtctcacaggtttttctgacaggtacattcacgcaggaagtgatgattcagattaaggaactagcgagttataaccccatcgtgcttgaagagtgtaaggcactggtgcgatgcaacatcaagcttgaactggagcaggccaatgagagggagtgcgaggtgttgcggaagatctggtcttcagctcagggcatcgaaagcatgctgaagatcccgcttctggggtacaaggccgcattccccccaaggaagactcaaaatgaccaaagatggtgcccatag

SEQ ID NO: 20273 - DNA, 1668 bp, Artificial Sequence
  derived and/or modified sequence
atggccagccaggagttcgaggtggaggccatcgtggacaagcggcaggacaaaaacgggaacacccagtatcttgtgcgctggaaaggttacgacaaacaggacgatacttgggaacctgaacagcatttgatgaattgcgagaaatgtgtccacgactttaatagaagacagaccgaaaagcagaaaaagctgacctggactaccaccagccgtattttttccaataatgccaggaggagaacatctagatccactaaggccaattattcgaagaatagccccaaaacgcccgtgaccgacaagcaccatcgctctaagaactgcaaactgtttgccgctagcaagaacgtccggagaaaggctgcttctacactgtcagacacaaaaaacatggagatcataaattcaacaattgagacccttgcgccagactccccgtttgaccataagaaaacagtgtctggattccaaaaacttgagaaattggatccgattgccgcggaccagcaggacactgtggtattcaaggtgacagaaggtaagctgttaagagacccgctatctcaccctggggccgaacagactgggatccagaataaaacccagatgcacccactgatgagtcaaatgagtggttcagtcactgccagcatggccacaggttctgctacgaggaagggtatcgtggtgctcatcgatcctctggccgccaatggaaccaccgacatgcacacaagtgtgcccagggttaaaggtgggcagcggaatataactgatgattctagagggcagccgtttataaagaagatgcacttcacaatccggctcacagagtccgccataacctaccgggacatcgtggtgaaaaaggaggatggcttcacccagattgttctcagcacaagatcaactgagaagaacgcactgaacactgaggtgatcaaagagatggttaacgcactgaacagcgcagcagccgacgatagcaaactggtcctattttctgctgccggatcggttttctgctgtggcctggacttcggttacttcgttaggcacctcagaaatgataggaataccgccagcctggagatggtggacacaattaaaaactttgtgaacacattcatacagtttaaaaagcctattgtcgtgagcgtcaatggacctgcaattggcctgggtgcatcaatacttccactctgcgatctggtctgggccaacgaaaaggcatggttccaaacaccgtataccacatttggccaatcgccagacggctgctcttcaataacattcccaaaaatgatgggcaaagcatccgcaaatgagatgctcattgcagggcggaaacttacagcgcgagaggcttgcgcaaaggggctagtgagccaggtgtttctcaccgggacctttactcaggaagtgatgatccaaattaaggaactggcttcgtacaacgctatcgttctagaagaatgtaaagctctggtgaggtgtaacattaaattagagctcgaacaagccaacgaacgcgaatgtgaggtgctcagaaaaatctggtccagcgcacagggaatcgaatctatgttgaagattccacttctgggctataaggctgcatttccccccaggaagactcagaacgaccaacggtggtgcccatag

SEQ ID NO: 20274 - DNA, 1665 bp, Artificial Sequence
  derived and/or modified sequence
atggcctctcaggaatttgaggttgaggccatcgtggataaacgtcaagacaaaaatgggaacacccagtacctcgtgcgatggaaaggatacgacaaacaagacgatacctgggagccagagcagcatttgatgaactgcgaaaaatgcgtccacgacttcaatagaagacaaaccgagaagcagaagaaactgacatggaccactacttcgagaatcttcagcaataatgccaggcgtcggacctctcggtcaaccaaagccaactacagcaaaaactctccaaaaacccctgtgaccgacaagcaccatcgtagcaaaaatagaaagttattcgccgcttccaaaaatgtgagacgaaaagcggcttcaatcctgtcggacactaaaaacatggagatcatcaactcgacgatcgagaccctcgcccctgacagccctttcgaccataagacagtctcgggctttcagaagctggagaagctcgatcctatagccgctgaccagcaggacacagttgtatttaaagtgaccgaaggcaagctcctgcgggacccactgagtagaccaggagccgagcagacggggatccaaaataagactcaaatccatcctcttatgagccagatgtcaggcagcgtgaccgcttcaatggcaaccggtagtgcaactcgtaagggtatcgttgtcctgattgatccccttgcagccaatggcaccaccgatatgcacacctccgtgccgcgagtaaaggggggacagaggaatattaccgatgattctagagatcagcctttcatcaaaaagatgcacttcactattagactgaccgaaagtgcctcgacttaccgggacatcgtggtaaagaaggaagatggatttactcagattgtgctcagcacaagatcaaccgaaaaaaacgccctgaacaccgaagttatcaaggagattgtgaacgcgctgaacagtgctgccgctgatgacagcaagctcgtcttgttttctgctgccggttccgtgttttgctgcgggctcgatttcggatacttcgtcaaacacctgaggaacaatcggaacacggcgtccctggagatggtcgacacaatcaagaactttgttaatacgttcatccagttcaaaaagcctatcgttgtaagcgtcaacggaccagccatcggcctgggggcaagtatactccccctatgcgacctggtgtgggcgaacgagaaggcttggtttcagactccttacacaactttcgggcaatcccccgatggttgttcaagcattacattccccaaaatgatggggaaggccagcgcaaatgaaatgctgatcgctggacggaaattgactgcacgggaagcctgtgccaaagggctggtttctcaggtctttctaactgggacattcacccaggaggtgatgatccagattaaggaactggcaagctataacccgatcgtgcttgaggaatgtaaagcattggtgcgctgcaatattaagctggaactggagcaggctaatgaaagggaatgtgaggttctcaggaaaatttggagttccgcccagggaatagaatccatgctgaaaatacccttgttagggtacaaggctgcctttccacccaggaagacacagaacgaccagcgctggtgcccctag

SEQ ID NO: 20275 - DNA, 1668 bp, Artificial Sequence
  derived and/or modified sequence
atggctagccaggagtttgaggtggaagctatcgtcgataagcggcaagacaagaatggaaatacccagtaccttgtccgttggaaagggtatgacaaacaggatgatacttgggaaccggaacagcatttgatgaactgtgagaagtgtgtccatgatttcaaccgacgccagactgaaaagcagaagaaattgacttggactaccacatcaaggatcttttccaataatgcgaggcgccgtacctcccgtagcactaaggccaactatagcaaaaacagcccaaaaacgcccgtaacggacaagcaccaccgctcgaaaaattgcaaactgttcgccgcatctaagaatgttagacggaaagcggcttccaccttgtccgacacaaaaaatatggaaatcataaactccacgattgagacactcgcgccagacagcccttttgatcacaaaaagactgtctccggcttccaaaagctcgaaaaactggatcctatcgccgcagaccagcaggataccgtggtctttaaggtaaccgagggcaaattgctcagggatcctctgtctcacccaggcgctgagcaaacgggtattcaaaacaagacccagatgcaccccctgatgagccagatgtcagggagtgtaactgcttctatggccacaggatcagctacccgcaaggggatagtggtgctcatagatcccttggcagccaacggtaccaccgacatgcacacatctgtaccccgtgttaaggggggtcagagaaacatcaccgacgactcccgtggtcaaccatttattaaaaaaatgcactttactataagattgactgaaagcgctattacctacagggatatcgtagtgaaaaaagaggacggatttacccagattgtcctttccaccaggtctactgagaaaaacgctttgaataccgaggtcattaaagaaatggtaaatgctctcaatagcgccgcagccgatgatagcaaattagtgctcttcagcgctgcaggtagcgtcttttgttgcggtctcgatttcgggtattttgttaggcatttgcgaaatgacaggaacacagcctctctcgaaatggtggacaccatcaaaaatttcgtcaacaccttcatacagttcaaaaaacccatcgtggtctcagtgaacggccctgccattggactaggggcatcaattctgcccctatgcgacctcgtgtgggctaatgagaaggcctggttccagaccccttatacgaccttcggacagtctcctgatggctgctcctctataactttccccaagatgatgggaaaggcgagcgcgaatgagatgctcatcgccggtagaaaattaacagctagggaggcttgtgccaaaggcttggtgtctcaggttttcctgacagggacctttactcaggaggtgatgatccaaataaaggaactagctagttacaatgccatcgtgctggaagaatgcaaggccttagttcgctgcaatataaaactggagcttgaacaggccaacgaaagagagtgtgaggtcctgcggaagatttggtcttcagcacagggcatcgaatctatgctgaagatcccgttgcttggatacaaagcagccttccctccgcgaaaaactcagaacgaccaacggtggtgtccttag

SEQ ID NO: 20276 - DNA, 2321 bp, Artificial Sequence
  derived and/or modified sequence
ctgtggatttagctactctcacctgaggctactgagcaagttgtcatgcaccatgagacaaagcccaagctgtcccaccaggcagtaagtatggagaggttcaggcacatggcatagctgctatttcgcacaattttcactacaccagtggtgacaaaatagaagaggttcatccatacacagaacctggtgaagagctggaggcagaaagaagtgtctatgtggagacgcaactgaaacaaaggtggcacagcaactgttccaatcccgtgtctttcctcatggcttcccaggagtttgaggttgaagctattgttgacaaaagacaggataaaaatgggaatacacagtatttggttcggtggaaaggttatgacaaacaggatgacacttgggaaccagagcagcacctcatgaactgtgaaaaatgtgtacatgattttaatagacgacagactgaaaaacagaaaaaactgacatggactacaaccagtagaattttttcaaacaatgccagaagaagaacttccagatctacaaaagcaaactattctaagaactctcctaaaacgccagtgactgataaacaccacaggtccaaaaaccgcaagttatttgctgccagcaagaacgttaggagaaaggcagcttcaattctctccgacacaaagaatatggagataataaattcaactattgagacccttgcacctgacagcccctttgaccacaaaactgtgagtggctttcagaaacttgagaaactggaccctattgcagcagatcagcaggacacggtggtcttcaaggtgacagaagggaaactcctccgggaccctttgtcacgtcctggtgcagaacagactggaatacagaacaagactcagatacacccactaatgtcgcagatgtctggctcagttactgcttctatggccacaggttcagctacccgaaagggtatagtggtattaatagacccattagcagccaatgggacaacagacatgcatacctcagttccaagagtgaaaggtgggcaaagaaatattactgatgacagcagagaccagccttttatcaagaagatgcacttcaccataaggctaacagaaagtgccagcacatacagagacattgtagtgaagaaagaggatggattcacccagatagtgctatcaactagatcgacagaaaaaaatgcactgaatacagaagtaattaaagaaatagttaatgctctgaatagcgctgctgcagatgacagcaagctcgtgctgttcagtgcagctggaagtgtcttttgctgcggtcttgattttgggtactttgtgaagcacttaaggaataacagaaacacagcaagccttgaaatggtggacaccatcaagaactttgtgaatacttttattcaatttaaaaagcctattgttgtatcagtcaatggccctgcgattggactaggtgcatccatcctgcctctttgtgatctcgtgtgggctaatgaaaaggcttggttccaaaccccttatacgacctttggacagagtccagatggctgttcttctattacattccccaaaatgatgggtaaagcatctgccaatgaaatgttaattgctgggcgaaagctgacagcaagggaggcatgcgccaaaggcctggtctctcaggtatttttgactggaactttcacccaagaggttatgattcaaattaaggagcttgcctcatacaatccaattgtactggaagaatgtaaggccctcgttcgctgtaatattaagttggagttggaacaggccaatgagagagagtgtgaggtgctgaggaagatctggagctcagcccaagggatagaatccatgttaaaaatacctctgttgggatataaagcagccttccctcccagaaagacacagaatgatcagagatggtgcccttgactttatagtggcacaaacgcttcagagacacacaattataagagacttatcttttagcataaatacttatggctcaaaatccactgacgatcattctcctaaactgaacacatgactagaattggtggtgagatatcgcttgattttcttttcctttataaatgtctagttcttacccagttaacaaaagaaaactttatcgctctaaagtaaaacttgttacaccacattagtgaattatggaatgattttggtggaaatatccaggttctaatgtgtggaatgtgcagatttaggttactttagtgtatgttctagttaataagttaaaattctggacacattattaaaggcagaaacttctttcaaagcaaa

SEQ ID NO: 20277 - DNA, 2369 bp, Artificial Sequence
  derived and/or modified sequence
aacaggcaggaagaaagctttctgtactacaccagagggttggggctgtggatttagctactctcacctgaggctactgagcaagctgtcatgcaccacgagacaaagcccaagctgtcccaccaggcagtaagtgtggagaggttcaggcacatggcatagctgctatttcgcacaattttcactacaccagtggtgaccaaatagaagaggttcatccatacacagaacctggtgaagagctggaggcagaaagaagtgtctatgtggagacgcaactgaaacaaaggtggcacagcaactgttccaatcccgtgtctttcctcatggcttcccaggagtttgaggttgaagctattgttgacaaaagacaggataaaaatgggaatacacagtatttggttcggtggaaaggttatgacaaacaggatgacacttgggaaccagagcagcacctcatgaactgtgaaaaatgtgtacatgattttaatagacgacagactgaaaaacagaaaaaactgacatggactacaaccagtagaattttttcaaacaatgccagaagaagaacttccagatctacaaaagcaaactattctaagaactctcctaaaactccagtgactgataaacaccacaggtccaaaaactgcaagttatttgctgccagcaagaacgttaggagaaaggcagcttcaactctctccgacacaaagaatatggagataataaattcaactattgagacccttgcacctgacagcccctttgaccacaagaaaactgtgagtggctttcagaaacttgagaaactggaccctattgcagcagatcagcaggacacggtggtcttcaaggtgacagaagggaaactcctccgggaccctttgtcacatcctggtgcagaacagactggaatacagaacaagactcagatgcacccactaatgtcgcagatgtctggctcagttactgcttctatggccacaggttcagctacccgaaagggtatagtggtattaatagacccattagcagccaatgggacaacagacatgcatacctcagttccaagagtgaaaggtgggcaaagaaatattactgatgacagcagaggccagccttttatcaagaagatgcacttcaccataaggctaacagaaagtgccatcacatacagagacattgtagtgaagaaagaggatggattcacccagatagtgctatcaactagatcgacagaaaaaaatgcactgaatacagaagtaattaaagaaatggttaatgctctgaatagcgctgctgcagatgacagcaagctcgtgctgttcagtgcagctggaagtgtcttttgctgcggtcttgattttgggtactttgtgaggcacttaaggaatgacagaaacacagcaagccttgaaatggtggacaccatcaagaactttgtgaatacttttattcaatttaaaaagcctattgttgtatcagtcaatggccctgccattggactaggtgcatccatcctgcctctttgtgatctcgtgtgggctaatgaaaaggcttggttccaaaccccttatacgacctttggacagagtccagatggctgttcttctattacattccccaaaatgatgggtaaagcatctgccaatgaaatgttaattgctgggcgaaagctgacagcacgggaggcatgcgccaaaggcctggtctctcaggtatttttgactggaactttcacccaagaggttatgattcaaattaaggagcttgcctcatacaatgcaattgtactggaagaatgtaaggccctcgttcgctgtaatattaagttggagttggaacaggccaatgagagagagtgtgaggtgctgaggaagatctggagctcagcccaagggatagaatccatgttaaaaatacctctattgggatataaagcagccttccctcccagaaagacacagaacgatcagagatggtgcccttgactttatagtggcacaaacacttcagagacacacaattataagagacttatcttttagcataaatacttatggcacaaaatccactgacgatcattctcctaaactgaacacatgactagaattggtggtgagatatcgcttgattttcttttcctttataaatgtctagttcttacccagttaacaaaagaaaactttatcgctctaaagtaaaacttgttacaccacattagtgaattatggaatcattttggtggaaatatccaggttctaatgtgtggaatgtgcagatttaggttactttagtgtatgttctagttaataagttaaaattctggacacattattaaaggcagaaacttctttcaaaacaaa

SEQ ID NO: 20278 - DNA, 1665 bp, Artificial Sequence
  derived and/or modified sequence
atggccagccaggagttcgaggtggaggccatcgtggacaagagacaggacaagaacggcaacacccagtacctggtgagatggaagggctacgacaagcaggacgacacctgggagcccgagcagcacctgatgaactgcgagaagtgcgtgcacgacttcaacagaagacagaccgagaagcagaagaagctgacctggaccaccaccagcagaatcttcagcaacaacgccagaagaagaaccagcagaagcaccaaggccaactacagcaagaacagccccaagacccccgtgaccgacaagcaccacagaagcaagaacagaaagctgttcgccgccagcaagaacgtgagaagaaaggccgccagcatcctgagcgacaccaagaacatggagatcatcaacagcaccatcgagaccctggcccccgacagccccttcgaccacaagaccgtgagcggcttccagaagctggagaagctggaccccatcgccgccgaccagcaggacaccgtggtgttcaaggtgaccgagggcaagctgctgagagaccccctgagcagacccggcgccgagcagaccggcatccagaacaagacccagatccaccccctgatgagccagatgagcggcagcgtgaccgccagcatggccaccggcagcgccaccagaaagggcatcgtggtgctgatcgaccccctggccgccaacggcaccaccgacatgcacaccagcgtgcccagagtgaagggcggccagagaaacatcaccgacgacagcagagaccagcccttcatcaagaagatgcacttcaccatcagactgaccgagagcgccagcacctacagagacatcgtggtgaagaaggaggacggcttcacccagatcgtgctgagcaccagaagcaccgagaagaacgccctgaacaccgaggtgatcaaggagatcgtgaacgccctgaacagcgccgccgccgacgacagcaagctggtgctgttcagcgccgccggcagcgtgttctgctgcggcctggacttcggctacttcgtgaagcacctgagaaacaacagaaacaccgccagcctggagatggtggacaccatcaagaacttcgtgaacaccttcatccagttcaagaagcccatcgtggtgagcgtgaacggccccgccatcggcctgggcgccagcatcctgcccctgtgcgacctggtgtgggccaacgagaaggcctggttccagaccccctacaccaccttcggccagagccccgacggctgcagcagcatcaccttccccaagatgatgggcaaggccagcgccaacgagatgctgatcgccggcagaaagctgaccgccagagaggcctgcgccaagggcctggtgagccaggtgttcctgaccggcaccttcacccaggaggtgatgatccagatcaaggagctggccagctacaaccccatcgtgctggaggagtgcaaggccctggtgagatgcaacatcaagctggagctggagcaggccaacgagagagagtgcgaggtgctgagaaagatctggagcagcgcccagggcatcgagagcatgctgaagatccccctgctgggctacaaggccgccttcccccccagaaagacccagaacgaccagagatggtgcccctag

SEQ ID NO: 20279 - DNA, 1665 bp, Artificial Sequence
  derived and/or modified sequence
atggcctctcaggagtttgaagtggaggctatagtagataaaaggcaggataagaatggcaatacacaatacctggtcaggtggaaaggctacgataagcaggacgacacttgggagccagagcaacacttgatgaattgcgagaaatgtgtacacgactttaaccgcaggcaaacagagaagcagaagaaactgacttggaccacaacatcccggatattcagcaataatgccagaagaaggaccagccgcagtacgaaagccaattactcaaaaaactccccaaagacccccgtcactgataagcaccaccgcagtaaaaataggaagctctttgccgcaagtaagaatgttcgcaggaaggccgcttcaatcctttctgataccaagaacatggaaattatcaattctaccattgagacccttgccccagattccccattcgatcacaagaccgtgtccggcttccaaaagctcgagaagctagaccccatagccgccgaccagcaggacacagtggtgtttaaggtcactgaaggcaaactgctccgcgacccactgtccaggcccggggctgaacagacaggaatacagaacaagactcagatccatccattgatgtctcagatgagtggttctgtgaccgccagcatggccaccggtagtgccacgagaaagggaatcgtggttctgatcgaccccttagcggcaaacggaaccactgacatgcatacttctgtgcccagagtgaaaggtgggcaaagaaacatcacagacgactcacgggaccagccattcataaaaaagatgcatttcaccatccggttgacggaaagcgcctcaacatacagagatattgttgttaagaaagaggatggttttacccagatcgtgcttagcaccagatctaccgaaaaaaacgcattaaacacagaggttattaaggagattgtcaacgctcttaactctgccgccgcggatgatagtaaacttgtgctattttctgcagctgggagcgtcttctgctgtggcctcgattttggctacttcgtgaaacacctgaggaacaaccgaaacacagccagcctggaaatggtggataccataaaaaacttcgtaaacacttttatccagtttaagaagccaatcgtagtgtccgtaaatggaccggccatagggttgggcgcatcaatcctgcccctctgcgacttggtgtgggccaatgaaaaagcctggtttcaaactccttacacaacctttggccagagccctgatgggtgttcttccatcactttccctaagatgatggggaaggcatctgccaacgagatgctaatcgcgggcaggaaattaactgcacgtgaggcgtgcgccaagggacttgtctcccaggtgtttcttaccggcaccttcacccaggaggtgatgatccagattaaggagttggcaagctacaatcctatcgtgttggaagagtgtaaggccctagtcagatgcaacatcaagctggaacttgaacaagctaacgaaagggagtgcgaggtgctgcgcaagatatggtcttctgcacagggcatcgagtctatgcttaagatacccctcctgggttacaaggcagccttcccccctcgcaagacccagaacgatcagcgctggtgtccatag

SEQ ID NO: 20280 - DNA, 1665 bp, Artificial Sequence
  derived and/or modified sequence
atggccagccaggagttcgaggtggaggccatcgtggacaagcggcaggacaaaaatggcaatacacaatatctggtacgttggaagggttatgataaacaagacgatacgtgggagcccgaacaacacttgatgaactgcgagaagtgtgtccatgactttaacaggagacagaccgagaagcaaaaaaaacttacctggaccactacttcaagaatcttttccaacaatgctaggagaaggacatcacgaagtaccaaagccaactactccaagaattccccaaaaacaccggttacggataagcaccacagatccaaaaatcgaaaactgttcgctgctagtaagaatgtgagacggaaggctgcgtctatattaagcgacacgaaaaacatggagatcattaatagcacaatagagacgctcgcaccagatagcccttttgaccacaagaccgttagcggattccaaaagctggaaaaactcgaccccatcgccgctgaccagcaggatacggtggttttcaaggttacggaaggcaaattactccgcgatcccctctcaaggccaggcgccgaacagaccggaatccagaacaagacgcagatccaccccctcatgtctcagatgtccggctccgttaccgccagcatggctaccgggtcagctacccgcaagggaattgtagtcctgattgacccactggcggcaaatggcacaactgatatgcacacctcagtgcctcgagtgaaaggcggacagcgcaatatcacggatgactctagagatcaaccatttatcaaaaaaatgcacttcactatccgtctgacggagtcagccagtacctaccgagatatcgtagtgaaaaaagaagacgggttcactcaaattgtgctctcaactcggagcaccgagaaaaacgcgctgaatacggaggtcattaaggagatcgtgaatgctttgaattctgccgctgctgatgatagcaaactagttctctttagcgctgcagggtcagttttctgctgtggcctagattttggctatttcgtcaaacatctgcggaacaaccgaaatactgcatctctagagatggtggataccatcaaaaattttgtgaacacattcattcagttcaagaaaccgatcgttgtctccgtgaatgggcctgctatcggcttgggggcctcaattctccctctctgtgatttagtgtgggcaaatgaaaaagcatggttccaaactccctacacaactttcgggcagtctccagacgggtgctcatctatcacctttccgaagatgatggggaaggccagtgcgaatgaaatgctgatagccggccgcaaactcaccgccagagaggcatgcgcgaaggggttggtcagtcaagtgttcctgacagggacattcacccaggaggtgatgatccaaattaaggagttagcctcttacaatccaattgttctggaagagtgtaaggcccttgtgcggtgtaatatcaagctggaactcgagcaagctaatgagcgtgaatgcgaggtgttgaggaaaatctggtcatccgcccaaggaatagagagcatgctgaagattccgttgttgggctataaggctgcctttccaccacggaaaactcagaatgatcaacgttggtgcccttag

SEQ ID NO: 20281 - DNA, 1665 bp, Artificial Sequence
  derived and/or modified sequence
atggctagccaagaattcgaagtggaggctatcgttgacaaaaggcaggataaaaatgggaacacacaatatttagtacggtggaaggggtacgataaacaggatgatacatgggagcctgaacaacacctcatgaattgcgagaagtgtgttcatgactttaataggaggcagacagaaaaacagaagaaattgacttggaccactacatctaggatattctccaacaatgccaggaggcgtaccagtagaagtactaaagctaactattccaagaattctccaaagacacccgtgacagataagcaccaccgcagcaagaaccggaagctattcgccgcttcaaagaacgtgagacggaaagccgcttctattctttcagatactaagaatatggagatcattaatagcactatcgaaacgctagcaccagattctccatttgatcataaaaccgtctcagggttccagaagcttgaaaagcttgatcccattgctgcagatcaacaggatactgtggtgtttaaggttactgaggggaagcttctgagagatcctctgtcaaggcccggtgccgaacagactggcattcagaataagacacagatccatcctctgatgtcccagatgtcagggtccgttactgccagcatggccactggatctgcgacacggaagggaattgtcgtcctgattgatcctctggcagcgaacggcaccacagatatgcacacgagtgtcccacgtgttaaaggcggacagcggaacataacagatgattcaagagaccaaccatttatcaaaaaaatgcattttactataaggttgactgaaagcgcctctacgtatagggatatagtagtaaagaaagaagacggcttcacccagatcgtcctgagcacacgttcaacggagaaaaatgcactcaacaccgaggtgatcaaggaaatcgtgaatgccctgaacagtgccgctgcagacgacagtaagcttgtgcttttttctgctgctggctcagtattttgttgtggactggactttgggtatttcgtcaagcacctgagaaataatagaaacactgctagccttgagatggtcgatacaatcaaaaactttgtgaatacattcatccagttcaagaaacctattgttgtgtctgttaatggacccgcaatcggtttgggggctagtatccttcccttgtgcgacctggtatgggctaatgagaaagcctggttccagactccctacaccaccttcggccagtcccctgacggctgcagttctatcacctttccaaagatgatggggaaggccagcgccaatgagatgttgattgctgggagaaagctcacagcaagagaggcttgtgccaagggcctcgtgtcacaggtcttccttacaggaacatttacacaggaggtaatgatccagatcaaggaactggcttcctacaatcctattgtgctggaggaatgtaaggccctcgtgagatgtaacattaagcttgaactggagcaagccaacgagcgggagtgcgaggtcctccgtaagatctggagcagtgcccagggcatcgaatctatgctgaagatacctctcctggggtacaaagcagccttcccgccacgcaagactcagaacgaccagcgatggtgtccatag

SEQ ID NO: 20282 - protein, 259 aa, Artificial Sequence
  derived and/or modified sequence
MLLRSWFGNKDFQALPILARLPSMPTDMEHTGHYLHLAFLMTTVFSLSPGTKANYTRLWANSTSSWDSVIQNKTGRNQNENINTNPITPEVDYKGNSTNMPETSHIVALTSKSEQELYIPSVVSNSPSTVQSIENTSKSHGEIFKKDVCAENNNNMAMLICLIIIAVLFLICTFLFLSTVVLANKVSSLRRSKQVGKRQPRSNGDFLASGLWPAESDTWKRTKQLTGPNLVMQSTGVLTATRERKDEEGTEKLTNKQIG

SEQ ID NO: 20283 - DNA, 780 bp, Artificial Sequence
  derived and/or modified sequence
atgcttctgcgtagttggttcgggaataaagacttccaggccctccctattctggcccgcttaccgtccatgccaaccgacatggagcacacaggacactatctgcatcttgcctttctcatgaccacagttttctccctgagtcctggaacaaaggctaattacacaaggttatgggccaatagtacaagctcctgggatagtgttatccagaataaaactggccgcaaccagaatgaaaacattaatacaaacccgattacccctgaggtcgactataaggggaattccaccaatatgcctgagacttctcacatagtcgccttgaccagtaaaagcgagcaagagctgtatattccgtccgtcgtgtctaattcgccttcaacagttcaatccatagagaacacttcaaaaagccatggcgagattttcaaaaaggacgtgtgcgccgagaacaataataacatggctatgctgatatgcctcatcatcatcgctgtgctgtttctgatttgtaccttcttgttcctgtccaccgttgtactggctaacaaagtttcatctttaaggaggagtaagcaggtgggaaagaggcagccacggagcaacggcgattttttagccagcggattatggcccgccgaatcagatacgtggaaacgaacaaagcaattgactggacctaatctcgttatgcagtctacaggcgtgctgaccgcaacccgggagcgaaaggatgaggagggcacagagaagctcacgaataagcagatcggatag

SEQ ID NO: 20284 - DNA, 780 bp, Artificial Sequence
  derived and/or modified sequence
atgctgctgcgctcctggtttggaaacaaggacttccaggccctgcccatcctggcccggctgcccagcatgcccacagacatggagcacacaggccactacctgcacctggccttcctgatgaccaccgtcttcagcctgagccctggcaccaaggccaactacacccggctgtgggccaacagcaccagctcctgggacagcgtcatccagaacaagacaggcaggaaccagaatgaaaacatcaacaccaaccccatcaccccagaggtggactacaagggcaacagcaccaacatgcctgagaccagccacatcgtggccctgaccagcaagtctgagcaggagctgtacatccccagcgtggtgagcaacagccccagcacagtgcagagcattgagaacaccagcaagagccacggggagatcttcaagaaggatgtgtgtgccgagaacaacaacaacatggccatgctgatctgcctgatcatcatcgctgtgctcttcctgatctgcaccttcctgttcctgagcacagtggtgctggccaacaaggtgagcagcctgcggcgcagcaagcaggtgggcaagaggcagcccaggagcaatggagacttcctggccagcggcctgtggccagctgagagtgacacctggaagaggaccaagcagctgaccggccccaacctggtgatgcagagcactggagtgctgacagccacccgggagaggaaggatgaggagggcacagagaagctgaccaacaagcagatcggctag

SEQ ID NO: 20285 - DNA, 780 bp, Artificial Sequence
  derived and/or modified sequence
atgctgctgcggagctggttcggcaacaaggacttccaggccctgccaatcctagctaggctgccatctatgccaaccgatatggagcatacgggacactacttgcatctcgctttcctgatgactactgtattctccttatcaccaggcaccaaagcaaactacactcgcttatgggctaattccaccagcagttgggatagcgtgatacagaataagaccggacggaatcaaaacgagaacattaacacaaaccccatcactcccgaagtcgattacaaaggtaactcaacaaacatgccggaaaccagccacatcgtggccctgacaagcaagtcagaacaagaactgtatatccccagtgtggtgtccaattcaccatctaccgtgcagagtattgagaacacatccaagagtcacggggagatctttaaaaaagacgtttgcgctgagaataacaataatatggccatgctgatttgcctgatcatcattgccgtactgttcctgatttgtactttcctcttcttgtctactgtggtcctggccaataaggtgagttcactgagacgcagtaaacaagtgggtaagcgacagccacgatccaacggagatttcctggcctccgggctctggccagctgagtctgacacgtggaagaggaccaagcagctgacagggcccaatctggtgatgcagagcacaggcgtactgacggcgaccagagagagaaaggacgaggaaggaacggagaagctaacaaacaaacagattgggtag

SEQ ID NO: 20286 - DNA, 780 bp, Artificial Sequence
  derived and/or modified sequence
atgcttcttcggtcttggtttggaaacaaagacttccaagccttgcctatccttgcaaggctgccatctatgcctaccgacatggagcacactggacattatctgcaccttgcctttttaatgaccacagtgtttagcctgagccccggaacgaaggctaattacacacgcctgtgggcaaactcaacgagttcctgggacagcgtgatacagaataagaccggccgaaaccaaaacgaaaacataaacaccaatccgattacgcctgaagtggattacaaggggaactccaccaacatgcccgagacgtcccacatcgtcgcgcttacctctaagtcagaacaggaactttacatccccagcgttgtgtctaattcgccttcaaccgtgcagtccattgagaacacgtcaaagtcccacggagagatatttaaaaaagacgtctgtgccgagaataacaataacatggccatgctcatctgcctcattatcattgccgtgctgtttctgatttgtacctttctgttcctatctacagtggtgctggccaacaaggtgtcttccctgcggcgatcaaagcaggtaggcaaaagacaacctcgatccaatggcgacttcttagcgtccgggctgtggcctgcggaatcagatacctggaaaaggacaaaacaacttaccggccctaacttggtgatgcagtccactggggtgctcacagcgacgcgcgaacggaaggatgaagaggggaccgaaaaactgactaataagcaaatcggatag

SEQ ID NO: 20287 - DNA, 780 bp, Artificial Sequence
  derived and/or modified sequence
atgctgctgagaagctggttcggcaacaaggacttccaggccctgcccatcctggccagactgcccagcatgcccaccgacatggagcacaccggccactacctgcacctggccttcctgatgaccaccgtgttcagcctgagccccggcaccaaggccaactacaccagactgtgggccaacagcaccagcagctgggacagcgtgatccagaacaagaccggcagaaaccagaacgagaacatcaacaccaaccccatcacccccgaggtggactacaagggcaacagcaccaacatgcccgagaccagccacatcgtggccctgaccagcaagagcgagcaggagctgtacatccccagcgtggtgagcaacagccccagcaccgtgcagagcatcgagaacaccagcaagagccacggcgagatcttcaagaaggacgtgtgcgccgagaacaacaacaacatggccatgctgatctgcctgatcatcatcgccgtgctgttcctgatctgcaccttcctgttcctgagcaccgtggtgctggccaacaaggtgagcagcctgagaagaagcaagcaggtgggcaagagacagcccagaagcaacggcgacttcctggccagcggcctgtggcccgccgagagcgacacctggaagagaaccaagcagctgaccggccccaacctggtgatgcagagcaccggcgtgctgaccgccaccagagagagaaaggacgaggagggcaccgagaagctgaccaacaagcagatcggctag

SEQ ID NO: 20288 - DNA, 1860 bp, Artificial Sequence
  derived and/or modified sequence
agagaagttggagctttttcgttgtttttttttttttccctcctgtgacatgtgctttagttgcagtggaaaggaaatgtgtcatctgtggtttggttttaaaagtggaaaactagctgcacatatccttttttactgcagatttactttaaggctcatattctccaagtctattctgctttaaaaagaagacaagaaaagaagtggtttatcaaaatcacgttataatcagattttgaccaagcattttgtaagtatacaaatgtcagccaatgacatataacaaccatttcttataaaaccttgatgttcaaaagcctgactagcagtggcatccatgttgcttaggagttggtttggaaacaaagactttcaggccctacctatactagctagattgccaagcatgcccacggacatggaacacacaggacattacctacatcttgcctttctgatgacaacagttttttctttgtctcctggaacaaaagcaaactatacccgtctgtgggctaacagtacttcttcctgggattcagttattcaaaacaagacaggcagaaaccaaaatgaaaacattaacacaaaccctataactcctgaagtagattataaaggtaattctacaaacatgcctgaaacatctcacatcgtagctttaacttctaaatctgaacaggagctttatataccttctgtcgtcagcaacagtccttcaacagtacagagcattgaaaacacaagcaaaagtcatggtgaaattttcaaaaaggatgtctgtgcggaaaacaacaacaacatggctatgctaatttgcttaattataattgcagtgctttttcttatctgtacctttctatttctatcaactgtggttttggcaaacaaagtctcttctctcagacgatcaaaacaagtaggcaagcgtcagcctagaagcaatggcgattttctggcaagcggtctatggcccgctgaatcagacacttggaaaagaacaaaacagctcacaggacccaacctagtgatgcaatctactggagtgctcacagctacaagggaaagaaaagatgaagaaggaactgaaaaacttactaacaaacagataggttagtgaagaaaaatgcaaagtagcaatgagaaggcttatggagtaaaaatgaagtcagttggtatttaatcccaaagtgttgttctgattatctaaaatttgacatggtagaccttgcaatttagaatcaagcaggtgagacagggagaagtatgcctgcttaattatttaaactgtgtacttttgttttgacactgaatattttaaaaagcaaataataaaataactaagcatttgaggaaaattttaaggataaattgaggaaactgattaatagagatagcaagggataattaaataaatattccctatgtagcaacagtggttagatgatctttgtctgaatgtaattaaactttgaatagttttagtgtgtccttaaagccaagtatatgctttaacatcaaatggaagtcaaattcctaatgcatagatagagagagctaaactgtgtaatttaatggtatcttccttgctggatgtggcagaatccacaccagcttatcaaccaacacagctaattttagaatagatcctttatctttccatatggcacacgtaagaaagtgtttttctactattaatattaaattaaaacctttacttttgtataataaattaaaactcagaataaacctgtgaccacgtatatttgcattcactttattactttagagaacacattgtaaagatcaataagaaatagagcacaactaaaataaataagatttatagccacaccaata

SEQ ID NO: 20289 - DNA, 2869 bp, Artificial Sequence
  derived and/or modified sequence
agagaagttggagctttttcgttgtttttttttttttccctcctgtgacatgtgctttagttgcagtggaaaggaaatgtgtcatctgtggtttggttttaaaagtggaaaactagctgcacatatccttttttactgcagatttactttaaggctcatattctccaagtctattctgctttaaaaagaagacaagaaaagaagtggtttatcaaaatcacgttataatcagattttgaccaagcattttgtaagattgccaagcatgcccacggacatggaacacacaggacattacctacatcttgcctttctgatgacaacagttttttctttgtctcctggaacaaaagcaaactatacccgtctgtgggctaacagtacttcttcctgggattcagttattcaaaacaagacaggcagaaaccaaaatgaaaacattaacacaaaccctataactcctgaagtagattataaaggtaattctacaaacatgcctgaaacatctcacatcgtagctttaacttctaaatctgaacaggagctttatataccttctgtcgtcagcaacagtccttcaacagtacagagcattgaaaacacaagcaaaagtcatggtgaaattttcaaaaaggatgtctgtgcggaaaacaacaacaacatggctatgctaatttgcttaattataattgcagtgctttttcttatctgtacctttctatttctatcaactgtggttttggcaaacaaagtctcttctctcagacgatcaaaacaagtaggcaagcgtcagcctagaagcaatggcgattttctggcaagcggtctatggcccgctgaatcagacacttggaaaagaacaaaacagctcacaggacccaacctagtgatgcaatctactggagtgctcacagctacaagggaaagaaaagatgaagaaggaactgaaaaacttactaacaaacagataggttagtgaagaaaaatgcaaagtagcaatgagaaggcttatggagtaaaaatgaagtcagttggtatttaatcccaaagtgttgttctgattatctaaaatttgacatggtagaccttgcaatttagaatcaagcaggtgagacagggagaagtatgcctgcttaattatttaaactgtgtacttttgttttgacactgaatattttaaaaagcaaataataaaataactaagcatttgaggaaaattttaaggataaattgaggaaactgattaatagagatagcaagggataattaaataaatattccctatgtagcaacagtggttagatgatctttgtctgaatgtaattaaactttgaatagttttagtgtgtccttaaagccaagtatatgctttaacatcaaatggaagtcaaattcctaatgcatagatagagagagctaaactgtgtaatttaatggtatcttccttgctggatgtggcagaatccacaccagcttatcaaccaacacagctaattttagaatagatcctttatctttccatatggcacacgtaagaaagtgtttttctactattaatattaaattaaaacctttacttttgtataataaattaaaactcagaataaacctgtgaccacgtatatttgcattcactttattactttagagaacacattgtaaagatcaataagaaatagagcacaactaaaataaataagatttatagccacaccaataggctaagtgtaaacgcaaagtatgtttcactgtttatgattaataatattcatcttttctataaatactacttactggaacattaacaacaagtaccaaaggttgattaatttttggacttcaaggatgccaagtagcctaatgatttattaggggtgtgtgtgtgtgtgtgtgtgtgtgtgtgtgtgtgttcaaatctggaaaactgcatacttcaggttataatttaacctttaaagaaactggcttcaagtaaaataatgacttacatttaagttgagaacccccccatcttcaattaaatatattacaaaaattggtttgagagactttccaaatatctactgaaattaacacagggctaagatcaggccacatttcaaaaatctcatcccttactgggcatttatttcgggcaatatagtaaccattttaaaaatattttttatatgttttttcccaagtatgactacaatcttactctcccttctaagctagtgattcttaccctggctgcatgtcagaatcacctgaagagtttttaaaaaacaccaatgcctaattcccatgtcttccttctgatgcaactggaatggggtgaactctaagcattggtaatttttacgtaactctcaaggtgataactgctcttggtcatcaaattcaaacgtctagctattattaaaatgagaggaaaaaaataaagcatcatttttattatcaatttattagcaatttgtaaaaaacaaatctattctctaaacgagaaatcataacaatattattccagataaagttaagtgttaacaaagtaaaaaggaaagcatgagaatattcatgccagtcatggtgactgaaatcaggttatcttttgaggggaaaaataacccagattagaaatgaaactgggcagacttcccattctgtgcaaaaattgaaaatttgagattgtgcaccagtacatccaggagtaacacaaagcactccttgaatcaagggtcataaataaacacgtgtcagagaaaattaaaagaaattaatatcatcataaaaataggaaattactttcatattcaacatactggtcaaacattttctcaccagagagcttctaccacaaggatatttaaaagaatatttaaaattcacc

SEQ ID NO: 20290 - DNA, 1540 bp, Artificial Sequence
  derived and/or modified sequence
atacagtttgtttatttgggcactgcagtacatctggctgaagacaatcaacagcaggcctattatctgttccgtgattgccaagcatgcccacggacatggaacacacaggacattacctacatcttgcctttctgatgacaacagttttttctttgtctcctggaacaaaagcaaactatacccgtctgtgggctaacagtacttcttcctgggattcagttattcaaaacaagacaggcagaaaccaaaatgaaaacattaacacaaaccctataactcctgaagtagattataaaggtaattctacaaacatgcctgaaacatctcacatcgtagctttaacttctaaatctgaacaggagctttatataccttctgtcgtcagcaacagtccttcaacagtacagagcattgaaaacacaagcaaaagtcatggtgaaattttcaaaaaggatgtctgtgcggaaaacaacaacaacatggctatgctaatttgcttaattataattgcagtgctttttcttatctgtacctttctatttctatcaactgtggttttggcaaacaaagtctcttctctcagacgatcaaaacaagtaggcaagcgtcagcctagaagcaatggcgattttctggcaagcggtctatggcccgctgaatcagacacttggaaaagaacaaaacagctcacaggacccaacctagtgatgcaatctactggagtgctcacagctacaagggaaagaaaagatgaagaaggaactgaaaaacttactaacaaacagataggttagtgaagaaaaatgcaaagtagcaatgagaaggcttatggagtaaaaatgaagtcagttggtatttaatcccaaagtgttgttctgattatctaaaatttgacatggtagaccttgcaatttagaatcaagcaggtgagacagggagaagtatgcctgcttaattatttaaactgtgtacttttgttttgacactgaatattttaaaaagcaaataataaaataactaagcatttgaggaaaattttaaggataaattgaggaaactgattaatagagatagcaagggataattaaataaatattccctatgtagcaacagtggttagatgatctttgtctgaatgtaattaaactttgaatagttttagtgtgtccttaaagccaagtatatgctttaacatcaaatggaagtcaaattcctaatgcatagatagagagagctaaactgtgtaatttaatggtatcttccttgctggatgtggcagaatccacaccagcttatcaaccaacacagctaattttagaatagatcctttatctttccatatggcacacgtaagaaagtgtttttctactattaatattaaattaaaacctttacttttgtataataaattaaaactcagaataaacctgtgaccacgtatatttgcattcactttattactttagagaacacattgtaaagatcaataagaaatagagcacaactaaaataaataagatttatagccacaccaata

SEQ ID NO: 20291 - DNA, 1719 bp, Artificial Sequence
  derived and/or modified sequence
agagaagttggagctttttcgttgtttttttttttttccctcctgtgacatgtgctttagttgcagtggaaaggaaatgtgtcatctgtggtttggttttaaaagtggaaaactagctgcacatatccttttttactgcagatttactttaaggctcatattctccaagtctattctgctttaaaaagaagacaagaaaagaagtggtttatcaaaatcacgttataatcagattttgaccaagcattttgtaagattgccaagcatgcccacggacatggaacacacaggacattacctacatcttgcctttctgatgacaacagttttttctttgtctcctggaacaaaagcaaactatacccgtctgtgggctaacagtacttcttcctgggattcagttattcaaaacaagacaggcagaaaccaaaatgaaaacattaacacaaaccctataactcctgaagtagattataaaggtaattctacaaacatgcctgaaacatctcacatcgtagctttaacttctaaatctgaacaggagctttatataccttctgtcgtcagcaacagtccttcaacagtacagagcattgaaaacacaagcaaaagtcatggtgaaattttcaaaaaggatgtctgtgcggaaaacaacaacaacatggctatgctaatttgcttaattataattgcagtgctttttcttatctgtacctttctatttctatcaactgtggttttggcaaacaaagtctcttctctcagacgatcaaaacaagtaggcaagcgtcagcctagaagcaatggcgattttctggcaagcggtctatggcccgctgaatcagacacttggaaaagaacaaaacagctcacaggacccaacctagtgatgcaatctactggagtgctcacagctacaagggaaagaaaagatgaagaaggaactgaaaaacttactaacaaacagataggttagtgaagaaaaatgcaaagtagcaatgagaaggcttatggagtaaaaatgaagtcagttggtatttaatcccaaagtgttgttctgattatctaaaatttgacatggtagaccttgcaatttagaatcaagcaggtgagacagggagaagtatgcctgcttaattatttaaactgtgtacttttgttttgacactgaatattttaaaaagcaaataataaaataactaagcatttgaggaaaattttaaggataaattgaggaaactgattaatagagatagcaagggataattaaataaatattccctatgtagcaacagtggttagatgatctttgtctgaatgtaattaaactttgaatagttttagtgtgtccttaaagccaagtatatgctttaacatcaaatggaagtcaaattcctaatgcatagatagagagagctaaactgtgtaatttaatggtatcttccttgctggatgtggcagaatccacaccagcttatcaaccaacacagctaattttagaatagatcctttatctttccatatggcacacgtaagaaagtgtttttctactattaatattaaattaaaacctttacttttgtataataaattaaaactcagaataaacctgtgaccacgtatatttgcattcactttattactttagagaacacattgtaaagatcaataagaaatagagcacaactaaaataaataagatttatagccacaccaata

SEQ ID NO: 20292 - protein, 540 aa, Artificial Sequence
  derived and/or modified sequence
MSLLFLAMAPKPKPWVQTEGPEKKKGRQAGREEDPFRSTAEALKAIPAEKRIIRVDPTCPLSSNPGTQVYEDYNCTLNQTNIENNNNKFYIIQLLQDSNRFFTCWNHWGRVGEVGQSKINHFTRLEDAKKDFEKKFREKTKNNWAERDHFVSHPGKYTLIEVQAEDEAQEAVVKVDRGPVRTVTKRVQPCSLDPATQKLITNIFSKEMFKNTMALMDLDVKKMPLGKLSKQQIARGFEALEALEEALKGPTDGGQSLEELSSHFYTVIPHNFGHSQPPPINSPELLQAKKDMLLVLADIELAQALQAVSEQEKTVEEVPHPLDRDYQLLKCQLQLLDSGAPEYKVIQTYLEQTGSNHRCPTLQHIWKVNQEGEEDRFQAHSKLGNRKLLWHGTNMAVVAAILTSGLRIMPHSGGRVGKGIYFASENSKSAGYVIGMKCGAHHVGYMFLGEVALGREHHINTDNPSLKSPPPGFDSVIARGHTEPDPTQDTELELDGQQVVVPQGQPVPCPEFSSSTFSQSEYLIYQESQCRLRYLLEVHL

SEQ ID NO: 20293 - protein, 533 aa, Artificial Sequence
  derived and/or modified sequence
MAPKPKPWVQTEGPEKKKGRQAGREEDPFRSTAEALKAIPAEKRIIRVDPTCPLSSNPGTQVYEDYNCTLNQTNIENNNNKFYIIQLLQDSNRFFTCWNHWGRVGEVGQSKINHFTRLEDAKKDFEKKFREKTKNNWAERDHFVSHPGKYTLIEVQAEDEAQEAVVKVDRGPVRTVTKRVQPCSLDPATQKLITNIFSKEMFKNTMALMDLDVKKMPLGKLSKQQIARGFEALEALEEALKGPTDGGQSLEELSSHFYTVIPHNFGHSQPPPINSPELLQAKKDMLLVLADIELAQALQAVSEQEKTVEEVPHPLDRDYQLLKCQLQLLDSGAPEYKVIQTYLEQTGSNHRCPTLQHIWKVNQEGEEDRFQAHSKLGNRKLLWHGTNMAVVAAILTSGLRIMPHSGGRVGKGIYFASENSKSAGYVIGMKCGAHHVGYMFLGEVALGREHHINTDNPSLKSPPPGFDSVIARGHTEPDPTQDTELELDGQQVVVPQGQPVPCPEFSSSTFSQSEYLIYQESQCRLRYLLEVHL

SEQ ID NO: 20294 - DNA, 1623 bp, Artificial Sequence
  derived and/or modified sequence
atgagcctgctgttcctggccatggcccccaagcccaagccctgggtgcagaccgagggccccgagaagaagaagggcagacaggccggcagagaggaggaccccttcagaagcaccgccgaggccctgaaggccatccccgccgagaagagaatcatcagagtggaccccacctgccccctgagcagcaaccccggcacccaggtgtacgaggactacaactgcaccctgaaccagaccaacatcgagaacaacaacaacaagttctacatcatccagctgctgcaggacagcaacagattcttcacctgctggaaccactggggcagagtgggcgaggtgggccagagcaagatcaaccacttcaccagactggaggacgccaagaaggacttcgagaagaagttcagagagaagaccaagaacaactgggccgagagagaccacttcgtgagccaccccggcaagtacaccctgatcgaggtgcaggccgaggacgaggcccaggaggccgtggtgaaggtggacagaggccccgtgagaaccgtgaccaagagagtgcagccctgcagcctggaccccgccacccagaagctgatcaccaacatcttcagcaaggagatgttcaagaacaccatggccctgatggacctggacgtgaagaagatgcccctgggcaagctgagcaagcagcagatcgccagaggcttcgaggccctggaggccctggaggaggccctgaagggccccaccgacggcggccagagcctggaggagctgagcagccacttctacaccgtgatcccccacaacttcggccacagccagcccccccccatcaacagccccgagctgctgcaggccaagaaggacatgctgctggtgctggccgacatcgagctggcccaggccctgcaggccgtgagcgagcaggagaagaccgtggaggaggtgccccaccccctggacagagactaccagctgctgaagtgccagctgcagctgctggacagcggcgcccccgagtacaaggtgatccagacctacctggagcagaccggcagcaaccacagatgccccaccctgcagcacatctggaaggtgaaccaggagggcgaggaggacagattccaggcccacagcaagctgggcaacagaaagctgctgtggcacggcaccaacatggccgtggtggccgccatcctgaccagcggcctgagaatcatgccccacagcggcggcagagtgggcaagggcatctacttcgccagcgagaacagcaagagcgccggctacgtgatcggcatgaagtgcggcgcccaccacgtgggctacatgttcctgggcgaggtggccctgggcagagagcaccacatcaacaccgacaaccccagcctgaagagccccccccccggcttcgacagcgtgatcgccagaggccacaccgagcccgaccccacccaggacaccgagctggagctggacggccagcaggtggtggtgccccagggccagcccgtgccctgccccgagttcagcagcagcaccttcagccagagcgagtacctgatctaccaggagagccagtgcagactgagatacctgctggaggtgcacctgtag

SEQ ID NO: 20295 - DNA, 1623 bp, Artificial Sequence
  derived and/or modified sequence
atgtcgctccttttccttgcaatggccccaaagccaaaaccttgggtgcagaccgaaggaccagagaagaaaaaaggtagacaggcagggcgggaagaagaccctttccggtccacggctgaagccctgaaagccattccagcagagaaaaggattatacgggtggaccccacttgtcctctgtcctccaaccccggtacgcaggtgtacgaggactacaattgcacccttaatcagaccaacattgaaaataacaacaataagttctacataatccaactcctgcaggacagtaatcgtttttttacctgttggaaccattggggacgggtcggtgaagtgggccagtctaaaataaatcatttcacaagactggaggatgcaaagaaggatttcgagaagaagtttagagagaagacaaaaaacaattgggccgagcgggatcatttcgtcagtcatcccggtaagtacacgttaatcgaagtccaggcagaagatgaagctcaggaagccgtagtcaaggttgaccgggggccagtgcggacggtcacgaagagggtgcagccatgctccttagaccctgccacccagaagcttattacaaacattttttctaaagaaatgttcaaaaataccatggccttaatggacctggacgtgaaaaagatgccgcttgggaagctgtctaaacagcagattgcgcgtggatttgaagccctggaggctctggaggaggctttgaaagggccaacagatggcggccagtccctggaagagctgtcatcacacttttataccgtgattccccacaactttggtcacagccaacctcctcctatcaacagccctgaactgcttcaggcgaagaaggacatgcttttagtgcttgcggatatcgagctggcccaggccctgcaagccgtttctgagcaagagaagacggtggaggaggtcccacacccgctcgatagagactatcagcttctgaaatgccagcttcagctgttggactctggcgcgccggagtataaggttatccagacctacctggagcagacagggtctaatcaccggtgcccaactctgcaacatatttggaaagtcaaccaggagggtgaagaagacaggtttcaggcgcactcgaagctcggcaacagaaaactcttgtggcatggtactaatatggccgtggtggcagcaatcctcacttccgggctaaggattatgcctcacagtggtgggagggttggcaagggcatttactttgcatctgaaaacagtaaatcggctggctatgttattggcatgaagtgcggcgcacatcatgttgggtacatgttccttggcgaggttgccttagggcgcgaacaccatatcaacaccgataacccctccctcaaaagtccaccaccaggttttgactcagtcatcgccaggggacacactgagccagatccgacgcaggacacagagcttgagctggatggccagcaggtagtggtgccacaggggcagcctgtcccatgcccagagttcagctcttcaacattttcccaatccgagtatctgatctatcaggagtcccagtgtaggctccggtacctgctggaggtgcatctctag

SEQ ID NO: 20296 - DNA, 1623 bp, Artificial Sequence
  derived and/or modified sequence
atgagcctgctcttcctggccatggcccccaagcccaagccctgggtgcagacagagggccctgagaagaagaagggccggcaggccggccgggaggaggaccccttccgcagcacagctgaggccctgaaggccatcccagctgagaagaggatcatccgggtggaccccacctgccccctgagcagcaaccctggcacccaggtgtatgaggactacaactgcaccctgaaccagaccaacatcgagaacaacaacaacaagttctacatcatccagctgctgcaggacagcaaccgcttcttcacctgctggaaccactggggccgggtgggggaggtgggccagagcaagatcaaccacttcacccggctggaggatgccaagaaggactttgagaagaagttccgggagaagaccaagaacaactgggccgagcgggaccactttgtgagccaccctgggaagtacaccctcatcgaggtgcaggctgaagatgaggcccaggaggccgtggtgaaggtggaccggggccctgtgaggacagtgaccaagagggtgcagccctgcagcctggaccctgccacccagaagctgatcaccaacatcttcagcaaggagatgttcaagaacaccatggccctgatggacctggatgtgaagaagatgcccctgggcaagctgagcaagcagcagatcgcccggggctttgaggccctggaggccctggaggaggccctgaagggccccacagatggcggccagagcctggaggagctgagcagccacttctacaccgtcatcccccacaactttggccacagccagcccccacccatcaacagccctgagctgctgcaggccaagaaggacatgctgctggtgctggccgacatcgagctggcccaggccctgcaggccgtgtctgagcaggagaagacagtggaggaggtgccccaccccctggaccgggactaccagctgctgaagtgccagctgcagctgctggacagcggggcccctgagtacaaggtgatccagacctacctggagcagacaggcagcaaccaccgctgccccaccctgcagcacatctggaaggtgaaccaggagggggaggaggaccgcttccaggcccacagcaagctgggcaacaggaagctgctgtggcacggcaccaacatggctgtggtggccgccatcctgaccagcggcctgcgcatcatgccccacagcggcggccgggtgggcaagggcatctactttgccagcgagaacagcaagtctgctggctacgtgattggcatgaagtgtggggcccaccacgtgggctacatgttcctgggggaggtggccctgggccgggagcaccacatcaacacagacaaccccagcctgaagagccccccacctggctttgattctgtgattgcccggggccacacagagccagaccccacccaggacacagagctggagctggatggccagcaggtggtggtgccccagggccagcctgtgccctgcccagagttcagcagcagcaccttcagccagagcgagtacctgatctaccaggagagccagtgccgcctgcgctacctgctggaggtgcacctgtag

SEQ ID NO: 20297 - DNA, 1623 bp, Artificial Sequence
  derived and/or modified sequence
atgagcctgctgttcctggccatggcccccaagcccaagccctgggtgcagaccgaggggcccgaaaaaaaaaaagggcgccaggctgggagagaagaggacccgtttagatcaactgctgaagcactcaaggcaatccctgctgaaaagagaatcattagagtcgatccaacttgcccgctgtcatctaatccaggcacacaggtgtacgaggattacaactgcacactgaatcaaactaatattgagaacaacaacaataagttctacataatacagctactccaggactccaatcgattcttcacatgctggaaccactgggggcgtgtgggagaggtcggccaatcgaaaattaatcactttactaggctcgaagacgctaagaaggatttcgagaagaagtttagagaaaaaaccaaaaataattgggcagaacgcgatcactttgtttcccatcctggtaagtatacactgattgaagtccaggctgaggacgaggcccaagaggctgtcgtgaaggtcgataggggacccgtaaggacagtaacgaaaagggtccagccctgttctctggatcccgcaacacagaagttaattacgaatatattttctaaggagatgttcaaaaacactatggcactgatggacttagacgtcaagaagatgcccttagggaagctctccaagcagcagattgcccgggggtttgaggcattggaagctctggaggaagctctgaaagggcccacagatggaggtcagtcactggaagaacttagctcacacttctacaccgtcatcccgcacaacttcggccacagccagcccccacccatcaactcgccggagctgctgcaggcaaaaaaggacatgctgttagttctagccgatatcgaattagctcaggccctgcaggccgtgagcgagcaggaaaagacagttgaggaggtccctcacccgctggaccgagactatcagctcctgaagtgccagctccaactgttggatagcggcgccccagagtacaaagtgatccagacttacctggaacagaccggtagcaatcacaggtgtcctaccttgcaacatatttggaaggtgaaccaagagggggaagaagaccggtttcaggctcacagcaagcttgggaatcgtaaattgttatggcatggtaccaacatggcagtggtggccgctatcctgacctccggattacggatcatgccgcattctggcggcagagtggggaaaggcatctacttcgcttccgaaaactccaagtccgccgggtatgttattggtatgaaatgtggagcgcatcacgttggatacatgtttcttggcgaggtggcactcggacgtgagcaccatattaataccgacaatccatctcttaaatcccccccgccagggttcgattctgtgatcgcccgggggcatacggagcccgatcccacccaagacacggagctcgaactggatggccagcaggtggtcgtccctcagggccagccggtgccatgtccggagttctcctccagcaccttcagtcagagcgaatacttaatctatcaggagagtcaatgccgcctgcggtatttgctcgaggtgcatctttag

SEQ ID NO: 20298 - DNA, 1623 bp, Artificial Sequence
  derived and/or modified sequence
atgtcgctgttgttccttgccatggccccaaaacccaagccatgggtgcagacagagggaccagagaaaaagaaaggacgccaggccggtagagaagaggacccttttcgctcaacagccgaggctctgaaagctattcccgctgaaaaaaggattataagggtggacccaacatgtcccttgtccagtaacccagggacccaagtctacgaggactacaactgtactctgaatcagaccaatattgaaaacaataataacaagttctatataatccagctcctgcaagacagtaacagatttttcacttgctggaatcactgggggagagtcggggaggttggacaaagcaaaataaaccactttaccaggcttgaggacgctaagaaagactttgaaaaaaagtttcgcgagaaaaccaagaacaactgggccgaacgggaccactttgtgtcccaccccggtaagtatacactaatcgaggtacaggcagaggacgaagcacaagaagccgtggtgaaggtggatcgtggtcccgttagaactgtcaccaaaagagtccagccatgttccttggaccccgctacccagaaactgatcaccaatatcttttctaaagaaatgttcaaaaacacaatggctttaatggacctggatgtgaaaaaaatgccgctaggtaagctgtccaaacaacagattgcacgcggtttcgaagctctagaagctttggaagaggctctcaaggggccaacagatgggggacagagcctcgaggagctgagctcccacttctatacagtgatccctcacaattttggacatagtcaacctccaccgattaactcgccagagctcctacaggctaagaaggacatgctgctggtgctagctgacattgagctcgctcaggcactccaggctgtgtccgagcaggagaaaacagttgaggaagtgccacaccccttagatcgcgactaccagttactgaagtgtcagctacagcttctagattcaggagccccagaatacaaggttatccaaacatacttagagcagaccggttcaaaccaccgatgcccaaccctgcagcatatttggaaggttaaccaggagggagaggaagatagatttcaggcccactctaagctgggaaaccgcaagctcctgtggcacggcacaaatatggctgtggtggcagccattttgacttcaggcctccggatcatgccacatagcggcggaagagtcggaaagggcatttatttcgccagtgagaactcaaagtccgcgggttacgttattggaatgaagtgtggagcccatcacgtgggctacatgttcctgggcgaagtggcccttgggcgagagcaccacattaacacagacaacccaagtctgaaatcacctcctccaggattcgacagtgttatcgcaaggggccacaccgaacccgacccaacccaggataccgagctcgagttggatggccagcaggttgtagttcctcaggggcaacctgtaccatgtcccgagttctcttctagcaccttcagtcagtcagaatatcttatctaccaggagagtcaatgtaggctgagatacctgttagaagtccacctttag

SEQ ID NO: 20299 - DNA, 2336 bp, Artificial Sequence
  derived and/or modified sequence
ggtcaccgcgcgaccggcagatgcgtgctgcaggccccggccacatgagcagcgctacggacgcgactgccccggccttggatatgccagatcgagtgtccacccgtccgtgggactggtcgcctgactcggcctgccccagcctctgcttcaccccactggtggccaaatagccgatgtctaatcccccacacaagctcatccccggcctctggcgattgttgggaattctctccctaattcacgcctgaggctcatggagagttgctagacctgggactgccctgggaggcgcacacaaccaggccgggtggcagccaggacctctcccatgtccctgcttttcttggccatggctccaaagccgaagccctgggtacagactgagggccctgagaagaagaagggccggcaggcaggaagggaggaggaccccttccgctccaccgctgaggccctcaaggccatacccgcagagaagcgcataatccgcgtggatccaacatgtccactcagcagcaaccccgggacccaggtgtatgaggactacaactgcaccctgaaccagaccaacatcgagaacaacaacaacaagttctacatcatccagctgctccaagacagcaaccgcttcttcacctgctggaaccactggggccgtgtgggagaggtcggccagtcaaagatcaaccacttcacaaggctagaagatgcaaagaaggactttgagaagaaatttcgggaaaagaccaagaacaactgggcagagcgggaccactttgtgtctcacccgggcaagtacacacttatcgaagtacaggcagaggatgaggcccaggaagctgtggtgaaggtggacagaggcccagtgaggactgtgactaagcgggtgcagccctgctccctggacccagccacgcagaagctcatcactaacatcttcagcaaggagatgttcaagaacaccatggccctcatggacctggatgtgaagaagatgcccctgggaaagctgagcaagcaacagattgcacggggtttcgaggccttggaggcgctggaggaggccctgaaaggccccacggatggtggccaaagcctggaggagctgtcctcacacttttacaccgtcatcccgcacaacttcggccacagccagcccccgcccatcaattcccctgagcttctgcaggccaagaaggacatgctgctggtgctggcggacatcgagctggcccaggccctgcaggcagtctctgagcaggagaagacggtggaggaggtgccacaccccctggaccgagactaccagcttctcaagtgccagctgcagctgctagactctggagcacctgagtacaaggtgatacagacctacttagaacagactggcagcaaccacaggtgccctacacttcaacacatctggaaagtaaaccaagaaggggaggaagacagattccaggcccactccaaactgggtaatcggaagctgctgtggcatggcaccaacatggccgtggtggccgccatcctcactagtgggctccgcatcatgccacattctggtgggcgtgttggcaagggcatctactttgcctcagagaacagcaagtcagctggatatgttattggcatgaagtgtggggcccaccatgtcggctacatgttcctgggtgaggtggccctgggcagagagcaccatatcaacacggacaaccccagcttgaagagcccacctcctggcttcgacagtgtcattgcccgaggccacaccgagcctgatccgacccaggacactgagttggagctggatggccagcaagtggtggtgccccagggccagcctgtgccctgcccagagttcagcagctccacattctcccagagcgagtacctcatctaccaggagagccagtgtcgcctgcgctacctgctggaggtccacctctgagtgcccgccctgtcccccggggtcctgcaaggctggactgtgatcttcaatcatcctgcccatctctggtacccctatatcactcctttttttcaagaatacaatacgttgttgttaactatagtcaccatgctgtacaagatccctgaacttatgcctcctaactgaaattttgtattctttgacacatctgcccagtccctctcctcccagcccatggtaaccagcatttgactctttacttgtataagggcagcttttataggttccacatgtaagtgagatcatgcagtgtttgtctttctgtgcctggcttatttcactcagcataatgtgcaccgggttcacccatgttttcataaatgacaagatttcctccttt

SEQ ID NO: 20300 - DNA, 2472 bp, Artificial Sequence
  derived and/or modified sequence
gtatccgggcccaaggtcaccgcgcgaccggcagatgcgtgctgcaggccccggccacatgagcagcgctacggacgcgactgccccggccttggatatgccagatcgagtgtccacccgtccgtgggactggtcgcctgactcggcctgccccagcctctgcttcaccccactggtggccaaatagccgatgtctaatcccccacacaagctcatccccggcctctggcgattgttgggaattctctccctaattcacgcctgaggctcatggagagttgctagacctgggactgccctgggaggcgcacacaaccaggccgggtggcagccaggacctctcccatgtccctgcttttcttggctcggtgactcggcccggcaaccatgccagggctgaactagctgacacagggggaggagccccgaagtggaagagagagagcctcctttcactttccctacccctcaggacacacaggacagccatggctccaaagccgaagccctgggtacagactgagggccctgagaagaagaagggccggcaggcaggaagggaggaggaccccttccgctccaccgctgaggccctcaaggccatacccgcagagaagcgcataatccgcgtggatccaacatgtccactcagcagcaaccccgggacccaggtgtatgaggactacaactgcaccctgaaccagaccaacatcgagaacaacaacaacaagttctacatcatccagctgctccaagacagcaaccgcttcttcacctgctggaaccactggggccgtgtgggagaggtcggccagtcaaagatcaaccacttcacaaggctagaagatgcaaagaaggactttgagaagaaatttcgggaaaagaccaagaacaactgggcagagcgggaccactttgtgtctcacccgggcaagtacacacttatcgaagtacaggcagaggatgaggcccaggaagctgtggtgaaggtggacagaggcccagtgaggactgtgactaagcgggtgcagccctgctccctggacccagccacgcagaagctcatcactaacatcttcagcaaggagatgttcaagaacaccatggccctcatggacctggatgtgaagaagatgcccctgggaaagctgagcaagcaacagattgcacggggtttcgaggccttggaggcgctggaggaggccctgaaaggccccacggatggtggccaaagcctggaggagctgtcctcacacttttacaccgtcatcccgcacaacttcggccacagccagcccccgcccatcaattcccctgagcttctgcaggccaagaaggacatgctgctggtgctggcggacatcgagctggcccaggccctgcaggcagtctctgagcaggagaagacggtggaggaggtgccacaccccctggaccgagactaccagcttctcaagtgccagctgcagctgctagactctggagcacctgagtacaaggtgatacagacctacttagaacagactggcagcaaccacaggtgccctacacttcaacacatctggaaagtaaaccaagaaggggaggaagacagattccaggcccactccaaactgggtaatcggaagctgctgtggcatggcaccaacatggccgtggtggccgccatcctcactagtgggctccgcatcatgccacattctggtgggcgtgttggcaagggcatctactttgcctcagagaacagcaagtcagctggatatgttattggcatgaagtgtggggcccaccatgtcggctacatgttcctgggtgaggtggccctgggcagagagcaccatatcaacacggacaaccccagcttgaagagcccacctcctggcttcgacagtgtcattgcccgaggccacaccgagcctgatccgacccaggacactgagttggagctggatggccagcaagtggtggtgccccagggccagcctgtgccctgcccagagttcagcagctccacattctcccagagcgagtacctcatctaccaggagagccagtgtcgcctgcgctacctgctggaggtccacctctgagtgcccgccctgtcccccggggtcctgcaaggctggactgtgatcttcaatcatcctgcccatctctggtacccctatatcactcctttttttcaagaatacaatacgttgttgttaactatagtcaccatgctgtacaagatccctgaacttatgcctcctaactgaaattttgtattctttgacacatctgcccagtccctctcctcccagcccatggtaaccagcatttgactctttacttgtataagggcagcttttataggttccacatgtaagtgagatcatgcagtgtttgtctttctgtgcctggcttatttcactcagcataatgtgcaccgggttcacccatgttttcataaatgacaagatttcctccttt

SEQ ID NO: 20301 - DNA, 2360 bp, Artificial Sequence
  derived and/or modified sequence
gtatccgggcccaaggtcaccgcgcgaccggcagatgcgtgctgcaggccccggccacatgagcagcgctacggacgcgactgccccggccttggatatgccagatcgagtgtccacccgtccgtgggactggtcgcctgactcggcctgccccagcctctgcttcaccccactggtggccaaatagccgatgtctaatcccccacacaagctcatccccggcctctggcgattgttgggaattctctccctaattcacgcctgaggctcatggagagttgctagacctgggactgccctgggaggcgcacacaaccaggccgggtggcagccaggacctctcccatgtccctgcttttcttgggacagccatggctccaaagccgaagccctgggtacagactgagggccctgagaagaagaagggccggcaggcaggaagggaggaggaccccttccgctccaccgctgaggccctcaaggccatacccgcagagaagcgcataatccgcgtggatccaacatgtccactcagcagcaaccccgggacccaggtgtatgaggactacaactgcaccctgaaccagaccaacatcgagaacaacaacaacaagttctacatcatccagctgctccaagacagcaaccgcttcttcacctgctggaaccactggggccgtgtgggagaggtcggccagtcaaagatcaaccacttcacaaggctagaagatgcaaagaaggactttgagaagaaatttcgggaaaagaccaagaacaactgggcagagcgggaccactttgtgtctcacccgggcaagtacacacttatcgaagtacaggcagaggatgaggcccaggaagctgtggtgaaggtggacagaggcccagtgaggactgtgactaagcgggtgcagccctgctccctggacccagccacgcagaagctcatcactaacatcttcagcaaggagatgttcaagaacaccatggccctcatggacctggatgtgaagaagatgcccctgggaaagctgagcaagcaacagattgcacggggtttcgaggccttggaggcgctggaggaggccctgaaaggccccacggatggtggccaaagcctggaggagctgtcctcacacttttacaccgtcatcccgcacaacttcggccacagccagcccccgcccatcaattcccctgagcttctgcaggccaagaaggacatgctgctggtgctggcggacatcgagctggcccaggccctgcaggcagtctctgagcaggagaagacggtggaggaggtgccacaccccctggaccgagactaccagcttctcaagtgccagctgcagctgctagactctggagcacctgagtacaaggtgatacagacctacttagaacagactggcagcaaccacaggtgccctacacttcaacacatctggaaagtaaaccaagaaggggaggaagacagattccaggcccactccaaactgggtaatcggaagctgctgtggcatggcaccaacatggccgtggtggccgccatcctcactagtgggctccgcatcatgccacattctggtgggcgtgttggcaagggcatctactttgcctcagagaacagcaagtcagctggatatgttattggcatgaagtgtggggcccaccatgtcggctacatgttcctgggtgaggtggccctgggcagagagcaccatatcaacacggacaaccccagcttgaagagcccacctcctggcttcgacagtgtcattgcccgaggccacaccgagcctgatccgacccaggacactgagttggagctggatggccagcaagtggtggtgccccagggccagcctgtgccctgcccagagttcagcagctccacattctcccagagcgagtacctcatctaccaggagagccagtgtcgcctgcgctacctgctggaggtccacctctgagtgcccgccctgtcccccggggtcctgcaaggctggactgtgatcttcaatcatcctgcccatctctggtacccctatatcactcctttttttcaagaatacaatacgttgttgttaactatagtcaccatgctgtacaagatccctgaacttatgcctcctaactgaaattttgtattctttgacacatctgcccagtccctctcctcccagcccatggtaaccagcatttgactctttacttgtataagggcagcttttataggttccacatgtaagtgagatcatgcagtgtttgtctttctgtgcctggcttatttcactcagcataatgtgcaccgggttcacccatgttttcataaatgacaagatttcctccttttttaa

SEQ ID NO: 20302 - DNA, 1040 bp, Artificial Sequence
  derived and/or modified sequence
ggagaccatggaggcctaagggcctctctgtgccccaggacagccatggctccaaagccgaagccctgggtacagactgagggccctgagaagaagaagggccggcaggcaggaagggaggaggaccccttccgctccaccgctgaggccctcaaggccatacccgcagagaagcgcataatccgcgtggatccaacatgtccactcagcagcaaccccgggacccaggtgtatgaggactacaactgcaccctgaaccagaccaacatcgagaacaacaacaacaagttctacatcatccagctgctccaagacagcaaccgcttcttcacctgctggaaccactggggccgtgtgggagaggtcggccagtcaaagatcaaccacttcacaaggctagaagatgcaaagaaggactttgagaagaaatttcgggaaaagaccaagaacaactgggcagagcgggaccactttgtgtctcacccgggcaagtacacacttatcgaagtacaggcagaggatgaggcccaggaagctgtggtgaaggtggacagaggcccagtgaggactgtgactaagcgggtgcagccctgctccctggacccagccacgcagaagctcatcactaacatcttcagcaaggagatgttcaagaacaccatggccctcatggacctggatgtgaagaagatgcccctgggaaagctgagcaagcaacagattgcacggggtttcgaggccttggaggcgctggaggaggccctgaaaggccccacggatggtggccaaagcctggaggagctgtcctcacacttttacaccgtcatcccgcacaacttcggccacagccagcccccgcccatcaattcccctgagcttctgcaggccaagaaggacatgctgctggtgctggcggacatcgagctggcccaggccctgcaggcagtctctgagcaggagaagacggtggaggaggtgccacaccccctggaccgagactaccagcttctcaagtgccagctgcagctgctagactctgg

SEQ ID NO: 20303 - protein, 141 aa, Artificial Sequence
  derived and/or modified sequence
MLSAQERAQIAQVWDLIAGHEAQFGAELLLRLFTVYPSTKVYFPHLSACQDATQLLSHGQRMLAAVGAAVQHVDNLRAALSPLADLHALVLRVDPANFPLLIQCFHVVLASHLQDEFTVQMQAAWDKFLTGVAVVLTEKYR

SEQ ID NO: 20304 - DNA, 426 bp, Artificial Sequence
  derived and/or modified sequence
atgctatccgctcaagaaagagctcagattgcgcaggtatgggatttaattgctggccatgaagcccagtttggcgccgagctgctcttacgactgtttactgtgtatcccagcaccaaggtttatttcccccacctttcagcatgtcaggacgccacccaactgttgagtcacggacagagaatgctggccgcggtgggcgcagctgtccagcatgttgataatctcagggctgcactctcccctcttgcagatctgcatgcactggtgctgagagtcgatcctgcaaactttccccttctgatacagtgtttccacgtggtgttggcctcccatctacaggatgaattcaccgtgcagatgcaagctgcatgggataaattcctgacaggcgttgccgtcgtgctcacagagaaataccggtag

SEQ ID NO: 20305 - DNA, 506 bp, Artificial Sequence
  derived and/or modified sequence
agagcacgtcaggcggcgccatgctcagcgcccaggagcgcgcccaaatcgcgcaggtctgggacctgattgcgggccacgaggcgcaattcggggcggagctgctgctcaggctcttcacggtgtaccccagcaccaaggtctacttcccgcacctgagcgcctgccaggacgcgacgcagctgctgagccacgggcagcgcatgctggcggctgtgggcgcggcggtgcagcacgtggacaacctgcgcgccgcgctgagcccgctggcggacctgcacgcgctcgtgctgcgcgtggacccagccaactttccgctgctaatccagtgtttccacgtcgtgctggcctcccacctgcaggacgagttcaccgtgcaaatgcaagcggcgtgggacaagttcctgactggtgtggccgtggtgctgaccgaaaaataccgctgagccctgtgctgcgcaggccttggtctgtgcctgtcaataaacagaggcccgaaccatctg

SEQ ID NO: 20306 - DNA, 426 bp, Artificial Sequence
  derived and/or modified sequence
atgctgagcgcccaggagcgggcccagatcgcccaggtgtgggacctgattgctggccacgaggcccagtttggagctgagctgctgctgcggctcttcaccgtgtaccccagcaccaaggtgtacttcccccacctgagcgcctgccaggatgccacccagctgctgagccacggccagaggatgctggccgctgtgggcgctgctgtgcagcacgtggacaacctgcgggccgccctgagccccctggccgacctgcacgccctggtgctgcgggtggaccctgccaacttccccctgctgatccagtgcttccacgtggtgctggccagccacctgcaggatgagttcaccgtgcagatgcaggccgcctgggacaagttcctgactggagtggccgtggtgctgacagagaagtacagatag

SEQ ID NO: 20307 - DNA, 426 bp, Artificial Sequence
  derived and/or modified sequence
atgctgagcgcccaggagcgggcccagatcgcccaggtgtgggacctgatcgctgggcatgaagcccagttcggagcggagttgctcctgcggttgttcaccgtttacccatccactaaagtctactttccccacctgagtgcctgtcaggacgcgacccagcttctttctcatggacagcgcatgttggccgcggtaggagccgctgtccagcacgtagataatctgagggctgcactctcccccctggcggacctgcacgcactagtactgcgcgtagacccagccaacttccccctgctaattcaatgttttcacgttgtcctggcatcccatctccaagacgagtttaccgtgcagatgcaagccgcttgggacaaattcctgacgggggtcgctgtggtgttgacagaaaaatatcgatag

SEQ ID NO: 20308 - DNA, 426 bp, Artificial Sequence
  derived and/or modified sequence
atgttgtcagctcaggagcgcgctcagatagcccaggtctgggatctgatagcgggacacgaagcacagtttggcgcagaactgctcctgagattattcaccgtctatccttcaaccaaagtttacttccctcatctgtctgcttgtcaggatgcaacccagttgctgtcgcatgggcagcgtatgctggctgccgtgggggcagcggtgcagcacgtggacaacttgcgagctgccttgtcaccactggccgatttacacgcactggtcctacgcgtggaccccgctaacttccccttactgattcagtgcttccacgtggtgctggctagccatttgcaggatgaattcactgtgcagatgcaagccgcttgggacaagtttctgacgggggtcgccgtggtgctgaccgaaaaataccggtag

SEQ ID NO: 20309 - DNA, 426 bp, Artificial Sequence
  derived and/or modified sequence
atgctgagcgcccaggagagagcccagatcgcccaggtgtgggacctgatcgccggccacgaggcccagttcggcgccgagctgctgctgagactgttcaccgtgtaccccagcaccaaggtgtacttcccccacctgagcgcctgccaggacgccacccagctgctgagccacggccagagaatgctggccgccgtgggcgccgccgtgcagcacgtggacaacctgagagccgccctgagccccctggccgacctgcacgccctggtgctgagagtggaccccgccaacttccccctgctgatccagtgcttccacgtggtgctggccagccacctgcaggacgagttcaccgtgcagatgcaggccgcctgggacaagttcctgaccggcgtggccgtggtgctgaccgagaagtacagatag

SEQ ID NO: 20310 - protein, 211 aa, Artificial Sequence
  derived and/or modified sequence
MFHLRTCAAKLRPLTASQTVKTFSQNRPAAARTFQQIRCYSAPVAAEPFLSGTSSNYVEEMYCAWLENPKSVHKSWDIFFRNTNAGAPPGTAYQSPLPLSRGSLAAVAHAQSLVEAQPNVDKLVEDHLAVQSLIRAYQIRGHHVAQLDPLGILDADLDSSVPADIISSTDKLGFYGLDESDLDKVFHLPTTTFIGGQESALPLREIIRRLE

SEQ ID NO: 20311 - protein, 427 aa, Artificial Sequence
  derived and/or modified sequence
MFHLRTCAAKLRPLTASQTVKTFSQNRPAAARTFQQIRCYSAPVAAEPFLSGTSSNYVEEMYCAWLENPKSVHKSWDIFFRNTNAGAPPGTAYQSPLPLSRGSLAAVAHAQSLVEAQPNVDKLVEDHLAVQSLIRAYQIRGHHVAQLDPLGILDADLDSSVPADIISSTDKLGFYGLDESDLDKVFHLPTTTFIGGQESALPLREIIRRLEMAYCQHIGVEFMFINDLEQCQWIRQKFETPGIMQFTNEEKRTLLARLVRSTRFEEFLQRKWSSEKRFGLEGCEVLIPALKTIIDKSSENGVDYVIMGMPHRGRLNVLANVIRKELEQIFCQFDSKLEAADEGSGDVKYHLGMYHRRINRVTDRNITLSLVANPSHLEAADPVVMGKTKAEQFYCGDTEGKKVRPRERRARQIVKAPCSSMEFRSPT

SEQ ID NO: 20312 - DNA, 636 bp, Artificial Sequence
  derived and/or modified sequence
atgtttcatctgagaacctgtgccgcaaagctgaggccactgaccgcttcccaaactgtgaagactttctcccaaaaccgccctgccgctgcccgcactttccaacagatcagatgttactccgcccccgtcgctgctgagccgttcctttcggggacatcaagcaactacgtggaagagatgtactgtgcgtggctggagaatcccaagtccgtacacaaatcctgggacatttttttcaggaacactaacgctggggcacctcccggtacagcatatcaatctccactacctctgagccgagggtcactggccgccgttgcacacgcccagtccctggtcgaggcacagccgaacgtggacaaattagtggaggaccacctggcagtacaatcacttatcagagcctaccaaatcagagggcatcacgtagcacagctggacccactggggattctggatgctgacctggattcgagtgtccccgcagacatcatttcttcaacagataaactggggttctatggcctcgatgaatccgacctcgataaggtttttcatcttcccacaaccacattcatcggcggtcaagagagcgctttaccactgcgcgagattatccggcgcctcgaatag

SEQ ID NO: 20313 - DNA, 1284 bp, Artificial Sequence
  derived and/or modified sequence
atgttccacctgaggacatgcgcagccaaactaaggcccctgacagccagccagacagttaagaccttctctcaaaacaggcccgcggcagccagaacctttcagcagatccgctgctattctgcacccgtggcagccgaacctttcctctccggaacctctagtaattatgtggaagagatgtattgcgcctggctggagaatcctaaatccgtccacaagtcctgggatatctttttccgcaacaccaatgcaggtgcacccccgggtaccgcctaccaaagcccactgcccctctctcgcgggagcttggccgcagttgcccacgcgcagagcctcgtcgaagcacagcctaacgttgacaagttagttgaggaccaccttgccgtgcaaagtctcattagggcctaccagattagaggccaccatgtggcccagctcgaccctttgggcattttggatgcagacctggactctagtgtccctgcggacatcatctcatccactgataagcttggcttctatgggctcgacgagtcagatctcgacaaagtctttcacttgcctacaaccacatttatcggtgggcaggagtcagctctccccctgagggagatcatcagaaggctggaaatggcatattgtcaacacatcggagttgagttcatgtttatcaatgacttggagcagtgccagtggatccggcagaagttcgagaccccaggcattatgcagtttacaaatgaggagaagagaacactgctggctcgtctggtgcgcagtaccaggtttgaagagtttttacagagaaagtggtcatctgaaaagcgcttcgggttggagggttgcgaggtgttgatcccagccttaaaaacaatcatcgacaaatctagcgagaatggagtggattatgtcattatgggtatgccccacagagggagactaaacgtgcttgctaatgttatcagaaaggagctggagcagatcttttgtcagtttgacagcaaactggaggccgctgacgaaggttccggggatgtgaaataccacctgggtatgtatcatagaaggattaatcgagtgaccgatcgtaatattacgctgagcctggtggctaacccttctcatttagaagccgctgaccctgtagtcatgggtaagactaaggccgaacagttttattgtggcgacaccgagggtaagaaagtgagaccccgcgagcgacgggcgcgccaaatagtgaaagcaccctgctcctcaatggaatttcgcagccctacctag

SEQ ID NO: 20314 - DNA, 636 bp, Artificial Sequence
  derived and/or modified sequence
atgttccacctgcggacctgtgccgccaagctgcggcccctgacagccagccagacagtgaagaccttcagccagaacagacctgctgctgcccggaccttccagcagatccgctgctacagcgcccctgtggccgctgagcccttcctgagcggcaccagcagcaactacgtggaggagatgtactgtgcctggctggagaaccccaagtctgtgcacaagtcctgggacatcttcttcaggaacaccaatgctggggcccctcctggaacagcctaccagagccccctgcccctgagccggggcagcctggccgctgtggcccacgcccagagcctggtggaggcccagcccaacgtggacaagctggtggaggaccacctggccgtgcagagcctcatccgggcctaccagatccggggccaccacgtggcccagctggaccccctgggcatcctggatgctgacctggacagctctgtgcctgctgacatcatcagcagcacagacaagctgggcttctacggcctggatgaaagtgacctggacaaggtgttccacctgcccaccaccaccttcatcggcggccaggagagcgccctgcccctgcgggagatcatccggcggctggagtag

SEQ ID NO: 20315 - DNA, 1284 bp, Artificial Sequence
  derived and/or modified sequence
atgttccacctgcggacctgtgccgccaagctgcggcccctgacagccagccagacagtgaagaccttcagccagaacagacctgctgctgcccggaccttccagcagatccgctgctacagcgcccctgtggccgctgagcccttcctgagcggcaccagcagcaactacgtggaggagatgtactgtgcctggctggagaaccccaagtctgtgcacaagtcctgggacatcttcttcaggaacaccaatgctggggcccctcctggaacagcctaccagagccccctgcccctgagccggggcagcctggccgctgtggcccacgcccagagcctggtggaggcccagcccaacgtggacaagctggtggaggaccacctggccgtgcagagcctcatccgggcctaccagatccggggccaccacgtggcccagctggaccccctgggcatcctggatgctgacctggacagctctgtgcctgctgacatcatcagcagcacagacaagctgggcttctacggcctggatgaaagtgacctggacaaggtgttccacctgcccaccaccaccttcatcggcggccaggagagcgccctgcccctgcgggagatcatccggcggctggagatggcctactgccagcacatcggcgtggagttcatgttcatcaatgacctggagcagtgccagtggatccggcagaagtttgagaccccaggcatcatgcagttcaccaatgaggagaagaggaccctgctggcccggctggtgcgcagcaccaggtttgaggagttcctgcagaggaagtggagcagcgagaagcgcttcggcctggagggctgtgaggtgctgatcccagccctgaagaccatcatcgacaagagcagtgaaaatggagtggactatgtgatcatgggcatgccccaccggggccgcctgaatgtgctggccaacgtcatcaggaaggagctggagcagatcttctgccagtttgacagcaagctggaggccgcagatgagggcagcggagatgtgaagtaccacctgggcatgtaccaccggcgcatcaacagagtgacagacaggaacatcaccctgagcctggtggccaaccccagccacctggaggccgctgaccctgtggtgatgggcaagaccaaggccgagcagttctactgtggggacacagagggcaagaaggtgcggccccgggagcggcgggcccggcagatcgtgaaggccccctgcagctccatggagttccgcagccccacctag

SEQ ID NO: 20316 - DNA, 636 bp, Artificial Sequence
  derived and/or modified sequence
atgttccacctgcggacctgcgccgccaagctgcggcccctgaccgccagccagactgtgaaaacattttcgcagaaccgccccgccgcggcgaggacattccagcaaattcgttgctacagtgctcctgtggcagccgaaccattcctgagtggaacctctagcaattatgtcgaagagatgtactgtgcttggctcgaaaatcctaagtccgtccataagagttgggacatcttctttcgcaatacaaatgccggagctcccccaggaaccgcttaccagtctccattacccctctctcgaggaagcctggcagcagtagctcacgcacaatctctggtagaagcacaaccaaacgtcgataagctggtggaggatcacttagccgtacagtctctgatcagagcttaccagattagaggtcaccatgtagcccaactcgatccactgggcatactcgacgccgatttggacagcagtgtgccggccgacataatctcatcaacggacaaactgggcttctatggactcgacgagtccgatcttgataaagtctttcacctgccgaccacgaccttcattgggggacaagaaagtgccctaccccttcgggagattattcgccgtctggaatag

SEQ ID NO: 20317 - DNA, 1284 bp, Artificial Sequence
  derived and/or modified sequence
atgttccacctgcggacctgcgccgccaagctgcggcccctgaccgccagccagacagtgaaaacattctcccaaaaccgacccgcagcagctcgcacatttcaacagataagatgttatagtgctcccgtggccgcggaacccttcctcagtgggacttccagtaactatgtcgaggagatgtattgcgcctggctagagaaccccaagtcagtgcacaagagttgggatatcttttttcggaacaccaacgcgggggctccacccggtactgcgtaccagagccctcttcccctgtcccggggtagccttgctgcagttgcccacgcacagagccttgtagaagcacagcctaatgttgataagctggtcgaagaccacctggcagtgcaatctctaattagggcttatcaaatcaggggccaccatgtagcccagctagatccactgggaattttggacgctgaccttgacagttcagttcctgcagatattatttcctctaccgacaagctgggattctatggactggatgagtccgatctagacaaggtcttccacttacctacaacgacattcataggtggacaggagtccgctctcccactccgcgaaatcattcgaaggttggagatggcttactgtcaacacatcggagttgaatttatgttcattaatgacctggaacaatgccagtggattagacagaaattcgagacccctggtatcatgcagttcacaaacgaagagaagaggactctgctggccaggctcgtcaggagcacccggttcgaggaattcctacagaggaaatggtcatccgaaaagagatttgggctggaaggatgcgaggtcttgattccggcactgaagaccattattgataaaagttcagagaacggggtggactatgtgatcatggggatgcctcacagggggaggctcaacgtgctagctaatgtgatcaggaaggagctggaacagattttctgccagtttgatagcaaactggaggccgccgacgaagggtccggggatgttaagtaccatttggggatgtatcatcgaaggattaacagggtaactgatcgaaatattactctatcactggtggccaatccatcccacctcgaagccgccgaccccgtggtcatgggaaaaacgaaggccgaacaattttactgtggggacactgaaggaaagaaagtccgtccccgcgagcgtagggccagacagattgtcaaggccccctgctccagcatggaatttcgctcccccacctag

SEQ ID NO: 20318 - DNA, 789 bp, Artificial Sequence
  derived and/or modified sequence
tttggagccccggagtggggtgtcggcgcctcattcgggtggagctgagccggagacaggcagcgtccttgtgaactttccgcttggatcctgactctgctgttagtagcctatgaccttggatgaaatgcagttgtgaaaaacttcaggacaaaaatgtttcatttaaggacttgtgctgctaagttgaggccattgacggcttcccagactgttaagacattttcacaaaacagaccagcagcagctaggacatttcaacagattcggtgctattctgcacctgttgctgctgagccctttctcagtgggactagttcgaactatgtggaggagatgtactgtgcttggctggaaaaccccaaaagtgtacataagtcatgggacattttttttcgcaacacgaatgccggagccccaccgggcactgcctaccagagtccccttcccctgagccgaggctccctggctgctgtggcccatgcacagtccctggtagaagcacagcccaacgtggacaagctcgtggaggaccacctggcagtgcagtcgctcatcagggcatatcagatacgagggcaccatgtagcacagctggaccccctggggattttggatgctgatctggactcctccgtgcccgctgacattatctcatccacagacaaacttgggttctatggcctggatgagtctgacctcgacaaggtcttccacttgcccaccaccactttcatcgggggacaggaatcagcacttcctctgcgggagatcatccgtcggctggag

SEQ ID NO: 20319 - DNA, 1744 bp, Artificial Sequence
  derived and/or modified sequence
ccgagagtttggagccccggagtggggtgtcggcgcctcattcgggtggagctgagccggagacaggcagttgtgaaaaacttcaggacaaaaatgtttcatttaaggacttgtgctgctaagttgaggccattgacggcttcccagactgttaagacattttcacaaaacagaccagcagcagctaggacatttcaacagattcggtgctattctgcacctgttgctgctgagccctttctcagtgggactagttcgaactatgtggaggagatgtactgtgcttggctggaaaaccccaaaagtgtacataagtcatgggacattttttttcgcaacacgaatgccggagccccaccgggcactgcctaccagagtccccttcccctgagccgaggctccctggctgctgtggcccatgcacagtccctggtagaagcacagcccaacgtggacaagctcgtggaggaccacctggcagtgcagtcgctcatcagggcatatcagatacgagggcaccatgtagcacagctggaccccctggggattttggatgctgatctggactcctccgtgcccgctgacattatctcatccacagacaaacttgggttctatggcctggatgagtctgacctcgacaaggtcttccacttgcccaccaccactttcatcgggggacaggaatcagcacttcctctgcgggagatcatccgtcggctggagatggcctactgccagcatattggggtggagttcatgttcatcaatgacctggagcagtgccagtggatccggcagaagtttgagacccctgggatcatgcagttcacaaatgaggagaaacggaccctgctggccaggcttgtgcggtccaccaggtttgaggagttcctacagcggaagtggtcctctgagaagcgctttggtctagaaggctgcgaggtactgatccctgccctcaagaccatcattgacaagtctagtgagaatggcgtggactacgtgatcatgggcatgccacacagagggcggctgaacgtgcttgcaaatgtcatcaggaaggagctggaacagatcttctgtcaattcgattcaaagctggaggcagctgatgagggctccggagatgtgaagtaccacctgggcatgtatcaccgcaggatcaatcgtgtcaccgacaggaacattaccttgtccttggtggccaacccttcccaccttgaggccgctgaccccgtggtgatgggcaagaccaaagccgaacagttttactgtggcgacactgaagggaaaaaggtaaggcccagagagaggcgtgcaaggcagatcgtcaaggccccatgttccagcatggagttccgctcaccaacataacccagagccctgggtgcatctagactttaaaaaaatatttaaagtcggccgggcgcagtgtctcacgcctgtaatcccagcactttgggaggccgaggtgggcagatcacctgagttcgggagttggagaccagcctgaccaacatggagaaactccatctctactaaaaatacaaaattagctgggcgtggtggcgcgcgcctgtaatcccagctactcaggaggctgaggcaggagaatcgcttgaacccgggaggtggaggttgcagtgagccgagattacgccattgcactccagcctgggccaacaagagcgaaactctgtctcaaagaaaaaaataaataaataaaaaatatatgtatatg

SEQ ID NO: 20320 - DNA, 636 bp, Artificial Sequence
  derived and/or modified sequence
atgtttcacctgaggacttgcgctgctaagcttcgcccactgactgctagccagacagtgaagacctttagccagaacaggcctgccgcagcacggacatttcagcagattcggtgctactcagcaccggtcgcggctgaaccgtttttgtctggtaccagttcaaactatgtggaagagatgtattgtgcctggcttgaaaacccaaagtccgttcataaatcctgggatatcttcttccgaaatacaaacgctggagcaccccctggcactgcctaccagagtcccctacccttgagtagggggagtctggccgcagtagcccatgctcaaagtttagttgaagctcagcctaacgtggataaacttgtcgaagatcacctcgctgtccagagtctcatccgcgcatatcaaattcgcggacaccacgttgcacagcttgaccccttgggaatactcgatgcagacctcgattcgtccgtcccggcagacatcatttcctcaaccgacaagttggggttttacggtctggacgaatctgacctggacaaggtctttcatctgccaaccaccactttcatcggtggccaggagtcagccctgcccctgagggagatcatccgtcgcttagagtag

SEQ ID NO: 20321 - DNA, 1284 bp, Artificial Sequence
  derived and/or modified sequence
atgttccacctgagaacgtgcgcggctaagctgcggccattgaccgcaagccagacagtcaagactttcagccaaaaccgccctgctgctgccagaactttccagcagattcggtgttacagtgctccggtcgccgcagaacccttcctgtccgggacatcctcgaactacgtcgaagagatgtactgtgcctggctggagaatcccaaaagcgtgcataaatcttgggatatcttctttcggaatactaatgccggagcgccaccagggaccgcctatcaatcgccattgcccctgagccgtggcagcttggcagccgtcgctcatgcacagtctctggtggaagctcaacccaacgtagataaactggtggaggaccatctggccgtccaatctctcatcagagcttatcagatccgcggtcaccacgtcgcacagctagatccactgggtatcctcgatgctgacctggactcctctgtgccagccgacataatttcctctaccgacaagctgggcttctacggcttagatgagtcagatctggataaggtgttccatctgcctaccacaacttttatcggcggacaagagagtgcactgcctctgcgcgagattatccggaggctcgagatggcatactgtcagcacatcggcgtggagtttatgtttatcaacgacctggagcaatgccaatggattcgacagaagtttgagacacccggaataatgcagttcacgaatgaggagaagcgaaccctgctggcaagactcgtgaggtctactcgcttcgaagaattcctgcagcgaaagtggagttcagaaaaaagatttggcctcgaagggtgcgaggttttgatccctgcgttgaaaactattatcgataaatccagcgagaacggggtcgactatgttattatgggtatgccgcacagaggcaggttgaacgtcctcgcgaatgttatccgaaaagagctagagcagatattttgtcagttcgattcaaaactggaagccgctgatgagggctcaggagacgtgaaatatcacctcgggatgtatcataggagaataaaccgggtaactgacaggaacatcacgttgtccctggtggctaacccaagccacctagaagccgcagaccctgtcgttatgggcaagaccaaagccgagcagttttactgtggagacactgagggcaagaaagtgcgccctagggaaaggagagccaggcagattgttaaggccccatgctcgagcatggaattccggtctcctacctag

SEQ ID NO: 20322 - DNA, 636 bp, Artificial Sequence
  derived and/or modified sequence
atgttccacctgagaacctgcgccgccaagctgagacccctgaccgccagccagaccgtgaagaccttcagccagaacagacccgccgccgccagaaccttccagcagatcagatgctacagcgcccccgtggccgccgagcccttcctgagcggcaccagcagcaactacgtggaggagatgtactgcgcctggctggagaaccccaagagcgtgcacaagagctgggacatcttcttcagaaacaccaacgccggcgccccccccggcaccgcctaccagagccccctgcccctgagcagaggcagcctggccgccgtggcccacgcccagagcctggtggaggcccagcccaacgtggacaagctggtggaggaccacctggccgtgcagagcctgatcagagcctaccagatcagaggccaccacgtggcccagctggaccccctgggcatcctggacgccgacctggacagcagcgtgcccgccgacatcatcagcagcaccgacaagctgggcttctacggcctggacgagagcgacctggacaaggtgttccacctgcccaccaccaccttcatcggcggccaggagagcgccctgcccctgagagagatcatcagaagactggagtag

SEQ ID NO: 20323 - DNA, 1284 bp, Artificial Sequence
  derived and/or modified sequence
atgttccacctgagaacctgcgccgccaagctgagacccctgaccgccagccagaccgtgaagaccttcagccagaacagacccgccgccgccagaaccttccagcagatcagatgctacagcgcccccgtggccgccgagcccttcctgagcggcaccagcagcaactacgtggaggagatgtactgcgcctggctggagaaccccaagagcgtgcacaagagctgggacatcttcttcagaaacaccaacgccggcgccccccccggcaccgcctaccagagccccctgcccctgagcagaggcagcctggccgccgtggcccacgcccagagcctggtggaggcccagcccaacgtggacaagctggtggaggaccacctggccgtgcagagcctgatcagagcctaccagatcagaggccaccacgtggcccagctggaccccctgggcatcctggacgccgacctggacagcagcgtgcccgccgacatcatcagcagcaccgacaagctgggcttctacggcctggacgagagcgacctggacaaggtgttccacctgcccaccaccaccttcatcggcggccaggagagcgccctgcccctgagagagatcatcagaagactggagatggcctactgccagcacatcggcgtggagttcatgttcatcaacgacctggagcagtgccagtggatcagacagaagttcgagacccccggcatcatgcagttcaccaacgaggagaagagaaccctgctggccagactggtgagaagcaccagattcgaggagttcctgcagagaaagtggagcagcgagaagagattcggcctggagggctgcgaggtgctgatccccgccctgaagaccatcatcgacaagagcagcgagaacggcgtggactacgtgatcatgggcatgccccacagaggcagactgaacgtgctggccaacgtgatcagaaaggagctggagcagatcttctgccagttcgacagcaagctggaggccgccgacgagggcagcggcgacgtgaagtaccacctgggcatgtaccacagaagaatcaacagagtgaccgacagaaacatcaccctgagcctggtggccaaccccagccacctggaggccgccgaccccgtggtgatgggcaagaccaaggccgagcagttctactgcggcgacaccgagggcaagaaggtgagacccagagagagaagagccagacagatcgtgaaggccccctgcagcagcatggagttcagaagccccacctag

SEQ ID NO: 20324 - protein, 163 aa, Artificial Sequence
  derived and/or modified sequence
MEPSQCVEELEDDVFQPEDGEPVTQPGSLLSADLFAQSLLDCPLSRLQLFPLTHCCGPGLRPTSQEDKATQTLSPASPSQGVMLPCGVTEEPQRLFYGNAGYRLPLPASFPAVLPIGEQPPEGQWQHQAEHQQNQNRVWWQILLFLHNLALNGEENRNGAGPR

SEQ ID NO: 20325 - DNA, 492 bp, Artificial Sequence
  derived and/or modified sequence
atggagccctcgcagtgcgtggaggaactggaggatgacgtctttcagcctgaggatggcgaacccgttacccagccagggagcctgctatcggcggacctgttcgcccagtcactcttggactgtccactgtctcgcctccagctctttccactcacccactgctgtggcccaggcctgaggcccacctcgcaggaagacaaagccacacagaccctttcccccgcttctccaagtcagggggtgatgttgccttgcggcgtgaccgaggaaccgcaacgcctattttacggcaacgcgggatacagactgcctctgccagcctcttttcctgccgtcctgccaattggcgagcagccccccgaaggtcaatggcaacaccaggcagagcaccagcagaaccagaaccgcgtgtggtggcagatcctgctatttctgcacaacctggcactgaatggggaggaaaaccggaatggggcaggcccgcggtag

SEQ ID NO: 20326 - DNA, 492 bp, Artificial Sequence
  derived and/or modified sequence
atggagcccagccagtgtgtggaggagctggaggatgatgtgttccagccagaagatggagagcctgtgacccagcccggcagcctgctgtctgctgacctgtttgcccagagcctgctggactgccccctgagccggctgcagctgttccccctgacccactgctgcggccctggcctgcggcccaccagccaggaggacaaggccacccagaccctgagccctgccagccccagccagggcgtgatgctgccctgtggggtgacagaggagccccagaggctcttctatggaaatgccggctaccgcctgcccctgcctgccagcttccctgctgtgctgcccatcggggagcagcccccagagggccagtggcagcaccaggccgagcaccagcagaaccagaacagagtgtggtggcagatcctgctcttcctgcacaacctggccctgaatggagaagaaaatagaaatggagctggccccaggtag

SEQ ID NO: 20327 - DNA, 492 bp, Artificial Sequence
  derived and/or modified sequence
atggagcccagccagtgcgtggaggagctggaggacgacgtgttccagccagaagacggggagcctgtgacccaacccggatccctcctgagtgccgacttattcgcacagtcgttgctggactgtcccctgagccgcttacagctcttccccctcacacactgttgcggcccggggttgagacctacatcacaggaagataaagcaactcaaacactgtccccagccagcccatcacagggggtcatgctcccttgcggagtgacagaggagccccaacgtctgttttacggcaatgccggctaccggctgccactccctgctagttttccggccgttctgcccattggagagcagccacccgaaggacaatggcagcaccaggcggagcaccagcagaaccagaatagagtatggtggcagatccttctttttctccacaacctcgccttgaacggagaggagaatagaaatggggcaggacctaggtag

SEQ ID NO: 20328 - DNA, 492 bp, Artificial Sequence
  derived and/or modified sequence
atggagccgagccagtgcgtcgaggaactcgaggacgatgtgttccaacctgaggatggcgaacctgtgacccagcccggttccttgttgtctgcggacctttttgcccagtccttgctcgattgtcctttatcgcggctgcagctgtttcccctgactcactgctgcggccctggactaaggcctaccagtcaggaggataaagccacacagactctcagccccgcatctcctagtcagggcgttatgctaccctgtggagtaacggaggagccccagcgcctgttttacgggaacgccggatacagacttccgctgcccgcttctttccctgctgtgctgcctattggggagcagccacccgaaggccagtggcagcaccaggcggagcatcagcaaaatcaaaaccgagtttggtggcagattttactcttcttacacaatctagccctgaacggggaggagaataggaacggtgccggaccacggtag

SEQ ID NO: 20329 - DNA, 492 bp, Artificial Sequence
  derived and/or modified sequence
atggagccatctcagtgtgtggaggagctggaggatgatgtgttccaaccagaggatggggagccggtgacccaacccgggagcttgctctctgctgacctgtttgcccagagcctactggactgccccctcagccgacttcagctcttccctctcacccactgctgtggccctggccttcgacccaccagccaggaagacaaagctacccagactctcagcccagcctcccccagccaaggtgtcatgctgccttgtggggtgactgaggaaccccagcgactcttttatggcaatgctggctatcggcttcctctccctgccagtttcccagcagtcttgcccattggggagcagccccccgaagggcagtggcaacatcaagcagagcaccagcagaaccaaaatcgtgtgtggtggcagatcctcctcttcctgcacaaccttgctttgaatggagaagagaacaggaacggggcaggccctaggtga

SEQ ID NO: 20330 - DNA, 492 bp, Artificial Sequence
  derived and/or modified sequence
atggagcccagccagtgcgtggaggagctggaggacgacgtgttccagcccgaggacggcgagcccgtgacccagcccggcagcctgctgagcgccgacctgttcgcccagagcctgctggactgccccctgagcagactgcagctgttccccctgacccactgctgcggccccggcctgagacccaccagccaggaggacaaggccacccagaccctgagccccgccagccccagccagggcgtgatgctgccctgcggcgtgaccgaggagccccagagactgttctacggcaacgccggctacagactgcccctgcccgccagcttccccgccgtgctgcccatcggcgagcagccccccgagggccagtggcagcaccaggccgagcaccagcagaaccagaacagagtgtggtggcagatcctgctgttcctgcacaacctggccctgaacggcgaggagaacagaaacggcgccggccccagatag

SEQ ID NO: 20331 - protein, 129 aa, Artificial Sequence
  derived and/or modified sequence
MEPSQCVEELEDDVFQPEDGEPVTQPGSLLSADLFAQSLLDCPLSRLQLFPLTHCCGPGLRPTSQEDKATQTLSPASPSQGVMLPCGVTEEPQRLFYAPAEPKSCVVADPPLPAQPCFEWRREQERGRP

SEQ ID NO: 20332 - DNA, 186 bp, Artificial Sequence
  derived and/or modified sequence
atggagccctcacagtgcgttgaggagcttgaggacgacgtgttccaacccgaggacggtgagcccgtcacccaacctggcagcctgctctccgctgacctcttcgcacagagcttgctggattgtccactctcgaggcttcaactgttccccctgacccactgctgtggcccgggattacggtag

SEQ ID NO: 20333 - DNA, 390 bp, Artificial Sequence
  derived and/or modified sequence
atggagccatcccagtgcgtggaagagctcgaggacgatgtgttccagcccgaggacggggagccggtaactcaacccggcagtttgctgtcagctgacctattcgcacagtctctgcttgattgtcccctgtcacggttgcagctgttccccctcactcactgctgcggacccggtctgcgaccaacatcccaggaagacaaagcgacccagacactcagccccgcaagtccctcgcagggtgtgatgctcccctgcggagtgacagaggagccccagcgacttttttatgcccccgccgaacccaagtcgtgcgttgtcgccgaccctcccctaccagctcaaccttgtttcgagtggagaagagaacaggagcggggccgaccatag

SEQ ID NO: 20334 - DNA, 42 bp, Artificial Sequence
  derived and/or modified sequence
atggaaccttctcagtgcgtggaagaactggaagacgactag

SEQ ID NO: 20335 - DNA, 390 bp, Artificial Sequence
  derived and/or modified sequence
atggagccttcgcagtgtgtagaagagctcgaggacgacgtgttccagcccgaagacggcgagcccgtaacacagcccggatcgctattaagtgccgacctgtttgcacaaagcctcctcgattgccctctttcgaggctccaactgtttcccctgacccactgctgtggccctggcctgcgccccactagccaggaagataaggccacccagacactgtcacctgcgtcacctagccaaggcgtgatgcttccctgcggcgtgacagaagagccacagcgattgttttacgcccctgcagagcctaagagctgcgtggtggcagacccccctctccctgcacagccctgctttgagtggaggagagagcaagaacggggcaggccttag

SEQ ID NO: 20336 - DNA, 186 bp, Artificial Sequence
  derived and/or modified sequence
atggagcccagccagtgtgtggaggagctggaggatgatgtgttccagccagaagatggagagcctgtgacccagcccggcagcctgctgtctgctgacctgtttgcccagagcctgctggactgccccctgagccggctgcagctgttccccctgacccactgctgcggccctggcctgaggtag

SEQ ID NO: 20337 - DNA, 390 bp, Artificial Sequence
  derived and/or modified sequence
atggagcccagccagtgtgtggaggagctggaggatgatgtgttccagccagaagatggagagcctgtgacccagcccggcagcctgctgtctgctgacctgtttgcccagagcctgctggactgccccctgagccggctgcagctgttccccctgacccactgctgcggccctggcctgcggcccaccagccaggaggacaaggccacccagaccctgagccctgccagccccagccagggcgtgatgctgccctgtggggtgacagaggagccccagaggctcttctacgccccagctgagcccaagagctgtgtggtggccgacccccccctgcctgcccagccctgctttgagtggaggcgggagcaggagcggggccggccctag

SEQ ID NO: 20338 - DNA, 42 bp, Artificial Sequence
  derived and/or modified sequence
atggagcccagccagtgtgtggaggagctggaggatgactag

SEQ ID NO: 20339 - DNA, 186 bp, Artificial Sequence
  derived and/or modified sequence
atggagcccagccagtgcgtggaggagctggaggacgacgtgttccagcccgaggatggggaacccgtgacacagcctgggtccctgctgtcagcagacctgtttgcacagagcctattagactgtccactctctcgcctgcaactgtttcctttgacacactgctgtgggcctgggttaagatag

SEQ ID NO: 20340 - DNA, 390 bp, Artificial Sequence
  derived and/or modified sequence
atggagcccagccagtgcgtggaggagctggaggacgacgtgttccagcccgaggacggtgaacctgtgactcagcccgggagcctgctttcagcagacctcttcgcccaatcccttctggattgtcccctttcccgactgcagttgttccccttaacccattgctgtgggcctgggctgcggccaacaagccaagaggataaagcaacacaaactctcagccctgctagcccaagccaaggtgttatgttaccctgcggcgtgacagaagagcctcaaaggttattctatgcacccgccgaacccaaatcatgtgtagttgcagatcctcccctcccagcacagccttgtttcgagtggcggagggagcaggaacgcggcaggccatag

SEQ ID NO: 20341 - DNA, 390 bp, Artificial Sequence
  derived and/or modified sequence
atggagcccagccagtgcgtggaggagctggaggacgacgtgttccagcctgaagacggcgaaccggttacacagcccgggagtctgttgtccgccgatcttttcgcacaatcccttctagattgccctctctctcggttacaactattccccttaacacattgttgtggccccggactgcggcctacatcacaggaggataaggccacccagactctgtctccggctagtccctcacagggagtgatgttgccctgcggagtgaccgaagagccacagagattattctacgcacccgccgaacccaagagctgcgttgttgccgatccacctctgccggcccagccatgctttgaatggagaagagaacaggagcgcggcaggccatag

SEQ ID NO: 20342 - DNA, 186 bp, Artificial Sequence
  derived and/or modified sequence
atggagccttcccagtgcgtggaggagcttgaggacgatgtctttcagcctgaggacggcgagcccgttacccagcccggttcactactgagcgctgacctttttgcccagtccctgcttgactgcccattgagccggctccagctgtttcccctgacacattgctgcggtcctggcctgcgttag

SEQ ID NO: 20343 - DNA, 390 bp, Artificial Sequence
  derived and/or modified sequence
atggagcccagccagtgcgtcgaagaactagaggacgacgtgttccaacccgaggatggagagcctgtaacccagcccggttctctcttatccgcagatttgttcgcccagtccctgctagactgccctctgagtcggcttcagttgtttcccctgactcattgttgcggtccagggttacgccctaccagccaagaagataaggccactcagactctgtccccagctagtccctctcagggggtgatgctcccttgtggtgttaccgaggagcctcaacgccttttctacgcccctgcagagcccaagagctgcgtagtggccgatccccctctcccagcgcagccttgttttgagtggaggcgtgaacaggagagaggcaggccctag

SEQ ID NO: 20344 - DNA, 42 bp, Artificial Sequence
  derived and/or modified sequence
atggagccatcccagtgtgtggaggagcttgaagatgactag

SEQ ID NO: 20345 - DNA, 390 bp, Artificial Sequence
  derived and/or modified sequence
atggaacccagccagtgcgtggaggagttagaggacgacgtgtttcagcctgaagacggtgagcccgtaacccagcccggtagcctcctgagtgccgacctcttcgcccagagcctcttggactgccctctcagtaggctgcagctcttccccctcacccactgctgcggacctgggttgaggcctacctcacaggaagacaaagccacacagaccctgagccccgcttcaccttcacagggcgttatgttgccttgcggagtgacggaagaaccacaaaggttattctatgctcctgctgaacctaagtcttgtgtagttgctgaccccccactaccggctcaaccctgttttgaatggcggagggagcaggagagaggtcgaccctag

SEQ ID NO: 20346 - DNA, 4288 bp, Artificial Sequence
  derived and/or modified sequence
atggagccatctcagtgtgtggaggagctggaggatgatgtgttccaaccagaggatggggagccggtgacccaacccgggagcttgctctctgctgacctgtttgcccagagcctactggactgccccctcagccgacttcagctcttccctctcacccactgctgtggccctggccttcgacccaccagccaggaagacaaagctacccagactctcagcccagcctcccccagccaaggtgtcatgctgccttgtggggtgactgaggaaccccagcgactcttttatgcaccagcagaaccaaaatcgtgtgtggtggcagatcctcctcttcctgcacaaccttgctttgaatggagaagagaacaggaacggggcaggccctaggtgagggtgggctgccctcttcacatggggcaccaggaacaccgtctggaacaggaaggacatcgggcaggactgacactgtgtcttgtgaaattgtttttttgttgttattttgtgttttaattttttttaatttctctctgagtgtacatacaacatactcaagcgggaccttctttctctgtcaggcccttgacctggaatgggggcctttgtcaaacactgttgaaggagaggctgatgtgtctgtgatggtgagaattcccaagggctctgacaagtagattcttcgactgaggaatctaccagttgtcgaagatgatccgttagtgatgttctctgggaagtggactgtggtttttccagaggaactcagttaagaaatcgagagtggattagactcccagttccaccaaacctatgagccttccactgtggatgggggccgtgatcctgatggtcacattgctttaacccagcagggcttcggccaggggctttccacttgaggatagcagcttcactaggctggccggccagctccacatctgactgggttcttacttctcagccagtacctgccccatgggctcaaggattcctggccagctcctgccacctccagcagacctcagggagggttgagtttctctaaggacccctcaaacatgtcgcaaaatgaaccaaacttctggctaggcctcaaaactgacttggtcccacttggaggccccaggattggtcctgaggtacagagccactgccaccactggcggcctgggaccagctgggtgtcagccacggatgagccgaatagccagtcagcatgttgctgctggcagcctgtgcctttgtcagctcttctttcaaaagaccccaccgacagaccgcattccacccccaacatcggcactgagggacatcgggggcaagtttgcagtggggccggaaaatatggtggccaccctaccatgagagtcagccgtaggggaccccagaccccttggtttccttggaaacaacatacctcttcccccttatccccagtcctttttcatacctagtgggatacagaagaagccaggacagtggctttgccagctaagtgacttttagagtaacagataacgattagagtggggaaccgtcaaagctgggtacacatttcctatcttcctccagcttccagctaggccagaagggcatgctctggaacccagcaggatcacagctgcctgtgcacgtcttcccttctctccctgctgcggcacttatggagaggatctaaagcagccggtgtggcagctccgatagcaggcacagggaatctgttaaccagacgctagaaactaaattataacttttgcatatgtgagaaaagacaacattggtgctaacagtgaagtaaggcccaaaggaaagacggcttccctggacaaagaagacctcagggctacccaaggaaataggaggagtctagagtagactcacaaatctgaacaagcccaagtcttccagttctgaggagaggaggtcttcagtactattgaaggagacattgatcttctggatgtacagttgtgcaggttgttcactgcacaagggcacctgcagctaatggaggctggaattcagcttgtgttctgctcactaagctgtgtgcgtgccctggtgtggggctacttctcccaagaagaaggggtgcctttcctaatttgcaaaggtgccatatgggctcacagcaccctggaggagaagggcctcaaactgtgcatgtaagcctttgttttgttctgctcagatattctggatattacctcttcttggtcagaattctattctcagggtgtgtaccatgatttgtctgctaagaagacgggttcctgctttgcagagaaggagccggggaccagcttgaagactggctctgggacacactgaccattgtgaaattcagccttccctgtgggtctccataccattttatgatgtgtatgggacatacgttgttctcccctctctggatcaaggtggtgacaggcagcctgctgccgtatgcttcagtggcacacaccaaaaaaccgggattatttacagcagccactattcaccccttttggcagactctccacctgagttcagtgagagagaaaatgatttagatcttggtgctggggcaaggccatcagcttcagagaccttgccaggcccaggctgggtgccctgtggcctgagaactgagcccagactttgacaaacccacctcaacatcaagcctggggcaggtggaaggtggtctgactgcactgtctccatcttatgcaaagccaggaactcactcactgtcttaagtgagccagggcaaaatttacacccctcacgtttccctctcccttcttccccaccaacaaaacccaggaggtagctggcagagtagctgtcaggaaggagaaaggttctttctggctggttgtttttaattggcttagtgatctaaactggccccttcctcctctgcctggtgagttggcctaaacattcctcaagtctagcctcaggagacctgcccctcccccccgacctccaccccctcagactccatcccccacccccaggagcctggctgtctctagcgaggggtggagaatcagatttagagggagggagagtctgacctggatcctgacctgtaaccagctgaagacggtggaggctttgtggcttgctgagggtgggggttgggagagggactggaaaccttcctcctcgggaaagaaatgcctgggaggaagggaagcctgatattcagggtcaaaacagcccttctaattcacaaccccaaagcaggggtttctagaagttggtcaacagatctggtgagggaagtccccaggccagacgctggactcctgcaatgagggtggaggactcagcctggcctctgcctggcctgtttcaaagtctgggccactggcagccttctcttgctcaatccgaggtggaaaaagatcacctcccagtgacctccctcagcccccaggggagtaggtctgtgtccaaagctatgtggcaggcttgtttgaaggacccagaggggcccagctgacctgtctcactgctcctggcagcccagccccatcggcaggtggcccctgcctgggggttattcgggatggttcagccagggcctcccaggaagagtgctgtggagccacggtgactgtcctggacagcaaggagcatgctaccccagtgagcacttctttttgagggacttgatggggaggtggggtaggcagaagggacgtggcagaagcgggaagactttggtcaccatggctctgcaggccttctgcaaatcagtgctggcctgggctggaaacagctctgtgtgtgaaggtgaggactcttggaagcaggccatcctggccagacaccctagcaggaaggggctcacctgtcacccttaggcagcctgagggctggtggggacttttgagtcttgaggggatagcggaaaaagctgagctcataggtgcccagccagcctcccagctaaaggtgctcagagccccactgccccctctctctgtgcaggtggccagtgcccctccctgctctgggagcattgctagccttctaccccatccctggatccacaggggctatcgaggagacccagtgagaatgtagcattttgttcatccccagggtagctgccctggggtctgggcactctgcctctgggagagaggaagaagaaaggggccccattttttaaaaaactgtacagagcctttggctttatgtgtttatgttcttcacatgcatatgtgtgtatgtgtgtatatctttccccccatcaattggtacaatttttaataaaatcatttaaagc

SEQ ID NO: 20347 - DNA, 505 bp, Artificial Sequence
  derived and/or modified sequence
attttggaaacaataccgcaccgtgcggagtggcctcctcccgccccggcctgtgcccgccgccgccgccgcccctgcctgcgcctcccgcctcctgccgcagcccgctgggctttttccctccttcccaatcgagtctgggcgtccagcccccgagtgctcgtcacgctggaccctggcgcggagccctggcatcacgactcggaggccgagactctctcctggagtcacccaggtaccctgcatgcatatagctgctgattctactcctgctattgctcacaaccctcagagtcaaactttgtgaccggcctaggagagatggagccatctcagtgtgtggaggagctggaggatgatgtgttccaaccagaggatggggagccggtgacccaacccgggagcttgctctctgctgacctgtttgcccagagcctactggactgccccctcagccgacttcagctcttccctctcacccactgctgtggccctggccttcgac

SEQ ID NO: 20348 - DNA, 630 bp, Artificial Sequence
  derived and/or modified sequence
attttggaaacaataccgcaccgtgcggagtggcctcctcccgccccggcctgtgcccgccgccgccgccgcccctgcctgcgcctcccgcctcctgccgcagcccgctgggctttttccctccttcccaatcgagtctgggcgtccagcccccgagtgctcgtcacgctggaccctggcgcggagccctggcatcacgactcggaggccgagactctctcctggagtcacccaggagagatggagccatctcagtgtgtggaggagctggaggatgatgtgttccaaccagaggatggggagccggtgacccaacccgggagcttgctctctgctgacctgtttgcccagagcctactggactgccccctcagccgacttcagctcttccctctcacccactgctgtggccctggccttcgacccaccagccaggaagacaaagctacccagactctcagcccagcctcccccagccaaggtgtcatgctgccttgtggggtgactgaggaaccccagcgactcttttatgcaccagcagaaccaaaatcgtgtgtggtggcagatcctcctcttcctgcacaaccttgctttgaatggagaagagaacaggaacggggcaggccctag

SEQ ID NO: 20349 - DNA, 186 bp, Artificial Sequence
  derived and/or modified sequence
atggagcccagccagtgcgtggaggagctggaggacgacgtgttccagcccgaggacggcgagcccgtgacccagcccggcagcctgctgagcgccgacctgttcgcccagagcctgctggactgccccctgagcagactgcagctgttccccctgacccactgctgcggccccggcctgagatag

SEQ ID NO: 20350 - DNA, 390 bp, Artificial Sequence
  derived and/or modified sequence
atggagcccagccagtgcgtggaggagctggaggacgacgtgttccagcccgaggacggcgagcccgtgacccagcccggcagcctgctgagcgccgacctgttcgcccagagcctgctggactgccccctgagcagactgcagctgttccccctgacccactgctgcggccccggcctgagacccaccagccaggaggacaaggccacccagaccctgagccccgccagccccagccagggcgtgatgctgccctgcggcgtgaccgaggagccccagagactgttctacgcccccgccgagcccaagagctgcgtggtggccgacccccccctgcccgcccagccctgcttcgagtggagaagagagcaggagagaggcagaccctag

SEQ ID NO: 20351 - DNA, 42 bp, Artificial Sequence
  derived and/or modified sequence
atggagcccagccagtgcgtggaggagctggaggacgactag

SEQ ID NO: 20352 - protein, 357 aa, Artificial Sequence
  derived and/or modified sequence
MGNRHSQSYTLSEGSQQLPKGDSQPSTVVQPLSHPSRNGEPEAPQPAKASSPQGFDVDRDAKKLNKACKGMGTNEAAIIEILSGRTSDERQQIKQKYKATYGKELEEVLKSELSGNFEKTALALLDRPSEYAARQLQKAMKGLGTDESVLIEVLCTRTNKEIIAIKEAYQRLFDRSLESDVKGDTSGNLKKILVSLLQANRNEGDDVDKDLAGQDAKDLYDAGEGRWGTDELAFNEVLAKRSYKQLRATFQAYQILIGKDIEEAIEEETSGDLQKAYLTLVRCAQDCEDYFAERLYKSMKGAGTDEETLIRIVVTRAEVDLQGIKAKFQEKYQKSLSDMVRSDTSGDFRKLLVALLH

SEQ ID NO: 20353 - DNA, 1074 bp, Artificial Sequence
  derived and/or modified sequence
atgggcaacagacacagccagagctacaccctgagcgagggcagccagcagctgcccaagggcgacagccagcccagcaccgtggtgcagcccctgagccaccccagcagaaacggcgagcccgaggccccccagcccgccaaggccagcagcccccagggcttcgacgtggacagagacgccaagaagctgaacaaggcctgcaagggcatgggcaccaacgaggccgccatcatcgagatcctgagcggcagaaccagcgacgagagacagcagatcaagcagaagtacaaggccacctacggcaaggagctggaggaggtgctgaagagcgagctgagcggcaacttcgagaagaccgccctggccctgctggacagacccagcgagtacgccgccagacagctgcagaaggccatgaagggcctgggcaccgacgagagcgtgctgatcgaggtgctgtgcaccagaaccaacaaggagatcatcgccatcaaggaggcctaccagagactgttcgacagaagcctggagagcgacgtgaagggcgacaccagcggcaacctgaagaagatcctggtgagcctgctgcaggccaacagaaacgagggcgacgacgtggacaaggacctggccggccaggacgccaaggacctgtacgacgccggcgagggcagatggggcaccgacgagctggccttcaacgaggtgctggccaagagaagctacaagcagctgagagccaccttccaggcctaccagatcctgatcggcaaggacatcgaggaggccatcgaggaggagaccagcggcgacctgcagaaggcctacctgaccctggtgagatgcgcccaggactgcgaggactacttcgccgagagactgtacaagagcatgaagggcgccggcaccgacgaggagaccctgatcagaatcgtggtgaccagagccgaggtggacctgcagggcatcaaggccaagttccaggagaagtaccagaagagcctgagcgacatggtgagaagcgacaccagcggcgacttcagaaagctgctggtggccctgctgcactag

SEQ ID NO: 20354 - DNA, 1074 bp, Artificial Sequence
  derived and/or modified sequence
atggggaatagacattcccaaagctacaccctgagtgagggctcccagcagctccccaaaggagactctcagcccagcaccgtggttcagcccctcagtcacccgtccagaaatggagagccagaagctccccaacctgccaaagcctcttcccctcaggggttcgacgtggacagggatgccaagaaactgaacaaggcctgtaaaggcatgggaaccaacgaagctgccatcattgaaatcctatcaggtaggacctcagatgagcgccagcagataaaacagaaatataaggctacctatggcaaagagctggaagaagtgctgaagtctgaactgtccggtaactttgaaaaaacagctctcgccctgctggatcggccatccgaatacgccgcgaggcagctacagaaggccatgaaaggacttggaactgacgaatccgtgcttattgaagtgttgtgcacgcgtacaaataaggaaatcatcgccataaaagaagcataccaaaggctgtttgacagaagcttggagtctgatgtgaagggggacacctccggaaacctgaaaaagatcctcgtgagtctgctccaggccaatcggaatgaaggggatgacgtcgacaaggatttggccggccaagatgcaaaagacctctatgatgcaggagaaggcagatggggaacggatgagcttgctttcaacgaggtgctggctaaacgtagctacaaacagctccgtgcaactttccaggcgtaccagatccttattggcaaagacatcgaggaggcaatcgaggaggaaacttccggagatttacaaaaagcgtacttgactcttgtccgttgtgcccaggattgcgaagattactttgcagagagactgtataagtccatgaagggtgccggtacagacgaagagactctgatacggatcgtggtgacccgagccgaggtggaccttcagggaatcaaggcaaagtttcaagagaaatatcagaagagcctatctgatatggtcaggtcagatacctctggggacttcagaaagttacttgtggccttgctgcactag

SEQ ID NO: 20355 - DNA, 1074 bp, Artificial Sequence
  derived and/or modified sequence
atgggcaacagacacagccagagctacaccctgtctgagggcagccagcagctgcccaagggggacagccagcccagcacagtggtgcagcccctgagccaccccagcagaaatggagagcctgaggccccccagcctgccaaggccagcagcccccagggctttgatgtggacagagatgccaagaagctgaacaaggcctgcaagggcatgggcaccaatgaggccgccatcatcgagatcctgagcggccgcaccagtgatgagcggcagcagatcaagcagaagtacaaggccacctacggcaaggagctggaggaggtgctgaagtctgagctgagcggcaactttgagaagacagccctggccctgctggaccggcccagtgaatatgctgcccggcagctgcagaaggccatgaagggcctgggcacagatgagagcgtgctgattgaggtgctgtgcaccaggaccaacaaggagatcatcgccatcaaggaggcctaccagaggctgtttgacaggagcctggagagtgatgtgaagggggacaccagcggcaacctgaagaagatcctggtgtccctgctgcaggccaacagaaatgaaggagatgatgtggacaaggacctggccggccaggatgccaaggacctgtatgatgctggggagggccgctggggcacagatgagctggccttcaatgaggtgctggccaagaggagctacaagcagctgcgggccaccttccaggcctaccagatcctgattggcaaggacatcgaggaggccatcgaggaggagaccagcggggacctgcagaaggcctacctgaccctggtgcgctgtgcccaggactgtgaggactactttgctgagcggctgtacaagtccatgaagggggccggcacagatgaggagaccctcatccgcatcgtggtgaccagggctgaggtggacctgcagggcatcaaggccaagttccaggagaagtaccagaagagcctgagtgacatggtgcggagtgacaccagcggggacttcaggaagctgctggtggccctgctgcactag

SEQ ID NO: 20356 - DNA, 1074 bp, Artificial Sequence
  derived and/or modified sequence
atgggcaaccggcacagccagagctacaccctgagcgagggcagccagcagttgcccaagggggatagtcagccctcaactgtggtgcaacccctgagccacccgtctcggaatggagagccagaagccccacagccagcgaaggcttcctcgccacagggctttgacgtggatagagacgccaagaaacttaacaaagcttgcaagggcatgggcacgaacgaagccgccatcatcgagatcctgagtggccggaccagcgacgaacgacagcagatcaagcagaagtataaagcgacatacgggaaggagttggaggaagttctgaagtcagaactgagcggaaactttgaaaaaactgccctcgcactcctcgaccgaccatccgaatatgccgcaaggcagctgcagaaagccatgaaagggctgggcacggatgagagcgttctaattgaagtgctctgtacgcgaactaataaagaaattattgcaatcaaagaggcctaccaaaggctgttcgatcggagtctcgaaagcgatgtgaaaggagatacgtccggcaatctgaagaagatcctcgtttctctcctccaagctaatcgcaatgaaggagacgacgtcgacaaggaccttgcggggcaagacgccaaggatctgtacgatgcaggagagggtaggtggggtaccgacgagctggccttcaatgaagtccttgcaaagcggtcatacaaacaacttcgtgccacctttcaggcttatcagatccttatcggcaaagatatcgaggaggctatcgaggaggagacatcaggtgaccttcagaaagcctatcttacgcttgtacggtgtgcccaggattgcgaagattattttgcggagagattgtataaatccatgaagggtgcagggactgatgaagagaccctgatccgcatcgttgttactcgggcagaggtggatttacaaggcattaaagctaaattccaggagaagtatcagaagtcgctctccgatatggtcagaagcgacacatccggagactttcggaagctcttggtagccctccttcactag

SEQ ID NO: 20357 - DNA, 1588 bp, Artificial Sequence
  derived and/or modified sequence
gtaaactttgcctgtaggaggactgatctcttgatgaaatacagaaaaaccatctcagaaaaaggaaaatgggcaatcgtcatagccagtcgtacaccctctcagaaggcagtcaacagttgcctaaaggggactcccaaccctcgacagtcgtgcagcctctcagccacccatcacggaatggagagccagaggccccacagcctgctaaagcgagcagtcctcagggttttgatgtggatcgagatgccaaaaagctgaacaaagcctgcaaaggaatggggaccaatgaagcagccatcattgaaatcttatcgggcaggacatcagatgagaggcaacaaatcaagcaaaagtacaaggcaacgtacggcaaggagctggaggaagtactcaagagtgagctgagtggaaacttcgagaagacagcgttggcccttctggaccgtcccagcgagtacgccgcccggcagctgcagaaggctatgaagggtctgggcacagatgagtccgtcctcattgaggtcctgtgcacgaggaccaataaggaaatcatcgccattaaagaggcctaccaaaggctatttgataggagcctcgaatcagatgtcaaaggtgatacaagtggaaacctaaaaaaaatcctggtgtctctgctgcaggctaatcgcaatgaaggagatgacgtggacaaagatctagctggtcaggatgccaaagatctgtatgatgcaggggaaggccgctggggcactgatgagcttgcgttcaatgaagtcctggccaagaggagctacaagcagttacgagccacctttcaagcctatcaaattctcattggcaaagacatagaagaagccattgaagaagaaacatcaggcgacttgcagaaggcctatttaactctcgtgagatgtgcccaggattgtgaggactattttgctgaacgtctgtacaagtcgatgaagggtgcggggaccgatgaggagacgttgattcgcatagtcgtgaccagggccgaggtggaccttcaggggatcaaagcaaagttccaagagaagtatcagaagtctctctctgacatggttcgctcagatacctccggggacttccggaaactgctagtagccctcttgcactgagccaagccagggcaataggaacacagggtggaaccgcctttgtcaagagcacattccaaatcaaacttgcaaatgagactcccgcacgaaaacccttaagagtcccggattactttcttggcagcttaagtggcgcagccaggccaagctgtgtaagttaagggcagtaacgttaagatgcgtgggcagggcaccttgaactctggcttagcaagcatctaggctgcctcttcactttcttttagcatggtaactggatgttttctaaacactaatgaaatcagcagttgatgaaaaaactatgcatttgtaatggcacatttagaaggatatgcatcacacaagtaaggtacaggaaagacaaaattaaacaatttattaattttccttctgtgtgttcaatttgaaagcctcattgttaattaaagttgtggattatgcctcta

SEQ ID NO: 20358 - DNA, 1074 bp, Artificial Sequence
  derived and/or modified sequence
atgggcaacaggcacagccaaagctacacactgagtgaggggagtcagcaacttcctaagggcgactcacagcccagtacagtcgtccagccattgtcccatcccagtagaaacggcgaacccgaagcaccacagccagctaaggcgtcttccccacagggctttgacgtggatcgggatgcaaaaaagttgaataaggcctgcaagggaatgggaacgaatgaggcggcaatcatcgagattctgtccggtcgcaccagcgatgagagacagcagattaaacagaaatataaggcgacctacggtaaggagctggaggaagtactcaagtccgaactctctggcaactttgaaaagactgcactggcgctgctggatcggccatcagaatacgcagcgcgacagctccagaaagccatgaagggcctgggaacagatgagagcgtactgattgaggtgttatgtacccgcactaataaagagatcatagccattaaagaggcataccagcggctgttcgatcgctctctcgaatccgacgttaaaggcgacacatccggaaacctgaaaaaaatcttggttagccttctacaggccaataggaatgagggcgatgacgtggacaaggatctagccggacaagacgcaaaagacttgtatgatgcaggcgaaggacgctggggtactgacgaactggcctttaacgaagtcctggcaaagcggtcgtataagcaattacgcgctacctttcaggcctatcagattctgatcgggaaggatatagaagaggccatagaggaggagacatccggcgacctacaaaaagcttatctgaccctggtaaggtgcgctcaagactgcgaagattattttgctgagcgactctacaaatccatgaaaggagcagggaccgatgaagaaacactgattcggatagtagtcacacgcgcagaggtcgacctgcaggggatcaaagcgaagttccaagagaagtaccagaagagtctgtccgacatggttcgtagcgacacaagcggagacttcagaaaactgttagtggcgcttctgcactag

SEQ ID NO: 20359 - protein, 568 aa, Artificial Sequence
  derived and/or modified sequence
MKWKEKLGDGVYDTFMMIDETKCPPCSNVLCNPSEPPPPRRLNMTTEQFTGDHTQHFLDGGEMKVEQLFQEFGNRKSNTIQSDGISDSEKCSPTVSQGKSSDCLNTVKSNSSSKAPKVVPLTPEQALKQYKHHLTAYEKLEIINYPEIYFVGPNAKKRHGVIGGPNNGGYDDADGAYIHVPRDHLAYRYEVLKIIGKGSFGQVARVYDHKLRQYVALKMVRNEKRFHRQAAEEIRILEHLKKQDKTGSMNVIHMLESFTFRNHVCMAFELLSIDLYELIKKNKFQGFSVQLVRKFAQSILQSLDALHKNKIIHCDLKPENILLKHHGRSSTKVIDFGSSCFEYQKLYTYIQSRFYRAPEIILGSRYSTPIDIWSFGCILAELLTGQPLFPGEDEGDQLACMMELLGMPPPKLLEQSKRAKYFINSKGIPRYCSVTTQADGRVVLVGGRSRRGKKRGPPGSKDWGTALKGCDDYLFIEFLKRCLHWDPSARLTPAQALRHPWISKSVPRPLTTIDKVSGKRVVNPASAFQGLGSKLPPVVGIANKLKANLMSETNGSIPLCSVLPKLIS

SEQ ID NO: 20360 - protein, 243 aa, Artificial Sequence
  derived and/or modified sequence
MKWKEKLGDGVYDTFMMIDETKCPPCSNVLCNPSEPPPPRRLNMTTEQFTGDHTQHFLDGGEMKVEQLFQEFGNRKSNTIQSDGISDSEKCSPTVSQGKSSDCLNTVKSNSSSKAPKVVPLTPEQALKQYKHHLTAYEKLEIINYPEIYFVGPNAKKRHGVIGGPNNGGYDDADGAYIHVPRDHLAYRYEVLKIIGKGSFGQVARVYDHKLRQYVALKMVRNEKRFHRQAAEEIRILEHLKKQ

SEQ ID NO: 20361 - DNA, 1707 bp, Artificial Sequence
  derived and/or modified sequence
atgaagtggaaggagaagctgggcgacggcgtgtacgacaccttcatgatgatcgacgagaccaagtgccccccctgcagcaacgtgctgtgcaaccccagcgagccccccccccccagaagactgaacatgaccaccgagcagttcaccggcgaccacacccagcacttcctggacggcggcgagatgaaggtggagcagctgttccaggagttcggcaacagaaagagcaacaccatccagagcgacggcatcagcgacagcgagaagtgcagccccaccgtgagccagggcaagagcagcgactgcctgaacaccgtgaagagcaacagcagcagcaaggcccccaaggtggtgcccctgacccccgagcaggccctgaagcagtacaagcaccacctgaccgcctacgagaagctggagatcatcaactaccccgagatctacttcgtgggccccaacgccaagaagagacacggcgtgatcggcggccccaacaacggcggctacgacgacgccgacggcgcctacatccacgtgcccagagaccacctggcctacagatacgaggtgctgaagatcatcggcaagggcagcttcggccaggtggccagagtgtacgaccacaagctgagacagtacgtggccctgaagatggtgagaaacgagaagagattccacagacaggccgccgaggagatcagaatcctggagcacctgaagaagcaggacaagaccggcagcatgaacgtgatccacatgctggagagcttcaccttcagaaaccacgtgtgcatggccttcgagctgctgagcatcgacctgtacgagctgatcaagaagaacaagttccagggcttcagcgtgcagctggtgagaaagttcgcccagagcatcctgcagagcctggacgccctgcacaagaacaagatcatccactgcgacctgaagcccgagaacatcctgctgaagcaccacggcagaagcagcaccaaggtgatcgacttcggcagcagctgcttcgagtaccagaagctgtacacctacatccagagcagattctacagagcccccgagatcatcctgggcagcagatacagcacccccatcgacatctggagcttcggctgcatcctggccgagctgctgaccggccagcccctgttccccggcgaggacgagggcgaccagctggcctgcatgatggagctgctgggcatgcccccccccaagctgctggagcagagcaagagagccaagtacttcatcaacagcaagggcatccccagatactgcagcgtgaccacccaggccgacggcagagtggtgctggtgggcggcagaagcagaagaggcaagaagagaggcccccccggcagcaaggactggggcaccgccctgaagggctgcgacgactacctgttcatcgagttcctgaagagatgcctgcactgggaccccagcgccagactgacccccgcccaggccctgagacacccctggatcagcaagagcgtgcccagacccctgaccaccatcgacaaggtgagcggcaagagagtggtgaaccccgccagcgccttccagggcctgggcagcaagctgccccccgtggtgggcatcgccaacaagctgaaggccaacctgatgagcgagaccaacggcagcatccccctgtgcagcgtgctgcccaagctgatcagctag

SEQ ID NO: 20362 - DNA, 1707 bp, Artificial Sequence
  derived and/or modified sequence
atgaagtggaaggaaaagctgggcgatggcgtctatgatactttcatgatgattgacgaaacaaagtgtcccccctgctctaatgtgctctgcaatccctccgagcctcctccaccacgtaggctaaacatgacaactgaacagttcaccggagaccatactcagcatttcctggacggtggagagatgaaggtggagcagttgtttcaagagttcggcaaccggaagagtaataccattcaaagtgatggaatctccgactcagagaagtgctcgccaacggtctcccaaggtaagtcttctgactgtctaaatactgttaagtcaaacagctcgagcaaagctcctaaggtggtgcccttgacacctgaacaggctttgaaacagtataagcaccacctcacggcctatgaaaagttggagattattaattacccagaaatttatttcgtcggcccaaatgcaaagaaacgccacggcgttatagggggacctaataacggcgggtatgacgacgcagacggtgcctacatccatgtccctagggaccacctggcctatcggtatgaggtgttaaagatcatcggcaagggctctttcggccaggtagctcgcgtgtacgaccataaattacgccagtacgtggctcttaaaatggttcgtaatgagaaacgtttccaccggcaggccgccgaagagattcggatcttggagcacctcaagaaacaggacaaaaccgggagcatgaacgtaattcatatgctggagtcatttacttttcgaaaccatgtatgtatggccttcgagctcctctcaattgacttatatgaattgataaaaaagaataagttccaaggatttagcgttcaactcgtcagaaaatttgctcagtccattttgcagtctctggacgctttgcacaagaacaagatcatccactgtgatctgaaacccgagaatatactacttaaacatcacgggcgctcctcgacgaaagtgattgattttggaagtagttgtttcgagtaccaaaaactttatacatacatccagagccggttttatagggcacctgagattatcctgggaagtcggtatagtacacccatcgacatttggtcatttggctgcatcctcgccgagttgctgacaggccaacctctcttcccgggcgaagacgagggcgaccagcttgcatgcatgatggaacttctgggaatgcctcctcccaaacttctggaacagtcaaagcgcgctaaatactttataaattctaagggcattccaaggtactgctcagtgacaacacaggccgacgggcgggtggttctggtggggggtaggtcaagacgaggcaagaagcggggacctccgggctcaaaggactggggaacagcactgaaggggtgcgatgattacctctttatcgagttcttaaagagatgcctgcattgggatccgagtgccaggctaacacccgcccaggctctgcggcacccctggattagcaaaagtgtcccaaggcctttgactaccatcgataaagtgtcaggcaaacgagtggttaatcctgcctctgcctttcagggcttagggtccaaactaccgcctgtggtgggcatcgctaataagctcaaagctaacctcatgtcagagacgaacgggtctatccccctgtgttctgtgctaccaaagttgattagctag

SEQ ID NO: 20363 - DNA, 2218 bp, Artificial Sequence
  derived and/or modified sequence
gcagtgtctggtcgagagtacccgtgggagcgtcgcgccgcggaggcagccgtcccggcgtaggtggcgtggccgaccggacccccaactggcgcctctccccgcgcggggtcccgagctaggagatgggaggcacagctcgtgggcctgggcggaaggatgcggggccgcctggggccgggctcccgccccagcagcggagtggtggagccacagtgttaaagaacagagaagtgatccttaatcatttagaattttgcctccaccatccaccagaaaatgaagtggaaagagaagttgggggatggtgtctatgacaccttcatgatgatagatgaaaccaaatgtcccccctgttcaaatgtactctgcaatccttctgaaccacctccacccagaagactaaatatgaccactgagcagtttacaggagatcatactcagcactttttggatggaggtgagatgaaggtagaacagctgtttcaagaatttggcaacagaaaatccaatactattcagtcagatggcatcagtgactctgaaaaatgctctcctactgtttctcagggtaaaagttcagattgcttgaatacagtaaaatccaacagttcatccaaggcacccaaagtggtgcctctgactccagaacaagccctgaagcaatataaacaccacctcactgcctatgagaaactggaaataattaattatccagaaatttactttgtaggtccaaatgccaagaaaagacatggagttattggtggtcccaataatggagggtatgatgatgcagatggggcctatattcatgtacctcgagaccatctagcttatcgatatgaggtgctgaaaattattggcaaggggagttttgggcaggtggccagggtctatgatcacaaacttcgacagtacgtggccctaaaaatggtgcgcaatgagaagcgctttcatcgtcaagcagctgaggagatccggattttggagcatcttaagaaacaggataaaactggtagtatgaacgttatccacatgctggaaagtttcacattccggaaccatgtttgcatggcctttgaattgctgagcatagacctttatgagctgattaaaaaaaataagtttcagggttttagcgtccagttggtacgcaagtttgcccagtccatcttgcaatctttggatgccctccacaaaaataagattattcactgcgatctgaagccagaaaacattctcctgaaacaccacgggcgcagttcaaccaaggtcattgactttgggtccagctgtttcgagtaccagaagctctacacatatatccagtctcggttctacagagctccagaaatcatcttaggaagccgctacagcacaccaattgacatatggagttttggctgcatccttgcagaacttttaacaggacagcctctcttccctggagaggatgaaggagaccagttggcctgcatgatggagcttctagggatgccaccaccaaaacttctggagcaatccaaacgtgccaagtactttattaattccaagggcataccccgctactgctctgtgactacccaggcagatgggagggttgtgcttgtggggggtcgctcacgtaggggtaaaaagcggggtcccccaggcagcaaagactgggggacagcactgaaagggtgtgatgactacttgtttatagagttcttgaaaaggtgtcttcactgggacccctctgcccgcttgaccccagctcaagcattaagacacccttggattagcaagtctgtccccagacctctcaccaccatagacaaggtgtcagggaaacgggtagttaatcctgcaagtgctttccagggattgggttctaagctgcctccagttgttggaatagccaataagcttaaagctaacttaatgtcagaaaccaatggtagtatacccctatgcagtgtattgccaaaactgattagctagtggacagagatatgcccagagatgcatatgtgtatatttttatgatcttacaaacctgcaaatggaaaaaatgcaagcccattggtggatgtttttgttagagtagactttttttaaacaagacaaaacatttttatatgattataaaagaattcttcaagggctaattacctaaccagcttgtattggccatctggaatatgcattaaatgactttttataggtcaatgca

SEQ ID NO: 20364 - DNA, 1707 bp, Artificial Sequence
  derived and/or modified sequence
atgaagtggaaggagaagctgggagatggagtgtatgacaccttcatgatgattgatgagaccaagtgccccccctgcagcaatgtgctgtgcaaccccagcgagcccccaccaccccggcggctgaacatgaccacagagcagttcaccggggaccacacccagcacttcctggatggaggagagatgaaggtggagcagctgttccaggagtttggaaacaggaagagcaacaccatccagagtgatggcatcagtgacagcgagaagtgcagccccaccgtgtcccagggcaagagcagtgactgcctgaacacagtgaagagcaacagcagcagcaaggcccccaaggtggtgcccctgaccccagagcaggccctgaagcagtacaagcaccacctgacagcctatgagaagctggagatcatcaactacccagagatctactttgtgggccccaatgccaagaagagacatggagtcatcggcggccccaacaatggaggctatgatgatgctgatggagcctacatccacgtgccccgggaccacctggcctaccgctatgaggtgctgaagatcatcggcaagggcagctttggccaggtggcccgggtgtatgaccacaagctgcggcagtatgtggccctgaagatggtgagaaatgagaagcgcttccaccggcaggccgctgaggagatccgcatcctggagcacctgaagaagcaggacaagacaggctccatgaatgtcatccacatgctggagagcttcaccttcagaaatcatgtgtgcatggcctttgagctgctgagcattgacctgtatgagctgatcaagaagaacaagttccagggcttctctgtgcagctggtgaggaagtttgcccagagcatcctgcagagcctggatgccctgcacaagaacaagatcatccactgtgacctgaagccagagaacatcctgctgaagcaccacggccgcagcagcaccaaggtgattgactttggcagcagctgctttgagtaccagaagctgtacacctacatccagagccgcttctaccgggcccctgagatcatcctgggcagccgctacagcacccccatcgacatctggagctttggctgcatcctggccgagctgctgaccggccagcccctcttccctggagaagatgaaggagaccagctggcctgcatgatggagctgctgggcatgcccccacccaagctgctggagcagagcaagagggccaagtacttcatcaacagcaagggcatcccccgctactgcagcgtgaccacccaggctgatggccgggtggtgctggtgggcggccgcagccggcggggcaagaagaggggccccccaggcagcaaggactggggcacagccctgaagggctgtgatgactacctgttcatcgagttcctgaagcgctgcctgcactgggaccccagcgcccggctgaccccagcccaggccctgcggcacccctggatcagcaagtctgtgccccggcccctgaccaccatcgacaaggtgtctgggaagagggtggtgaacccagccagcgccttccagggcctgggcagcaagctgccccctgtggtgggcatcgccaacaagctgaaggccaacctgatgtctgagaccaacggcagcatccccctgtgcagcgtgctgcccaagctgatctcctag

SEQ ID NO: 20365 - DNA, 1707 bp, Artificial Sequence
  derived and/or modified sequence
atgaagtggaaggagaagctgggcgacggcgtgtacgacaccttcatgatgattgacgagacgaagtgccccccctgtagcaacgtgctttgcaatccgtctgagcccccaccaccacgacgcctcaatatgaccacagaacagttcaccggggatcacacccagcatttcctggacggcggggagatgaaagtcgaacaactgttccaagaattcggaaacaggaagagtaatacaattcagtctgatgggatttctgactccgagaaatgctcgccaaccgtttcccaagggaaatcatccgactgtctgaacacagtgaaatctaatagctccagcaaggcccccaaggtggtgccactgactcccgagcaggccctgaaacagtacaagcaccacctcaccgcgtatgagaagttagagattattaactaccctgagatttattttgtgggcccaaacgccaagaagaggcatggggtcattgggggacctaacaatggaggctacgacgacgctgacggtgcttatattcatgtgcctagagaccatctggcctaccggtatgaggtgctcaagattatcgggaagggttcctttggacaggtggcccgtgtgtatgaccacaagctccgccaatacgtggcccttaagatggtacggaacgagaaaaggtttcaccggcaggccgccgaggaaattcgtatcctggagcatctgaagaagcaggataaaaccggcagcatgaatgtgattcacatgctggagtccttcacattcagaaaccacgtctgtatggcctttgagttactgagcattgacttatacgagctcataaagaagaacaaatttcagggtttctccgtccagctcgtacgcaaatttgctcagtccatcttgcagtctctagatgccctgcacaaaaataaaatcattcattgcgatcttaagcctgagaatattctcctgaaacatcacggcaggagttccacaaaggtgatagatttcgggtcatcctgctttgaataccaaaaactgtatacatatatccaatctaggttctacagggctcctgagatcatactgggctcccggtatagtacaccgattgatatatggtcctttggctgtattctcgctgaactactaacagggcaacctctatttccgggcgaagacgagggcgatcaactggcgtgcatgatggagctgctcggcatgcccccccccaaactgttagagcagagcaaacgggcaaaatacttcattaacagcaaaggaatccctcgttattgctccgtgactactcaggcagacggcagagtcgtcctcgtcggaggacggagcaggagaggaaaaaagcgcggcccaccaggatcaaaagattgggggactgctctcaagggctgtgatgattacttatttatcgagttcctgaaacgatgtctgcactgggatccgtctgcaagactgacccccgcccaagccctccgccatccctggatctctaaaagcgtccctaggcccctcacaacaatcgacaaggtctcaggcaagcgggtggttaacccggccagcgcctttcagggtctgggtagcaagcttccccctgtggtgggcatcgctaacaaactcaaagcaaatctgatgtccgagactaatggatccatccccctttgtagcgtgctacctaaactgatctcttag

SEQ ID NO: 20366 - DNA, 1707 bp, Artificial Sequence
  derived and/or modified sequence
atgaagtggaaagaaaagctaggggatggcgtatatgacacctttatgatgatagacgaaaccaagtgtcccccttgctccaatgtgctgtgcaatccatcggaaccaccacccccacggaggctgaacatgaccaccgagcagttcacaggggatcacactcagcactttctggacggtggtgaaatgaaagtggaacagctgtttcaagaatttggaaatagaaaatctaatactatccagagcgacggcatttccgattcggagaagtgttcacccacagtgagtcagggcaaaagctcagattgccttaacactgtcaaatcaaactccagctcaaaggcccctaaggtggtccccttaacaccagaacaggctcttaagcagtataagcatcatctcactgcctatgaaaaactggaaatcattaattaccccgaaatctactttgtgggacccaacgcgaagaagcgacacggggtgattggcggtcctaacaacggcggttacgatgacgccgatggtgcatacattcacgtccccagagatcatctagcgtacagatatgaagtcctgaagattattggcaaggggagtttcggccaagtagccagggtgtacgaccacaaactcagacaatacgtggccctgaagatggtgcggaatgaaaagcgtttccatcgacaggcagctgaggagattaggattttggagcacctgaagaagcaggataagactggctccatgaatgtgatccacatgctcgagtcctttacatttaggaatcatgtgtgcatggcttttgagcttctaagcattgatttatatgagttgataaagaagaacaagtttcagggtttctccgtgcagttggtaagaaagtttgcccaatcaattctgcagtcactggatgcactacataagaataaaattattcactgtgatttaaagcccgaaaacattttacttaaacatcacggaaggagctctactaaagtcatcgatttcggatcaagttgtttcgagtatcagaaactgtatacatacatccaatctcgattttatcgcgctcctgaaattatcctcggatcacggtactctacgccgattgatatctggtctttcggatgtatcctcgccgaactgttaacaggccagccattgttcccgggagaggacgagggcgatcaattggcttgcatgatggagctcttaggtatgccacctcccaagcttctggagcaaagtaagcgcgcaaaatacttcatcaattccaaaggaattccgaggtactgctcagttacaactcaggccgacggtcgcgtcgtcttggtgggcggtaggtccaggagggggaagaaacggggtccaccaggatcaaaagattggggcaccgcactgaagggatgtgatgactatttatttatagagtttctgaagcgctgtttgcactgggaccctagcgcccgactcacacccgcacaagccctccggcatccttggataagcaagagcgttccacgtcccctgacaactatagacaaagtgtctggtaagagagtcgtgaaccctgcctcagccttccaggggctgggatcgaagctgccccctgtcgtcggaattgctaacaaactgaaggctaacctcatgagtgagaccaacggtagcatacccttatgcagcgttctcccaaaactgatatcctag

SEQ ID NO: 20367 - DNA, 1707 bp, Artificial Sequence
  derived and/or modified sequence
atgaagtggaaggaaaagcttggcgatggagtgtacgatacttttatgatgatagacgaaacaaagtgccccccatgttcgaacgttctgtgtaatccatccgagcctccaccaccacgccggctcaatatgactactgaacagtttaccggagaccacacacagcactttctcgatggtggtgaaatgaaagtcgagcagcttttccaggagtttggcaatcgcaaaagcaataccatacagtcggacggcatctctgactctgaaaagtgttcccccactgttagtcaggggaagagttccgactgtttaaatactgtgaaatctaatagcagcagcaaagcccccaaagtggtgccactcactcctgaacaggccttgaaacagtataagcatcatctgactgcctacgagaagctcgagataatcaattacccagagatctatttcgttgggcccaacgctaagaagcgccatggtgttattgggggtccgaacaacggtgggtacgacgatgctgacggggcatacatccatgtcccacgggatcacttggcttatagatacgaggtgctgaagattatcggaaagggctcttttgggcaggtggcccgggtttacgatcataagctcaggcagtacgttgcgctgaagatggtgaggaatgaaaaaagatttcacagacaggcggctgaggagataagaatcctggagcacctgaaaaagcaggataagacaggcagcatgaatgtgatccacatgctggagtcttttacatttagaaaccacgtgtgcatggcatttgaactgctgtccatagacctgtatgagcttattaagaaaaataaattccaaggcttcagtgttcagctggtgcggaaatttgcccagtctattctgcaaagcctggacgcactgcataaaaataaaatcatccactgtgatctcaagccagaaaacattctgctcaaacaccacggaaggtctagcaccaaggttattgacttcgggtcatcgtgcttcgaataccagaagctttacacatacatccagagtaggttttatagagccccagaaatcattctggggagtcgctacagtacccccattgatatctggagcttcggatgcatactagctgaacttcttaccggacagccgctgttcccaggggaggacgagggcgatcagctggcctgcatgatggaactgttgggcatgccaccccctaagcttctggagcaatctaagcgagcgaagtactttatcaattcaaagggcatccctagatactgctccgtgacaacccaggctgacggccgagtggtcctagtcggggggagatctcgccggggaaagaagcgtggcccacctggaagcaaggactggggaaccgctcttaagggctgcgatgactacttgttcatcgagttcctcaagagatgtctgcattgggacccatcggctaggctcactcccgctcaggccctccgacacccctggatttctaagagtgttccaaggcctttaacaacaatcgataaggtctccggcaagcgagtggttaaccctgctagcgcctttcagggattaggctcgaaacttcctcccgtcgtaggaattgcaaacaagctgaaagctaatttgatgtcagagacaaatggatccatccccctgtgttccgtgttgcctaaactgatctcttag

SEQ ID NO: 20368 - DNA, 1707 bp, Artificial Sequence
  derived and/or modified sequence
atgaaatggaaagaaaaattaggtgacggcgtctacgatacgttcatgatgattgatgagaccaagtgccccccctgctccaacgtactgtgcaatccttctgagcctcctccccctaggcgactcaacatgacaaccgagcagttcacaggcgaccatactcagcactttctggatggcggagaaatgaaagtggaacagctgtttcaggaatttggcaaccgcaaaagcaacaccattcaatctgacggtatcagcgactctgagaaatgtagccctaccgtgagtcaggggaaaagctccgattgtttgaacacagtgaagagtaattcctcttctaaagctcccaaggtggtgccactgactcccgagcaggccctcaaacagtacaagcaccaccttactgcctatgaaaaactcgagattattaattacccagagatttacttcgtcggcccgaatgctaagaagcgtcacggagtgattggcgggcctaataatggcggatatgatgatgcagatggagcctatatccacgtgcctcgcgaccatcttgcctatcggtacgaggtgctcaagattatcgggaagggttcctttggccaggtggctagagtgtatgaccacaaactcagacagtatgttgcacttaagatggtgcggaatgagaaacgttttcacagacaggcagccgaggagatccgcattttagaacacttaaagaagcaggacaagacaggatccatgaacgtgatccatatgttggaaagtttcacctttagaaatcacgtctgtatggccttcgaattactgagcatagatttgtatgaattaattaagaagaataaattccagggctttagcgtccagcttgttagaaaatttgcccaatccattctgcagtctctggatgccctgcacaaaaataaaataatccattgcgatctgaaacccgagaatatcctgctgaagcaccacggtcgctccagcaccaaagtgatcgacttcgggtcctcttgctttgagtaccagaaactatacacatacatccagagtaggttctaccgagcccccgagataatcttagggtcaaggtacagcacgcctattgacatctggtctttcggttgcattttagcagaattactcaccgggcagcccttgttccccggggaggacgaaggggaccaactggcgtgtatgatggagctcttaggaatgccgcctcctaaactgcttgaacagagtaagagagcaaagtactttatcaattctaagggaataccgcggtactgcagcgtcacaactcaggctgatggcagggtggtactggtcgggggccgcagtcggaggggaaagaagcgagggcccccaggaagcaaggattggggcactgccctcaagggttgtgacgactatttgtttattgaattcttgaaaagatgtttgcactgggatccatcagcgcgccttactcctgcacaagcattgagacatccctggatttccaagagcgtccctagaccccttaccacaatcgacaaagtgtctggtaaacgtgttgtgaatcccgcgtccgcttttcagggactaggctctaagctgcctcctgttgtgggcatcgccaacaagcttaaggctaaccttatgagcgagaccaatggctcaattcctttgtgttctgtattgccaaagctgatatcatag

SEQ ID NO: 20369 - DNA, 732 bp, Artificial Sequence
  derived and/or modified sequence
atgaagtggaaagagaagctgggagatggggtttatgacaccttcatgatgatcgatgaaaccaaatgtccaccatgttccaatgtgctgtgtaaccccagtgagcctcctccacccagacggctaaacatgactacagaacagttcactggagatcatacccaacacttcttggatggaggcgagatgaaagttgagcagctcttccaggaatttggcaacagaaagtcgaatactatccagtctgatggcatttccgactcagagaaatgctcaccaactgtatcccaggggaagtcaagtgactgcctgaacaccgtgaagagtaactcaagcagtaaggcaccaaaagtcgttcctctaacccctgagcaagcgctgaagcagtataaacaccatttgaccgcttacgagaagctcgaaattatcaattaccccgagatctatttcgtcggacccaatgctaagaagcggcatggggtcatcggcgggcctaacaacggcggatatgatgatgccgatggagcatatattcacgtgcctcgtgatcaccttgcctacagatacgaggtacttaagataatcggcaagggctctttcggccaagtagcgcgagtctacgatcacaagctccgccagtatgttgcactgaaaatggtgagaaacgagaagagatttcatcggcaggcagcagaagagatcagaattttggaacatctgaaaaaacagtag

SEQ ID NO: 20370 - DNA, 732 bp, Artificial Sequence
  derived and/or modified sequence
atgaagtggaaggagaagctgggagatggagtgtatgacaccttcatgatgattgatgagaccaagtgccccccctgcagcaatgtgctgtgcaaccccagcgagcccccaccaccccggcggctgaacatgaccacagagcagttcaccggggaccacacccagcacttcctggatggaggagagatgaaggtggagcagctgttccaggagtttggaaacaggaagagcaacaccatccagagtgatggcatcagtgacagcgagaagtgcagccccaccgtgtcccagggcaagagcagtgactgcctgaacacagtgaagagcaacagcagcagcaaggcccccaaggtggtgcccctgaccccagagcaggccctgaagcagtacaagcaccacctgacagcctatgagaagctggagatcatcaactacccagagatctactttgtgggccccaatgccaagaagagacatggagtcatcggcggccccaacaatggaggctatgatgatgctgatggagcctacatccacgtgccccgggaccacctggcctaccgctatgaggtgctgaagatcatcggcaagggcagctttggccaggtggcccgggtgtatgaccacaagctgcggcagtatgtggccctgaagatggtgagaaatgagaagcgcttccaccggcaggccgctgaggagatccgcatcctggagcacctgaagaagcagtag

SEQ ID NO: 20371 - DNA, 1707 bp, Artificial Sequence
  derived and/or modified sequence
atgaagtggaaggagaagctgggcgacggcgtgtacgacaccttcatgatgatcgatgaaaccaagtgccccccgtgttctaatgttctgtgcaacccttcggagcctccgccacctcgccggctaaacatgacgaccgaacagttcactggagaccatacacagcatttcctggatggtggggagatgaaagttgaacagctttttcaggaattcgggaacagaaagtccaatactattcagtctgatggaatctcagatagtgaaaaatgttcacctactgtctcgcagggcaaatcctccgactgtcttaatacagtgaagagcaactcctcctctaaagcacctaaagtggttccccttacaccagagcaagccctgaagcagtataagcaccacctcacagcgtatgaaaaactggaaatcatcaattacccagaaatctattttgtgggcccaaatgccaagaagcgccatggggtgatcggaggccccaacaacggcggctatgacgacgcagatggcgcttatatccacgtgcctagggatcacctcgcctacaggtatgaagtgcttaagatcataggtaagggatcctttggccaagtggctcgcgtgtacgaccataaactcaggcagtacgtcgctctgaagatggtaagaaatgagaaacggtttcacagacaagcggctgaagagatacggatcctcgagcatctcaaaaagcaggataagaccgggtcgatgaacgtgatccacatgcttgaatccttcaccttccgcaatcacgtttgtatggcgtttgagctgctcagtatcgacctgtacgagcttattaaaaaaaacaaattccaaggcttttctgtgcagctcgtccgcaagttcgcacagtcaattcttcaatcattggatgcattgcataaaaataagatcatccattgtgacctcaagccagagaacatcttactgaaacaccatggacgttcctctaccaaagtcatagactttggaagcagttgctttgagtaccagaaattatatacttatattcagtcgcgcttttaccgggcgccagagatcatactgggaagtcgttactcaacacctatcgatatatggtcctttggatgtatcttggcagagctgctgaccgggcagcctcttttccccggagaggacgaaggagaccagttggcttgtatgatggagcttctgggcatgcctccaccaaaattactagagcagagcaaacgagctaaatactttattaactcaaaagggattccaagatactgtagtgtcacaacccaagcagacggccgggtggtgttggtgggggggagaagcaggaggggcaaaaaacgtggcccacccgggagtaaagactggggcacagcgttgaaagggtgcgatgattatctctttatcgagttcttgaagcggtgcctccactgggacccttctgcaaggctcacacccgcccaggctctgcgacatccttggattagcaaatccgtgccaagacctctcacgaccatagacaaggtatctggtaaacgtgtggttaatcctgcctccgccttccagggactgggctcaaaactccctcccgtcgtgggaatcgccaacaaactgaaggcaaaccttatgagcgagaccaatggaagcattccgctttgtagcgtgcttcctaagctcattagctag

SEQ ID NO: 20372 - DNA, 1707 bp, Artificial Sequence
  derived and/or modified sequence
atgaagtggaaggagaagctgggcgacggcgtgtacgacaccttcatgatgattgatgagactaagtgtccaccatgttctaacgttttatgtaatccctccgagccacctccccctcggcggctgaatatgacaaccgagcagtttaccggcgaccacacacagcatttccttgatggaggcgaaatgaaggtggaacagcttttccaagagtttggcaataggaagtctaacacaatccagtctgatggcatctccgattctgagaagtgcagtccaactgtttcacaggggaaaagtagtgactgtcttaacacagtgaagtctaattcaagcagtaaggctcccaaagtagtacctctgacccccgagcaagcccttaagcagtacaaacaccacctcactgcctacgagaagctcgagattattaactacccagagatttatttcgtcggtccgaacgctaaaaaaagacatggcgtaataggcggccccaacaacggcggctacgacgatgcagacggagcttatatacacgtgcctcgggaccatctggcttacagatacgaggtgctaaagattattggaaagggctcctttggccaggtagcgagagtgtatgaccacaagttgcgccagtatgtcgcattgaagatggtgcgcaacgaaaaaagatttcacaggcaggctgccgaagagataagaattctcgaacacctaaagaaacaagacaagacaggctctatgaacgtgattcacatgctggagtcattcacgttccgcaaccatgtgtgtatggcttttgaactcctgtctatcgacttgtacgagcttatcaaaaagaacaagttccagggattctcggtccagctggttcggaagtttgcccaatccatcctgcagtcactggacgccttgcacaagaacaaaattatccattgcgacctaaagcctgaaaacattctcctcaagcatcatgggagaagcagcaccaaggtaatcgactttggctcttcatgtttcgagtaccagaaactgtacacctatatccagtcccggttttaccgggcacctgaaataatattaggaagccgctattctacccctatcgatatctggagctttggctgtatcttggccgagctcctgactggccaacctctctttccgggggaagacgagggcgatcagctggcttgcatgatggagctccttggtatgcctccccccaagctcttggagcagtctaaacgagccaagtatttcattaattctaaggggattccaaggtattgcagcgtgaccacccaagccgacgggagagtcgtgctggtgggagggcgatcaagaagaggcaagaagagaggccctcccggttcgaaagattgggggactgccctgaaagggtgcgacgattacctgtttatcgaattcctgaagagatgcctgcattgggatccgtccgcgcgccttactcccgcccaagctcttaggcacccttggataagcaagagcgtccctagaccgctcaccacgatcgataaagtgtctggcaaaagagtcgtcaaccccgcgagcgcctttcagggtctgggcagtaagctgccacctgtggtggggatcgccaataagttaaaggcaaatctcatgtctgaaaccaacggctccattccactctgttctgttctgcctaaactcatcagttag

SEQ ID NO: 20373 - DNA, 732 bp, Artificial Sequence
  derived and/or modified sequence
atgaagtggaaggagaagctgggcgacggcgtgtacgacaccttcatgatgatcgacgagactaaatgtcccccctgttcaaacgtgttgtgcaacccaagcgagccaccccctcccaggagactaaacatgacaaccgagcagttcaccggcgaccatacacagcacttcctggacggcggggagatgaaagtggaacagctgttccaagagttcggaaacaggaagagcaacaccattcaatcagatggaatcagtgattcagagaaatgctcccctaccgtttcccagggcaagagttccgactgcctgaatacggttaagtccaactcctcctctaaggcgcctaaggtggttcctctgacacccgagcaagcccttaagcagtacaaacatcatctgacggcttatgagaaactggaaatcataaactatccagagatttattttgtgggccctaatgcaaagaaaagacatggggtgattgggggcccgaacaatggtggatacgatgatgcagacggcgcttatatccacgtgccgcgcgaccatctggcatatcgctatgaagtcttaaaaatcattgggaaaggtagttttggtcaggtggcacgcgtgtatgaccataagctgagacagtatgtggccctgaagatggtccgcaacgagaagcggtttcaccgccaggccgccgaagagatacgcatcctcgagcacttgaagaagcagtag

SEQ ID NO: 20374 - DNA, 1707 bp, Artificial Sequence
  derived and/or modified sequence
atgaaatggaaagagaaactgggagatggggtgtacgatacatttatgatgatcgatgagacaaagtgtcctccatgcagcaacgttctgtgtaatccatccgagcccccaccgccacgcaggttgaacatgaccaccgagcaattcacaggagaccacactcaacactttctcgatgggggtgagatgaaggtggagcaactcttccaggaatttggcaatcggaagagtaacacaatccagtccgatggcatcagtgatagtgagaaatgcagtccaacagtcagccagggcaaaagcagcgattgtctgaacaccgtaaagagcaattctagtagtaaagcccctaaggtcgtgccactgacaccagagcaggccttgaaacagtacaaacatcacctgaccgcgtatgagaagcttgaaatcattaactatcctgagatctactttgtcggaccaaatgcaaagaaacgccacggggtgatcggcggaccaaacaacggtggttatgacgacgccgacggtgcttacattcacgtacctagggaccaccttgcgtataggtacgaggtgcttaagataataggcaagggctcttttggccaagtggctagggtgtatgatcataagctgcgtcaatacgtcgccttgaagatggtgcggaacgaaaaacgatttcatcgccaggccgcagaagagattcgcattcttgagcacctgaagaagcaggacaagactgggtccatgaacgtgatccatatgttggaatcattcacattccggaatcatgtgtgtatggcttttgaactgctcagcatcgatttgtacgagctcattaaaaagaataagtttcagggcttcagcgtccagcttgtgcgtaagttcgcacaaagtatccttcagtcactggatgcgctccacaaaaacaaaatcattcattgcgatcttaagcccgagaacattctcctgaagcaccatggtagatcgagcactaaggtcatcgattttggttcctcgtgttttgagtatcagaagctttacacatatatccagtccaggttctatcgagcccctgagattattctcgggagtcgctattcaacccccatcgacatctggtccttcggctgtatactagctgagctgctgactggtcaacccctatttccgggagaggatgaaggcgatcagctcgcctgcatgatggagctgctgggcatgccccctcctaagttactcgagcagagcaaaagagccaagtactttatcaattccaaagggatccccagatactgtagcgtaacaacacaggcagatggccgagtcgtcctagttggaggcagaagtagaaggggtaagaagcggggaccacctggcagcaaggactggggtaccgccctgaagggctgtgacgactacctgttcatcgagttcctcaagcgctgtttgcactgggacccgtccgctcgcctcacacccgctcaagcactgcggcatccgtggatctcaaaaagcgtccctcgtccgctcactactattgacaaggtatctgggaaaagagtggtcaaccccgcaagcgcatttcaggggcttggctccaagctgcctccagtcgtcggtatagccaacaaactgaaagccaacctgatgtccgaaacaaatgggtctatccctttgtgctccgtgctacctaaattgatttcatag

SEQ ID NO: 20375 - DNA, 1707 bp, Artificial Sequence
  derived and/or modified sequence
atgaagtggaaggagaagctgggcgatggtgtgtatgacaccttcatgatgattgacgagacaaaatgcccaccatgttcaaatgtcctctgcaacccctcggaaccccctcccccacgacgcttgaacatgaccacagaacagtttactggcgaccatacacagcacttcctagacggcggagaaatgaaagtggaacagctctttcaggagttcggtaaccggaaatccaacactatccaaagcgatggaatctcagattcagaaaagtgcagccctactgtaagccaggggaaaagctctgattgcttgaatactgtgaaatctaacagcagtagcaaagctcccaaggtggtaccccttacacctgaacaggcacttaaacaatacaagcatcatctcaccgcttatgaaaagctagaaatcataaactaccccgagatctattttgtgggccctaacgcgaagaagaggcacggcgtgattggcggacccaataacgggggttacgacgatgctgacggggcatacattcacgtgcccagggaccaccttgcttatcggtacgaggttctgaaaataatagggaaggggagtttcggccaggttgcgagagtctacgatcataagttgcggcagtacgttgcactaaagatggtcaggaacgagaaacggtttcatcgacaggccgcagaggaaataagaattttagaacacctgaagaagcaggataaaacgggttcgatgaatgtaatccatatgcttgaaagttttacttttagaaatcacgtatgcatggcatttgagttactgtctattgatttatatgagttaattaagaaaaacaaattccaaggttttagcgtacagcttgtccgaaaatttgcccagtcaatcttgcagtctctcgatgcgttgcataaaaataagatcatacactgcgacttgaagccagagaacattctgctgaagcatcatgggaggagctccactaaagtgatcgatttcgggtctagttgcttcgaataccaaaaattgtacacatacattcagagccgcttttatagagcccctgaaatcatcctgggcagtcggtacagcacccccatagacatttggtcctttggctgcattcttgcagaactcctgacgggccagcctctttttcccggagaggacgagggcgaccaactcgcatgcatgatggagctcctgggcatgccccctccaaagctactcgagcagtccaaaagagctaagtacttcatcaacagtaaaggcatccccagatactgctcggtgaccactcaagccgatggtagagtcgtattggtgggtgggagatctcgacgaggcaaaaagagaggcccacctgggtccaaggattggggcactgcactgaagggatgtgacgactacctgtttatcgagtttttaaagcgctgcctacactgggatccaagcgccaggttgacgcccgctcaggcccttcgccacccctggatctcaaagtcagttcccagacctctgacgactattgacaaagtgtcaggaaaaagggtggttaatcccgcaagcgccttccagggcctcgggtctaaattgccaccagtggtgggtatcgccaataaactgaaggccaatctgatgtccgagacgaacggatccattcctttgtgctcggtgctccctaagctcatctcttag

SEQ ID NO: 20376 - DNA, 732 bp, Artificial Sequence
  derived and/or modified sequence
atgaaatggaaggaaaagctgggagacggggtatatgatacctttatgatgatagacgagacgaagtgtccgccttgcagtaacgtcctgtgcaacccatctgagccaccaccaccccgaagactgaacatgaccacagaacaatttactggggatcacacacaacattttttagacggcggagaaatgaaggtcgaacagttgttccaggaattcggcaatcgcaaatcaaacaccattcagtcagacggaatttccgacagcgagaaatgtagcccaaccgtgtcccaggggaagtcaagcgactgccttaacacagtgaagtctaatagctcatcaaaggcccctaaggtggtgcctcttaccccagagcaggccttaaagcaatacaagcaccatttaacggcttatgaaaaactcgagatcataaactacccggaaatttacttcgtgggcccaaacgccaaaaagcgtcacggggtaataggcggacccaataatggaggatacgacgacgctgacggggcttacatccacgtgccgagagaccacctcgcatataggtacgaggtgctgaagattatcggcaagggctcctttggccaagttgcccgagtgtatgatcataaactgcggcagtatgtggccctcaagatggtccgcaatgaaaagagattccaccggcaggcagccgaggagataagaatactggagcatctgaagaagcagtag

SEQ ID NO: 20377 - DNA, 732 bp, Artificial Sequence
  derived and/or modified sequence
atgaagtggaaggagaagctgggcgacggcgtgtacgacaccttcatgatgatcgacgagaccaagtgccccccctgcagcaacgtgctgtgcaaccccagcgagccccccccccccagaagactgaacatgaccaccgagcagttcaccggcgaccacacccagcacttcctggacggcggcgagatgaaggtggagcagctgttccaggagttcggcaacagaaagagcaacaccatccagagcgacggcatcagcgacagcgagaagtgcagccccaccgtgagccagggcaagagcagcgactgcctgaacaccgtgaagagcaacagcagcagcaaggcccccaaggtggtgcccctgacccccgagcaggccctgaagcagtacaagcaccacctgaccgcctacgagaagctggagatcatcaactaccccgagatctacttcgtgggccccaacgccaagaagagacacggcgtgatcggcggccccaacaacggcggctacgacgacgccgacggcgcctacatccacgtgcccagagaccacctggcctacagatacgaggtgctgaagatcatcggcaagggcagcttcggccaggtggccagagtgtacgaccacaagctgagacagtacgtggccctgaagatggtgagaaacgagaagagattccacagacaggccgccgaggagatcagaatcctggagcacctgaagaagcagtag

SEQ ID NO: 20378 - DNA, 2329 bp, Artificial Sequence
  derived and/or modified sequence
ggcgctggcaagcgaagcttgggggtggggaggaggtagagtgagccctcagtaggagggacgagggcaggggtctgactgcctccccgggaccgcccccacctcctctctatcagggccccctccccccatccctgtctcaccgggcgcgggggacggggctagagcggagttagagcaagaagaatttccacccctggattccctctgaaaccctagatcggggtatatgttaagggattacgaaaatctaggactttttgtggggctttttattaaagggggggagcccgggagcaataccttggaaagaagccctgttgcttagagcggataaccaacggctgaactcttggggtttgctgtgaggggtgcggtctagcttcgaatgtacagtggtggagccacagtgttaaagaacagagaagtgatccttaatcatttagaattttgcctccaccatccaccagaaaatgaagtggaaagagaagttgggggatggtgtctatgacaccttcatgatgatagatgaaaccaaatgtcccccctgttcaaatgtactctgcaatccttctgaaccacctccacccagaagactaaatatgaccactgagcagtttacaggagatcatactcagcactttttggatggaggtgagatgaaggtagaacagctgtttcaagaatttggcaacagaaaatccaatactattcagtcagatggcatcagtgactctgaaaaatgctctcctactgtttctcagggtaaaagttcagattgcttgaatacagtaaaatccaacagttcatccaaggcacccaaagtggtgcctctgactccagaacaagccctgaagcaatataaacaccacctcactgcctatgagaaactggaaataattaattatccagaaatttactttgtaggtccaaatgccaagaaaagacatggagttattggtggtcccaataatggagggtatgatgatgcagatggggcctatattcatgtacctcgagaccatctagcttatcgatatgaggtgctgaaaattattggcaaggggagttttgggcaggtggccagggtctatgatcacaaacttcgacagtacgtggccctaaaaatggtgcgcaatgagaagcgctttcatcgtcaagcagctgaggagatccggattttggagcatcttaagaaacaggataaaactggtagtatgaacgttatccacatgctggaaagtttcacattccggaaccatgtttgcatggcctttgaattgctgagcatagacctttatgagctgattaaaaaaaataagtttcagggttttagcgtccagttggtacgcaagtttgcccagtccatcttgcaatctttggatgccctccacaaaaataagattattcactgcgatctgaagccagaaaacattctcctgaaacaccacgggcgcagttcaaccaaggtcattgactttgggtccagctgtttcgagtaccagaagctctacacatatatccagtctcggttctacagagctccagaaatcatcttaggaagccgctacagcacaccaattgacatatggagttttggctgcatccttgcagaacttttaacaggacagcctctcttccctggagaggatgaaggagaccagttggcctgcatgatggagcttctagggatgccaccaccaaaacttctggagcaatccaaacgtgccaagtactttattaattccaagggcataccccgctactgctctgtgactacccaggcagatgggagggttgtgcttgtggggggtcgctcacgtaggggtaaaaagcggggtcccccaggcagcaaagactgggggacagcactgaaagggtgtgatgactacttgtttatagagttcttgaaaaggtgtcttcactgggacccctctgcccgcttgaccccagctcaagcattaagacacccttggattagcaagtctgtccccagacctctcaccaccatagacaaggtgtcagggaaacgggtagttaatcctgcaagtgctttccagggattgggttctaagctgcctccagttgttggaatagccaataagcttaaagctaacttaatgtcagaaaccaatggtagtatacccctatgcagtgtattgccaaaactgattagctagtggacagagatatgcccagagatgcatatgtgtatatttttatgatcttacaaacctgcaaatggaaaaaatgcaagcccattggtggatgtttttgttagagtagactttttttaaacaagacaaaacatttttatatgattataaaa

SEQ ID NO: 20379 - DNA, 870 bp, Artificial Sequence
  derived and/or modified sequence
agcggaggtaacggcgccacggggtaacgggctggaggcgccacagggagcggctggcgctgtggtggagccacagtgttaaagaacagagaagtgatccttaatcatttagaattttgcctccaccatccaccagaaaatgaagtggaaagagaagttgggggatggtgtctatgacaccttcatgatgatagatgaaaccaaatgtcccccctgttcaaatgtactctgcaatccttctgaaccacctccacccagaagactaaatatgaccactgagcagtttacaggagatcatactcagcactttttggatggaggtgagatgaaggtagaacagctgtttcaagaatttggcaacagaaaatccaatactattcagtcagatggcatcagtgactctgaaaaatgctctcctactgtttctcagggtaaaagttcagattgcttgaatacagtaaaatccaacagttcatccaaggcacccaaagtggtgcctctgactccagaacaagccctgaagcaatataaacaccacctcactgcctatgagaaactggaaataattaattatccagaaatttactttgtaggtccaaatgccaagaaaagacatggagttattggtggtcccaataatggagggtatgatgatgcagatggggcctatattcatgtacctcgagaccatctagcttatcgatatgaggtgctgaaaattattggcaaggggagttttgggcaggtggccagggtctatgatcacaaacttcgacagtacgtggccctaaaaatggtgcgcaatgagaagcgctttcatcgtcaagcagctgaggagatccggattttggagcatcttaagaaacagga

SEQ ID NO: 20380 - protein, 323 aa, Artificial Sequence
  derived and/or modified sequence
MSHTNVTIFHPAVFVLPGIPGLEAYHIWLSIPLCLIYITAVLGNSILIVVIVMERNLHVPMYFFLSMLAVMDILLSTTTVPKALAIFWLQAHNIAFDACVTQGFFVHMMFVGESAILLAMAFDRFVAICAPLRYTTVLTWPVVGRIALAVITRSFCIIFPVIFLLKRLPFCLTNIVPHSYCEHIGVARLACADITVNIWYGFSVPIVMVILDVILIAVSYSLILRAVFRLPSQDARHKALSTCGSHLCVILMFYVPSFFTLLTHHFGRNIPQHVHILLANLYVAVPPMLNPIVYGVKTKQIREGVAHRFFDIKTWCCTSPLGS

SEQ ID NO: 20381 - protein, 270 aa, Artificial Sequence
  derived and/or modified sequence
MFFSLHRETPKEGMFGANLTTFHPTLFILLGIPGLEQYHIWLSIPFYLMYITAVLGNGALILVVLSEHTLHVFLSMLAGTDILLSTTTVPKALAIFWVHAGEIAFDACITQMFFIHVAFVAESGILLAMAFDSYVAICTPLRYTTILTSMVNGKMTLTIWGQSIGTIFPVIFLLKRLPYCQTNIIPHSYCEHIGVAQLACADITVNIWYGFSVPMASVLVDVAFIGFSYTLILQAVFRLPSQESQHKALNTCGSTLELFSSSSSHHFLLS

SEQ ID NO: 20382 - DNA, 972 bp, Artificial Sequence
  derived and/or modified sequence
atgagccacaccaacgtgaccatcttccaccccgccgtgttcgtgctgcccggcatccccggcctggaggcctaccacatctggctgagcatccccctgtgcctgatctacatcaccgccgtgctgggcaacagcatcctgatcgtggtgatcgtgatggagagaaacctgcacgtgcccatgtacttcttcctgagcatgctggccgtgatggacatcctgctgagcaccaccaccgtgcccaaggccctggccatcttctggctgcaggcccacaacatcgccttcgacgcctgcgtgacccagggcttcttcgtgcacatgatgttcgtgggcgagagcgccatcctgctggccatggccttcgacagattcgtggccatctgcgcccccctgagatacaccaccgtgctgacctggcccgtggtgggcagaatcgccctggccgtgatcaccagaagcttctgcatcatcttccccgtgatcttcctgctgaagagactgcccttctgcctgaccaacatcgtgccccacagctactgcgagcacatcggcgtggccagactggcctgcgccgacatcaccgtgaacatctggtacggcttcagcgtgcccatcgtgatggtgatcctggacgtgatcctgatcgccgtgagctacagcctgatcctgagagccgtgttcagactgcccagccaggacgccagacacaaggccctgagcacctgcggcagccacctgtgcgtgatcctgatgttctacgtgcccagcttcttcaccctgctgacccaccacttcggcagaaacatcccccagcacgtgcacatcctgctggccaacctgtacgtggccgtgccccccatgctgaaccccatcgtgtacggcgtgaagaccaagcagatcagagagggcgtggcccacagattcttcgacatcaagacctggtgctgcaccagccccctgggcagctag

SEQ ID NO: 20383 - DNA, 813 bp, Artificial Sequence
  derived and/or modified sequence
atgttcttcagcctgcacagagagacccccaaggagggcatgttcggcgccaacctgaccaccttccaccccaccctgttcatcctgctgggcatccccggcctggagcagtaccacatctggctgagcatccccttctacctgatgtacatcaccgccgtgctgggcaacggcgccctgatcctggtggtgctgagcgagcacaccctgcacgtgttcctgagcatgctggccggcaccgacatcctgctgagcaccaccaccgtgcccaaggccctggccatcttctgggtgcacgccggcgagatcgccttcgacgcctgcatcacccagatgttcttcatccacgtggccttcgtggccgagagcggcatcctgctggccatggccttcgacagctacgtggccatctgcacccccctgagatacaccaccatcctgaccagcatggtgaacggcaagatgaccctgaccatctggggccagagcatcggcaccatcttccccgtgatcttcctgctgaagagactgccctactgccagaccaacatcatcccccacagctactgcgagcacatcggcgtggcccagctggcctgcgccgacatcaccgtgaacatctggtacggcttcagcgtgcccatggccagcgtgctggtggacgtggccttcatcggcttcagctacaccctgatcctgcaggccgtgttcagactgcccagccaggagagccagcacaaggccctgaacacctgcggcagcaccctggagctgttcagcagcagcagcagccaccacttcctgctgagctag

SEQ ID NO: 20384 - DNA, 972 bp, Artificial Sequence
  derived and/or modified sequence
atgtcacatactaatgttactatcttccaccctgcggttttcgtgttacccggtatcccaggtttggaagcctaccacatttggttgagcataccgctctgtctgatctacatcaccgccgtcttgggcaacagcattcttattgtagttatcgtcatggaacgaaatcttcatgttcctatgtactttttcctcagcatgttggcagtcatggacatcctgctcagcacaacgactgttcccaaggcgttagccatattttggctgcaggcacataacatcgccttcgatgcgtgcgtcacacaagggttctttgtgcacatgatgttcgttggcgagtctgcaattttgcttgcaatggccttcgatcggttcgtggccatttgcgcccccctgcgttacacaaccgttctcacctggccagtggtcgggcgcatcgcattagccgtgatcaccagatccttctgtattatcttccctgtgattttcctcttaaagagactgccgttctgcttgactaacatcgtgccccactcgtattgcgaacatataggtgtggcacgtctggcatgcgcagacataaccgtgaatatctggtacggtttttccgttccaatcgttatggtgattctcgatgtcattctgattgctgtctcctacagcttgattctgcgcgccgtattccgcctccccagccaggatgcccggcacaaagccctcagtacctgcggatcacacctttgtgtgattctgatgttttatgtgccttccttctttacactgcttacacatcatttcggccgcaatatcccacagcacgtgcatatccttctggcgaacctgtatgtagccgtaccaccaatgctgaatcctattgtatatggcgtgaagactaagcagatcagggagggagtggcccatcgctttttcgacattaagacatggtgttgcacttctccccttggctcttag

SEQ ID NO: 20385 - DNA, 813 bp, Artificial Sequence
  derived and/or modified sequence
atgttttttagcttacaccgcgaaactcccaaggaagggatgtttggagccaatctcaccacttttcaccccactctctttatcctcctcgggattccaggactagaacagtaccatatttggctgagcataccattctatctgatgtacataaccgcagtgctaggcaatggcgctctaatcttggtcgtgcttagcgaacatacactacacgtgttcctcagtatgctggctggaactgacattctgctttccaccacgacggtgcccaaggccttggcgatattttgggtccatgcgggagaaatcgcctttgacgcatgtataacacagatgttttttatccacgtggcctttgtggcagagtccggtatccttctagcaatggcctttgactcctacgtggccatatgcacacccttaagatatactacaattctcacctctatggtcaacggcaagatgaccctcacaatctggggtcaaagtatcggaaccattttcccagtcatcttcctgctcaaacgcctgccctactgtcagacaaatatcattcctcattcatattgcgagcatatcggcgtggcacaactggcatgtgctgacataaccgtgaacatttggtatggctttagcgtgcccatggcctcagtgttggtagacgtggcctttattggctttagttatactctcattctacaggccgtgttccgtttgccttctcaagaatcccagcataaggctctaaacacatgtggatcgacactggagctttttagctcctcttccagccaccattttttgctgagctag

SEQ ID NO: 20386 - DNA, 972 bp, Artificial Sequence
  derived and/or modified sequence
atgagccacaccaacgtgaccatcttccaccctgctgtgtttgtgctgcccggcatccctggcctggaggcctaccacatctggctgagcatccccctgtgcctgatctacatcacagctgtgctgggcaacagcatcctgattgtggtgattgtgatggagaggaacctgcacgtgcccatgtacttcttcctgtccatgctggccgtgatggacatcctgctgagcaccaccaccgtgcccaaggccctggccatcttctggctgcaggcccacaacatcgcctttgatgcctgtgtgacccagggcttctttgtgcacatgatgtttgtgggggagagcgccatcctgctggccatggcctttgacagatttgtggccatctgtgcccccctgcgctacaccaccgtgctgacctggcctgtggtgggccgcatcgccctggccgtcatcaccaggagcttctgcatcatcttccctgtgatcttcctgctgaagaggctgcccttctgcctgaccaacatcgtgccccacagctactgtgagcacatcggcgtggcccggctggcctgtgccgacatcaccgtgaacatctggtacggcttctctgtgcccatcgtgatggtgatcctggatgtgatcctgattgctgtgtcctacagcctcatcctgcgggctgtgttccggctgcccagccaggatgcccggcacaaggccctgagcacctgtggcagccacctgtgtgtgatcctgatgttctacgtgcccagcttcttcaccctgctgacccaccacttcggcaggaacatcccccagcacgtgcacatcctgctggccaacctgtatgtggccgtgccccccatgctgaaccccatcgtgtatggagtgaagaccaagcagatccgggagggcgtggcccaccgcttctttgacatcaagacctggtgctgcaccagccccctgggcagctag

SEQ ID NO: 20387 - DNA, 813 bp, Artificial Sequence
  derived and/or modified sequence
atgttcttcagcctgcaccgggagacccccaaggagggcatgtttggagccaacctgaccaccttccaccccaccctcttcatcctgctgggcatccctggcctggagcagtaccacatctggctgagcatccccttctacctgatgtacatcacagctgtgctgggcaatggagccctgatcctggtggtgctgtctgagcacaccctgcacgtgttcctgtccatgctggccggcacagacatcctgctgagcaccaccaccgtgcccaaggccctggccatcttctgggtgcacgccggggagatcgcctttgatgcctgcatcacccagatgttcttcatccacgtggcctttgtggccgagagcggcatcctgctggccatggcctttgacagctatgtggccatctgcacccccctgcgctacaccaccatcctgacctccatggtgaatggcaagatgaccctgaccatctggggccagagcatcggcaccatcttccctgtgatcttcctgctgaagaggctgccctactgccagaccaacatcatcccccacagctactgtgagcacatcggcgtggcccagctggcctgtgccgacatcaccgtgaacatctggtacggcttctctgtgcccatggcctctgtgctggtggatgtggccttcatcggcttctcctacaccctcatcctgcaggccgtgttccggctgcccagccaggagagccagcacaaggccctgaacacctgtggcagcaccctggagctgttcagcagcagcagcagccaccacttcctgctgtcctag

SEQ ID NO: 20388 - DNA, 972 bp, Artificial Sequence
  derived and/or modified sequence
atgagccacaccaacgtgaccatcttccaccccgccgtgttcgtgctgccgggtattccaggcttagaagcgtatcacatttggctgtccattccattatgcttgatctatattactgccgtgctggggaacagcattctgatcgtagttattgtcatggagcggaaccttcacgtccccatgtatttcttcctctcgatgcttgccgtgatggatatcctcctgagcactactacagtaccaaaggccctcgcaatcttctggcttcaggcacacaacatcgcgtttgacgcctgtgtcacccaaggcttttttgtccatatgatgtttgtcggcgagtcggccatcttgctcgcaatggcattcgaccgcttcgtcgccatctgcgcccctttgcggtacacaactgtattgacatggccagtagtaggtaggatcgcgctggccgtgatcacacggagtttttgtatcatctttccagtgattttcctgttaaagaggctccctttctgtctcacgaatatagtcccgcatagctactgcgagcacattggtgtggccagactggcctgtgccgacataaccgtcaatatctggtatggatttagtgtcccaatagtgatggtgattttggatgtgattctgatcgccgtgtcatactcgctgatcttacgggcagttttcaggctgccatcccaggatgcccgccacaaagccctctccacctgtggaagtcatctctgtgttatcctgatgttttacgtgcctagcttctttacactgctgacacaccacttcgggcggaacatcccacagcacgttcacatcctgctggctaatctgtacgtggccgtgccacccatgctgaaccccatagtgtacggtgtgaagacgaagcaaatacgagagggcgtggctcaccgcttcttcgatattaaaacctggtgttgtacctctccactgggaagctag

SEQ ID NO: 20389 - DNA, 813 bp, Artificial Sequence
  derived and/or modified sequence
atgttcttcagcctgcaccgggagacccccaaggagggcatgttcggcgcgaaccttaccactttccatccgacgctgttcatactcctcgggataccaggactggagcagtaccatatctggcttagcattccattctacctgatgtacataaccgccgtattggggaatggagccctaattctggtagtactgagcgagcatacactacacgtttttctgtccatgctggctggcactgatattttactgtcaaccactaccgtccctaaagcactggccatcttttgggtgcatgcaggtgaaatcgctttcgatgcgtgcatcactcaaatgtttttcatacacgtggccttcgtggctgaaagcggcattctgctggccatggcatttgattcatatgttgcaatttgcacgcctttgagatacactacaattctgacctctatggtcaatggtaagatgaccctgaccatttggggacagagcattggcaccatttttccagtaatttttctactcaagcggttgccctactgccagaccaacatcatcccacactcctactgtgagcatatcggcgtcgcacagcttgcgtgcgctgacattacagtcaacatctggtacggcttctccgttcctatggcaagcgtgctggtagatgtcgctttcatcggcttttcttacacactgatcctccaagccgtgtttagactgccttctcaagagtcacagcataaggcactaaacacatgcggctcgaccttggagttgttctccagcagtagctcacatcatttcctgctgtcctag

SEQ ID NO: 20390 - DNA, 1079 bp, Artificial Sequence
  derived and/or modified sequence
ttcgggagtgctttctgtttctatcactttcagtagactcatcagcttctaagtcattatagagaggaccataaagtgcatcatgagtcacaccaatgttaccatcttccatcctgcagtttttgtccttcctggcatccctgggttggaggcttatcacatttggctgtcaatacctctttgcctcatttacatcactgcagtcctgggaaacagcatcctgatagtggttattgtcatggaacgtaaccttcatgtgcccatgtatttcttcctctcaatgctggccgtcatggacatcctgctgtctaccaccactgtgcccaaggccctagccatcttttggcttcaagcacataacattgcttttgatgcctgtgtcacccaaggcttctttgtccatatgatgtttgtgggggagtcagctatcctgttagccatggcctttgatcgctttgtggccatttgtgccccactgagatatacaacagtgctaacatggcctgttgtggggaggattgctctggccgtcatcacccgaagcttctgcatcatcttcccagtcatattcttgctgaagcggctgcccttctgcctaaccaacattgttcctcactcctactgtgagcatattggagtggctcgtttagcctgtgctgacatcactgttaacatttggtatggcttctcagtgcccattgtcatggtcatcttggatgttatcctcatcgctgtgtcttactcactgatcctccgagcagtgtttcgtttgccctcccaggatgctcggcacaaggccctcagcacttgtggctcccacctctgtgtcatccttatgttttatgttccatccttctttaccttattgacccatcattttgggcgtaatattcctcaacatgtccatatcttgctggccaatctttatgtggcagtgccaccaatgctgaaccccattgtctatggtgtgaagactaagcagatacgtgagggtgtagcccaccggttctttgacatcaagacttggtgctgtacctcccctctgggctcatgaatcttcatgtccagctccttcaagg

SEQ ID NO: 20391 - DNA, 972 bp, Artificial Sequence
  derived and/or modified sequence
atgagccacaccaacgttaccattttccatccggctgtattcgtcttgcctgggatacctggcctggaagcctaccacatttggctctcaatccccctgtgcctaatctacatcaccgccgtactgggtaactccatcctaattgtcgtcatcgtgatggagaggaatctgcacgttcctatgtacttcttccttagcatgctggccgtgatggatatcctactgtccactacaacggtcccaaaggcactggcaattttctggttacaagcccacaacattgcattcgacgcctgcgttacacagggcttttttgtccacatgatgttcgtcggtgaatcggccattctcctggccatggcattcgaccgattcgttgctatctgtgcccctctgcgttataccaccgtgctgacatggcctgtcgtcggcagaattgctctagccgtcatcacgaggtcattctgtatcatcttccctgtcatctttcttttgaagaggctccccttctgcctgacaaacatcgttccacatagctactgtgaacacatcggggtggcgcgactggcttgcgccgacatcactgtgaacatctggtacggtttctccgtgcccatagtgatggtgattttagatgtgattctgatcgcagttagttactcccttatcttacgcgctgtgttccgcctgccatcacaggacgctcggcacaaagcactcagtacctgtggcagccatttatgtgtgatactgatgttttatgtgccatctttttttacactgctgacgcaccacttcgggagaaatatccctcaacatgttcacatcctcctggctaacttgtacgtggctgttcccccaatgctcaatccaattgtgtacggggtaaagaccaagcagatccgcgagggcgtggcccaccgattcttcgatatcaaaacttggtgctgtacatctccactgggcagctag

SEQ ID NO: 20392 - DNA, 813 bp, Artificial Sequence
  derived and/or modified sequence
atgtttttcagcctgcatagagagacacccaaggagggcatgtttggtgccaatctcactacttttcatccaactttattcatcctcctgggaattccagggctggaacaataccatatttggctttcgattccattctacctaatgtatatcaccgctgtgttgggcaacggcgctttgatactggttgtcctgtcggagcacaccctgcacgtgttcctgtccatgctggccggaacagatatcctgttgtctacgacgacagtgcctaaggccttggctattttttgggtccatgcaggggagattgctttcgacgcctgcatcacccaaatgttctttatccacgtggcttttgtcgcagagtctggcatcctgctggccatggcgttcgactcctacgttgccatttgcacacccttacgctataccacgatcctgacatccatggtgaacggaaagatgactctcacaatttggggacaatctattgggactatttttcctgtgattttcctcctcaaaaggctgccatactgtcaaacaaacatcattccacactcttactgcgaacatataggtgtggctcaactcgcatgtgcagacattaccgtcaacatctggtatggcttttccgtacctatggctagcgtactggtggatgtggcgttcatcggcttttcatataccctcattctccaggccgtgtttcgactgccgagtcaggagagtcagcacaaggccctgaacacttgtgggagcaccctggagctgttttcatcatcgtcgtctcatcatttcctgctgagctag

SEQ ID NO: 20393 - DNA, 813 bp, Artificial Sequence
  derived and/or modified sequence
atgttctttagtcttcatagagagactccaaaagaaggcatgtttggtgctaatctcaccaccttccatcccactctattcattctccttggcatcccaggactggagcaataccacatctggctttccattcctttctaccttatgtacatcactgcagtcttgggaaatggagccctcatcctagttgtcctcagtgaacacaccctccatgtcttcctatccatgctggctggcactgatatcctgctatccaccaccactgtgcctaaggccttggcgatcttctgggtccacgctggggagatagcctttgatgcctgcattactcagatgtttttcattcatgttgcctttgtggctgagtcaggaatcctgctggccatggcatttgacagttatgtagccatttgtactcccttgagatacactaccatcttaacttctatggtaaatggaaaaatgaccctgacaatctggggacaaagcattgggacaatttttcctgtcatattcctgctgaagaggctgccatactgtcagaccaatatcatcccccactcatactgtgagcacattggggtggcccaattggcctgtgctgacataactgtcaatatctggtatggcttttcagtgccaatggcatcggttttggtagatgttgcattcattggtttttcctacactttgatcctccaggctgtgtttagacttccttcccaggagtcccagcacaaagctcttaacacctgtggttctacattggagttgttctcctcttcttcatcccatcattttttactttcctga

SEQ ID NO: 20394 - protein, 546 aa, Artificial Sequence
  derived and/or modified sequence
MELENIVANSLLLKARQEKDYSSLCDKQPIGRRLFRQFCDTKPTLKRHIEFLDAVAEYEVADDEDRSDCGLSILDRFFNDKLAAPLPEIPPDVVTECRLGLKEENPSKKAFEECTRVAHNYLRGEPFEEYQESSYFSQFLQWKWLERQPVTKNTFRHYRVLGKGGFGEVCACQVRATGKMYACKKLQKKRIKKRKGEAMALNEKRILEKVQSRFVVSLAYAYETKDALCLVLTIMNGGDLKFHIYNLGNPGFDEQRAVFYAAELCCGLEDLQRERIVYRDLKPENILLDDRGHIRISDLGLATEIPEGQRVRGRVGTVGYMAPEVVNNEKYTFSPDWWGLGCLIYEMIQGHSPFKKYKEKVKWEEVDQRIKNDTEEYSEKFSEDAKSICRMLLTKNPSKRLGCRGEGAAGVKQHPVFKDINFRRLEANMLEPPFCPDPHAVYCKDVLDIEQFSVVKGIYLDTADEDFYARFATGCVSIPWQNEMIESGCFKDINKSESEEALPLDLDKNIHTPVSRPNRGFFYRLFRRGGCLTMVPSEKEVEPKQC

SEQ ID NO: 20395 - DNA, 1641 bp, Artificial Sequence
  derived and/or modified sequence
atggagctggagaacatcgtggccaacagcctgctgctgaaggccagacaggagaaggactacagcagcctgtgcgacaagcagcccatcggcagaagactgttcagacagttctgcgacaccaagcccaccctgaagagacacatcgagttcctggacgccgtggccgagtacgaggtggccgacgacgaggacagaagcgactgcggcctgagcatcctggacagattcttcaacgacaagctggccgcccccctgcccgagatcccccccgacgtggtgaccgagtgcagactgggcctgaaggaggagaaccccagcaagaaggccttcgaggagtgcaccagagtggcccacaactacctgagaggcgagcccttcgaggagtaccaggagagcagctacttcagccagttcctgcagtggaagtggctggagagacagcccgtgaccaagaacaccttcagacactacagagtgctgggcaagggcggcttcggcgaggtgtgcgcctgccaggtgagagccaccggcaagatgtacgcctgcaagaagctgcagaagaagagaatcaagaagagaaagggcgaggccatggccctgaacgagaagagaatcctggagaaggtgcagagcagattcgtggtgagcctggcctacgcctacgagaccaaggacgccctgtgcctggtgctgaccatcatgaacggcggcgacctgaagttccacatctacaacctgggcaaccccggcttcgacgagcagagagccgtgttctacgccgccgagctgtgctgcggcctggaggacctgcagagagagagaatcgtgtacagagacctgaagcccgagaacatcctgctggacgacagaggccacatcagaatcagcgacctgggcctggccaccgagatccccgagggccagagagtgagaggcagagtgggcaccgtgggctacatggcccccgaggtggtgaacaacgagaagtacaccttcagccccgactggtggggcctgggctgcctgatctacgagatgatccagggccacagccccttcaagaagtacaaggagaaggtgaagtgggaggaggtggaccagagaatcaagaacgacaccgaggagtacagcgagaagttcagcgaggacgccaagagcatctgcagaatgctgctgaccaagaaccccagcaagagactgggctgcagaggcgagggcgccgccggcgtgaagcagcaccccgtgttcaaggacatcaacttcagaagactggaggccaacatgctggagccccccttctgccccgacccccacgccgtgtactgcaaggacgtgctggacatcgagcagttcagcgtggtgaagggcatctacctggacaccgccgacgaggacttctacgccagattcgccaccggctgcgtgagcatcccctggcagaacgagatgatcgagagcggctgcttcaaggacatcaacaagagcgagagcgaggaggccctgcccctggacctggacaagaacatccacacccccgtgagcagacccaacagaggcttcttctacagactgttcagaagaggcggctgcctgaccatggtgcccagcgagaaggaggtggagcccaagcagtgctag

SEQ ID NO: 20396 - DNA, 1641 bp, Artificial Sequence
  derived and/or modified sequence
atggagctggagaacatagtggctaattcacttctcctgaaagcccgccaagagaaggattacagctctctttgcgacaagcagcccataggccggcggctcttccggcagttctgcgatacaaaacccaccctcaagaggcatatcgagttcctagacgcagtggctgagtacgaggtcgcagacgatgaagatcggtctgactgtggacttagcatccttgaccgcttcttcaacgataagttggcagccccactgcctgagatcccacccgacgtggttactgaatgccggcttggactgaaggaggagaaccctagcaagaaagcattcgaagaatgtactagagtcgcccacaattatttgaggggagaacccttcgaagagtaccaggagagttcttacttctctcagttcttgcagtggaaatggctcgaaagacaaccagtcacaaaaaatacctttcgacactaccgagttctggggaaagggggcttcggcgaggtctgcgcatgtcaggtacgcgctaccggtaagatgtatgcatgcaagaagttacaaaaaaaaagaatcaagaagcgtaagggagaagctatggctctaaatgagaaacgaatactggagaaggtgcagagcaggttcgtcgtcagtctggcctacgcttacgagaccaaagatgccctgtgcctcgtgctgacaataatgaacggaggagatctgaaatttcatatttataacctcggcaaccctggattcgatgagcaaagagctgtattctacgccgcagagctatgttgcggcctggaggatctccagcgcgaaagaatagtataccgggacctgaagcctgaaaatatcctgctggatgacagaggccatatccgcatcagcgacctgggcttggccactgagattccggagggccagagggttcggggtcgggtgggcaccgtaggatacatggctccggaggtagtgaataatgagaaatacaccttctctcccgactggtggggcctcggatgcctaatttatgagatgattcaggggcactcacccttcaagaaatacaaggagaaggtgaagtgggaggaagtggaccagcgaataaagaatgataccgaggagtactccgaaaaattttctgaggacgccaaaagcatctgcaggatgttgctaactaagaatccaagcaaacgcctcggatgtagaggtgagggcgcagctggagttaagcagcatcccgtgttcaaggatattaacttcaggaggcttgaagctaatatgctagagccccccttctgccccgacccacatgccgtgtattgcaaagacgttctcgacatcgagcagttttctgttgtcaaaggaatttacctggacaccgccgatgaggacttttacgcgcgctttgccacaggatgcgtatcaatcccatggcagaacgagatgatagaaagtggctgcttcaaggacatcaataagtctgagagtgaggaggctttgccattggacctggataagaacatacacactcccgtgtctaggcccaaccgcggctttttttacagactgttcagaagaggcggctgtctcaccatggtgccgagcgagaaggaggtggagcccaaacaatgttag

SEQ ID NO: 20397 - DNA, 1641 bp, Artificial Sequence
  derived and/or modified sequence
atggagctggagaacatcgtggccaacagcctgctgctgaaggcccggcaggagaaggactacagcagcctgtgtgacaagcagcccatcggccggcggctcttccggcagttctgtgacaccaagcccaccctgaagaggcacatcgagttcctggatgctgtggccgagtatgaggtggctgatgatgaggacagaagtgactgtggcctgagcatcctggaccgcttcttcaatgacaagctggccgcccccctgcctgagatccccccagatgtggtgacagagtgccgcctgggcctgaaggaggagaaccccagcaagaaggcctttgaagaatgtaccagggtggcccacaactacctgcggggggagccctttgaggagtaccaggagagcagctacttcagccagttcctgcagtggaagtggctggagcggcagcctgtgaccaagaacaccttccgccactacagagtgctgggcaaaggaggctttggagaggtgtgtgcctgccaggtgcgggccaccgggaagatgtatgcctgcaagaagctgcagaagaagaggatcaagaagaggaaaggagaggccatggccctgaatgagaagaggatcctggagaaggtgcagagcagatttgtggtgtccctggcctatgcctatgagaccaaggatgccctgtgcctggtgctgaccatcatgaatggaggagacctgaagttccacatctacaacctgggcaaccctggctttgatgagcagagagctgtgttctatgctgctgagctgtgctgcggcctggaggacctgcagcgggagcgcatcgtgtacagagacctgaagccagagaacatcctgctggatgaccggggccacatccgcatcagtgacctgggcctggccacagagatccctgagggccagagggtgcggggccgggtgggcaccgtgggctacatggcccctgaggtggtgaacaatgagaagtacaccttctccccagactggtggggcctgggctgcctgatctatgagatgatccagggccacagccccttcaagaagtacaaggagaaggtgaagtgggaggaggtggaccagaggatcaagaatgacacagaggagtacagcgagaagttctctgaagatgccaagagcatctgcaggatgctgctgaccaagaaccccagcaagaggctgggctgccgcggggagggcgctgctggggtgaagcagcaccctgtgttcaaggacatcaacttccggcggctggaggccaacatgctggagccccccttctgcccagacccccatgctgtgtactgcaaggatgtgctggacatcgagcagttctctgtggtgaagggcatctacctggacacagcagatgaggacttctacgccaggtttgccaccggctgtgtgtccatcccctggcagaatgagatgattgaaagtggctgcttcaaggacatcaacaagtctgagagcgaggaggccctgcccctggacctggacaagaacatccacacccctgtgtcccggcccaacagaggcttcttctaccgcctcttcagaagaggaggctgcctgaccatggtgcccagcgagaaggaggtggagcccaagcagtgctag

SEQ ID NO: 20398 - DNA, 2013 bp, Artificial Sequence
  derived and/or modified sequence
ccgccgcggtcgggctgccccctcccctcgccccgaccgctcccctgctggtgagggcctgcggaggcggcggcggcggcgcccttggtggcagtggtggcggcggagcagcctcccgggatcgtgtccggagctcgaggagagggtggtgcccggcgagctatgcacgggggcggcggcgtctcctcctgttccgcctcctcagtctcctcggtctcgcagaatccgccggcggcggcggcgccaggacatggagctcgagaacatcgtggccaactcgctgctgctgaaagcgcgtcaagaaaaggattatagcagtctttgtgacaagcaaccgataggaagacgtctcttcaggcagttctgtgataccaaacccactctaaagaggcacattgaattcttggatgcagtggcagaatatgaagttgccgatgatgaggaccgaagtgattgtggactgtcaatcttagatagattcttcaatgataagttggcagcccctttaccagaaatacctccagatgttgtgacagaatgtagattgggactgaaggaggagaacccttccaaaaaagcctttgaggaatgtactagagttgcccataactacctaagaggggaaccatttgaagaataccaagaaagctcatatttttctcagtttttacaatggaaatggctggaaaggcaacccgtaacaaagaacacatttagacattacagagttctaggaaaaggcggatttggagaggtttgcgcctgtcaagtgcgagccacaggaaaaatgtatgcctgcaaaaagctacaaaaaaaaagaataaagaagaggaaaggtgaagctatggctctaaatgagaaaagaattctggagaaagtgcaaagtagattcgtagttagtttagcctacgcttatgaaaccaaagatgccttgtgcttggtgctcaccattatgaatggaggggatttgaagtttcacatttacaacctgggcaatcccggctttgatgagcagagagccgttttctatgctgcagagctgtgttgcggcttggaagatttacagagggaaagaattgtatacagagacttgaagcctgagaatattctccttgatgatcgtggacacatccggatttcagacctcggtttggccacagagatcccagaaggacagagggttcgaggaagagttggaacagtcggctacatggcacctgaagttgtcaataatgaaaagtatacgtttagtcccgattggtggggacttggctgtctgatctatgaaatgattcagggacattctccattcaaaaaatacaaagagaaagtcaaatgggaggaggtcgatcaaagaatcaagaatgataccgaggagtattctgagaagttttcagaggatgccaaatctatctgcaggatgttactcaccaagaatccaagcaagcggctgggctgcaggggcgagggagcggctggggtgaagcagcaccccgtgttcaaggacatcaacttcaggaggctggaggcaaacatgctggagccccctttctgtcctgatcctcatgccgtttactgtaaggacgtcctggatatcgagcagttctcggtggtgaaagggatctacctggacaccgcagatgaagacttctatgctcggtttgctaccgggtgtgtctccatcccctggcagaatgagatgatcgaatctgggtgtttcaaagacatcaacaaaagtgaaagtgaggaagctttgccattagatctagacaagaacatacataccccggtttccagaccaaacagaggcttcttctatagactcttcagaagagggggctgcctgaccatggtccccagtgagaaggaagtggaacccaagcaatgctgagcaccccggtgcggaccacagagcagaccctggcgccaggaaggagcatgtgttagcgtctcgtcccacctggaattgtaataaatacatctaaataaaacatgccttgggagtgtacagac

SEQ ID NO: 20399 - DNA, 1641 bp, Artificial Sequence
  derived and/or modified sequence
atggagctggagaacatcgtggccaacagcctgctgctgaaggccaggcaggagaaggactactcctctctgtgcgataagcagcctataggtagacgcctcttccgccagttttgtgacacgaagcctacgctcaaaaggcacatcgaatttttggatgcggtggctgagtatgaggtggcagacgatgaagacagaagtgactgcggactgagtattctggacagatttttcaacgacaaactggccgcccccttgcccgagattccccctgacgtcgtcacagaatgcagattagggttaaaagaagaaaacccatctaaaaaggcgttcgaagaatgcactcgggttgctcacaactatttgagaggcgagccttttgaagagtaccaagagagtagctatttctctcagttcctacagtggaagtggctggagcgccagcctgttactaagaacacttttaggcactatagggtgctggggaaaggcggctttggagaagtttgcgcttgtcaggttcgtgctacaggcaaaatgtacgcgtgcaaaaagctccagaagaagaggatcaagaagcggaaaggagaggctatggccctcaatgagaaacgcatattggaaaaggtgcagtcgcgtttcgttgtatctcttgcctacgcttatgagacgaaggatgcactgtgcttagtcttaacaattatgaatggcggggacctgaagttccatatctataacctgggcaatcctgggtttgacgagcagagggctgtattttatgccgctgaactgtgctgtggccttgaagatttacagagggagaggattgtataccgcgatctcaaacctgagaacattctcctggacgaccgaggtcacatacgaatatcagatctaggcttggccaccgagattcccgaagggcaaagagtgagggggagggtcggcactgtaggttacatggcacccgaggtggtgaacaatgaaaagtacacctttagtcccgactggtggggcctgggctgtctcatatatgaaatgatacaaggtcattctcctttcaaaaaatacaaagagaaggtgaagtgggaggaagttgatcagcgcatcaaaaacgatacagaagagtattcagagaaattttccgaggatgcaaaatccatctgtagaatgctgctgaccaaaaatccctcaaagagacttggatgtagaggggaaggcgcagccggcgttaagcagcaccccgtattcaaggatatcaacttccggcgtcttgaggcaaatatgctggagccccccttttgccccgaccctcatgccgtttattgcaaggacgtcttagatatcgagcagttcagtgtggtgaaggggatctatttagacacagctgacgaggacttttacgcccggttcgccacaggatgcgtatccataccgtggcagaatgaaatgatcgaatccgggtgttttaaagacatcaacaaaagtgagtctgaggaggcactaccactagatttggataaaaacattcacacgcctgtgtcccgccctaaccgcgggttcttttacagactttttcgacgaggtggctgcctgaccatggtgccctcagagaaagaggtggaaccaaagcagtgttag

SEQ ID NO: 20400 - DNA, 1641 bp, Artificial Sequence
  derived and/or modified sequence
atggaactcgagaatatcgtggctaactcattgcttcttaaggctcgtcaggaaaaggattactccagtctgtgtgataaacaacctatcgggagacgcctgtttcgacaattctgcgatactaagccaaccctaaagcgccacattgaattccttgacgccgtggctgaatacgaggtcgccgatgacgaggatcgctcagactgtggcctgtccattctggacagattcttcaacgacaagctggcagccccactccctgagatccccccagatgtcgttactgagtgtcgactcgggctcaaagaagagaacccatccaaaaaagcgtttgaggaatgcactagggtggctcacaactatctgcggggtgagccatttgaagagtaccaggagtccagttatttctcccagttcttgcagtggaagtggcttgagcggcagccagttaccaagaacactttccggcattaccgggttctcgggaaggggggattcggtgaggtgtgcgcgtgtcaagtaagagcgacaggcaagatgtatgcttgcaaaaagttgcagaaaaagcgcatcaagaagcggaaaggggaggcaatggcactgaatgaaaagcggattcttgagaaagttcagagcagatttgtagtatctctggcctacgcttacgaaaccaaagacgccctatgcttggtgcttacaatcatgaatggtggtgatctgaagttccacatctacaacctgggcaatcccggattcgacgagcagcgagccgtgttttatgccgctgagctttgttgtggcctggaggatctgcagagagaaagaatcgtttacagagacctgaagccagagaacatcctcctcgatgaccggggacatatccgtatcagcgacttaggtctggcaacagagatcccagaaggccagcgagtgaggggccgagtcggtaccgtgggctacatggcgcctgaagtggtgaacaatgagaagtacaccttttcaccagattggtggggtctgggttgccttatatacgaaatgatccaaggacatagcccattcaaaaagtataaagagaaggttaagtgggaagaggtagaccaaaggatcaaaaacgacaccgaagagtatagtgagaagttttctgaagacgcaaagagcatatgtcgcatgttgctaacgaagaaccccagtaaacgtctggggtgtaggggcgagggagctgcaggggtgaagcagcatcccgtttttaaggatattaattttcgaagactggaggcgaacatgcttgaacctcctttttgccccgacccgcacgcagtctattgcaaggatgttttggatatagagcagttttctgtggtcaaggggatatacttggacaccgccgatgaagacttttacgccagattcgccactggatgcgtgtcgataccatggcagaatgagatgatcgagagcggatgcttcaaagacattaataaatcagagtccgaggaagccctgccgctcgatctggacaagaacattcatacgccagttagccgacccaaccgcggatttttctacagactcttccgtagaggagggtgtcttactatggtgccatctgagaaggaagtggagccaaagcagtgttag

SEQ ID NO: 20401 - protein, 532 aa, Artificial Sequence
  derived and/or modified sequence
MELENIVANSLLLKARQGGYGKKSGRSKKWKEILTLPPVSQCSELRHSIEKDYSSLCDKQPIGRRLFRQFCDTKPTLKRHIEFLDAVAEYEVADDEDRSDCGLSILDRFFNDKLAAPLPEIPPDVVTECRLGLKEENPSKKAFEECTRVAHNYLRGEPFEEYQESSYFSQFLQWKWLERQPVTKNTFRHYRVLGKGGFGEVCACQVRATGKMYACKKLQKKRIKKRKGEAMALNEKRILEKVQSRFVVSLAYAYETKDALCLVLTIMNGGDLKFHIYNLGNPGFDEQRAVFYAAELCCGLEDLQRERIVYRDLKPENILLDDRGHIRISDLGLATEIPEGQRVRGRVGTVGYMAPEVVNNEKYTFSPDWWGLGCLIYEMIQGHSPFKKYKEKVKWEEVDQRIKNDTEEYSEKFSEDAKSICRMLLTKNPSKRLGCRGEGAAGVKQHPVFKDINFRRLEANMLEPPFCPDPHAVYCKDVLDIEQFSVVKGIYLDTADEDFYARFATGCVSIPWQNEGCLTMVPSEKEVEPKQC

SEQ ID NO: 20402 - DNA, 1599 bp, Artificial Sequence
  derived and/or modified sequence
atggagctggagaacatcgtggccaacagcctgctgctgaaggccagacagggcggctacggcaagaagagcggcagaagcaagaagtggaaggagatcctgaccctgccccccgtgagccagtgcagcgagctgagacacagcatcgagaaggactacagcagcctgtgcgacaagcagcccatcggcagaagactgttcagacagttctgcgacaccaagcccaccctgaagagacacatcgagttcctggacgccgtggccgagtacgaggtggccgacgacgaggacagaagcgactgcggcctgagcatcctggacagattcttcaacgacaagctggccgcccccctgcccgagatcccccccgacgtggtgaccgagtgcagactgggcctgaaggaggagaaccccagcaagaaggccttcgaggagtgcaccagagtggcccacaactacctgagaggcgagcccttcgaggagtaccaggagagcagctacttcagccagttcctgcagtggaagtggctggagagacagcccgtgaccaagaacaccttcagacactacagagtgctgggcaagggcggcttcggcgaggtgtgcgcctgccaggtgagagccaccggcaagatgtacgcctgcaagaagctgcagaagaagagaatcaagaagagaaagggcgaggccatggccctgaacgagaagagaatcctggagaaggtgcagagcagattcgtggtgagcctggcctacgcctacgagaccaaggacgccctgtgcctggtgctgaccatcatgaacggcggcgacctgaagttccacatctacaacctgggcaaccccggcttcgacgagcagagagccgtgttctacgccgccgagctgtgctgcggcctggaggacctgcagagagagagaatcgtgtacagagacctgaagcccgagaacatcctgctggacgacagaggccacatcagaatcagcgacctgggcctggccaccgagatccccgagggccagagagtgagaggcagagtgggcaccgtgggctacatggcccccgaggtggtgaacaacgagaagtacaccttcagccccgactggtggggcctgggctgcctgatctacgagatgatccagggccacagccccttcaagaagtacaaggagaaggtgaagtgggaggaggtggaccagagaatcaagaacgacaccgaggagtacagcgagaagttcagcgaggacgccaagagcatctgcagaatgctgctgaccaagaaccccagcaagagactgggctgcagaggcgagggcgccgccggcgtgaagcagcaccccgtgttcaaggacatcaacttcagaagactggaggccaacatgctggagccccccttctgccccgacccccacgccgtgtactgcaaggacgtgctggacatcgagcagttcagcgtggtgaagggcatctacctggacaccgccgacgaggacttctacgccagattcgccaccggctgcgtgagcatcccctggcagaacgagggctgcctgaccatggtgcccagcgagaaggaggtggagcccaagcagtgctag

SEQ ID NO: 20403 - DNA, 1599 bp, Artificial Sequence
  derived and/or modified sequence
atggagctcgagaatatcgttgccaacagcctgctgcttaaagcgagacagggggggtatggtaagaagagtgggcgctcaaaaaagtggaaagaaatcctgacattacccccagtctctcaatgttccgagctgcgtcactcaatcgagaaagactatagcagcctgtgcgacaagcagcctatcggcaggagactgtttcgccaattctgtgacacgaagccgacactcaaaagacacatcgaatttctggatgccgtcgccgagtatgaggtcgcagatgatgaagaccgctccgattgcggcctgtcaatactcgaccgattctttaacgacaagctagccgccccgctgcctgaaatacccccggacgtggttacagagtgtcggctggggcttaaggaggagaatccttctaagaaagccttcgaagagtgtactcgggtggctcataattacctgcgcggggagccttttgaggagtaccaggaatcctcctatttcagtcagttcctccaatggaaatggttagagaggcagccagttacaaaaaacacatttcggcattaccgtgtgctgggaaagggaggctttggagaggtgtgcgcctgccaggtccgtgccacgggcaagatgtatgcatgcaaaaaactgcagaaaaaacggattaagaaacgtaagggcgaggcaatggcacttaacgaaaaaaggatcttggaaaaagtgcagagccgcttcgtcgtgtcactggcatacgcttacgagactaaagatgctctctgcctggtcctgacaatcatgaatggcggggacctcaaatttcatatatataatttgggtaaccctggattcgatgagcaacgtgccgtattctacgctgcagaattatgttgcggactcgaagacttacaacgtgagcggatcgtgtatagagatttgaagccagagaatatactcctggatgaccgcggccatattcgcatttccgatcttgggcttgctaccgaaattccagagggtcagagagtccggggacgcgtgggcaccgtgggctatatggcccctgaagtcgtaaacaacgaaaagtacactttctctccggactggtggggcctaggatgcctgatttatgagatgatacagggtcactctccgtttaaaaaatataaagaaaaggttaaatgggaggaggtagaccagcgaattaagaatgatactgaagaatattcagagaaatttagcgaggatgctaaatctatctgtagaatgctgctcactaaaaaccctagtaaacgcttaggttgtagaggagagggagccgcgggggtgaaacaacatcccgtcttcaaggacatcaatttccgccggctcgaggccaatatgctggaacccccattctgccccgacccccacgccgtgtactgtaaagacgttcttgacatagaacagttcagcgtagtcaaagggatttacctggacaccgcagatgaggatttctacgctcgctttgctactggttgcgtttccatcccctggcagaatgagggctgcctaacaatggtgccaagcgaaaaagaggtcgagcccaagcagtgctag

SEQ ID NO: 20404 - DNA, 1599 bp, Artificial Sequence
  derived and/or modified sequence
atggagctggagaacatcgtggccaacagcctgctgctgaaggcccggcagggcggctacggcaagaagagcggccgcagcaagaagtggaaggagatcctgaccctgccccctgtgtcccagtgcagcgagctgcggcacagcattgagaaggactacagcagcctgtgtgacaagcagcccatcggccggcggctcttccggcagttctgtgacaccaagcccaccctgaagaggcacatcgagttcctggatgctgtggccgagtatgaggtggctgatgatgaggacagaagtgactgtggcctgagcatcctggaccgcttcttcaatgacaagctggccgcccccctgcctgagatccccccagatgtggtgacagagtgccgcctgggcctgaaggaggagaaccccagcaagaaggcctttgaagaatgtaccagggtggcccacaactacctgcggggggagccctttgaggagtaccaggagagcagctacttcagccagttcctgcagtggaagtggctggagcggcagcctgtgaccaagaacaccttccgccactacagagtgctgggcaaaggaggctttggagaggtgtgtgcctgccaggtgcgggccaccgggaagatgtatgcctgcaagaagctgcagaagaagaggatcaagaagaggaaaggagaggccatggccctgaatgagaagaggatcctggagaaggtgcagagcagatttgtggtgtccctggcctatgcctatgagaccaaggatgccctgtgcctggtgctgaccatcatgaatggaggagacctgaagttccacatctacaacctgggcaaccctggctttgatgagcagagagctgtgttctatgctgctgagctgtgctgcggcctggaggacctgcagcgggagcgcatcgtgtacagagacctgaagccagagaacatcctgctggatgaccggggccacatccgcatcagtgacctgggcctggccacagagatccctgagggccagagggtgcggggccgggtgggcaccgtgggctacatggcccctgaggtggtgaacaatgagaagtacaccttctccccagactggtggggcctgggctgcctgatctatgagatgatccagggccacagccccttcaagaagtacaaggagaaggtgaagtgggaggaggtggaccagaggatcaagaatgacacagaggagtacagcgagaagttctctgaagatgccaagagcatctgcaggatgctgctgaccaagaaccccagcaagaggctgggctgccgcggggagggcgctgctggggtgaagcagcaccctgtgttcaaggacatcaacttccggcggctggaggccaacatgctggagccccccttctgcccagacccccatgctgtgtactgcaaggatgtgctggacatcgagcagttctctgtggtgaagggcatctacctggacacagcagatgaggacttctacgccaggtttgccaccggctgtgtgtccatcccctggcagaatgaaggctgcctgaccatggtgcccagcgagaaggaggtggagcccaagcagtgctag

SEQ ID NO: 20405 - DNA, 1971 bp, Artificial Sequence
  derived and/or modified sequence
ccgccgcggtcgggctgccccctcccctcgccccgaccgctcccctgctggtgagggcctgcggaggcggcggcggcggcgcccttggtggcagtggtggcggcggagcagcctcccgggatcgtgtccggagctcgaggagagggtggtgcccggcgagctatgcacgggggcggcggcgtctcctcctgttccgcctcctcagtctcctcggtctcgcagaatccgccggcggcggcggcgccaggacatggagctcgagaacatcgtggccaactcgctgctgctgaaagcgcgtcaaggaggatatggcaaaaaaagtggtcgtagtaaaaaatggaaggagatactgacactgcctcctgtcagccagtgcagtgagcttagacattccattgaaaaggattatagcagtctttgtgacaagcaaccgataggaagacgtctcttcaggcagttctgtgataccaaacccactctaaagaggcacattgaattcttggatgcagtggcagaatatgaagttgccgatgatgaggaccgaagtgattgtggactgtcaatcttagatagattcttcaatgataagttggcagcccctttaccagaaatacctccagatgttgtgacagaatgtagattgggactgaaggaggagaacccttccaaaaaagcctttgaggaatgtactagagttgcccataactacctaagaggggaaccatttgaagaataccaagaaagctcatatttttctcagtttttacaatggaaatggctggaaaggcaacccgtaacaaagaacacatttagacattacagagttctaggaaaaggcggatttggagaggtttgcgcctgtcaagtgcgagccacaggaaaaatgtatgcctgcaaaaagctacaaaaaaaaagaataaagaagaggaaaggtgaagctatggctctaaatgagaaaagaattctggagaaagtgcaaagtagattcgtagttagtttagcctacgcttatgaaaccaaagatgccttgtgcttggtgctcaccattatgaatggaggggatttgaagtttcacatttacaacctgggcaatcccggctttgatgagcagagagccgttttctatgctgcagagctgtgttgcggcttggaagatttacagagggaaagaattgtatacagagacttgaagcctgagaatattctccttgatgatcgtggacacatccggatttcagacctcggtttggccacagagatcccagaaggacagagggttcgaggaagagttggaacagtcggctacatggcacctgaagttgtcaataatgaaaagtatacgtttagtcccgattggtggggacttggctgtctgatctatgaaatgattcagggacattctccattcaaaaaatacaaagagaaagtcaaatgggaggaggtcgatcaaagaatcaagaatgataccgaggagtattctgagaagttttcagaggatgccaaatctatctgcaggatgttactcaccaagaatccaagcaagcggctgggctgcaggggcgagggagcggctggggtgaagcagcaccccgtgttcaaggacatcaacttcaggaggctggaggcaaacatgctggagccccctttctgtcctgatcctcatgccgtttactgtaaggacgtcctggatatcgagcagttctcggtggtgaaagggatctacctggacaccgcagatgaagacttctatgctcggtttgctaccgggtgtgtctccatcccctggcagaatgagggctgcctgaccatggtccccagtgagaaggaagtggaacccaagcaatgctgagcaccccggtgcggaccacagagcagaccctggcgccaggaaggagcatgtgttagcgtctcgtcccacctggaattgtaataaatacatctaaataaaacatgccttgggagtgtacagac

SEQ ID NO: 20406 - DNA, 1599 bp, Artificial Sequence
  derived and/or modified sequence
atggagctggagaacatcgtggccaacagcctgctgctgaaggcccggcagggcgggtatggcaaaaagtccggtaggtcaaagaaatggaaggaaatcctgaccctgcctccagtatctcagtgttccgaattgaggcatagtattgagaaagattattcctctttgtgcgacaagcagcctatcggccgtcggttgtttcggcagttttgtgatacaaagccgactctcaaacggcacattgagtttctggacgccgtggccgagtatgaagtcgccgacgatgaagaccgttcagattgtggactgagcatcctggacagattcttcaacgataaactggcagctcccctgcccgagatcccccccgatgttgtgacagaatgtcgcctgggactcaaggaggagaatccatcaaaaaaagcctttgaagaatgcactagagtggctcataactatctgagaggggagccgtttgaagaataccaagaatcatcttattttagccagttcctccagtggaagtggctggaacgacagccggttaccaagaatacattcaggcactaccgcgtgttgggtaagggcgggtttggcgaagtatgtgcatgtcaggtaagagctacaggaaagatgtatgcttgtaagaagcttcagaagaagagaataaaaaaacgcaaaggagaagcaatggctctgaacgagaagaggatcctcgaaaaagttcagagtcggttcgtggttagcttggcatatgcttatgagaccaaggacgcgctctgcttggtattgaccattatgaacgggggagaccttaagttccacatttataaccttggcaacccggggttcgatgaacagcgagccgtgttttatgccgcagaattgtgctgcggccttgaggacctgcaaagggagaggatcgtgtatcgagatctcaaacccgagaatatcctgctcgacgatcgtggccatattaggatcagcgacctggggctggcaaccgaaatccctgagggccaacgcgtgagaggaagagtggggaccgtgggatatatggcccccgaagtcgtgaacaatgaaaaatacaccttctcacccgactggtgggggttaggctgcctgatctacgaaatgattcagggccactctccatttaaaaaatataaggagaaggtgaaatgggaagaggtcgaccagaggataaagaacgacactgaggaatattctgagaagtttagtgaggacgcgaagtctatctgcagaatgctgcttactaagaatccctccaagagactgggctgtcggggcgagggcgcagctggggtaaagcaacacccggtgttcaaagatatcaattttcgacggctggaagcgaatatgctggaaccaccattttgtccagaccctcacgcagtctattgcaaggacgtgttagatatcgaacagttctcagtggttaagggcatctacctcgataccgccgacgaggatttctacgctcggttcgctaccggttgcgtttcaatcccctggcagaacgagggttgcctcacgatggtgccatcagagaaggaggtggagccaaaacagtgttag

SEQ ID NO: 20407 - DNA, 1599 bp, Artificial Sequence
  derived and/or modified sequence
atggaacttgagaatatcgtcgcaaatagcctactgctcaaggctagacagggcggatacggcaagaagtcaggcagatcgaaaaaatggaaagaaatccttacgctcccacccgtctctcaatgcagtgagctgagacatagcatcgagaaggattattccagcttatgcgataagcagcccatcgggagaaggctctttcgccagttttgcgatacaaaacctaccctcaagaggcatatcgaattcctggacgcagtggctgagtacgaggtggcggatgacgaggaccggagcgattgcggcctcagcattctggatcgtttcttcaatgacaagctggcggcacctctgcctgaaattccgccagacgtggtcaccgaatgccggctggggctcaaagaagaaaacccaagtaagaaagcttttgaggagtgcacccgagtcgctcataactacctgcggggagagcctttcgaggaataccaggagagttcatactttagccagtttctgcagtggaaatggctcgagcgtcagcctgtgacgaagaacactttcagacactaccgcgtgctgggaaagggtgggttcggcgaggtgtgcgcgtgtcaggtgcgcgctactggaaagatgtacgcgtgtaagaaactccagaagaaacggataaagaaacggaaaggggaggcgatggctctgaacgagaagagaatcttggaaaaggtgcagtccagatttgttgtgagtttggcgtatgcatatgaaacaaaggacgcgctctgtttagtcctaacaatcatgaatggtggcgatcttaagttccacatctataatctgggcaacccgggttttgacgaacagagggccgtattttacgccgctgagctgtgctgtggcctggaggacctgcagagagagcggattgtataccgggatctcaagccggagaatattctcctggacgaccgagggcatattcgtatcagtgacttgggcctggctaccgaaatacccgaaggacaaagagtccggggacgcgtgggaaccgtgggttacatggctcctgaagtggtgaacaacgagaagtacacattttcacccgactggtgggggctgggttgcctgatctatgagatgatccagggacactctccttttaaaaaatataaagaaaaagttaagtgggaggaggtggaccaacgcattaagaatgacacagaggaatacagcgaaaagttttctgaagatgccaaatcaatatgcaggatgctgctgaccaagaacccgtcgaagcggctcggttgtaggggtgagggtgctgctggcgtgaaacaacaccctgtattcaaggacattaacttccgaaggctggaagcaaatatgcttgaaccccctttttgtccggatcctcacgccgtgtattgcaaggacgtgctcgacatcgagcaattttccgtggtgaaggggatctatctagacaccgcggacgaggacttctatgcacggtttgccaccggctgcgtgtcgatcccctggcagaatgagggttgcctgaccatggttccctctgaaaaggaggtagagccgaagcagtgttag

SEQ ID NO: 20408 - protein, 311 aa, Artificial Sequence
  derived and/or modified sequence
MEKINNVTEFIFWGLSQSPEIEKVCFVVFSFFYIIILLGNLLIMLTVCLSNLFKSPMYFFLSFLSFVDICYSSVTAPKMIVDLLAKDKTISYVGCMLQLFGVHFFGCTEIFILTVMAYDRYVAICKPLHYMTIMNRETCNKMLLGTWVGGFLHSIIQVALVVQLPFCGPNEIDHYFCDVHPVLKLACTETYIVGVVVTANSGTIALGSFVILLISYSIILVSLRKQSAEGRRKALSTCGSHIAMVVIFFGPCTFMYMRPDTTFSEDKMVAVFYTIITPMLNPLIYTLRNAEVKNAMKKLWGRNVFLEAKGK

SEQ ID NO: 20409 - DNA, 936 bp, Artificial Sequence
  derived and/or modified sequence
atggagaagatcaacaacgtgaccgagttcatcttctggggcctgagccagagccccgagatcgagaaggtgtgcttcgtggtgttcagcttcttctacatcatcatcctgctgggcaacctgctgatcatgctgaccgtgtgcctgagcaacctgttcaagagccccatgtacttcttcctgagcttcctgagcttcgtggacatctgctacagcagcgtgaccgcccccaagatgatcgtggacctgctggccaaggacaagaccatcagctacgtgggctgcatgctgcagctgttcggcgtgcacttcttcggctgcaccgagatcttcatcctgaccgtgatggcctacgacagatacgtggccatctgcaagcccctgcactacatgaccatcatgaacagagagacctgcaacaagatgctgctgggcacctgggtgggcggcttcctgcacagcatcatccaggtggccctggtggtgcagctgcccttctgcggccccaacgagatcgaccactacttctgcgacgtgcaccccgtgctgaagctggcctgcaccgagacctacatcgtgggcgtggtggtgaccgccaacagcggcaccatcgccctgggcagcttcgtgatcctgctgatcagctacagcatcatcctggtgagcctgagaaagcagagcgccgagggcagaagaaaggccctgagcacctgcggcagccacatcgccatggtggtgatcttcttcggcccctgcaccttcatgtacatgagacccgacaccaccttcagcgaggacaagatggtggccgtgttctacaccatcatcacccccatgctgaaccccctgatctacaccctgagaaacgccgaggtgaagaacgccatgaagaagctgtggggcagaaacgtgttcctggaggccaagggcaagtag

SEQ ID NO: 20410 - DNA, 936 bp, Artificial Sequence
  derived and/or modified sequence
atggagaaaattaacaacgtaacagagttcatattttggggtctgagccagagccccgaaattgaaaaggtctgctttgtggtgttctccttcttttacattatcattcttctggggaaccttctcatcatgctgaccgtttgtttgtccaatctcttcaagagcccaatgtatttctttcttagcttcctctcttttgtcgacatttgttactccagcgtaacagcccctaaaatgatagttgaccttttggcgaaggataaaactatatcttacgttggctgcatgctccaactgtttggtgttcacttcttcggttgtactgagatctttatattaaccgtgatggcttacgaccgttacgtcgcgatttgcaaacctctacactacatgaccataatgaacagggagacatgtaacaagatgctgctgggtacatgggtgggcggatttctgcattctatcatacaggttgccctggtggtccaactacctttttgcggccctaatgagatcgaccattatttctgtgacgtgcacccagtgcttaagctggcctgtaccgagacctacatcgtgggagtcgtcgttaccgcaaactcaggaacaattgcactgggaagcttcgtgattctcctgatcagctatagcattatcctggtgtctctccgcaaacagtcagccgagggacgccggaaggccctctccacctgcggatctcatatcgccatggtggtgattttttttggcccctgcaccttcatgtacatgcgcccagacacaaccttttctgaagacaagatggtcgcggtcttttatactatcatcacaccaatgcttaatcctctcatttatacccttcggaatgctgaagttaaaaacgccatgaagaagctgtggggacggaacgtgtttttagaggccaagggaaagtag

SEQ ID NO: 20411 - DNA, 936 bp, Artificial Sequence
  derived and/or modified sequence
atggagaagatcaacaacgtgacagagttcatcttctggggcctgagccagagccctgagattgagaaggtgtgctttgtggtgttctccttcttctacatcatcatcctgctgggcaacctgctgatcatgctgactgtgtgcctgagcaacctcttcaagagccccatgtacttcttcctgtccttcctgagctttgtggacatctgctacagctctgtgacagcccccaagatgattgtggacctgctggccaaggacaagaccatctcctatgtgggctgcatgctgcagctgtttggagtgcacttcttcggctgcacagagatcttcatcctgactgtgatggcctatgacagatatgtggccatctgcaagcccctgcactacatgaccatcatgaaccgggagacctgcaacaagatgctgctgggcacctgggtgggcggcttcctgcacagcatcatccaggtggccctggtggtgcagctgcccttctgtggccccaatgaaattgaccactacttctgtgatgtgcaccctgtgctgaagctggcctgcacagagacctacatcgtgggcgtggtggtgacagccaacagcggcaccatcgccctgggcagctttgtgatcctgctgatctcctacagcatcatcctggtgtccctgaggaagcagagcgctgagggccgcaggaaggccctgagcacctgtggcagccacatcgccatggtggtgatcttcttcggcccctgcaccttcatgtacatgaggccagacaccaccttcagcgaggacaagatggtggccgtgttctacaccatcatcacccccatgctgaaccccctcatctacaccctgagaaatgctgaggtgaagaatgccatgaagaagctgtggggcagaaatgtgttcctggaggccaagggcaagtag

SEQ ID NO: 20412 - DNA, 936 bp, Artificial Sequence
  derived and/or modified sequence
atggagaagatcaacaacgtgaccgagttcatcttctggggcctgagtcaatcacctgagatagagaaggtgtgctttgttgtgttctcctttttctacattattatcctcttgggcaatctgctgatcatgctgaccgtgtgtcttagcaacttgttcaaatcgccaatgtatttctttctgtcttttctgtcattcgtagatatttgttactcaagcgttactgcaccgaagatgattgtcgacctcctagccaaggacaagaccatttcatacgtcgggtgtatgcttcagttatttggagttcatttttttggctgtacggaaatcttcatactgaccgtgatggcctatgatagatatgtggccatatgcaagcctttgcactatatgaccattatgaatagagagacatgtaataaaatgctgctcggaacgtgggtcggaggatttctccattctatcatccaggtagccttagtggtccagctgccattttgtggccccaacgaaattgatcactacttctgtgatgtacaccctgtgttaaagttagcctgtaccgagacgtacattgttggtgtcgtcgttaccgctaactcaggaacaatagcacttgggtcttttgtcattctcttaatctcatactccataatactggtaagcttgcggaaacagtctgcagagggccgtcgcaaagccctcagcacctgtgggagtcacatcgccatggttgtgatatttttcggcccttgtactttcatgtatatgaggccagacaccactttcagcgaagataagatggtggccgtgttttataccattatcacccctatgttgaatcccctcatctatacactgagaaacgctgaagttaagaatgccatgaaaaagctgtggggccgcaacgttttcctggaagctaaaggtaagtag

SEQ ID NO: 20413 - DNA, 936 bp, Artificial Sequence
  derived and/or modified sequence
atggaaaaaataaacaacgtaactgaattcattttctggggtctttctcagagcccagagattgagaaagtttgttttgtggtgttttctttcttctacataatcattcttctgggaaatctcctcatcatgctgacagtttgcctgagcaacctgtttaagtcacccatgtatttctttctcagcttcttgtcttttgtggacatttgttactcttcagtcacagctcccaagatgattgttgacctgttagcaaaggacaaaaccatctcctatgtggggtgcatgttgcaactgtttggagtacatttctttggttgcactgagatcttcatccttactgtaatggcctatgatcgttatgtggctatctgtaaacccctacattatatgaccatcatgaaccgggagacatgcaataaaatgttattagggacgtgggtaggtgggttcttacactccattatccaagtggctctggtagtccaactacccttttgtggacccaatgagatagatcactacttttgtgatgttcaccctgtgttgaaacttgcctgcacagaaacatacattgttggtgttgttgtgacagccaacagtggtaccattgctctggggagttttgttatcttgctaatctcctacagcatcatcctagtttccctgagaaagcagtcagcagaaggcaggcgcaaagccctctccacctgtggctcccacattgccatggtcgttatctttttcggcccctgtacttttatgtacatgcgccctgatacgaccttttcagaggataagatggtggctgtattttacaccattatcactcccatgttaaatcctctgatttatacactgagaaatgcagaagtaaagaatgcaatgaagaaactgtggggcagaaatgttttcttggaggctaaagggaaatag

SEQ ID NO: 20414 - DNA, 936 bp, Artificial Sequence
  derived and/or modified sequence
atggaaaagatcaataacgtaacagagttcatattttggggtctatcccagagcccagagattgagaaggtttgcttcgtggtgttctcattcttttatattataattcttcttggtaacttacttatcatgctgaccgtttgcctgagcaacctgttcaaatcacctatgtatttctttctctccttcttgtcgttcgttgatatatgctattctagcgtaacagccccaaaaatgatcgttgatctcttagcaaaagataagactatctcatatgtcgggtgtatgctgcagttatttggagtgcatttcttcggctgcacagaaattttcatcctgacagtgatggcttatgaccgctacgtcgcaatctgtaaacccctccactacatgaccattatgaaccgtgagacctgcaataaaatgctgctgggcacatgggtcggaggattccttcacagcattatccaggtggcactcgtggtccaactgccattttgcggccctaacgagattgatcactacttctgtgacgtccatccagtactgaaactggcatgcaccgagacgtatatcgtaggagtagtggtgacagcgaatagcgggaccatcgctctcggctccttcgtcattctgctcattagctatagtatcatcctcgtctccctgcgaaaacagagcgccgaaggccgtcgcaaggcattaagcacttgcggctcgcacatagccatggttgtaatcttcttcggaccatgcacattcatgtacatgcggcctgacacaacattctccgaagacaaaatggtcgctgtgttttacacaataattactcccatgctgaaccccctcatctataccctccgcaacgccgaagtcaagaatgccatgaagaagctctgggggcgaaatgtgtttctcgaggctaagggcaagtag

SEQ ID NO: 20415 - protein, 948 aa, Artificial Sequence
  derived and/or modified sequence
MRWPQPGAAARLPPESPGPPESPGPPEREAAAARRWTGAEPQDCAPGSGRPEKPPQLSEDDIWLKSEGDNYSATLLEPAASSLSPDHKNMEIEVSVAECKSVPGITSTPHPMDHPSAFYSPPHNGLLTDHHESLDNDVAREIRYLDEVLEANCCDSAVDGTYNGTSSPEPGAVVLVGGLSPPVHEATQPEPTERTASRQAPPHIELSNSSPDPMAEAERTNGHSPSQPRDALGDSLQVPVSPSSTTSSRCSSRDGEFTLTTLKKEAKFELRAFHEDKKPSKLFEDDEHEKEQYCIRKVRPSEEMLELEKERRELIRSQAVKKNPGIAAKWWNPPQEKTIEEQLDEEHLESHKKYKERKERRAQQEQLLLQKQLQQQQQQPPSQLCTAPASSHERASMIDKAKEDIVTEQIDFSAARKQFQLMENSRQAVAKGQSTPRLFSIKPFYRPLGSVNSDKPLTNPRPPSVGGPPEDSGASAAKGQKSPGALETPSAAGSQGNTASQGKEGPYSEPSKRGPLSKLWAEDGEFTSARAVLTVVKDDDHGILDQFSRSVNVSLTQEELDSGLDELSVRSQDTTVLETLSNDFSMDNISDSGASNETTNALQENSLADFSLPQTPQTDNPSEGRGEGVSKSFSDHGFYSPSSTLGDSPLVDDPLEYQAGLLVQNAIQQAIAEQVDKAVSKTSRDGAEQQGPEATVEEAEAAAFGSEKPQSMFEPPQVSSPVQEKRDVLPKILPAEDRALRERGPPQPLPAVQPSGPINMEETRPEGSYFSKYSEAAELRSTASLLATQESDVMVGPFKLRSRKQRTLSMIEEEIRAAQEREEELKRQRQVLQSTQSPRTKNAPSLPSRTCYKTAPGKIEKVKPPPSPTTEGPSLQPDLAPEEAAGTQRPKNLMQTLMEDYETHKSKRRERMDDSSVLEATRVNRRKSALALRWEAGIYANQEEEDNE

SEQ ID NO: 20416 - DNA, 2847 bp, Artificial Sequence
  derived and/or modified sequence
atgcggtggccccaacctggagcagccgctaggctgcccccggagtcccctggccctcctgagtccccgggcccacctgaacgagaggccgcagcagctaggaggtggacaggcgcggaacctcaggattgcgccccggggtccggtcgcccagagaaacccccacagctgtcagaggatgacatttggcttaagagcgagggggacaattactctgcaaccttgcttgaacccgctgcgagtagcctctcccctgatcacaagaacatggagattgaggtgtccgtggccgaatgcaaatcagtgcccggtatcacgtctaccccccatcccatggatcaccccagtgctttctactccccacctcacaatggactgttaaccgatcatcacgaaagcctggacaatgatgtggcccgggaaatacggtacctggatgaagtgcttgaagccaattgctgtgactccgcggtggacggtacgtacaatgggactagctccccggaacctggagccgtcgtgcttgtcggtggcttgagcccacctgtccacgaagctacccagccggagccgacggaacgaactgcaagtaggcaggcaccaccgcacattgaactctctaattcatcaccggacccgatggccgaggccgagcgtacaaacgggcactctccctcgcagccgcgcgatgcattgggtgacagtctgcaagtcccagtatctcccagcagtacaacttcctcaaggtgtagttccagggacggagaatttaccttaaccacgctgaaaaaggaggcaaagtttgagctcagggcattccatgaagacaagaaaccttcgaaattatttgaagatgacgagcacgagaaggagcaatactgtatccggaaggtgcggccctccgaggagatgcttgagctggagaaagagaggagggaactcataaggtcccaggccgtgaagaaaaacccaggtatagccgccaagtggtggaatccaccccaggaaaagaccatcgaggagcagctggacgaagaacaccttgagtctcacaagaagtacaaggagcgcaaggagcgaagggcccagcaggagcagctcctgctccagaagcagttacaacagcagcagcagcagcctccctcacagctgtgcacagcccccgcatcatcccatgaaagggcgtccatgattgacaaggctaaagaggacattgtcacggaacagatagatttctccgccgcccgtaagcagttccaactcatggaaaattcacggcaggcagttgccaagggtcagagcacgccccgtctcttctcaattaagcctttctaccgcccactgggctcagtaaattccgacaaaccactgaccaatccgcgtccccccagtgttggcggtccccccgaagattctggtgcctctgctgctaaggggcaaaaaagccctggagccctcgagacacccagtgctgcaggatcccaagggaatacggcatcacaaggcaaagaaggaccatattccgagccatcaaaaagaggacccctctctaagctgtgggctgaagacggagagtttaccagtgccagagctgttctgacggtagttaaagatgacgatcatggcatattagaccaattttcacggagcgttaacgtaagtctgacccaggaggagctagactcaggcctggacgaattgtcagtgagatctcaagataccaccgtcctggagactctcagtaacgacttttcaatggacaatatctcagactcaggggcctccaacgaaaccacgaatgcactgcaggagaactcactagccgatttcagccttccccagacacctcagacagacaatccctccgaaggtcggggagagggggtcagtaaatccttttccgatcacggattctactctcccagcagcacgctgggcgacagcccactggtggatgaccctctggagtaccaagccggtctgctggtacagaacgcaatccagcaagcaatcgcagagcaggtggataaggcggtgtccaaaacgtccagggatggcgccgagcagcagggccccgaggctaccgtggaggaggctgaagccgctgctttcggctcagagaagccacagtcaatgttcgaaccgcctcaggtaagtagcccggtacaggagaagcgagacgttctccctaagatactgcccgccgaggatcgagctcttagagaaaggggccctcctcagcccttgcccgcagttcagcctagtggccccatcaacatggaagagactaggcccgagggttcatacttctccaagtattctgaagctgccgagctgcgttccacagcaagtctgctggccacacaggagtctgacgtcatggtgggccctttcaagctccggagccgcaagcaaagaacattaagcatgattgaagaagagattagggccgctcaggaacgggaggaggaattgaaaagacagcggcaggtcctccagagcacacagagccctagaactaagaatgctccttcccttcccagccggacctgctataaaaccgcacccggaaaaattgaaaaggtgaagccacccccatcgcctaccaccgagggaccatcactgcaacctgacttggctcccgaagaagctgctgggacccagcgcccgaaaaatcttatgcaaacgctaatggaagactacgagacacataaatccaagcgccgcgagagaatggatgatagtagcgtgcttgaggccacgcgtgttaacaggaggaaaagcgctctggccctcaggtgggaggccgggatttacgccaaccaggaagaggaagacaatgaatag

SEQ ID NO: 20417 - DNA, 2847 bp, Artificial Sequence
  derived and/or modified sequence
atgcgctggccccagcccggggctgctgcccggctgcccccagagagccctggccccccagagagccctggccccccagagcgggaggccgccgccgcccggcgctggacaggagctgagccccaggactgtgcccctggcagcggccggcctgagaagccaccccagctgtctgaagatgacatctggctgaagtctgagggggacaactacagcgccaccctgctggagcctgctgccagcagcctgagcccagaccacaagaacatggagattgaggtgtctgtggccgagtgcaagtctgtgcccggcatcaccagcaccccccaccccatggaccaccccagcgccttctacagccccccccacaacggcctgctgacagaccaccacgagagcctggacaatgatgtggcccgggagatccgctacctggatgaggtgctggaggccaactgctgtgacagcgctgtggatggcacctacaacggcaccagcagccctgagcccggggctgtggtgctggtgggcggcctgagcccccctgtgcatgaggccacccagcctgagcccacagagaggacagccagccggcaggccccaccccacatcgagctgagcaacagcagcccagaccccatggccgaggccgagaggaccaacggccacagccccagccagcccagagatgccctgggggacagcctgcaggtgcctgtgagccccagcagcaccaccagcagccgctgcagcagcagagatggagagttcaccctgaccaccctgaagaaggaggccaagtttgagctgcgggccttccacgaggacaagaagcccagcaagctgtttgaagatgatgagcacgagaaggagcagtactgcatcaggaaggtgcggcccagcgaggagatgctggagctggagaaggagcggcgggagctgatccgcagccaggccgtgaagaagaaccctggcattgctgccaagtggtggaaccccccccaggagaagaccatcgaggagcagctggatgaggagcacctggagagccacaagaagtacaaggagaggaaggagcggcgggcccagcaggagcagctgctgctgcagaagcagctgcagcagcagcagcagcagccccccagccagctgtgcacagccccagccagcagccatgagcgggcctccatgattgacaaggccaaggaggacatcgtgacagagcagattgacttctctgctgccaggaagcagttccagctgatggagaacagccggcaggccgtggccaagggccagagcacccccaggctcttcagcatcaagcccttctaccggcccctgggctctgtgaacagcgacaagcccctgaccaacccccggccccccagcgtgggcggccccccagaggacagcggggccagcgctgccaagggccagaagagccctggggccctggagacccccagcgctgctggcagccagggcaacacagccagccagggcaaggagggcccctacagcgagcccagcaagaggggccccctgagcaagctgtgggccgaggatggagagttcaccagcgcccgggctgtgctgactgtggtgaaggatgatgaccacggcatcctggaccagttcagccgctctgtgaatgtgtccctgacccaggaggagctggacagcggcctggatgagctgtctgtgcgcagccaggacaccaccgtgctggagaccctgagcaatgacttctccatggacaacatcagtgacagcggggccagcaatgagaccaccaatgccctgcaggagaacagcctggccgacttcagcctgccccagaccccccagacagacaaccccagcgagggccgcggggagggcgtgtccaagagcttcagtgaccacggcttctacagccccagcagcaccctgggggacagccccctggtggatgaccccctggagtaccaggccggcctgctggtgcagaatgccatccagcaggccatcgccgagcaggtggacaaggctgtgtccaagaccagcagagatggagctgagcagcagggccctgaggccaccgtggaggaggccgaggccgccgccttcggcagcgagaagccccagagcatgtttgagcccccccaggtgagcagccctgtgcaggagaagagagatgtgctgcccaagatcctgcctgctgaggaccgggccctgcgggagcggggccccccccagcccctgcctgctgtgcagcccagcggccccatcaacatggaggagaccaggcctgagggcagctacttcagcaagtacagcgaggccgctgagctgcggagcacagccagcctgctggccacccaggagagtgatgtgatggtgggccccttcaagctgcggagcaggaagcagaggaccctgtccatgattgaggaggagatccgggccgcccaggagcgggaggaggagctgaagaggcagaggcaggtgctgcagagcacccagagccccaggaccaagaatgcccccagcctgcccagcaggacctgctacaagacagcccctgggaagattgagaaggtgaagcccccacccagccccaccacagagggccccagcctgcagcctgacctggcccctgaggaggccgccggcacccagaggcccaagaacctgatgcagaccctgatggaggactatgagacccacaagagcaagaggcgggagaggatggatgacagctctgtgctggaggccaccagggtgaacagaaggaagagcgccctggccctgcgctgggaggccggcatctatgccaaccaggaggaggaggacaatgaatag

SEQ ID NO: 20418 - DNA, 2847 bp, Artificial Sequence
  derived and/or modified sequence
atgcggtggccccagcccggcgccgccgcccggctgccccccgagtctcccggaccccccgaatctccaggtccaccagaacgggaggcagctgccgcgcgcagatggactggagctgagccgcaggattgtgcacctgggtccggccgacccgaaaaacctccccagctgagtgaggacgatatctggctgaaatcagagggagacaactactcggccaccctactagaacccgcggcaagctcattgagtcctgaccacaaaaacatggagatcgaggtgtcagtggccgaatgcaagtcagtgccagggattacttcaacacctcatccgatggaccatccctctgccttttattcaccccctcacaatggtcttctgacagaccatcacgaatctctggataatgatgtggctagagaaatcaggtatcttgatgaggtccttgaggcgaattgctgtgatagcgccgtagacgggacctacaacgggaccagttctcccgagcctggagccgtggttctcgtgggtgggctgagccctccagtgcacgaagccacacaacctgaacctaccgaaaggacagcatctcgacaggcccccccacatattgagttgtccaactcctcccccgaccccatggctgaagctgaacgtaccaacggacacagcccatctcagccaagagatgctctaggcgacagcctacaggtgccagtctcgcccagttctacgacttctagtagatgctcatctcgagatggcgaattcaccctgactacactgaaaaaagaagcaaaattcgagcttcgggcctttcacgaagataagaaaccatctaagttgttcgaagatgatgaacacgaaaaggagcagtactgtattcggaaggtccggccatccgaagagatgctcgagctggagaaggagaggcgggagctcataagatcacaagcagtgaagaagaatccaggcatcgccgctaagtggtggaaccctccccaggaaaaaacaatagaagagcagctggatgaagaacatctggaaagccacaaaaaatacaaggaacggaaggagaggcgggcgcaacaagagcagctacttctccagaaacagctacaacaacagcaacagcagcccccctctcagctgtgtactgcccccgcatcatcgcacgaaagagccagtatgatcgacaaagccaaagaagatattgtgacagagcagattgattttagcgccgcgagaaaacagtttcagctgatggaaaactcgcggcaggcggttgcgaaagggcaatccacccctagactcttttccataaagcctttctaccggccattgggtagtgtcaactcggacaagccactcaccaatcctcgtccacccagtgtgggcggacctcccgaagattctggggcgagcgcagctaaaggacagaagtctccgggtgccctagagacaccatccgccgctggatcacaaggcaatacggcttcacagggaaaagaaggaccttatagcgagccgtctaaaagaggaccactgagcaagctgtgggctgaggatggcgagtttacttccgcacgcgcggtcttaactgtggtaaaggatgacgaccacggcatccttgatcagttttcccgaagcgttaacgtaagcctgacacaagaagaactcgatagcggtctggacgaactttcggtccgctcccaggacaccactgtgctggagaccttgtctaacgacttttcgatggacaacattagcgactccggagcatcaaacgagaccactaatgcactccaggagaatagcctcgccgactttagtctgccccagacaccccagacagacaatccatctgaaggtaggggggagggagtctctaaatccttttccgaccatggtttctacagtccatccagtacacttggggacagcccccttgttgacgatcccctggaatatcaggctggtttgctcgttcagaatgccatacagcaagctattgcggagcaagtggacaaagctgtgagtaaaactagcagggacggcgccgagcaacagggacccgaagccacagtggaggaggccgaagccgccgccttcggtagcgagaagccccagagtatgttcgaaccacctcaagtgtcttctccagtgcaggagaaaagggatgtcttgccaaagatccttcccgccgaggatcgggctctgcgagagaggggcccgccacaacccctgcctgctgtgcagccttccggaccaataaatatggaggagacaagaccagaggggagctacttcagcaagtactcggaagctgcagagctgagaagcacagcgtcacttctggctacccaggagagcgacgtgatggtgggaccttttaagctccgctctagaaagcagcgaactttgtctatgatcgaagaggagatccgcgctgcacaggaacgggaggaagagctgaaacgtcagagacaagtgctgcaaagtactcagagtccacgcacgaaaaatgcgcccagtttgccatcacgaacatgctacaaaaccgccccaggcaaaatagagaaggtgaaacccccaccttcgccaaccaccgagggaccttctctgcagccggatctagccccagaagaggccgccggaacccaacgacctaagaatctgatgcagacactgatggaggactacgagacgcacaaatccaaaaggcgtgagcgcatggacgacagcagtgtgcttgaggccacaagggtcaacagaaggaaatcagctctcgccctacgttgggaggcggggatctatgcaaaccaagaagaagaggataatgaatag

SEQ ID NO: 20419 - DNA, 2847 bp, Artificial Sequence
  derived and/or modified sequence
atgaggtggcctcagccaggggcagccgctcggctgcccccagagtcaccgggaccccctgagtcacctggccctccagagcgagaggctgccgcagctcgcaggtggaccggtgctgagcctcaggattgcgcccctgggtcaggtagacccgagaagccacctcagttaagcgaggacgacatatggctgaaatcagagggagacaattacagtgcaactttgttggagcccgctgcatcaagtctgtccccagatcataagaacatggagattgaggtttctgttgccgagtgcaagtccgtgccgggaattacttctaccccacacccaatggatcatccatccgccttttattctccaccccacaatggactgctgacagaccatcacgaatcactggacaatgatgttgcgcgtgagattcgctaccttgacgaggtgctcgaggctaactgttgtgactccgccgttgatggtacttataatgggacttcctccccagaacccggagctgtcgtgctcgtaggcggtttgagccctcctgtgcatgaagcgacccagcctgagccgacagaacgaaccgccagtcgacaagctccgcctcatattgagctgtccaacagcagccctgaccctatggccgaggcagagagaactaacgggcattcgccttcacagcctcgcgatgctctcggagactctctccaggtgcctgtaagccctagcagcaccacctcgtcgagatgttcctcaagagacggcgagttcactctcacaaccctcaaaaaagaggccaagtttgagctgagagcttttcatgaagacaaaaaaccatccaaactgttcgaggatgatgagcacgaaaaggagcaatactgcattagaaaggtcagaccaagcgaggagatgctcgagctggaaaaggagcgacgggagctcatccggtcacaagccgtgaaaaagaatcccggtattgccgctaagtggtggaatcctccgcaagagaagactattgaggaacagttggatgaggaacatctggagtcccataagaaatacaaggaacgtaaggaacgtcgagcccagcaggagcagctcttgctgcagaagcagctccagcagcagcagcagcagcctccatcgcaactctgcacagcccctgccagctctcatgagcgggcttcaatgattgacaaggccaaagaggatatcgtgactgaacaaattgatttctccgccgcaagaaaacagttccagttgatggaaaatagtaggcaagctgtcgctaagggacagtctactccaaggctcttcagtataaaaccattttataggccactagggtctgttaacagcgacaagcccctgaccaatccgaggcctcctagtgtcggcggtcctcctgaggactcaggtgcaagcgccgctaaagggcagaaatcaccgggtgcgctagagacccctagtgctgccggatctcaggggaacaccgcgtcccaaggcaaggaaggcccatactcagaaccaagcaagaggggtccgctgtcaaagctgtgggccgaagacggtgaatttacttctgctcgtgcagtgcttactgtcgttaaggatgacgatcacggcatcctcgaccagttttctcggtcagtgaatgtgtctttaacgcaggaagagcttgactcgggactggacgagctgagcgttcggtcccaggatacaacggtgttagagacattatcaaacgacttctctatggataacatttctgattccggggcatctaacgagaccaccaatgcactgcaggaaaattcactcgctgacttctctcttcctcagaccccacaaaccgataaccccagcgaggggagaggggagggagttagtaagagtttcagcgatcacggcttttacagcccatcgtcaaccctgggcgactctcctctggttgacgatcccttggagtaccaagctggactcctggtccagaacgccattcagcaagccatagctgaacaggtagataaggctgtcagcaagacctcaagggatggggcagagcaacaagggcctgaggccaccgttgaggaggccgaggcagctgctttcggaagtgagaaaccccagtcaatgttcgaaccccctcaggtatcaagtccagtgcaagaaaaaagagacgttctgccgaagatcctacctgctgaggacagggcacttcgcgagcgcggacctccccagcctctgcccgctgttcagcctagcgggcctatcaatatggaggagactcgaccggaaggctcctacttctctaaatacagtgaagcagccgaactcagatcgacagcctcgttgctcgcgacacaggaatccgacgtgatggtcggaccttttaaactgcgcagcaggaaacagaggaccctgagcatgatcgaggaggagattagggcggcacaggaacgagaggaggaactgaaaagacagagacaggtcttacagtctacacagagcccacggacaaagaacgccccaagtctgccatccagaacatgctataagaccgcacctggcaagattgagaaggtgaagccacctccctctcctaccacagagggtccctccttgcagccagacctagccccagaggaagccgctggtacccagcggccaaagaatctaatgcagaccctcatggaagattatgagacccataagtctaaacgcagggagagaatggacgattcctcagtgctagaggccacacgagtaaaccggaggaaatctgctcttgctctgagatgggaagccggaatatatgcgaatcaggaggaggaggataacgagtag

SEQ ID NO: 20420 - DNA, 6866 bp, Artificial Sequence
  derived and/or modified sequence
gcagatgcgctggccccagcccggggctgccgctcgccttcccccggagtctcctggacccccggagtctcctggacccccggagcgggaggcagcggccgcgcggcgctggactggagcagaaccccaggactgcgcccccgggagcgggcgcccagagaagcctccccagctttctgaggatgatatctggctaaaaagcgagggagacaactatagtgccaccctcctggagcctgctgccagctctctttccccagatcacaaaaacatggaaattgaggtgtctgttgcagaatgtaaaagtgttcctggaatcacctctaccccacatcccatggaccatccctccgctttctattcacccccgcataatggcctccttactgatcaccacgaatccctggataatgatgttgccagagagatccgctatctagatgaggtgctagaggccaactgctgtgattctgctgtggatggaacgtacaatggaacatcctccccagagcctggtgcagtggttctggtgggcggcctaagcccccctgtccacgaggcgacccagccagaacccactgaaagaacagctagccggcaggcacctcctcacatcgagctcagtaatagcagccctgaccccatggcagaggcagaaagaacaaatggccattcccccagccagcctagagatgcgctgggggacagcctgcaggtgcctgtcagccccagctccacaaccagctcacggtgttcttcccgagatggagagttcactctcaccacactgaaaaaggaggccaagtttgagctgcgtgccttccatgaggacaagaagccctccaagctctttgaggatgacgagcatgagaaagaacaatactgcattagaaaagtgaggccttcagaggagatgctggagctggaaaaggagaggagagagctcatccgcagccaggccgtcaagaagaatcctggcattgcagcaaaatggtggaatcccccgcaggaaaaaaccatcgaggagcagctggacgaggaacatctggagtcgcacaaaaagtacaaggagcgcaaagagagaagggcacagcaggaacagttgctgctgcagaagcagttacagcagcagcagcagcagcccccatcgcagctctgcacagcccctgcctcttctcatgaacgcgcaagcatgattgacaaagcaaaggaggacattgtcacagagcagatagatttctctgctgctcgcaaacaatttcagctgatggagaattccaggcaagcggtggccaagggccagagtacacccaggctgttctccatcaagcctttctacaggcctctggggtcagtcaactcagacaagccactgactaatccgagaccaccttctgtcgggggacctccagaagacagtggtgcctcagccgccaagggacagaaatcccccggtgccctggagaccccatcggcagcaggaagccagggcaacacagcctctcaggggaaggaagggccctacagcgagccttctaaacgtgggcccttatctaaactgtgggctgaggatggagaatttacgagcgcccgggctgtcctcactgtggtcaaggatgatgaccatgggattttggatcagttctcaagatctgtcaatgtctccttgacccaagaggagcttgactctggtctggacgaattgtcggtgaggtctcaggataccacagtcctggagaccctatccaatgatttcagcatggacaacatcagtgacagcggggcatccaatgagacaaccaatgccctccaggaaaattcactggctgatttttctctgccccagacaccacaaactgacaacccctcagagggccgaggagaaggcgtctccaagtcatttagtgatcatggtttctattccccttcctccacgctgggggactctccgttggttgatgaccccttggagtatcaggctggcctcctggtgcagaatgccattcaacaagccatagccgagcaggtggataaagctgtgtccaaaaccagcagggatggagcagagcaacagggacctgaagcgactgtagaggaagctgaagctgcggctttcggctcagaaaagcctcagagcatgtttgagccacctcaggtgtcttctcctgttcaagagaaaagggatgtattaccaaagattctgcctgctgaagacagggcgctcagggaaagggggcccccccagccactgccagctgtgcagcccagtggcccgattaacatggaggagaccaggcccgaaggaagctatttcagcaagtactcggaggcagctgagctgagaagcacagcctccctcctggccactcaagaatctgacgtgatggttgggcctttcaagctgaggtccaggaaacagcggactttgtccatgattgaggaagagatccgagcagctcaggaaagggaagaggagctgaagaggcagagacaagtcttgcagagtacgcagagccccaggacaaagaatgccccatcactgccctccagaacatgctacaaaactgctccagggaaaatagagaaagtcaaacctcctccatcccccaccactgaaggccccagcttgcagcctgacttagcccctgaagaggctgccggaacccagcggcccaagaatctgatgcagaccctcatggaagactatgagacacacaaatctaaaaggcgcgagagaatggatgatagtagtgtcctcgaggccacacgggttaatcgaagaaagagcgcactggctttgcgctgggaagcagggatctatgccaaccaggaggaagaagacaacgaataaacttccttcaacccaggaagcgtctttggtgcttgggagaccaagaaaccaagaaattaacaactgaaagcattttaatggactatttattaaagtgcaaacaaactcagcaatccttatgtagaccagaagctgcaatatacaatgatgaaaatgaaacgaaaaggaagtccccccatcagactctggacacccaggaatcaaaagagaaaggacttttttggtgactcaatcccagtgtctggtttggggccaatctacaatggatccaaaaggacaaaacatgttacaagcaaatcaacatagttgctgcaggcggaactgagaccagcctctctgggcgatgaaggacaatggtggtagggccacttagagagcagtagggcccaggctggtgcagcctacatggcacaggatatttccctgcaccagtttcccacctgtcacttgcagcatcagagggtgttgcattaactccattttctccagcagccataaaatgaatggcgtttctctccatatttgcccagaagaggcagttatgattccacttctcctacatttaattatttttaattgagaacaactcatgatcacaattcataaaatccatattttaagacaatagttcttcatgtcacaaacacaatctattctacatgaggaggctgagaaaggggaagagaaaaacaaaccaaatggatgatgttagctttaggatcgtgtctgcttataatattcactgatctgcagtttatgagaacacattttcacagttatgtttcttcataggaaaactatatttagtgggcaacaactatttttatgatgggatgggggagtatatacacgtatagaatctgtacgcgttgaacaacttggttcaagatggtgggggcatttttagagcggcaataattgaaaaaaaaggcgaactctgccttggagaggtagatgataagaaataaaaaggtgtttataactattttgtattataaagtgggccttagagataggaagaagaatgatggattccttttggatcaatcagaaaggaaacacgaaagaaaagtcaggaaggtagagagagaaaaagggagggaaggagaaagaatgggaataaaataaggaggtaagagatactatttttgctgagcaaccagtgtgtttcaggatgatacaaagaaaaatatagaatagaaataagtgcaggcttggaatcagctacaaatcctaaagatggggtgtgtgtggatgtgtgtgtgtgtgtgtgtacaccattgtgtgtttgtaaaatgtgtatgttcatgagtaagggtgtgtgtgtgtgtgtattaaaattccagagtgaccgtggcacttgggtgtacaggtaattcctccagagctgtttgctggcttcaggagtggagtgagaatttcttttttatgaaaagggatataaaggcaccgagctgatgcagtatttgtaatattaagttgacctaacaaggtatttgcatgagtcacaattacaaagttttgagcggttttgtaatttgacatttaggagagtctcctatttattctcatactttacattcatgcttagtatactatagaggatgccagctttaatctttctgtcatttaaagcaatatgataagggtattcaataattgggtgccctaaatttctggatgagaaaattttcaattctggccatgagaaagaaaaaaaaataaacagccttctttttttttcctttgttttaaaactgtggttttttaaaaaagcaataattaactcagacctcactaaaaatcatttttgtttttatattgttatgtcataagctctattatgttattctaacaagtagcaatttcacaaaatttgtatgtagatgttaacgcacatttcctttgcttcttttattagactagtgttgactttggggggggacatttattcacaaatgagaagtaggcacaaagtaaaaaatggaaccatctactaacaaggatcctttaaaactgccaagggagctctaacttgaagccacatcctacagatggcagcccaaatagcacatgggcaattggcaccatctttatatggttgagtctcctgaatattttgaatgaattctcaacaaaatgtgctagccactggggacgcaaaacaagtaagatccctgttgcaagaaattcattttatagtgagggaggttggcatggagactaaaattctcaggaaaatgagatccgtgttagattagaagtcctgatgtgaaatgggaggactcaggaaggaggatcgtctttacctgaggatttctagccagaggtcccagatgcctgggctgagaacccagcgataagggggcgttcccaaagcagacacagggataagaacagaggaggcagcagcattgcacagccccaggcacagtggcagttaggatggctggagagtaggatagttctatgggttgcccaaaaaatgtgatgcgcttcatgttttctctgactcatggatctggtagagaccatagacatgatatagactaacttccccatttttcacaagaggaaaccatccttatgacttaccttaaagttttttgttctgttttgaaggaaaccatgtgcttcatgaaacctacagttgacaagagaatgtacagctaagagaaaagcttaagaggccacactattcgcggaatggctttagaggcagatgaagtggtctttgaccacagttgattgaaccagagcacttattgcttaaagaataacagagttctagagctgggggttcttgggccatgctccgtgtgtggataaggaaagaaatactgtttctgggactctcccacagtcacaaagctgttttcactgtggcccctacatctcttaacttttgctattactcctatgctgccttccggattactgctgtctatcttcttgctccactcactgaagatcctattataatcccatgaaaatgtaaattacagtttacttgggagagccagattttctctgtgctcttgagttttttattcattcaagaaaccttgggccaccgctttgtacatagcaccgtgctaggctctgggatcccaaatggacccttttaactttctgaagatgggaccgtcccctggaggaaagtcattcctgcctaatccatcgagagaaagaggcttacgaaaaactttgcctctgatgctcagccccacccccaaatagcacacaagcttgttaaccccacctcttacaaaatgtttagattctgtaggtgttaaaagcctttctggaagtattgcattctgccgtgtttataggtgttcactttcctccagagctgattaactactgacatgacttggctttctcatccagaaattatggaaacagggtctgtcagtggcaggaggccgtgctgtgttttacttggatgacacaatgcagtttacttgcctcttcatacccatgcatgctgctcaccctagacaatgacatataagccgtatatagatcaatgtccacatatatatacacacacacatatatatatataaagtgtaacaaggaacactaaaacagtgttgattcttgtctctgaagacaaataattaaaccttttttttcccaactaaagaatggatttaattaaactatgtattgaaaaaaaagtagcctaagtgttagagatggtgaatatattccattttagttaaagaacaaatttcctgaattttaagcattcagtgagctgccaattttgattttgtgttgctctttacccaaattattttttctttgtttttctttttttgggggaggaggggaaaaaagcagcaatactgtgtttggaaattatactctgtatctggttttcctgtgtatgttaaccacttaaatgttattatcctgctttggttttagagtgattgtgaggcattcaatgcaagtatacagttattttctcattaaaatccaatgtgtgttgagtttttataaa

SEQ ID NO: 20421 - DNA, 2847 bp, Artificial Sequence
  derived and/or modified sequence
atgagatggccccagcccggcgccgccgccagactgccccccgagagccccggcccccccgagagccccggcccccccgagagagaggccgccgccgccagaagatggaccggcgccgagccccaggactgcgcccccggcagcggcagacccgagaagcccccccagctgagcgaggacgacatctggctgaagagcgagggcgacaactacagcgccaccctgctggagcccgccgccagcagcctgagccccgaccacaagaacatggagatcgaggtgagcgtggccgagtgcaagagcgtgcccggcatcaccagcaccccccaccccatggaccaccccagcgccttctacagccccccccacaacggcctgctgaccgaccaccacgagagcctggacaacgacgtggccagagagatcagatacctggacgaggtgctggaggccaactgctgcgacagcgccgtggacggcacctacaacggcaccagcagccccgagcccggcgccgtggtgctggtgggcggcctgagcccccccgtgcacgaggccacccagcccgagcccaccgagagaaccgccagcagacaggcccccccccacatcgagctgagcaacagcagccccgaccccatggccgaggccgagagaaccaacggccacagccccagccagcccagagacgccctgggcgacagcctgcaggtgcccgtgagccccagcagcaccaccagcagcagatgcagcagcagagacggcgagttcaccctgaccaccctgaagaaggaggccaagttcgagctgagagccttccacgaggacaagaagcccagcaagctgttcgaggacgacgagcacgagaaggagcagtactgcatcagaaaggtgagacccagcgaggagatgctggagctggagaaggagagaagagagctgatcagaagccaggccgtgaagaagaaccccggcatcgccgccaagtggtggaaccccccccaggagaagaccatcgaggagcagctggacgaggagcacctggagagccacaagaagtacaaggagagaaaggagagaagagcccagcaggagcagctgctgctgcagaagcagctgcagcagcagcagcagcagccccccagccagctgtgcaccgcccccgccagcagccacgagagagccagcatgatcgacaaggccaaggaggacatcgtgaccgagcagatcgacttcagcgccgccagaaagcagttccagctgatggagaacagcagacaggccgtggccaagggccagagcacccccagactgttcagcatcaagcccttctacagacccctgggcagcgtgaacagcgacaagcccctgaccaaccccagaccccccagcgtgggcggcccccccgaggacagcggcgccagcgccgccaagggccagaagagccccggcgccctggagacccccagcgccgccggcagccagggcaacaccgccagccagggcaaggagggcccctacagcgagcccagcaagagaggccccctgagcaagctgtgggccgaggacggcgagttcaccagcgccagagccgtgctgaccgtggtgaaggacgacgaccacggcatcctggaccagttcagcagaagcgtgaacgtgagcctgacccaggaggagctggacagcggcctggacgagctgagcgtgagaagccaggacaccaccgtgctggagaccctgagcaacgacttcagcatggacaacatcagcgacagcggcgccagcaacgagaccaccaacgccctgcaggagaacagcctggccgacttcagcctgccccagaccccccagaccgacaaccccagcgagggcagaggcgagggcgtgagcaagagcttcagcgaccacggcttctacagccccagcagcaccctgggcgacagccccctggtggacgaccccctggagtaccaggccggcctgctggtgcagaacgccatccagcaggccatcgccgagcaggtggacaaggccgtgagcaagaccagcagagacggcgccgagcagcagggccccgaggccaccgtggaggaggccgaggccgccgccttcggcagcgagaagccccagagcatgttcgagcccccccaggtgagcagccccgtgcaggagaagagagacgtgctgcccaagatcctgcccgccgaggacagagccctgagagagagaggccccccccagcccctgcccgccgtgcagcccagcggccccatcaacatggaggagaccagacccgagggcagctacttcagcaagtacagcgaggccgccgagctgagaagcaccgccagcctgctggccacccaggagagcgacgtgatggtgggccccttcaagctgagaagcagaaagcagagaaccctgagcatgatcgaggaggagatcagagccgcccaggagagagaggaggagctgaagagacagagacaggtgctgcagagcacccagagccccagaaccaagaacgcccccagcctgcccagcagaacctgctacaagaccgcccccggcaagatcgagaaggtgaagcccccccccagccccaccaccgagggccccagcctgcagcccgacctggcccccgaggaggccgccggcacccagagacccaagaacctgatgcagaccctgatggaggactacgagacccacaagagcaagagaagagagagaatggacgacagcagcgtgctggaggccaccagagtgaacagaagaaagagcgccctggccctgagatgggaggccggcatctacgccaaccaggaggaggaggacaacgagtag

SEQ ID NO: 20422 - DNA, 1683 bp, Artificial Sequence
  derived and/or modified sequence
atggagctggaaaacatcgttgccaacaccgtcctcctgaaagcccgagaggggggtggcggcaatcggaagggtaagtcaaagaagtggagacagatgctgcagtttcctcatataagtcaatgtgaagaattaaggctttcgctcgagcgagactaccattccctttgcgagcgccaacccatcggacgactgctattcagagagttttgcgccacacggcccgagctgtcaaggtgtgtggctttccttgacggggtcgcagagtacgaggttacccccgacgacaagcggaaagcctgcggtaggcagcttacacagaacttcctatcacatacagggcctgatttgataccagaggttccaagacagctggtcacgaactgtacacagagactggaacaggggccttgtaaagacttgtttcaggagctgaccaggctgacccatgaatacctctcggtggctccctttgctgattatctggattcaatctacttcaatcgcttcttgcagtggaagtggctggagaggcagcccgttacaaagaacacgtttaggcagtatcgcgtattggggaaaggcggcttcggtgaagtatgcgcttgtcaagtacgggccaccggaaagatgtatgcatgcaagaagctggaaaaaaaacgaatcaaaaagagaaagggggaggcaatggcccttaatgaaaagcagatcctggaaaaagttaactcaaggtttgtagtttccctggcatatgcctacgaaactaaagatgctctgtgcttagtgcttactttaatgaacggtggcgaccttaaatttcacatttatcatatgggccaggcaggcttccccgaggcgagggctgtcttttatgcagcagaaatatgttgcggcctggaggacttgcaccgggaaagaatagtgtacagggatctaaagcccgagaacatcctgctcgacgaccacggccacatcaggattagtgatttaggacttgccgtccacgtgcctgagggccagaccatcaagggaagggtcggcacagtagggtacatggccccagaggtggtgaagaatgaacgctacaccttttcacctgactggtgggcccttggctgcctgctttacgaaatgatcgcgggtcagtctccattccagcagagaaagaaaaagatcaaacgagaggaggttgaacggcttgtgaaggaggtgccagaagagtattcagagagattctctcctcaggctaggagcctgtgcagtcaattactgtgtaaggatccagcagagcgtttgggttgcaggggcggtagcgcacgggaagttaaggaacaccctctctttaagaaactcaatttcaagaggctcggggcaggaatgctcgaacccccctttaagccagatccacaggccatctattgcaaagatgtgcttgacatcgaacagttttcaacagtcaaaggtgtggagttggagccaaccgaccaagatttttatcaaaagttcgccaccgggagtgttccgatcccatggcagaacgagatggtggaaaccgaatgttttcaagaattaaatgtcttcggtctcgatggctctgtgccacctgacctcgactggaagggccagccccccgcccccccgaagaagggtctcctccagcgcttgttctctcgccaaagatag

SEQ ID NO: 20423 - DNA, 1683 bp, Artificial Sequence
  derived and/or modified sequence
atggagctggagaacatcgtggccaacacagtgctgctgaaggcccgggagggcggcggcggcaacaggaagggcaagagcaagaagtggaggcagatgctgcagttcccccacatcagccagtgtgaggagctgcggctgagcctggagcgggactaccacagcctgtgtgagcggcagcccatcggccgcctgctcttccgggagttctgtgccaccaggcctgagctgagccgctgtgtggccttcctggatggagtggccgagtatgaggtgaccccagatgacaagaggaaggcctgtggccggcagctgacccagaacttcctgagccacactggaccagacctgatccctgaggtgccccggcagctggtgaccaactgcacccagaggctggagcagggcccctgcaaggacctcttccaggagctgacccggctgacccatgagtacctgtctgtggccccctttgctgactacctggacagcatctacttcaaccgcttcctgcagtggaagtggctggagcggcagcctgtgaccaagaacaccttccggcagtacagagtgctgggcaagggcggctttggagaggtgtgtgcctgccaggtgcgggccaccgggaagatgtatgcctgcaagaagctggagaagaagaggatcaagaagaggaagggggaggccatggccctgaatgagaagcagatcctggagaaggtgaacagcagatttgtggtgtccctggcctatgcctatgagaccaaggatgccctgtgcctggtgctgaccctgatgaatggaggagacctgaagttccacatctaccacatgggccaggccggcttccctgaggcccgggctgtgttctacgccgctgagatctgctgcggcctggaggacctgcaccgggagagaattgtgtacagagacctgaagccagagaacatcctgctggatgaccacggccacatccgcatcagtgacctgggcctggccgtgcacgtgcctgagggccagaccatcaagggccgggtgggcaccgtgggctacatggcccctgaggtggtgaagaatgaaagatacaccttctccccagactggtgggccctgggctgcctgctgtatgagatgattgctggccagagccccttccagcagaggaagaagaagatcaagcgggaggaggtggagcggctggtgaaggaggtgcctgaggagtacagcgagcgcttcagcccccaggcccggagcctgtgcagccagctgctgtgcaaggaccctgctgagcggctgggctgccggggcggcagcgcccgggaggtgaaggagcaccccctcttcaagaagctgaacttcaagaggctgggcgccggcatgctggagccccccttcaagccagacccccaggccatctactgcaaggatgtgctggacatcgagcagttcagcacagtgaagggcgtggagctggagcccacagaccaggacttctaccagaagtttgccaccggctctgtgcccatcccctggcagaatgagatggtggagacagagtgcttccaggagctgaatgtgtttggcctggatggctctgtgcccccagacctggactggaagggccagcccccagccccacccaagaagggcctgctgcagaggctcttcagccggcagaggtag

SEQ ID NO: 20424 - DNA, 1683 bp, Artificial Sequence
  derived and/or modified sequence
atggagctggagaacatcgtggccaacaccgtgctgctgaaggcccgtgagggcggggggggtaacagaaagggcaaatctaaaaagtggagacagatgttacagttcccccacatcagccagtgcgaagagctacggcttagtttggaacgggattatcatagcttatgtgagcgccagcctattggtaggcttttattcagagaattttgtgcgacacgtcctgaactgtctcgttgtgtggcctttttggatggagttgcagagtacgaggtcactccggacgataaacgcaaggcttgcggccggcagctcacacaaaacttcctatctcacacggggccggacctcatcccagaggtgcccagacaattggtcaccaattgcacccagcgccttgaacaaggaccctgcaaagatttattccaggaattgacgcggctgacccacgaatatctttctgtcgccccgtttgctgactacctggattccatctatttcaaccggtttctgcagtggaaatggctcgaacggcagcctgttaccaaaaatacctttcggcaatatcgagtgttagggaaggggggcttcggagaagtgtgtgcctgccaggttagagctaccggcaagatgtatgcctgcaaaaagctggagaagaagagaatcaagaagcggaagggtgaggcgatggcattgaatgagaaacagatcttggaaaaggttaactctaggttcgtggtgagcttggcgtacgcatacgagactaaggatgccttgtgtctggtgctcacactgatgaatggcggagatctgaaattccacatatatcacatgggccaagctggttttcccgaggccagagcggtcttctacgccgcagaaatatgttgtggcctcgaagacctacaccgtgagcgcatcgtgtatagggatctgaagccggagaatatactcctggacgatcatggacacattcggatttctgacctaggactcgccgtgcacgttcctgagggccagactataaaaggacgcgtgggcacagtgggctatatggctcccgaggtcgtaaaaaatgagcgatacacattctcccctgactggtgggcccttgggtgtctgctgtacgaaatgatagctggtcagagcccatttcagcaacgcaaaaagaaaatcaaacgtgaagaggtggaacgcctggtcaaggaggtccctgaagagtatagcgaacggttttccccgcaagccagaagtttgtgcagtcagctgctgtgcaaggaccctgctgaacggctgggatgtagaggcgggtccgcgcgggaagttaaagagcacccactgtttaaaaagctaaatttcaagagacttggcgcgggcatgttggagccaccattcaagcctgatccgcaggccatctattgtaaggatgtgctggacatcgagcagttctccactgtgaaaggcgtagaattggagccgactgaccaggacttttatcaaaagtttgcaaccggatcggttccaattccgtggcagaatgaaatggtcgagacagagtgcttccaggagttgaacgtatttggcttagacgggagtgtgcccccagacctcgattggaaggggcagcccccagctcctccaaagaaaggtcttctgcagcgtctgttcagcagacagcgctag

SEQ ID NO: 20425 - DNA, 1683 bp, Artificial Sequence
  derived and/or modified sequence
atggagctcgagaatatcgtagccaataccgttctgttaaaggcaagagagggcggaggaggcaatcgtaaaggcaagagtaagaagtggcgacagatgctccagttccctcatatatcacaatgtgaggagctgagactgtctttagagcgcgactatcacagtctgtgcgagcgtcagccaatcggcagactactttttcgcgaattttgtgccacaaggccagaactttcccgctgtgtcgcctttctggatggagtggccgaatatgaggtgacccccgacgacaaacgaaaggcatgcgggcgtcagcttactcagaatttcctttcccatacagggccagacttgatccccgaggtccctaggcaactggtgacgaactgtacccagaggcttgagcagggcccttgcaaggacctattccaggagttgacgcggctcactcacgagtatctgagcgttgcccctttcgccgactatctcgatagcatatatttcaataggtttctgcagtggaaatggctcgagcgccagccggtaactaagaacacgttcagacagtaccgcgtcctcggtaagggcggattcggcgaggtctgtgcctgccaggtaagggcaaccggaaagatgtatgcgtgtaaaaagctcgaaaagaagagaatcaaaaaaaggaaaggggaggcaatggctctgaacgagaagcagatcctggaaaaggtaaactcacggttcgtggtgagtctggcctacgcatatgaaactaaggatgccctctgtctcgttctcactcttatgaacgggggagatcttaaatttcacatttatcacatgggacaggcgggattcccagaagctcgggcagtcttttacgctgccgagatctgctgcggtctggaggacttgcatagagagagaatcgtttacagagacctaaaaccagagaacattctgctggatgaccacggtcacattagaatctccgacttaggtcttgccgtgcacgtccccgaggggcagaccatcaaaggccgagttggcactgttggatacatggcacctgaggtggtgaagaatgagcgatacacatttagtcctgactggtgggcccttggatgtctcctgtacgaaatgattgctgggcaatcacctttccaacagcgaaaaaagaaaatcaagagagaggaggtcgagaggcttgtaaaggaggtgcctgaagaatactccgaaaggttttccccgcaggccaggagcctttgctcgcaacttttatgtaaggatcctgcagagcgattgggatgtcgcggtggatcagccagggaagtgaaggaacatcccctattcaagaagttaaactttaaaagacttggtgccggtatgctggagccacccttcaaaccagacccccaagcgatttactgtaaagatgtgctggatatcgagcaattttcaactgtgaaaggtgtggaactggaaccaaccgatcaggacttctatcaaaagttcgcaactgggtcagtgccaattccgtggcagaacgagatggttgagactgaatgttttcaagagttaaacgtatttggcctggacgggagtgtgccacccgatttggactggaaaggccagccacccgctccccctaagaaaggactgttgcaaagactgtttagtcgacagaggtag

SEQ ID NO: 20426 - DNA, 1683 bp, Artificial Sequence
  derived and/or modified sequence
atggagctggagaacatcgtggccaacaccgtgctgctgaaggccagagagggcggcggcggcaacagaaagggcaagagcaagaagtggagacagatgctgcagttcccccacatcagccagtgcgaggagctgagactgagcctggagagagactaccacagcctgtgcgagagacagcccatcggcagactgctgttcagagagttctgcgccaccagacccgagctgagcagatgcgtggccttcctggacggcgtggccgagtacgaggtgacccccgacgacaagagaaaggcctgcggcagacagctgacccagaacttcctgagccacaccggccccgacctgatccccgaggtgcccagacagctggtgaccaactgcacccagagactggagcagggcccctgcaaggacctgttccaggagctgaccagactgacccacgagtacctgagcgtggcccccttcgccgactacctggacagcatctacttcaacagattcctgcagtggaagtggctggagagacagcccgtgaccaagaacaccttcagacagtacagagtgctgggcaagggcggcttcggcgaggtgtgcgcctgccaggtgagagccaccggcaagatgtacgcctgcaagaagctggagaagaagagaatcaagaagagaaagggcgaggccatggccctgaacgagaagcagatcctggagaaggtgaacagcagattcgtggtgagcctggcctacgcctacgagaccaaggacgccctgtgcctggtgctgaccctgatgaacggcggcgacctgaagttccacatctaccacatgggccaggccggcttccccgaggccagagccgtgttctacgccgccgagatctgctgcggcctggaggacctgcacagagagagaatcgtgtacagagacctgaagcccgagaacatcctgctggacgaccacggccacatcagaatcagcgacctgggcctggccgtgcacgtgcccgagggccagaccatcaagggcagagtgggcaccgtgggctacatggcccccgaggtggtgaagaacgagagatacaccttcagccccgactggtgggccctgggctgcctgctgtacgagatgatcgccggccagagccccttccagcagagaaagaagaagatcaagagagaggaggtggagagactggtgaaggaggtgcccgaggagtacagcgagagattcagcccccaggccagaagcctgtgcagccagctgctgtgcaaggaccccgccgagagactgggctgcagaggcggcagcgccagagaggtgaaggagcaccccctgttcaagaagctgaacttcaagagactgggcgccggcatgctggagccccccttcaagcccgacccccaggccatctactgcaaggacgtgctggacatcgagcagttcagcaccgtgaagggcgtggagctggagcccaccgaccaggacttctaccagaagttcgccaccggcagcgtgcccatcccctggcagaacgagatggtggagaccgagtgcttccaggagctgaacgtgttcggcctggacggcagcgtgccccccgacctggactggaagggccagccccccgccccccccaagaagggcctgctgcagagactgttcagcagacagagatag

SEQ ID NO: 20427 - protein, 576 aa, Artificial Sequence
  derived and/or modified sequence
MELENIVANTVLLKAREGGGGNRKGKSKKWRQMLQFPHISQCEELRLSLERDYHSLCERQPIGRLLFREFCATRPELSRCVAFLDGVAEYEVTPDDKRKACGRQLTQNFLSHTGPDLIPEVPRQLVTNCTQRLEQGPCKDLFQELTRLTHEYLSVAPFADYLDSIYFNRFLQWKWLERQPVTKNTFRQYRVLGKGGFGEVCACQVRATGKMYACKKLEKKRIKKRKGEAMALNEKQILEKVNSRFVVSLAYAYETKDALCLVLTLMNGGDLKFHIYHMGQAGFPEARAVFYAAEICCGLEDLHRERIVYRDLKPENILLDDHGHIRISDLGLAVHVPEGQTIKGRVGTVGYMAPEVVKNERYTFSPDWWALGCLLYEMIAGQSPFQQRKKKIKREEVERLVKEVPEEYSERFSPQARSLCSQLLCKDPAERLGCRGGSAREVKEHPLFKKLNFKRLGAGMLEPPFKPDPQAIYCKDVLDIEQFSTVKGVELEPTDQDFYQKFATGSVPIPWQNEMVETECFQELNVFGLDGSVPPDLDWKGQPPAPPKKGLLQRLFSRQDCCGNCSDSEEELPTRL

SEQ ID NO: 20428 - DNA, 2939 bp, Artificial Sequence
  derived and/or modified sequence
agagtgcgcggctggctgcggcggccggggaggccggggaggccgcggcgcggtcactgcgagccgagccgagccgcgccgagccgcgccgatcgccatccggcctcggcactcgcgcgcgatcccggccggcggcgcggcccggcgggccaggcggcgccacagcccatggagctcgagaacatcgtagcgaacacggtgctactcaaggcccgggaaggtggcggtggaaatcgcaaaggcaaaagcaagaaatggcggcagatgctccagttccctcacatcagccagtgcgaagagctgcggctcagcctcgagcgtgactatcacagcctgtgcgagcggcagcccattgggcgcctgctgttccgagagttctgtgccacgaggccggagctgagccgctgcgtcgccttcctggatggggtggccgagtatgaagtgaccccggatgacaagcggaaggcatgtgggcggcagctaacgcagaattttctgagccacacgggtcctgacctcatccctgaggtcccccggcagctggtgacgaactgcacccagcggctggagcagggtccctgcaaagaccttttccaggaactcacccggctgacccacgagtacctgagcgtggccccttttgccgactacctcgacagcatctacttcaaccgtttcctgcagtggaagtggctggaaaggcagccagtgaccaaaaacaccttcaggcaataccgagtcctgggcaaaggtggctttggggaggtgtgcgcctgccaggtgcgggccacaggtaagatgtatgcctgcaagaagctagagaaaaagcggatcaagaagcggaaaggggaggccatggcgctgaacgagaagcagatcctggagaaagtgaacagtaggtttgtagtgagcttggcctacgcctatgagaccaaggacgcgctgtgcctggtgctgacactgatgaacgggggcgacctcaagttccacatctaccacatgggccaggctggcttccccgaagcgcgggccgtcttctacgccgccgagatctgctgtggcctggaggacctgcaccgggagcgcatcgtgtacagggacctgaagcccgagaacatcttgctggatgaccacggccacatccgcatctctgacctgggactagctgtgcatgtgcccgagggccagaccatcaaagggcgtgtgggcaccgtgggttacatggctccggaggtggtgaagaatgaacggtacacgttcagccctgactggtgggcgctcggctgcctcctgtacgagatgatcgcaggccagtcgcccttccagcagaggaagaagaagatcaagcgggaggaggtggagcggctggtgaaggaggtccccgaggagtattccgagcgcttttccccgcaggcccgctcactttgctcacagctcctctgcaaggaccctgccgaacgcctggggtgtcgtgggggcagtgcccgcgaggtgaaggagcaccccctctttaagaagctgaacttcaagcggctgggagctggcatgctggagccgccgttcaagcctgacccccaggccatttactgcaaggatgttctggacattgaacagttctctacggtcaagggcgtggagctggagcctaccgaccaggacttctaccagaagtttgccacaggcagtgtgcccatcccctggcagaacgagatggtggagaccgagtgcttccaagagctgaatgtctttgggctggatggctcagttcccccagacctggactggaagggccagccacctgcacctcctaaaaagggactgctgcagagactcttcagtcgccaagattgctgtggaaactgcagcgacagcgaggaagagctccccacccgcctctagcccccagcccgaggcccccaccagcagttggcggtagcagctactccgagcgccgtttacagttttgcacagtgatcttccccattgtccactcaagtcgtggcctggggaacacagacggagctgtccccagtgtcctccgtccctcagcccctggcctggctgagtttggcagggcctgggccatccctgggacaaaggtgcgtcccttcagctcttctccgtggagctcggggctttctgtatttatgtatttgtacgaatgtatatagcgaccagagcattcttaattcccgccgcagacctggcgcccccgccttggctcctgggggcagccagccctggctgggagagcgggagctggcagaggagccactgccaaactcaaggctcctctggcccagcttggatggctgagggtggtcacacccctgagccttcagcactgtgctggccaccccggcctctgagtaagactcgtgcctccccctgctgccctgggctcaggctgctaccctctggggcccaaagctgtcccttctcagtgcttgtcagcgctgggtctggggcctctgtatgccctaggcctgtgccaaagtggccagagattgggctgcctgtgatacccatcagcccactgccccggccggcccagataggtctgcctctgccttccagctcccacagcctggtccctgatactgggctctgtcctgcagacacctctttcagaaacgcccaagcccagcccctaggagggggtggggcatccctggtcaaccctcaaacattccggactcccctcataacaatagacacatgtgcccagcaataatccgccccttcctgtgtgcgcctgtggggtgcgtgcgcgcgcgtgtgtacctgtgtgggtgaaggggatagggcgaggctgtgcctgtgccccaggtcccagccctggcccttcccagactgtgatggccatcctggtcccagtgttagggtagcatgggattacagggccctgttttttccatatttaaagccaatttttatta

SEQ ID NO: 20429 - DNA, 1731 bp, Artificial Sequence
  derived and/or modified sequence
atggaactggaaaacatcgtggccaacacagtactactgaaggcaagggaagggggaggcggtaataggaagggaaagagtaagaagtggagacagatgctgcagtttccccacatcagccagtgcgaggagcttcgcctgtccctggaaagggactatcacagcctctgcgaaagacaacctataggtcggttgctgtttcgagagttttgtgccacccgccctgaactgtcacggtgcgtggcctttctggacggagtggctgagtacgaagtgacccctgacgacaagcggaaggcctgtggcaggcagctgacccagaacttcctgagccacactggtcctgatttaatcccggaggtaccgaggcagctggtcacaaactgcacccagcgtctggaacaaggaccatgtaaggacctgttccaggaactgaccaggctgacacacgaatatctgtcggtcgcccctttcgcggattatctggatagcatctacttcaaccggtttcttcagtggaagtggctggaacggcagccagtgacgaaaaataccttcaggcaatatcgcgtgctggggaagggagggtttggggaagtctgtgcctgtcaagtgcgggccactggcaagatgtacgcctgtaagaaattagagaagaagaggatcaaaaagaggaaaggagaagccatggccctgaacgagaaacagatattggaaaaggtgaactctaggttcgtggtgagccttgcttacgcttatgaaactaaggacgcactgtgcctagtgctcacactgatgaatggtggcgacctgaagttccatatttaccatatgggacaggctgggtttccagaggcacgcgcagtgttttacgcggcagagatttgctgcggattagaggacctgcaccgagaaaggatcgtgtatagggacctgaagcctgagaatatcctgttagacgatcatggtcacatccgaatcagtgatctcggcctggcagtgcatgtccccgagggccagaccatcaaaggacgcgtggggacggttggctacatggcccctgaagttgtcaaaaacgaacggtatacattctcaccggattggtgggcgttaggatgtctgttatacgaaatgatagccggccaatctccctttcaacagagaaagaagaaaataaagcgagaggaggtggagcgcctcgtcaaggaggtcccagaagagtactcagaacgtttcagccctcaagcccgctctttatgttctcaactgctctgcaaagaccccgcagagcggctgggatgtcggggcgggtcagccagagaggtcaaagagcatcctctgtttaagaagttgaatttcaagagactcggtgctggaatgctggaacctcctttcaaacctgatccacaggcaatttactgtaaagatgtactcgatatcgagcaattctctactgtaaaaggagtggaactggaaccgacagaccaggatttttaccaaaagttcgctacaggatctgtcccgatcccctggcaaaatgagatggtggaaacggaatgtttccaggagctgaatgttttcgggctcgatggctcagtgccaccagacctggattggaagggtcagccccccgccccgcctaagaagggcctgctccagcgactcttcagtcggcaggactgttgcggcaactgttctgactctgaggaagagttacccaccagactctag

SEQ ID NO: 20430 - DNA, 1731 bp, Artificial Sequence
  derived and/or modified sequence
atggagctggagaacatcgtggccaacacagtgctgctgaaggcccgggagggcggcggcggcaacaggaagggcaagagcaagaagtggaggcagatgctgcagttcccccacatcagccagtgtgaggagctgcggctgagcctggagcgggactaccacagcctgtgtgagcggcagcccatcggccgcctgctcttccgggagttctgtgccaccaggcctgagctgagccgctgtgtggccttcctggatggagtggccgagtatgaggtgaccccagatgacaagaggaaggcctgtggccggcagctgacccagaacttcctgagccacactggaccagacctgatccctgaggtgccccggcagctggtgaccaactgcacccagaggctggagcagggcccctgcaaggacctcttccaggagctgacccggctgacccatgagtacctgtctgtggccccctttgctgactacctggacagcatctacttcaaccgcttcctgcagtggaagtggctggagcggcagcctgtgaccaagaacaccttccggcagtacagagtgctgggcaagggcggctttggagaggtgtgtgcctgccaggtgcgggccaccgggaagatgtatgcctgcaagaagctggagaagaagaggatcaagaagaggaagggggaggccatggccctgaatgagaagcagatcctggagaaggtgaacagcagatttgtggtgtccctggcctatgcctatgagaccaaggatgccctgtgcctggtgctgaccctgatgaatggaggagacctgaagttccacatctaccacatgggccaggccggcttccctgaggcccgggctgtgttctacgccgctgagatctgctgcggcctggaggacctgcaccgggagagaattgtgtacagagacctgaagccagagaacatcctgctggatgaccacggccacatccgcatcagtgacctgggcctggccgtgcacgtgcctgagggccagaccatcaagggccgggtgggcaccgtgggctacatggcccctgaggtggtgaagaatgaaagatacaccttctccccagactggtgggccctgggctgcctgctgtatgagatgattgctggccagagccccttccagcagaggaagaagaagatcaagcgggaggaggtggagcggctggtgaaggaggtgcctgaggagtacagcgagcgcttcagcccccaggcccggagcctgtgcagccagctgctgtgcaaggaccctgctgagcggctgggctgccggggcggcagcgcccgggaggtgaaggagcaccccctcttcaagaagctgaacttcaagaggctgggcgccggcatgctggagccccccttcaagccagacccccaggccatctactgcaaggatgtgctggacatcgagcagttcagcacagtgaagggcgtggagctggagcccacagaccaggacttctaccagaagtttgccaccggctctgtgcccatcccctggcagaatgagatggtggagacagagtgcttccaggagctgaatgtgtttggcctggatggctctgtgcccccagacctggactggaagggccagcccccagccccacccaagaagggcctgctgcagaggctcttcagccggcaggactgctgcggcaactgcagcgacagcgaggaggagctgcccacccggctgtag

SEQ ID NO: 20431 - DNA, 1731 bp, Artificial Sequence
  derived and/or modified sequence
atggagctggagaacatcgtggccaacaccgtgctgctgaaggcccgggaaggaggcggcggcaacaggaaaggcaagtccaagaagtggcgtcaaatgctgcaattccctcatatttctcaatgtgaggaactgaggctgagtctggaaagggattaccacagcctctgtgagcgccagcctatcggacgtctcctctttcgggagttctgtgctacaaggcctgagctaagcaggtgtgtcgcattcttagacggcgtcgccgagtacgaggtgacccctgacgacaaaaggaaagcatgtgggcgacagttaacccagaacttcctttcacacaccggacccgaccttataccagaagtgccccgacaactcgtaaccaattgtacacaacgcctggagcaggggccttgcaaggacctgtttcaggaactcactcgccttacccacgagtacctgtctgttgctcccttcgccgattacctagactctatttattttaacagattcctgcagtggaagtggcttgagcggcagccggtcactaaaaatacattccggcagtatagagttttagggaaaggtggtttcggggaagtttgcgcctgtcaggttcgcgccacaggcaagatgtacgcctgtaaaaagttagagaaaaaacggatcaaaaagcgaaaaggggaggctatggccctcaacgaaaagcagatcctagagaaagtcaactctcggtttgtggtcagccttgcctatgcgtacgagacaaaggacgctctctgtctggtactgactctgatgaacgggggtgacctcaaattccacatctaccatatggggcaggccggcttcccggaagctagagctgtgttctacgctgcagagatctgctgtggtctagaagatctgcaccgggaacgaattgtctaccgagatcttaagcctgaaaatattctgttggacgatcatgggcacataagaattagtgacttgggcctcgccgtgcacgtccctgaaggccagactatcaaaggcagagtgggaaccgtcgggtacatggctcctgaagtagtgaagaatgaacgatacacgttctcgccggactggtgggccctgggttgcttgctgtatgagatgatagctggacaatcacccttccagcagagaaagaagaaaatcaagcgcgaagaggttgagaggctagtgaaggaggtgccagaagaatacagcgagagattttcaccgcaggcaaggagcctgtgtagtcaactgctatgcaaagatccagcagaacgcctggggtgccgtggcggaagcgccagggaagtgaaagaacaccccttattcaagaagctcaacttcaaacggctaggggctggtatgctggaaccccctttcaaacctgatccacaggctatttactgcaaggatgtcctcgacatcgaacagttttcaactgtgaagggggtcgaattagaacccacggatcaggacttttaccaaaaattcgcaacagggtctgtacctattccctggcagaacgagatggtggagacggagtgtttccaggagctgaatgtgtttggcttggacggaagtgtaccgccggacctggactggaaaggccagcctccagctccgcccaagaagggactgttgcaaaggctctttagtcgacaggactgctgcggtaactgtagcgatagcgaggaggagctgccgacacggctgtag

SEQ ID NO: 20432 - DNA, 1731 bp, Artificial Sequence
  derived and/or modified sequence
atggaactggaaaacatagtcgccaatacagtcctgttaaaggcgagggaaggcggaggcggtaacagaaaggggaagtctaagaagtggcgacagatgcttcagttcccacatatttcccaatgtgaggagttacgactaagcttagagcgagactatcatagcctctgtgagcggcaacctatcggacgcttgctgtttagagaattctgcgcaacccggccagaactgtccaggtgtgtggcattcctcgatggcgtagctgaatacgaagtaacgcctgacgataaacgtaaagcctgcgggagacaactgacccagaactttctcagccacaccggaccagacctgatcccagaagtgcccagacagctggtgactaactgtacccagaggttggagcaggggccatgtaaagacctgttccaggaactcacccggcttacccacgaatatctctcggtagctccatttgccgattacttggattccatctacttcaaccggttcctccagtggaagtggctggaacggcaaccggtaacgaaaaacacattccgccagtaccgtgtactgggcaagggtggcttcggtgaggtatgtgcctgccaggtgcgcgctaccggaaagatgtacgcctgcaaaaagctcgaaaaaaaacgcatcaaaaaacggaagggcgaagcgatggccttgaatgagaaacagattctcgagaaagtgaattctaggtttgtcgtgagcctcgcatacgcttatgagactaaagacgccctgtgcctggtactgaccctcatgaacgggggagatttaaagtttcatatttaccacatgggccaggcgggttttcctgaggcccgagcagtgttctacgccgcagaaatctgctgcggcctggaagatctccatagagaacggatcgtatacagagatctgaagccagagaatattcttctggacgaccatggtcatattcgaattagcgatttaggtctggctgtgcacgtgccggaaggccagacgattaaaggtagagtgggcaccgtcgggtatatggcccctgaggttgtgaaaaacgaacggtacacattctctcccgattggtgggccttgggctgtctattatatgaaatgattgcaggtcagtctcccttccaacagcggaaaaagaaaatcaaaagagaggaagtggagcggctagtgaaggaagtgcctgaagagtattcagaaagattctccccccaggcacgttcactctgtagccagctgctttgcaaggatcctgccgaacggctgggttgtcgtggagggtccgccagagaggttaaagagcaccctctgttcaaaaagttgaatttcaaacggctaggcgcaggaatgctggagcctccattcaagccagacccccaagctatatactgcaaggacgtgctcgatatagaacagtttagtactgtaaaaggcgtagagctggagccaaccgatcaggacttttaccagaaattcgccaccggatctgtgcctatcccttggcagaatgaaatggttgaaaccgagtgctttcaggagctgaatgtgtttggcttagacggctctgttcctcctgacctggactggaaaggccaaccgccagcgcctccaaaaaagggcctcctgcagcgtctcttctccaggcaagattgttgcggcaattgcagtgacagcgaagaggaactgccaacgcgcttgtag

SEQ ID NO: 20433 - DNA, 1731 bp, Artificial Sequence
  derived and/or modified sequence
atggagctggagaacatcgtggccaacaccgtgctgctgaaggccagagagggcggcggcggcaacagaaagggcaagagcaagaagtggagacagatgctgcagttcccccacatcagccagtgcgaggagctgagactgagcctggagagagactaccacagcctgtgcgagagacagcccatcggcagactgctgttcagagagttctgcgccaccagacccgagctgagcagatgcgtggccttcctggacggcgtggccgagtacgaggtgacccccgacgacaagagaaaggcctgcggcagacagctgacccagaacttcctgagccacaccggccccgacctgatccccgaggtgcccagacagctggtgaccaactgcacccagagactggagcagggcccctgcaaggacctgttccaggagctgaccagactgacccacgagtacctgagcgtggcccccttcgccgactacctggacagcatctacttcaacagattcctgcagtggaagtggctggagagacagcccgtgaccaagaacaccttcagacagtacagagtgctgggcaagggcggcttcggcgaggtgtgcgcctgccaggtgagagccaccggcaagatgtacgcctgcaagaagctggagaagaagagaatcaagaagagaaagggcgaggccatggccctgaacgagaagcagatcctggagaaggtgaacagcagattcgtggtgagcctggcctacgcctacgagaccaaggacgccctgtgcctggtgctgaccctgatgaacggcggcgacctgaagttccacatctaccacatgggccaggccggcttccccgaggccagagccgtgttctacgccgccgagatctgctgcggcctggaggacctgcacagagagagaatcgtgtacagagacctgaagcccgagaacatcctgctggacgaccacggccacatcagaatcagcgacctgggcctggccgtgcacgtgcccgagggccagaccatcaagggcagagtgggcaccgtgggctacatggcccccgaggtggtgaagaacgagagatacaccttcagccccgactggtgggccctgggctgcctgctgtacgagatgatcgccggccagagccccttccagcagagaaagaagaagatcaagagagaggaggtggagagactggtgaaggaggtgcccgaggagtacagcgagagattcagcccccaggccagaagcctgtgcagccagctgctgtgcaaggaccccgccgagagactgggctgcagaggcggcagcgccagagaggtgaaggagcaccccctgttcaagaagctgaacttcaagagactgggcgccggcatgctggagccccccttcaagcccgacccccaggccatctactgcaaggacgtgctggacatcgagcagttcagcaccgtgaagggcgtggagctggagcccaccgaccaggacttctaccagaagttcgccaccggcagcgtgcccatcccctggcagaacgagatggtggagaccgagtgcttccaggagctgaacgtgttcggcctggacggcagcgtgccccccgacctggactggaagggccagccccccgccccccccaagaagggcctgctgcagagactgttcagcagacaggactgctgcggcaactgcagcgacagcgaggaggagctgcccaccagactgtag

SEQ ID NO: 20434 - protein, 312 aa, Artificial Sequence
  derived and/or modified sequence
MEKSNNSTLFILLGFSQNKNIEVLCFVLFLFCYIAIWMGNLLIMISITCTQLIHQPMYFFLNYLSLSDLCYTSTVTPKLMVDLLAERKTISYNNCMIQLFTTHFFGGIEIFILTGMAYDRYVAICKPLHYTIIMSRQKCNTIIIVCCTGGFIHSASQFLLTIFVPFCGPNEIDHYFCDVYPLLKLACSNIHMIGLLVIANSGLIALVTFVVLLLSYVFILYTIRAYSAERRSKALATCSSHVIVVVLFFAPALFIYIRPVTTFSEDKVFALFYTIIAPMFNPLIYTLRNTEMKNAMRKVWCCQILLKRNQLF

SEQ ID NO: 20435 - DNA, 939 bp, Artificial Sequence
  derived and/or modified sequence
atggagaagagcaacaacagcaccctgttcatcctgctgggcttcagccagaacaagaacatcgaggtgctgtgcttcgtgctgttcctgttctgctacatcgccatctggatgggcaacctgctgatcatgatcagcatcacctgcacccagctgatccaccagcccatgtacttcttcctgaactacctgagcctgagcgacctgtgctacaccagcaccgtgacccccaagctgatggtggacctgctggccgagagaaagaccatcagctacaacaactgcatgatccagctgttcaccacccacttcttcggcggcatcgagatcttcatcctgaccggcatggcctacgacagatacgtggccatctgcaagcccctgcactacaccatcatcatgagcagacagaagtgcaacaccatcatcatcgtgtgctgcaccggcggcttcatccacagcgccagccagttcctgctgaccatcttcgtgcccttctgcggccccaacgagatcgaccactacttctgcgacgtgtaccccctgctgaagctggcctgcagcaacatccacatgatcggcctgctggtgatcgccaacagcggcctgatcgccctggtgaccttcgtggtgctgctgctgagctacgtgttcatcctgtacaccatcagagcctacagcgccgagagaagaagcaaggccctggccacctgcagcagccacgtgatcgtggtggtgctgttcttcgcccccgccctgttcatctacatcagacccgtgaccaccttcagcgaggacaaggtgttcgccctgttctacaccatcatcgcccccatgttcaaccccctgatctacaccctgagaaacaccgagatgaagaacgccatgagaaaggtgtggtgctgccagatcctgctgaagagaaaccagctgttctag

SEQ ID NO: 20436 - DNA, 939 bp, Artificial Sequence
  derived and/or modified sequence
atggaaaagtctaacaacagtactcttttcattctcctgggtttttcccaaaacaaaaacattgaagtactttgcttcgtgcttttcctcttctgttacattgcaatttggatggggaacttgctcatcatgatttcaattacttgcacccagctcatccatcagcctatgtatttttttttgaattacctctccctgagcgatctgtgttacaccagcacagtgacacccaaattgatggtagatctgcttgccgaaaggaagaccatctcctataacaactgtatgatacagttatttacgacacattttttcggaggcatagagattttcatactgactggcatggcctatgatcgctatgtggctatttgtaaacctctgcattacactattattatgtcacggcagaaatgcaatacaatcatcatcgtgtgttgcactggtggattcatccattccgcgtcacaatttcttctcaccatcttcgttcctttctgcgggcccaacgagatcgaccattacttctgtgatgtgtaccctttgctgaagctggcgtgtagtaacatacacatgattggactcctggtgattgccaactcgggcctcatcgctctagtcaccttcgtcgttctcttgctcagctatgtttttatcttgtacacaattcgagcttatagtgccgagcgccgtagtaaggccctggccacttgttctagtcacgtaattgtggtcgtgctctttttcgctcccgccctctttatatacatacgaccagtcacaaccttctctgaggataaagtatttgccttattctacactatcatcgcaccaatgtttaacccccttatatacacactgaggaacactgaaatgaaaaatgctatgagaaaggtttggtgctgccaaattctgcttaaacggaatcaactgttttag

SEQ ID NO: 20437 - DNA, 939 bp, Artificial Sequence
  derived and/or modified sequence
atggagaagagcaacaacagcaccctcttcatcctgctgggcttcagccagaacaagaacatcgaggtgctgtgctttgtgctcttcctgttctgctacatcgccatctggatgggcaacctgctgatcatgatcagcatcacctgcacccagctgatccaccagcccatgtacttcttcctgaactacctgagcctgagtgacctgtgctacaccagcacagtgacccccaagctgatggtggacctgctggccgagaggaagaccatctcctacaacaactgcatgatccagctgttcaccacccacttctttggaggcatcgagatcttcatcctgaccggcatggcctatgacagatatgtggccatctgcaagcccctgcactacaccatcatcatgagccggcagaagtgcaacaccatcatcatcgtgtgctgcaccggcggcttcatccacagcgccagccagttcctgctgaccatctttgtgcccttctgtggccccaatgaaattgaccactacttctgtgatgtgtaccccctgctgaagctggcctgcagcaacatccacatgattggcctgctggtgattgccaacagcggcctcatcgccctggtgacctttgtggtgctgctgctgtcctatgtgttcatcctgtacaccatccgggcctacagcgctgagcggcgcagcaaggccctggccacctgcagcagccacgtgattgtggtggtgctcttctttgccccagccctcttcatctacatccggcctgtgaccaccttcagcgaggacaaggtgtttgccctcttctacaccatcatcgcccccatgttcaaccccctcatctacaccctgaggaacacagagatgaagaatgccatgaggaaggtgtggtgctgccagatcctgctgaagaggaaccagctgttctag

SEQ ID NO: 20438 - DNA, 939 bp, Artificial Sequence
  derived and/or modified sequence
atggagaagagcaacaacagcaccctgttcatcctgctgggcttcagccaaaacaaaaacatcgaggtgttgtgtttcgtgctgtttttattttgctatattgctatatggatgggaaacctgttaatcatgatctcaattacttgtacgcaactgatccatcaaccgatgtatttcttcctgaactatttatctctcagtgacctgtgctatacaagcaccgtgacccccaagcttatggtcgacctcctcgccgagcgtaaaaccatttcctacaataactgcatgattcagctatttacaactcacttttttggtggaattgaaatctttattctgacaggaatggcctatgatagatacgtggccatctgtaaacccttacattataccattattatgtcacgccaaaaatgtaacactattattattgtgtgttgcacggggggtttcatacattccgctagtcagttccttttgacaattttcgttccattctgtggtccaaatgagatcgaccactacttttgtgacgtttatccactcctgaaacttgcctgtagtaacatacacatgataggactgctcgtcattgcgaactccggcctcatagccctggttaccttcgtcgtactcttacttagctacgtgttcattttatatactattcgagcctacagcgctgaaagacgctccaaagcactggccacatgctcctctcacgtgatcgtcgtggttcttttcttcgcaccagccctgttcatttacatcagaccagttacaaccttctccgaagacaaggtattcgccttgttttacacaataatagcgccgatgttcaatccactgatatatacactccgaaataccgagatgaagaacgcaatgcgaaaggtctggtgctgccagatactgctgaagcggaaccagctcttctag

SEQ ID NO: 20439 - DNA, 939 bp, Artificial Sequence
  derived and/or modified sequence
atggaaaaaagcaataatagcactttgtttattctcttggggttttcccaaaataagaacattgaagtcctctgctttgtattatttttgttttgctacattgctatttggatgggaaacttactcataatgatttctatcacgtgcacccagctcattcaccaacccatgtatttcttcctcaattacctctcactctccgacctttgctacacatccacagtgacccccaaattaatggttgacttactggcagaaagaaagaccatttcctataataactgtatgatacaactctttaccacccatttttttggaggcatagagatcttcattctcacagggatggcctatgaccgctatgtggccatttgcaagcccctgcactacaccattattatgagcaggcaaaagtgtaacacaatcatcatagtttgttgtactgggggatttatacattctgccagtcagtttcttctcaccatctttgtaccattttgtggcccaaatgagatagatcactacttctgtgatgtgtatcctttgctgaaattggcctgttctaatatacacatgataggtctcttagtcattgctaattcaggcttaattgctttggtgacatttgttgtcttgttgttgtcttatgtttttatattgtataccatcagagcatactctgcagagagacgcagcaaagctcttgccacttgtagttctcatgtaattgttgtggtcctgttttttgcacctgcattgttcatttacattagaccggtcacaacattctcagaagataaagtgtttgcccttttttataccatcattgctcccatgttcaaccctctcatatacacgctgagaaacacagagatgaagaacgccatgaggaaagtgtggtgttgtcaaatactcctgaaaagaaatcaacttttctga

SEQ ID NO: 20440 - DNA, 939 bp, Artificial Sequence
  derived and/or modified sequence
atggagaagagtaataacagcacgctattcatccttctgggattctcacaaaataaaaatatcgaggtcttgtgtttcgtattgttccttttctgctacattgccatttggatgggcaatctgctcatcatgatttccattacttgtacccagttgatccaccagcctatgtacttctttctaaattacctgtctctctccgacctgtgttatacctccactgtgacccctaaactcatggtggatctattggccgaaagaaaaacgataagctataataattgcatgatccagttgttcactactcacttcttcggaggaatcgagattttcattctcactggaatggcctacgatcgctatgtagctatctgcaagcccctccactacactatcataatgtctaggcaaaagtgcaataccataattattgtttgctgtacaggcggtttcatacatagcgcgtcacagtttttgttgaccatttttgtgccgttttgtggtcctaatgaaatcgatcattatttctgcgatgtgtatcccttattgaaattagcctgctctaatatccatatgatcggtttgctggtgattgccaacagcgggctgatagccttggttacgttcgtggtgctcttattatcctatgtgttcatcctgtacaccatccgcgcttactcagctgaacgacgcagcaaagccctagccacatgttcctcccacgtgattgttgtcgtgcttttctttgcccctgccctgtttatctacattaggcctgtcaccaccttctccgaagacaaggtcttcgccctcttttacaccattatcgcccctatgttcaatcccttaatctacacgttgcgaaatactgagatgaaaaatgccatgaggaaggtgtggtgctgccagatattgctgaaacgcaaccagttattttag

SEQ ID NO: 20441 - protein, 212 aa, Artificial Sequence
  derived and/or modified sequence
MGPMWRMRGGATRRGSCCGGDGAADGRGPGRSGRARGGGSPSGGGGGVGWRGRADGARQQLEERFADLAASHLEAIRARDEWDRQNARLRQENARLRLENRRLKRENRSLFRQALRLPGEGGNGTPAEARRVPEEASTNRRARDSGREDEPGSPRALRARLEKLEAMYRRALLQLHLEQRGPRPSGDKEEQPLQEPDSGLRSRDSEPSGPWL

SEQ ID NO: 20442 - DNA, 639 bp, Artificial Sequence
  derived and/or modified sequence
atgggccccatgtggagaatgagaggcggcgccaccagaagaggcagctgctgcggcggcgacggcgccgccgacggcagaggccccggcagaagcggcagagccagaggcggcggcagccccagcggcggcggcggcggcgtgggctggagaggcagagccgacggcgccagacagcagctggaggagagattcgccgacctggccgccagccacctggaggccatcagagccagagacgagtgggacagacagaacgccagactgagacaggagaacgccagactgagactggagaacagaagactgaagagagagaacagaagcctgttcagacaggccctgagactgcccggcgagggcggcaacggcacccccgccgaggccagaagagtgcccgaggaggccagcaccaacagaagagccagagacagcggcagagaggacgagcccggcagccccagagccctgagagccagactggagaagctggaggccatgtacagaagagccctgctgcagctgcacctggagcagagaggccccagacccagcggcgacaaggaggagcagcccctgcaggagcccgacagcggcctgagaagcagagacagcgagcccagcggcccctggctgtag

SEQ ID NO: 20443 - DNA, 639 bp, Artificial Sequence
  derived and/or modified sequence
atgggcccgatgtggagaatgcgtggcggagcgacgaggcggggatcctgttgtggaggagacggagccgctgacggcagagggccaggacggtccggacgggccagggggggtggttcaccttctggaggcggcggaggggtcgggtggcgggggcgagccgatggagccagacagcaacttgaggaacgcttcgccgacctggcagcctctcacttggaagccatcagagcgagggacgagtgggatcggcagaacgccaggctacgccaagaaaatgctagactccggttagagaatcgcagacttaaacgcgagaacaggtctctgtttagacaggcacttcggctccctggagagggtggcaatggtactcccgccgaagcccggcgggtgcctgaggaagcatctaccaatcgccgggcccgcgatagtggccgggaggacgaaccggggtccccccgtgcactgcgcgctagactcgaaaagcttgaggccatgtatcgtcgagccctgctacagctgcacctggaacaacgcggaccacgccctagcggagacaaagaggaacagcctctgcaggaaccggactctggcctgcggtcccgcgattccgagccaagcgggccttggctctag

SEQ ID NO: 20444 - DNA, 639 bp, Artificial Sequence
  derived and/or modified sequence
atgggccccatgtggaggatgagaggaggagccacccggcggggcagctgctgcggaggagatggagctgctgatggccggggccctggccgcagcggccgggcccggggcggcggcagccccagcggcggcggcggcggcgtgggctggaggggccgggcagatggagcccggcagcagctggaggagagatttgctgacctggccgccagccacctggaggccatccgggccagagatgagtgggaccggcagaatgcccggctgcggcaggagaatgcccggctgcggctggagaacagaaggctgaagcgggagaacagaagcctcttccggcaggccctgcggctgcccggggagggcggcaatggcaccccagctgaggcccggcgggtgcctgaggaggccagcaccaacagaagagcccgggacagcggccgggaggatgagcccggcagcccccgggccctgcgggcccggctggagaagctggaggccatgtacagaagagccctgctgcagctgcacctggagcagaggggcccccggcccagcggggacaaggaggagcagcccctgcaggagccagacagcggcctgcggagccgggacagcgagcccagcggcccctggctgtag

SEQ ID NO: 20445 - DNA, 639 bp, Artificial Sequence
  derived and/or modified sequence
atgggccccatgtggcggatgcggggcggcgccacccggcggggcagttgttgtggtggtgacggagctgcggatggcagagggcccgggcgtagcgggagggcgagaggtggaggttccccgtctgggggaggaggcggcgttggttggagaggacgtgcagacggcgcccgccagcagttagaagaacggtttgccgacctggctgcctctcatctcgaagccattcgcgcacgtgatgagtgggacaggcagaatgcccgattgcgtcaggaaaacgcgcgactacggctagaaaatcgccggctgaaaagggagaaccgctctttgttccgccaagcactcagactacccggcgagggtggcaacggtaccccagctgaggcccggagggtcccggaggaggcgagtaccaaccgccgcgcacgcgattccggcagagaggatgaacctggctctcctcgagcgttgcgggcgaggttggaaaagcttgaagccatgtataggcgagccctgctgcagttgcacctggagcagcgagggccccggccttccggcgacaaagaagagcagcccctgcaggaaccagacagcggactgagatcacgggattccgagccttctggcccatggctgtag

SEQ ID NO: 20446 - DNA, 639 bp, Artificial Sequence
  derived and/or modified sequence
atgggaccaatgtggaggatgagaggaggagccactcggagagggtcttgttgcggaggcgatggggcagccgacggtcgcggacctggacggtcaggaagggccaggggcggaggtagccctagcggcggaggtgggggagtgggttggcggggtagggcagacggagccaggcagcagctagaagagcggttcgccgacctggctgccagccatctggaggctatccgcgctcgggatgaatgggataggcagaatgcaagactgcgacaggaaaatgccagactgcgcctcgagaatcgtaggttgaaacgcgagaatagatcactctttcgccaggcgctgcggcttcctggggaagggggaaatggcacccccgcagaggcacggagagtccccgaagaggcatcaaccaaccgtagagcgagagactcagggagggaggacgagccaggctcacctagagctctgcgagctcgactcgagaagctggaggcaatgtacagaagagcgctgcttcagctccatcttgagcagagaggacctcgcccttcaggcgacaaagaagagcagccactgcaggagcctgattcaggactcagaagcagagattctgaaccctcgggaccttggctttag

SEQ ID NO: 20447 - DNA, 2461 bp, Artificial Sequence
  derived and/or modified sequence
ttctgtttaatgttttattaaacataggggtgggttaaaccactgggttttaaatgaagcacttagagcttttcaacttgccccatagctttgtctcagaaccgatcattctattatcattagttttgagaatgccgtgtaaagagcaaagtaaccactggtggttgcactccggagcgggcgaggacggctagttcctgcagtgcccaggcctgcacggaagcgccctggcacaactcagctgaggatacacgctttttcccgcgcagccggagggctgaacagcaaagcactccccgggggaactgtgtgtcagcgcagcctggagagagcaggcccagggggcagctccaccacaggagacaggacacgcctcagtctgggcaaattcccggcctcctttggctctaagccagcagccgccgcccgcgacctcctctcctcctccgtcgtcaccccggccgccctgccagccccgaacttgcccgcgcctggccgcgcggcccctcagcccacggggctggcggcgcggttgggatgggaccgatgtggcgcatgcgtggtggcgccactaggcgcgggagttgctgcggcggggacggtgctgcggacggccgagggccaggccgctccggccgggctcgtggtgggggcagccccagcggcggcggcggcggcgtgggctggcgaggccgcgcggacggcgcccgacagcagctggaggagcggtttgccgacctggcggcgagccacttggaggccatccgtgcgcgggacgagtgggaccggcagaacgcgcggctgcgtcaggagaacgcccggctgcggctcgagaaccggcggctgaagcgcgagaaccgcagcctcttccgtcaggctttgcggctccccggcgaaggcggcaacgggacgcccgcggaggcacgccgggtccctgaagaggccagcacgaaccggagggctagagacagcggccgagaggacgagccgggcagccccagggccctgagggcccgacttgagaagctggaagccatgtaccgccgggccctgctgcagctgcacctcgagcagcggggaccacgtccgagcggggacaaggaggagcagcctctacaggaacccgactccggcctccgctcccgggactcggagccctctgggccctggctgtagccgaggccgcagccggtgagaggcggagcctcgagcgggcccctcctcctccgttcccagctacccccgacctcgcgcacgccctggcccgctccctgcccgcggataccttggactacggtgccttcccgcccccaccagtggacacttccgggtggcgcttggccatccgcttggtggaggtcgagtgggtgcaagggccctcaggacctcccacatgtacagttcccctgcctcttgccccggctagtttccctggagagaggcctagccaacaacgaagggacggattttaaaacagcgagaactgggtgccaagaaacacttcatattccctgaacttttctggatgttgtgcgaacctgttgtatttttttttttcctgtattttggttctgagggatgagtaatgtgtttttagttggttgagtttatccattcttcaatcccctaaagccttcagctattctttcatatgtggccaacattttaagtacagtgtttgcttttataagtcggtgttacttggatgtcctataaaatacccactttttataaagatgatatttataacctaggaactcatgcctgtcttggctgcagtccctgtacatctaatatatactgatttgtttgcccccagagaatttttaaggtatctgcctatatcgtgatcttttgaaatggtaaataaatctggtgcattaaaaattatctgaaaggttgcggcgagtattatttgaagtgtgttacatttttatatttttaaaaagatacctttatgaatatactaatttaaatctggttttagttgtccttagtaaactatcatgttcttttagcttcatgtaacagtgatcttttaaaataatctaaagattaggtagtctaaaagttattttaatctttaatgttcaattagcttaattagtacgtagataatttgccttattttgactaaggacttttaagaaattataaattacttgtatatcaaaagttcccctaacaaagtaatttaagtctcagttgttatttcaatggcacaaaaaagtgactagtttagcaataaatgtcctaaaattacttttattgcgcttcgttaataacacttttgccaactaagtaatgaagaggataccattgtgcctgataaaaaaatcataggtccaagagtgtttcaatgatggaaaacatttcaggggaaaaaatcatgaatagaattgtcaagggaataaaatatactagttatggcatagtccaaaagtattaaatattatatatt

SEQ ID NO: 20448 - protein, 492 aa, Artificial Sequence
  derived and/or modified sequence
MAAGERSWCLCKLLRFFYSLFFPGLIVCGTLCVCLVIVLWGIRLLLQRKKKLVSTSKNGKNQMVIAFFHPYCNAGGGGERVLWCALRALQKKYPEAVYVVYTGDVNVNGQQILEGAFRRFNIRLIHPVQFVFLRKRYLVEDSLYPHFTLLGQSLGSIFLGWEALMQCVPDVYIDSMGYAFTLPLFKYIGGCQVGSYVHYPTISTDMLSVVKNQNIGFNNAAFITRNPFLSKVKLIYYYLFAFIYGLVGSCSDVVMVNSSWTLNHILSLWKVGNCTNIVYPPCDVQTFLDIPLHEKKMTPGHLLVSVGQFRPEKNHPLQIRAFAKLLNKKMVESPPSLKLVLIGGCRNKDDELRVNQLRRLSEDLGVQEYVEFKINIPFDELKNYLSEATIGLHTMWNEHFGIGVVECMAAGTIILAHNSGGPKLDIVVPHEGDITGFLAESEEDYAETIAHILSMSAEKRLQIRKSARASVSRFSDQEFEVTFLSSVEKLFK

SEQ ID NO: 20449 - protein, 36 aa, Artificial Sequence
  derived and/or modified sequence
MAAGERSWCLCKLLRSCGVYGSWHNYPCTQFGGPKA

SEQ ID NO: 20450 - DNA, 1479 bp, Artificial Sequence
  derived and/or modified sequence
atggcggcaggagagcgatcttggtgtttatgtaagctgcttcgattcttctatagcctgtttttccccggactcatcgtgtgcgggaccttatgtgtctgcctggttatcgttctttgggggatccggctattgctccagagaaagaagaaactggtgtccacctcaaaaaatggaaaaaatcagatggtcattgccttcttccatccgtactgtaacgcaggcgggggaggggagagggtcttgtggtgtgctctgcgcgccctgcagaagaaatacccagaagctgtgtatgtggtgtacacaggcgatgttaacgtgaatggccagcaaatcctggaaggcgcttttcggcggttcaacattcgcctcattcatcctgtgcaattcgtcttcctgcgcaaacggtacctggtcgaggattcactgtatcctcattttaccctgctgggacagtcgttaggatctatcttcctcgggtgggaggcactgatgcagtgtgtccctgatgtgtacatcgacagcatgggctacgcattcaccctacccctttttaagtacattggcggatgccaggttgggagctacgtccactacccaacaattagtaccgacatgcttagtgtggttaagaatcaaaatatagggtttaacaacgctgcatttattacccgcaacccttttctcagcaaggtcaaactgatttactactacttgttcgccttcatctatggccttgtcggctcttgttccgacgtcgtcatggtgaactcttcttggactctgaatcacattttgtctctgtggaaggtggggaattgcacaaacatcgtgtacccgccttgcgacgtgcagacctttctggatataccactgcatgaaaagaagatgacccctggccacctactggtctcggtaggtcagttcagacctgagaagaaccacccactgcagatccgagccttcgctaaactgcttaataaaaagatggtcgagtctccccctagcctcaaactggtactgatcggcggctgccgcaacaaagatgacgagctgagggtgaaccagctcagacgcctgtccgaggacctgggtgttcaggaatatgttgaattcaagattaacattcccttcgatgaattaaagaactacctcagcgaagctacaatcggcctgcacacaatgtggaacgagcacttcggcattggcgtagtagaatgcatggccgccggaacgatcattctggctcataactccggcggacctaagttagacattgtagtccctcatgaaggcgacattacagggtttctcgcagagtccgaagaggactacgccgagactatcgctcatattctgtcaatgtcagcagagaagcgattgcaaattcggaaatctgcccgtgcatccgtgagtcggttcagcgaccaagagttcgaggtaaccttcctctcttctgtcgaaaagctattcaaatag

SEQ ID NO: 20451 - DNA, 111 bp, Artificial Sequence
  derived and/or modified sequence
atggctgccggggagcgtagttggtgtctgtgtaaattgctaaggagttgtggtgtgtatgggagttggcacaattatccttgcactcaattcggaggccccaaagcttag

SEQ ID NO: 20452 - DNA, 1479 bp, Artificial Sequence
  derived and/or modified sequence
atggctgctggggagaggtcctggtgcctgtgcaagctgctgcgcttcttctacagcctcttcttccctggcctcatcgtgtgtggcaccctgtgtgtgtgcctggtgattgtgctgtggggcatccggctgctgctgcagaggaagaagaagctggtgtccaccagcaagaatggcaagaaccagatggtgattgccttcttccacccctactgcaatgctgggggcggcggggagcgggtgctgtggtgtgccctgcgggccctgcagaagaagtacccagaggccgtgtatgtggtgtacacaggagatgtgaatgtgaatggccagcagatcctggagggcgccttccgccgcttcaacatccgcctcatccaccctgtgcagtttgtgttcctgaggaagcgctacctggtggaggacagcctgtacccccacttcaccctgctgggccagagcctgggcagcatcttcctgggctgggaggccctgatgcagtgtgtgcctgatgtgtacatcgacagcatgggctacgccttcaccctgcccctcttcaagtacatcggcggctgccaggtgggcagctatgtgcactaccccaccatcagcacagacatgctgtctgtggtgaagaaccagaacatcggcttcaacaatgctgccttcatcaccaggaaccccttcctgagcaaggtgaagctgatctactactacctgtttgccttcatctacggcctggtgggcagctgcagtgatgtggtgatggtgaacagctcctggaccctgaaccacatcctgagcctgtggaaggtgggcaactgcaccaacatcgtgtacccaccctgtgatgtgcagaccttcctggacatccccctgcacgagaagaagatgaccccaggccacctgctggtgtctgtgggccagttccggcctgagaagaaccaccccctgcagatccgggcctttgccaagctgctgaacaagaagatggtggagagcccccccagcctgaagctggtgctgattggaggctgcaggaacaaggatgatgagctgcgggtgaaccagctgcggcggctgtctgaggacctgggcgtgcaggagtatgtggagttcaagatcaacatcccctttgatgagctgaagaactacctgtctgaggccaccatcggcctgcacaccatgtggaatgagcacttcggcatcggcgtggtggagtgcatggccgccggcaccatcatcctggcccacaacagcggcggccccaagctggacatcgtggtgccccatgaaggagacatcaccggcttcctggccgagagtgaagaagattatgcagagaccatcgcccacatcctgtccatgtctgctgagaagaggctgcagatcaggaagagcgcccgggcctctgtgagccgcttcagtgaccaggagtttgaggtgaccttcctgagctctgtggagaagctgttcaagtag

SEQ ID NO: 20453 - DNA, 111 bp, Artificial Sequence
  derived and/or modified sequence
atggctgctggggagaggtcctggtgcctgtgcaagctgctgcggagctgtggggtgtatggctcctggcacaactacccctgcacccagtttggaggccccaaggcctag

SEQ ID NO: 20454 - DNA, 1479 bp, Artificial Sequence
  derived and/or modified sequence
atggccgccggcgagcggagctggtgcctgtgcaagctgctgcggttcttctactctctttttttcccagggttgattgtttgcggcactctttgcgtctgtctggtcattgtgttatggggaatccgactgctgcttcaacggaaaaagaaactggtttcaactagcaagaacggaaagaaccagatggtgatcgctttcttccacccatattgcaatgctggaggaggcggcgagcgcgtgctctggtgcgcacttagagcactacagaagaaataccccgaggctgtttatgttgtgtataccggggacgtgaatgtcaatggacagcaaatcctggagggcgcatttcggcggtttaacataagactgattcatcccgttcaattcgtgtttctacgtaagcgctatttggttgaagactccctctatccccacttcacactactgggccagtctcttggatccatattcctgggctgggaggccttaatgcagtgcgtacctgacgtgtacatcgactctatgggctatgctttcaccttgcccctcttcaaatatatcggtggatgccaggtgggaagctatgtacattaccctactatcagcactgacatgctttcagtcgttaaaaaccagaatatcgggtttaacaatgctgctttcatcaccagaaatcccttcctgagcaaggtcaagctgatctactattacttatttgcctttatatacggtctggtgggtagctgctccgacgttgtgatggttaacagctcctggacactgaatcacatactgtccctgtggaaggttggaaactgcacaaacatcgtgtatccgccttgcgacgtgcagacgtttctggatattccgctgcatgaaaagaaaatgacccctggacacctattagtgtccgtgggtcaatttcgccctgagaagaatcatcccctacagatacgagcttttgccaaacttctcaataagaaaatggtcgaatctcctcctagtttaaaactggtgctaattgggggatgcaggaataaggacgacgagctaagagtaaaccagctgcgacggttgagcgaagacttaggggtccaggagtatgttgagttcaagatcaatatccctttcgatgagctgaaaaattacctgagcgaggctacaatcggtctgcatacaatgtggaacgaacactttggaattggggtggttgagtgtatggccgccggaacaataatcttggcccacaattcaggggggcccaagttggatatagtagtgccccacgaaggggacataactggcttcctggcagaatctgaggaggactacgctgagacgatcgctcatatactgtctatgagtgcagaaaagcgcctgcagattcgtaagagcgcaagagcttccgtcagccggtttagtgatcaggagtttgaggttacctttctttcctctgtagagaagctgtttaaatag

SEQ ID NO: 20455 - DNA, 111 bp, Artificial Sequence
  derived and/or modified sequence
atggccgccggcgagcggagctggtgcctgtgcaagctgctgcggtcctgcggagtgtatggttcatggcataattatccatgtacccagtttggcggcccaaaagcctag

SEQ ID NO: 20456 - DNA, 1479 bp, Artificial Sequence
  derived and/or modified sequence
atggccgctggtgagaggtcatggtgcctgtgtaaactgctccgctttttctactcgctcttttttcctgggctgatcgtgtgcggcacattatgcgtttgtcttgtaattgtactgtgggggatccgcttactgctccagcgcaaaaaaaagttggtgtcaacttctaagaatggtaagaatcaaatggtgatcgctttcttccacccctactgcaacgccggtggtggaggcgagcgcgttctgtggtgtgccctgcgcgctttgcagaaaaagtaccctgaagctgtttacgttgtgtacaccggtgacgttaatgtgaatggccagcagattctggagggtgccttccgcaggtttaatattagactgatccatcctgtgcagtttgtattcctgagaaaacggtacctcgtcgaggactcactgtaccctcatttcactttgctcgggcagtctctgggttccatctttctcgggtgggaagccctgatgcaatgcgttcctgatgtatacatcgatagtatgggttatgccttcactctgcctctgtttaaatatattggaggctgtcaagtggggagttatgtccactatccgaccatatctacggatatgctgtccgtcgtgaagaaccagaacattggattcaacaacgccgcattcataacccggaacccattcctttccaaagtgaagcttatttattactacctgtttgcatttatatatggactcgtgggctcttgtagtgacgtcgtaatggtaaattcctcttggacacttaatcacatcttatccctatggaaggtcggaaattgtactaacatagtctatcctccctgtgatgtgcaaaccttcctggacatcccactgcatgaaaaaaaaatgacaccaggccaccttctagtatcggtaggccagttcagacccgaaaagaatcatcctcttcagattagggcgttcgccaagttgctgaacaagaagatggtggagagtcccccttccctgaagctcgttcttatcggagggtgccggaacaaagatgacgagctaagggttaatcaactgcggagactttctgaagatctgggggttcaagagtatgttgagttcaaaattaacatccctttcgacgagttgaagaattacctatcagaagccaccattgggttgcacacaatgtggaacgaacactttggtataggcgtggttgaatgcatggccgcagggacaatcatcctagctcataacagcggaggccctaaactcgatatcgtagttccccacgagggggatatcacgggcttcttggccgagagcgaggaggactatgctgagaccatcgcacacattctctccatgagcgcagaaaagcggctgcagattcgaaaaagcgcgagggccagcgtgtctaggttcagcgatcaggagtttgaggttacatttctgagttcggtggaaaagctgttcaagtag

SEQ ID NO: 20457 - DNA, 111 bp, Artificial Sequence
  derived and/or modified sequence
atggctgctggagaaaggtcttggtgtctatgcaaattactgcgcagctgcggagtttatgggagctggcacaattacccttgtactcagttcggaggccctaaagcttag

SEQ ID NO: 20458 - DNA, 2558 bp, Artificial Sequence
  derived and/or modified sequence
ggaagatggcggccggcgaaaggagctggtgcctgtgcaagttgttgaggtttttttattcattattcttccctgggctcattgtatgtggaactttatgtgtgtgtttggtcattgtcctttggggaatcagactgctgctacagagaaagaaaaaattagtgtcaactagcaaaaatgggaaaaatcaaatggtgattgcattttttcatccatactgcaatgctggtggaggaggagaaagagttttatggtgtgctttaagagccctgcagaaaaagtatcctgaagcagtttatgttgtttataccggcgatgttaatgtcaacggtcaacagatactagaaggtgctttcagaagatttaacatcagattaattcacccagtgcagtttgtttttttaaggaaacgctatcttgtggaagattcactgtatcctcacttcacactgctgggccaaagtctaggatccatttttcttggctgggaagctctaatgcagtgtgttcctgatgtttacattgattcaatgggatacgcttttacgcttcctctgtttaagtatatagggggttgccaagttggaagctatgttcattatcctactatcagcaccgacatgctctctgtagtgaagaatcaaaatattggatttaataatgcagccttcattaccaggaatccttttctcagcaaagtaaagctcatctactactatttatttgcttttatttatggacttgttggttcttgcagtgatgtagtcatggtcaattcttcttggacactaaaccatattctctcactatggaaagttgggaattgcactaacattgtttatccaccttgtgatgtgcagacatttctggacattcccttacatgagaaaaagatgaccccaggacatttgctggtttctgttggccagtttaggccggaaaagaatcatccattgcagatcagagcctttgctaaattgctgaataagaagatggttgagtcacctccttcgcttaaacttgtcctcattggaggttgtcgtaacaaagatgatgaacttagggtaaaccaactgagaaggctgtctgaggatttaggagttcaagaatatgtggaatttaaaataaacattccatttgatgaattaaagaattatttgtctgaagcaacaattggtctgcataccatgtggaacgagcattttgggattggagttgtggagtgtatggcagctggcacaattatccttgcacacaattcggggggcccaaagcttgacattgtggttcctcacgaaggagatataactggctttctggctgagagtgaagaagactatgctgaaactatcgctcacattctttccatgtctgcagaaaagagactccaaatcagaaaaagtgctcgtgcatctgtaagcagattctctgatcaggaatttgaagtgacattcctatcatctgtggaaaagttatttaagtaatgccatatctgtaaaattaaagatattttatataaactggttaaacaccttcatatgtaaatatttttctaaattcaatctcatttgtcaaatcattttactttagaaaacagacaaaatttccttttagaataaaaggaagtgttgaaaagaaaatggatgactagccttcggcttccattcttggtatacatgagagaggctggctgctgagatgaatgtgaaccaggttgcagagaatctggctttgagccaccaggaagaactagtggatttgccaaaaaactaccccttgagtgaaaatgaagatgagggggacagtgatggagagagaaagcatcaaaagcttctggaagcaatcatttcccttgatggaaagaataggcggaaattggctgagaggtctgaggctagtctgaaagtgtcagagttcagtgtcagttctgaaggatcaggagaaaagctgggccttgcagatctgcttgagcccgttaaaacttcatcttctttggccactgtaaaaaagcaactgaatagagtcaaatcaaagaaggtggtggagttacctcttaacaaagaaaaaattgaacagatccacagagaagtagcattcagtaaaacctcacaggtcctctccaaatgggaccctatcatcctgaagaaccagcaggcagagcagctggtttttcccctggggaaggagcagccagccattgctcccattgaacatgcgctcagtggctggaaggcaagaactcccctggagcaggaaatttttaacctcctccataagaacaagcagccagtgacagatcctttactgactcccatggaaaaggcctctctccaagccatgagcctggaagaggcaaagatgcaccgagcagagcttcagagggctcgggctctgcagtcctactatgaggccaaggctcgaaaagagaagaaaatcaaaagtaaaaagtatcacaaagtcgtgaagaaaggaaaggccaagaaagccttaaaagagtttgagcagctacagaaggttaatccaactgtggcactggaagaaatggaaaaaattgaaaa

SEQ ID NO: 20459 - DNA, 1479 bp, Artificial Sequence
  derived and/or modified sequence
atggccgccggcgagagaagctggtgcctgtgcaagctgctgagattcttctacagcctgttcttccccggcctgatcgtgtgcggcaccctgtgcgtgtgcctggtgatcgtgctgtggggcatcagactgctgctgcagagaaagaagaagctggtgagcaccagcaagaacggcaagaaccagatggtgatcgccttcttccacccctactgcaacgccggcggcggcggcgagagagtgctgtggtgcgccctgagagccctgcagaagaagtaccccgaggccgtgtacgtggtgtacaccggcgacgtgaacgtgaacggccagcagatcctggagggcgccttcagaagattcaacatcagactgatccaccccgtgcagttcgtgttcctgagaaagagatacctggtggaggacagcctgtacccccacttcaccctgctgggccagagcctgggcagcatcttcctgggctgggaggccctgatgcagtgcgtgcccgacgtgtacatcgacagcatgggctacgccttcaccctgcccctgttcaagtacatcggcggctgccaggtgggcagctacgtgcactaccccaccatcagcaccgacatgctgagcgtggtgaagaaccagaacatcggcttcaacaacgccgccttcatcaccagaaaccccttcctgagcaaggtgaagctgatctactactacctgttcgccttcatctacggcctggtgggcagctgcagcgacgtggtgatggtgaacagcagctggaccctgaaccacatcctgagcctgtggaaggtgggcaactgcaccaacatcgtgtaccccccctgcgacgtgcagaccttcctggacatccccctgcacgagaagaagatgacccccggccacctgctggtgagcgtgggccagttcagacccgagaagaaccaccccctgcagatcagagccttcgccaagctgctgaacaagaagatggtggagagcccccccagcctgaagctggtgctgatcggcggctgcagaaacaaggacgacgagctgagagtgaaccagctgagaagactgagcgaggacctgggcgtgcaggagtacgtggagttcaagatcaacatccccttcgacgagctgaagaactacctgagcgaggccaccatcggcctgcacaccatgtggaacgagcacttcggcatcggcgtggtggagtgcatggccgccggcaccatcatcctggcccacaacagcggcggccccaagctggacatcgtggtgccccacgagggcgacatcaccggcttcctggccgagagcgaggaggactacgccgagaccatcgcccacatcctgagcatgagcgccgagaagagactgcagatcagaaagagcgccagagccagcgtgagcagattcagcgaccaggagttcgaggtgaccttcctgagcagcgtggagaagctgttcaagtag

SEQ ID NO: 20460 - DNA, 111 bp, Artificial Sequence
  derived and/or modified sequence
atggccgccggcgagagaagctggtgcctgtgcaagctgctgagaagctgcggcgtgtacggcagctggcacaactacccctgcacccagttcggcggccccaaggcctag

SEQ ID NO: 20461 - protein, 604 aa, Artificial Sequence
  derived and/or modified sequence
MRRCNSGSGPPPSLLLLLLWLLAVPGANAAPRSALYSPSDPLTLLQADTVRGAVLGSRSAWAVEFFASWCGHCIAFAPTWKALAEDVKAWRPALYLAALDCAEETNSAVCRDFNIPGFPTVRFFKAFTKNGSGAVFPVAGADVQTLRERLIDALESHHDTWPPACPPLEPAKLEEIDGFFARNNEEYLALIFEKGGSYLGREVALDLSQHKGVAVRRVLNTEANVVRKFGVTDFPSCYLLFRNGSVSRVPVLMESRSFYTAYLQRLSGLTREAAQTTVAPTTANKIAPTVWKLADRSKIYMADLESALHYILRIEVGRFPVLEGQRLVALKKFVAVLAKYFPGRPLVQNFLHSVNEWLKRQKRNKIPYSFFKTALDDRKEGAVLAKKVNWIGCQGSEPHFRGFPCSLWVLFHFLTVQAARQNVDHSQEAAKAKEVLPAIRGYVHYFFGCRDCASHFEQMAAASMHRVGSPNAAVLWLWSSHNRVNARLAGAPSEDPQFPKVQWPPRELCSACHNERLDVPVWDVEATLNFLKAHFSPSNIILDFPAAGSAARRDVQNVAAAPELAMGALELESRNSTLDPGKPEMMKSPTNTTPHVPAEGPELI

SEQ ID NO: 20462 - DNA, 1815 bp, Artificial Sequence
  derived and/or modified sequence
atgcgcagatgcaactcaggctcagggcctcccccatccttgttgctgctgctgctgtggctgctggctgtgccgggagccaatgccgcaccccgtagtgctctttactcaccctccgaccccctcactctcctccaagccgatacagtgaggggggctgttctgggcagtagatcagcttgggccgtggaatttttcgcaagctggtgcggccactgcatagcattcgcacctacctggaaggcactggctgaggatgtgaaagcctggcgtcccgcattgtacttagccgcactggactgtgctgaagaaactaactctgcagtgtgcagggatttcaacattcccggattcccgactgtacggttctttaaggccttcacgaagaatggatctggggctgttttcccagtcgcgggagccgatgtccagaccctacgcgagagactcattgatgcactggagagtcaccacgatacctggccaccggcatgcccacctttggagcctgcaaagctggaagaaattgacggattttttgcgagaaacaacgaggaatatctggccttgatctttgaaaaaggcggtagctacttgggcagagaagtcgcgcttgatctgtcccagcacaagggagtggcggtaagacgcgtgcttaacaccgaggccaacgtggttaggaaattcggggtgactgactttccttcatgttatctcctttttaggaatggatctgtcagtcgggtaccagtcctcatggagagcaggagtttctatactgcctacctccagcggttgagtggtcttacaagggaggctgcacagaccaccgtggcacctaccacggctaacaagatcgccccaaccgtctggaagttagccgatagaagcaagatatatatggccgacctggagtcagcactgcactacatcctgagaatcgaggtgggccgattccccgtcctggagggccagcgactggttgcactcaagaagtttgtcgccgtccttgctaaatactttcctggacgacctctggtccaaaacttcctccactccgtcaacgaatggctcaaaagacagaaaagaaacaagatcccctattcctttttcaaaacggccttggacgatcgaaaggagggcgcagtgctcgccaagaaggtgaactggatcggatgtcagggctccgaacctcactttcgcggttttccatgttctctgtgggtcctgttccatttcctgacggtgcaggcagctcggcagaatgtggaccattctcaggaagccgcaaaagccaaggaagtgcttccagccattcggggatacgttcattatttctttggctgccgggactgtgcctcacattttgaacagatggctgctgcctccatgcatcgcgtggggtctccgaacgcagccgttctctggctgtggagcagccataaccgagtgaatgcaaggcttgccggtgctcccagcgaggatccgcaattcccaaaagtccaatggccccctagagagctctgtagcgcttgccacaatgaacggctggatgtgcctgtgtgggatgtggaagcgaccttgaactttctgaaggctcatttcagtccctctaacattatactggatttcccggcagcaggttcggccgctcggcgagacgtgcagaacgtagcggctgctcccgagcttgctatgggtgcgttggaactggagtccaggaactcaactctcgacccaggaaaaccagaaatgatgaaaagcccaacaaatacaacaccccatgtacccgcagagggcccagagttgatttag

SEQ ID NO: 20463 - DNA, 1815 bp, Artificial Sequence
  derived and/or modified sequence
atgcggcgttgcaattccgggagtgggcctcccccatccttgctcctgctactcttatggctgctggccgtaccaggcgccaacgcagcaccacgcagtgctttgtattcacctagcgacccccttaccctcctccaggccgacaccgttcgtggggccgtcctcggatccaggagtgcctgggccgttgagttctttgcaagctggtgcggccactgcatcgcgttcgcacctacgtggaaggcactggctgaagacgtgaaggcctggcgcccagctttatacctggcagctctagattgtgctgaggaaacaaactcggccgtatgccgagatttcaatatccctggtttccccaccgtacggttctttaaagcttttaccaagaatggatccggcgccgtcttcccagtcgcaggtgccgatgtgcagacattaagagagcgactgattgacgcattggagagccaccatgacacttggcctcccgcatgccccccactggaaccagcaaagctagaagagattgacgggtttttcgcacggaacaacgaggagtacctggcacttatttttgagaaaggcggaagctacctcggcagggaggtggccttagacttgtctcagcacaaaggagtggccgttcgacgggtactgaataccgaggccaacgtagtccgtaaatttggcgttacggatttcccttcatgctacctgctgttcaggaacgggtctgtttctagggtgccggttttgatggaatctcgctcattctacacggcctatctgcagaggctctccgggctgacaagagaagccgctcaaacaacagtggcccccacaacagccaataaaatagcacctacagtttggaaactggcagacagaagcaagatttacatggcagacctcgaatcggcacttcattatattctgaggatcgaggtggggcgattcccagtgttggaggggcagaggctagtggccctcaaaaaattcgtggccgtgcttgctaaatatttcccaggccgaccgctggtacaaaacttccttcactctgtgaatgaatggctgaagagacagaagcgcaataagatcccgtactctttctttaagactgccttggatgatagaaaggaaggcgcagtcttagccaagaaagtgaactggatcggctgtcaagggagtgagccacattttagagggtttccttgcagcctatgggtcctcttccacttccttactgttcaggccgcaaggcagaatgtcgaccatagccaggaggcagccaaagcaaaagaggtgctacctgccatccggggctatgtccactatttctttggttgtcgcgattgtgccagtcatttcgaacagatggcagccgcctcaatgcatcgcgtcggcagccctaatgccgccgttctttggctgtggtcaagtcacaatcgcgtgaacgcacgtcttgccggagcaccaagtgaagatccgcaatttcccaaggttcaatggccgcctcgcgagctgtgcagtgcttgccacaatgagaggttagatgttccggtttgggacgtcgaggcaacgttgaactttctgaaagcacacttcagcccttccaatattattctggactttccagccgcgggatccgccgcgagaagggacgtgcagaatgttgccgcagcccctgagctggccatgggtgccttggaactggaaagcaggaactctacattggatcctggcaaacccgaaatgatgaagagcccaactaatactactccacacgtacccgctgaaggacctgaactgatttag

SEQ ID NO: 20464 - DNA, 1815 bp, Artificial Sequence
  derived and/or modified sequence
atgagaagatgtaattcagggtcaggtccacctcctagcttacttctcttgctgctgtggctcctcgccgtgcccggcgccaatgctgcgccgcggtctgccctgtactctccctcagatccgttaacccttctgcaagctgacacggtccggggagctgttttgggatctcgcagcgcctgggctgtggagttttttgcatcctggtgtggacactgcattgcattcgcccctacatggaaagcactagctgaggacgtcaaagcctggcgtcccgcgttataccttgctgcactggattgtgcggaggaaacaaattcagcagtgtgtagagacttcaatatccccgggtttccaacggtacggttcttcaaagctttcaccaagaatggcagtggcgcggtcttccctgttgcgggcgcggatgtccagaccctgcgggagcgccttatagacgcactcgaatcccatcatgatacttggccacctgcctgtcctccgcttgaaccagctaaactggaggaaattgatgggttttttgccaggaataatgaagagtaccttgcacttatttttgagaagggcgggtcttatctcggccgcgaggtagctcttgaccttagccaacacaagggtgtggctgtcagaagggtgctaaatactgaggctaacgtggtcagaaaatttggagttactgatttcccaagttgctacttattatttcggaacggcagcgtgtcccgtgtcccagttcttatggagtcgagatctttctatacagcgtatctccagcgattatccgggttgacccgcgaggccgcgcagacaactgtggccccgacaactgcaaacaaaatcgctcctaccgtttggaagctggcagacaggtcaaaaatttacatggcggatctcgaaagcgctctgcactatatcctgagaattgaagtgggacgttttccagtactggagggtcagcgcttggtggctttaaagaagttcgtggcggtcctagcgaaatacttccctggaaggcctttggtacagaatttcttacacagcgtgaacgaatggttaaaacgacagaaacgcaataagataccatattctttttttaaaacagccctagacgatcggaaggaaggagctgtcctagcaaagaaggttaattggattgggtgtcaggggagtgaaccacacttccgaggatttccctgttccttatgggtgctctttcactttttgaccgtccaggccgcccgacagaacgtcgaccacagtcaagaggctgccaaggctaaggaagtactgccagctatcagagggtacgtccattatttttttggatgcagagactgcgcaagtcatttcgaacagatggccgccgcctccatgcaccgcgtaggatctccaaatgccgccgtcctctggctttggagtagccataaccgcgtgaacgctagacttgcgggcgcccccagcgaagatccccaattccccaaggttcagtggcctccacgcgagctgtgctctgcctgccataatgaaagattagacgtgcccgtctgggatgtggaagcgactctgaatttcctgaaagcccacttctctccgtccaacattatcctcgatttccccgccgccggctcagccgcccgccgcgatgtgcagaatgtggctgccgcaccagagctagctatgggagcactggaactcgagagcagaaattccaccctggatcccgggaagcccgaaatgatgaaatctcctacaaatacaactcctcacgtccccgcggaaggtccggaactcatctag

SEQ ID NO: 20465 - DNA, 1815 bp, Artificial Sequence
  derived and/or modified sequence
atgagaagatgcaacagcggcagcggccccccccccagcctgctgctgctgctgctgtggctgctggccgtgcccggcgccaacgccgcccccagaagcgccctgtacagccccagcgaccccctgaccctgctgcaggccgacaccgtgagaggcgccgtgctgggcagcagaagcgcctgggccgtggagttcttcgccagctggtgcggccactgcatcgccttcgcccccacctggaaggccctggccgaggacgtgaaggcctggagacccgccctgtacctggccgccctggactgcgccgaggagaccaacagcgccgtgtgcagagacttcaacatccccggcttccccaccgtgagattcttcaaggccttcaccaagaacggcagcggcgccgtgttccccgtggccggcgccgacgtgcagaccctgagagagagactgatcgacgccctggagagccaccacgacacctggccccccgcctgcccccccctggagcccgccaagctggaggagatcgacggcttcttcgccagaaacaacgaggagtacctggccctgatcttcgagaagggcggcagctacctgggcagagaggtggccctggacctgagccagcacaagggcgtggccgtgagaagagtgctgaacaccgaggccaacgtggtgagaaagttcggcgtgaccgacttccccagctgctacctgctgttcagaaacggcagcgtgagcagagtgcccgtgctgatggagagcagaagcttctacaccgcctacctgcagagactgagcggcctgaccagagaggccgcccagaccaccgtggcccccaccaccgccaacaagatcgcccccaccgtgtggaagctggccgacagaagcaagatctacatggccgacctggagagcgccctgcactacatcctgagaatcgaggtgggcagattccccgtgctggagggccagagactggtggccctgaagaagttcgtggccgtgctggccaagtacttccccggcagacccctggtgcagaacttcctgcacagcgtgaacgagtggctgaagagacagaagagaaacaagatcccctacagcttcttcaagaccgccctggacgacagaaaggagggcgccgtgctggccaagaaggtgaactggatcggctgccagggcagcgagccccacttcagaggcttcccctgcagcctgtgggtgctgttccacttcctgaccgtgcaggccgccagacagaacgtggaccacagccaggaggccgccaaggccaaggaggtgctgcccgccatcagaggctacgtgcactacttcttcggctgcagagactgcgccagccacttcgagcagatggccgccgccagcatgcacagagtgggcagccccaacgccgccgtgctgtggctgtggagcagccacaacagagtgaacgccagactggccggcgcccccagcgaggacccccagttccccaaggtgcagtggccccccagagagctgtgcagcgcctgccacaacgagagactggacgtgcccgtgtgggacgtggaggccaccctgaacttcctgaaggcccacttcagccccagcaacatcatcctggacttccccgccgccggcagcgccgccagaagagacgtgcagaacgtggccgccgcccccgagctggccatgggcgccctggagctggagagcagaaacagcaccctggaccccggcaagcccgagatgatgaagagccccaccaacaccaccccccacgtgcccgccgagggccccgagctgatctag

SEQ ID NO: 20466 - DNA, 1815 bp, Artificial Sequence
  derived and/or modified sequence
atgcggcggtgcaattctgggagtggccctcctccatcgttgctgctgctgctgctctggctcctcgccgtgcccggggccaatgctgcgccgagatcggccctgtacagcccgtccgatccactgacccttctgcaggctgacacggtgcggggcgctgtcctgggaagccggtcagcttgggccgttgaattttttgcctcctggtgcggtcattgtatcgccttcgcacctacgtggaaggccctagcagaggacgtcaaagcttggaggccggccctttaccttgcagcactcgactgcgcagaggaaacaaattccgcggtttgccgtgactttaatatccctgggttccccacagtcagattctttaaggctttcactaagaacggatcaggggccgtgtttcctgtagctggagccgacgtccagacactgagggagcgcctgattgacgccctcgaaagccaccatgacacctggccgcccgcgtgtccccccctggagcccgccaaactggaggagatcgacgggtttttcgcccgaaataatgaggaataccttgctctcattttcgaaaagggcggctcttacctcggacgtgaagtcgccttggacttgtcacaacataagggagtggccgtccgtcgagttctgaacaccgaagccaatgtcgtacgaaaattcggcgtcaccgactttcccagttgctacctgctgttccggaacgggtccgtgtcacgggtcccggtgctgatggagagtaggagtttctatacagcctacctgcagcgcctgtccggcctaacgcgagaagcagcccaaactacggtagctcccaccacagccaataagatagcaccgacagtgtggaaattggctgaccgctcaaaaatatacatggcagaccttgagagcgccctgcattacattctgaggatcgaggtcgggagatttcctgttttagaaggccagcgattggtggccctcaagaagttcgtagctgtcctggccaaatacttccccgggaggccgctagttcagaatttcctccattcggtcaacgagtggctaaagcggcagaagaggaacaaaataccgtacagtttttttaagaccgcacttgatgataggaaggagggtgcggtgttagccaaaaaagtcaattggattggttgtcaagggtcagaaccgcacttccggggattcccatgctcactgtgggtgcttttccactttttgaccgtacaggctgcccgtcagaatgtggaccactctcaggaggctgccaaagcaaaagaagtgcttccagccattcggggctacgtgcactacttttttggttgcagagattgcgcctcccacttcgagcagatggctgcggcttcaatgcatagggtagggagtcccaatgctgccgtgctctggctttggagtagtcacaaccgcgtgaatgcaagactggccggtgcccccagtgaggacccccagtttcctaaggtgcaatggccgccccgggagttatgttcggcttgtcataatgaaagacttgacgtgcctgtgtgggatgtggaagctactctcaactttctcaaggcgcactttagtccgtcaaatataatcctagactttccagctgctggctccgcagcgcggagggacgtccagaatgtggccgcagcgcccgaactggctatgggcgccctagaattggagagccgcaacagcacactggatcctggaaagcccgaaatgatgaaatctcccaccaacactactccccacgttcctgccgaggggcccgaactgatttag

SEQ ID NO: 20467 - DNA, 2519 bp, Artificial Sequence
  derived and/or modified sequence
cagcgccgaggatgaggaggtgcaacagcggctccgggccgccgccgtcgctgctgctgctgctgctgtggctgctcgcggttcccggcgctaacgcggccccgcggtcggcgctctattcgccttccgacccgctgacgctgctgcaggcggacacggtgcgcggcgcggtgctgggctcccgcagcgcctgggccgtggagttcttcgcctcctggtgcggccactgcatcgccttcgccccgacgtggaaggcgctggccgaagacgtcaaagcctggaggccggccctgtatctcgccgccctggactgtgctgaggagaccaacagtgcagtctgcagagacttcaacatccctggcttcccgactgtgaggttcttcaaggcctttaccaagaacggctcgggagcagtatttccagtggctggtgctgacgtgcagacactgcgggagaggctcattgacgccctggagtcccatcatgacacgtggcccccagcctgtcccccactggagcctgccaagctggaggagattgatggattctttgcgagaaataacgaagagtacctggctctgatctttgaaaagggaggctcctacctgggtagagaggtggctctggacctgtcccagcacaaaggcgtggcggtgcgcagggtgctgaacacagaggccaatgtggtgagaaagtttggtgtcaccgacttcccctcttgctacctgctgttccggaatggctctgtctcccgagtccccgtgctcatggaatccaggtccttctataccgcttacctgcagagactctctgggctcaccagggaggctgcccagaccacagttgcaccaaccactgctaacaagatagctcccactgtttggaaattggcagatcgctccaagatctacatggctgacctggaatctgcactgcactacatcctgcggatagaagtgggcaggttcccggtcctggaagggcagcgcctggtggccctgaaaaagtttgtggcagtgctggccaagtatttccctggccggcccttagtccagaacttcctgcactccgtgaatgaatggctcaagaggcagaagagaaataaaattccctacagtttctttaaaactgccctggacgacaggaaagagggtgccgttcttgccaagaaggtgaactggattggctgccaggggagtgagccgcatttccggggctttccctgctccctgtgggtcctcttccacttcttgactgtgcaggcagctcggcaaaatgtagaccactcacaggaagcagccaaggccaaggaggtcctcccagccatccgaggctacgtgcactacttcttcggctgccgagactgcgctagccacttcgagcagatggctgctgcctccatgcaccgggtggggagtcccaacgccgctgtcctctggctctggtctagccacaacagggtcaatgctcgccttgcaggtgcccccagcgaggacccccagttccccaaggtgcagtggccaccccgtgaactttgttctgcctgccacaatgaacgcctggatgtgcccgtgtgggacgtggaagccaccctcaacttcctcaaggcccacttctccccaagcaacatcatcctggacttccctgcagctgggtcagctgcccggagggatgtgcagaatgtggcagccgccccagagctggcgatgggagccctggagctggaaagccggaattcaactctggaccctgggaagcctgagatgatgaagtcccccacaaacaccaccccacatgtgccggctgagggacctgagcttatttgaagtcctgcctcattctcactggagcctcagtctctcctgcttggtcttggccctcaactggggcaagtgaagccagaggagggtcccccagctgggtgggctggaatggaactcctcactagctgctggggctccgcccaccctgctcccttccggacaatgaagaagcctttgcaccctgggaggaaggaccaccccgggccctctatgcctggccagcctccagctcctcagacctcctgggtggggtttggcttcagggtggggtttggaagcttctggaagtcgtgctggtctcccaggtgaggcaagccatggttgctgggctgtagggtgagtggcttgcttggtgggacctgacgagttggtggcatgggaaggatgtgggtctctagtgccttgccctggcttagctgcaggagaagatggctgctttcacttccccccattgagctctgctccctctgagcctggtcttttgtccttttttattttggtctccaagatgaatgctcatctttggagggtgccaggtagaagctagggaggggagtgtcttctctctccaggtttcaccttccagtgtgcagaagttagaagggtctggcgggggcagtgccttacacatgcttgattcccacgctaccccctgccttgggaggtgtgtggaataaattatttttgttaaggcaa

SEQ ID NO: 20468 - DNA, 1815 bp, Artificial Sequence
  derived and/or modified sequence
atgaggcgctgcaacagcggcagcggccccccacccagcctgctgctgctgctgctgtggctgctggccgtgcctggggccaatgctgcccccaggtctgccctgtacagccccagcgaccccctgaccctgctgcaggccgacacagtgagaggagctgtgctgggcagccgcagcgcctgggccgtggagttctttgcctcctggtgtggccactgcatcgcctttgcccccacctggaaggccctggctgaagatgtgaaggcctggaggcctgccctgtacctggccgccctggactgtgccgaggagaccaacagcgctgtgtgccgggacttcaacatccctggcttccccaccgtgcgcttcttcaaggccttcaccaagaatggcagcggggctgtgtttcctgtggccggggctgatgtgcagaccctgcgggagcggctgattgatgccctggagagccaccacgacacctggcccccagcctgcccccccctggagcccgccaagctggaggagattgatggcttctttgccaggaacaatgaggagtacctggccctgatctttgagaagggcggcagctacctgggccgggaggtggccctggacctgagccagcacaagggcgtggccgtgcggcgggtgctgaacacagaggccaacgtggtgaggaagtttggagtgacagacttccccagctgctacctgctcttcagaaatggatctgtgtcccgggtgcctgtgctgatggagagccgctccttctacacagcctacctgcagaggctgagcggcctgacccgggaggccgcccagaccaccgtggcccccaccacagccaacaagatcgcccccaccgtgtggaagctggccgacaggagcaagatctacatggctgacctggagagcgccctgcactacatcctgcgcatcgaggtgggccgcttccctgtgctggagggccagaggctggtggccctgaagaagtttgtggccgtgctggccaagtacttccctggccggcccctggtgcagaacttcctgcacagcgtgaatgagtggctgaagaggcagaagaggaacaagatcccctacagcttcttcaagacagccctggatgacaggaaggagggcgctgtgctggccaagaaggtgaactggattggctgccagggcagcgagccccacttccggggcttcccctgcagcctgtgggtgctcttccacttcctgactgtgcaggccgcccggcagaatgtggaccacagccaggaggccgccaaggccaaggaggtgctgcctgccatccggggctacgtgcactacttcttcggctgccgggactgtgccagccactttgagcagatggctgctgcctccatgcaccgggtgggcagccccaatgctgctgtgctgtggctgtggagcagccacaacagagtgaatgcccggctggccggggcccccagcgaggacccccagttccccaaggtgcagtggccaccccgggagctgtgcagcgcctgccacaatgaaaggctggatgtgcctgtgtgggatgtggaggccaccctgaacttcctgaaggcccacttcagccccagcaacatcatcctggacttccctgctgctggcagcgctgccaggagagatgtgcagaatgtggccgccgcccctgagctggccatgggcgccctggagctggagagcaggaacagcaccctggaccccgggaagccagagatgatgaagagccccaccaacaccacccctcatgtgcctgctgagggccctgagctgatctag

SEQ ID NO: 20469 - DNA, 1815 bp, Artificial Sequence
  derived and/or modified sequence
atgcggcggtgcaacagcggcagcggccccccccccagcctgctgttgttactgctttggctcctggccgtgcccggcgccaatgcggctcctaggtccgccctgtactccccatctgatccgttgactctcctccaggcggacaccgttaggggtgctgttttggggagtagatctgcttgggcagtggaattcttcgcctcttggtgtggacactgtatagcattcgctcccacctggaaagcacttgcggaggacgtaaaagcctggagaccagcactctatcttgctgccctcgattgtgcagaggagacaaacagtgcggtttgtcgagatttcaacatacctggctttcccaccgtgcggttttttaaagcctttacaaagaacggctccggggctgtttttccggtggcaggggccgacgtccaaacactccgagaaaggcttatcgatgctctcgaaagccaccatgacacctggcctcctgcatgtcccccgctcgagcctgccaagctcgaagagattgacgggttctttgcccgaaataatgaggagtacctagccctaatttttgaaaaagggggatcatacctgggcagggaggtcgccctggatctctctcagcataagggagtcgcagtacgccgcgtgctgaacacagaggccaatgttgtgaggaagttcggagttactgacttccccagctgctacctgttgtttcgcaacggcagcgtttcaagagtgcccgtactgatggaatcccgctctttctatacggcttatctgcagaggctgtccggactcacccgggaggccgcccagactaccgttgctcccactactgccaataagatagcccctaccgtatggaaactggcagatagatccaagatctatatggctgatctggagagtgcgcttcactacatccttcgcattgaagtgggtagatttccggtgctggaggggcaacggctagttgcattaaagaagttcgtcgctgtgcttgccaagtatttccctgggcgccctcttgtgcaaaactttttgcactccgtgaacgagtggctgaaacgtcagaagaggaataagatcccgtattcatttttcaaaaccgctctcgacgatcgcaaggagggtgctgtgctcgcgaagaaagtgaattggataggatgtcagggctctgagcctcattttagagggttcccatgcagcctctgggtcctcttccatttcctgaccgtgcaggcggcccggcagaatgtggatcactcgcaggaagccgccaaagcgaaagaggtcctgcctgctatccgcggttacgtgcattactttttcggatgtagggactgcgcatcacatttcgaacaaatggcagcggctagtatgcatagggtcgggtcgcctaacgcagcggtgctgtggctctggtccagccacaacagggtcaacgctaggcttgccggagctccttctgaagaccctcaatttccgaaagtccaatggccgcccagagaactctgttctgcctgtcataacgagagactggacgttccagtctgggacgtcgaagcgaccctcaatttcctcaaggctcacttctctccttcaaacataatactggatttcccagccgcaggctcagccgcgagacgggatgtgcagaacgtcgcggcagctccggaacttgcaatgggggccttggagctggagagcaggaattctaccctcgaccccgggaagcctgagatgatgaagagcccaaccaacacaacccctcatgtgcccgctgaaggcccggagttgatctag

SEQ ID NO: 20470 - RNA, 1815 nt, Artificial Sequence
  derived and/or modified sequence
augcggcguugcaauuccgggagugggccucccccauccuugcuccugcuacucuuauggcugcuggccguaccaggcgccaacgcagcaccacgcagugcuuuguauucaccuagcgacccccuuacccuccuccaggccgacaccguucguggggccguccucggauccaggagugccugggccguugaguucuuugcaagcuggugcggccacugcaucgcguucgcaccuacguggaaggcacuggcugaagacgugaaggccuggcgcccagcuuuauaccuggcagcucuagauugugcugaggaaacaaacucggccguaugccgagauuucaauaucccugguuuccccaccguacgguucuuuaaagcuuuuaccaagaauggauccggcgccgucuucccagucgcaggugccgaugugcagacauuaagagagcgacugauugacgcauuggagagccaccaugacacuuggccucccgcaugccccccacuggaaccagcaaagcuagaagagauugacggguuuuucgcacggaacaacgaggaguaccuggcacuuauuuuugagaaaggcggaagcuaccucggcagggagguggccuuagacuugucucagcacaaaggaguggccguucgacggguacugaauaccgaggccaacguaguccguaaauuuggcguuacggauuucccuucaugcuaccugcuguucaggaacgggucuguuucuagggugccgguuuugauggaaucucgcucauucuacacggccuaucugcagaggcucuccgggcugacaagagaagccgcucaaacaacaguggcccccacaacagccaauaaaauagcaccuacaguuuggaaacuggcagacagaagcaagauuuacauggcagaccucgaaucggcacuucauuauauucugaggaucgagguggggcgauucccaguguuggaggggcagaggcuaguggcccucaaaaaauucguggccgugcuugcuaaauauuucccaggccgaccgcugguacaaaacuuccuucacucugugaaugaauggcugaagagacagaagcgcaauaagaucccguacucuuucuuuaagacugccuuggaugauagaaaggaaggcgcagucuuagccaagaaagugaacuggaucggcugucaagggagugagccacauuuuagaggguuuccuugcagccuauggguccucuuccacuuccuuacuguucaggccgcaaggcagaaugucgaccauagccaggaggcagccaaagcaaaagaggugcuaccugccauccggggcuauguccacuauuucuuugguugucgcgauugugccagucauuucgaacagauggcagccgccucaaugcaucgcgucggcagcccuaaugccgccguucuuuggcuguggucaagucacaaucgcgugaacgcacgucuugccggagcaccaagugaagauccgcaauuucccaagguucaauggccgccucgcgagcugugcagugcuugccacaaugagagguuagauguuccgguuugggacgucgaggcaacguugaacuuucugaaagcacacuucagcccuuccaauauuauucuggacuuuccagccgcgggauccgccgcgagaagggacgugcagaauguugccgcagccccugagcuggccaugggugccuuggaacuggaaagcaggaacucuacauuggauccuggcaaacccgaaaugaugaagagcccaacuaauacuacuccacacguacccgcugaaggaccugaacugauuuag

SEQ ID NO: 20471 - RNA, 1815 nt, Artificial Sequence
  derived and/or modified sequence
augagaagauguaauucagggucagguccaccuccuagcuuacuucucuugcugcuguggcuccucgccgugcccggcgccaaugcugcgccgcggucugcccuguacucucccucagauccguuaacccuucugcaagcugacacgguccggggagcuguuuugggaucucgcagcgccugggcuguggaguuuuuugcauccugguguggacacugcauugcauucgccccuacauggaaagcacuagcugaggacgucaaagccuggcgucccgcguuauaccuugcugcacuggauugugcggaggaaacaaauucagcaguguguagagacuucaauauccccggguuuccaacgguacgguucuucaaagcuuucaccaagaauggcaguggcgcggucuucccuguugcgggcgcggauguccagacccugcgggagcgccuuauagacgcacucgaaucccaucaugauacuuggccaccugccuguccuccgcuugaaccagcuaaacuggaggaaauugauggguuuuuugccaggaauaaugaagaguaccuugcacuuauuuuugagaagggcgggucuuaucucggccgcgagguagcucuugaccuuagccaacacaaggguguggcugucagaagggugcuaaauacugaggcuaacguggucagaaaauuuggaguuacugauuucccaaguugcuacuuauuauuucggaacggcagcgugucccgugucccaguucuuauggagucgagaucuuucuauacagcguaucuccagcgauuauccggguugacccgcgaggccgcgcagacaacuguggccccgacaacugcaaacaaaaucgcuccuaccguuuggaagcuggcagacaggucaaaaauuuacauggcggaucucgaaagcgcucugcacuauauccugagaauugaagugggacguuuuccaguacuggagggucagcgcuugguggcuuuaaagaaguucguggcgguccuagcgaaauacuucccuggaaggccuuugguacagaauuucuuacacagcgugaacgaaugguuaaaacgacagaaacgcaauaagauaccauauucuuuuuuuaaaacagcccuagacgaucggaaggaaggagcuguccuagcaaagaagguuaauuggauugggugucaggggagugaaccacacuuccgaggauuucccuguuccuuaugggugcucuuucacuuuuugaccguccaggccgcccgacagaacgucgaccacagucaagaggcugccaaggcuaaggaaguacugccagcuaucagaggguacguccauuauuuuuuuggaugcagagacugcgcaagucauuucgaacagauggccgccgccuccaugcaccgcguaggaucuccaaaugccgccguccucuggcuuuggaguagccauaaccgcgugaacgcuagacuugcgggcgcccccagcgaagauccccaauuccccaagguucaguggccuccacgcgagcugugcucugccugccauaaugaaagauuagacgugcccgucugggauguggaagcgacucugaauuuccugaaagcccacuucucuccguccaacauuauccucgauuuccccgccgccggcucagccgcccgccgcgaugugcagaauguggcugccgcaccagagcuagcuaugggagcacuggaacucgagagcagaaauuccacccuggaucccgggaagcccgaaaugaugaaaucuccuacaaauacaacuccucacguccccgcggaagguccggaacucaucuag

SEQ ID NO: 20472 - DNA, 975 bp, Artificial Sequence
  derived and/or modified sequence
atgggcatggagggcctgctgcagaacagcaccaacttcgtgctgaccggcctgatcacccaccccgccttccccggcctgctgttcgccatcgtgttcagcatcttcgtggtggccatcaccgccaacctggtgatgatcctgctgatccacatggacagcagactgcacacccccatgtacttcctgctgagccagctgagcatcatggacaccatctacatctgcatcaccgtgcccaagatgctgcaggacctgctgagcaaggacaagaccatcagcttcctgggctgcgccgtgcagatcttcctgtacctgaccctgatcggcggcgagttcttcctgctgggcctgatggcctacgacagatacgtggccgtgtgcaaccccctgagataccccctgctgatgaacagaagagtgtgcctgttcatggtggtgggcagctgggtgggcggcagcctggacggcttcatgctgacccccgtgaccatgagcttccccttctgcagaagcagagagatcaaccacttcttctgcgagatccccgccgtgctgaagctgagctgcaccgacaccagcctgtacgagaccctgatgtacgcctgctgcgtgctgatgctgctgatccccctgagcgtgatcagcgtgagctacacccacatcctgctgaccgtgcacagaatgaacagcgccgagggcagaagaaaggccttcgccacctgcagcagccacatcatggtggtgagcgtgttctacggcgccgccttctacaccaacgtgctgccccacagctaccacacccccgagaaggacaaggtggtgagcgccttctacaccatcctgacccccatgctgaaccccctgatctacagcctgagaaacaaggacgtggccgccgccctgagaaaggtgctgggcagatgcggcagcagccagagcatcagagtggccaccgtgatcagaaagggctag

SEQ ID NO: 20473 - DNA, 975 bp, Artificial Sequence
  derived and/or modified sequence
atgggtatggagggactcctccagaacagcacgaactttgttttaactggactgattacacatccagcctttccaggcttgcttttcgctatagttttttctatttttgttgtggccattacagcaaacctcgtaatgatcctcctcatccacatggactccagactccacacacctatgtatttccttctgtcccagctgtcaatcatggataccatttacatttgtattacagttcccaagatgcttcaagatcttcttagcaaggataaaacaatctcttttctgggatgtgcagtgcaaatattcctgtatttaacactaatcgggggcgaattcttcctgcttggcttaatggcatacgacagatacgtcgcggtctgtaatccactgcgctaccctctactgatgaatcgcagggtgtgtctcttcatggtcgtgggctcttgggtgggaggatctctcgatggattcatgctcactcccgttaccatgtccttccctttttgccgcagccgagagattaaccacttcttctgtgagataccggccgtgctgaagctgagctgcaccgacacatctctgtacgagacgttgatgtacgcttgttgtgtgctgatgcttcttatcccactctctgtcatcagtgtgagctatacccatatcttacttacagtacaccggatgaattcagccgaggggagacgcaaggcttttgccacttgctcgtcacacattatggtggtttcagtgttttacggtgccgcattttatacgaacgtgttaccacacagctatcacacgccagagaaggataaagtggtgagcgcattttacactatcctgactcctatgctgaatccactgatctacagcttaagaaataaggatgtggctgccgctctacgtaaggtgttagggcgctgtggaagtagccaatctatccgggtggccaccgtgattagaaaggggtag

SEQ ID NO: 20474 - DNA, 975 bp, Artificial Sequence
  derived and/or modified sequence
atgggcatggagggcctgctgcagaacagcaccaactttgtgctgaccggcctcatcacccacccagccttccctggcctgctgtttgccatcgtgttcagcatctttgtggtggccatcacagccaacctggtgatgatcctgctgatccacatggacagccggctgcacacccccatgtacttcctgctgagccagctgagcatcatggacaccatctacatctgcatcaccgtgcccaagatgctgcaggacctgctgagcaaggacaagaccatctccttcctgggctgtgctgtgcagatcttcctgtacctgaccctgattggaggagagttcttcctgctgggcctgatggcctatgaccgctacgtggccgtgtgcaaccccctgcgctaccccctgctgatgaacagaagagtgtgcctcttcatggtggtgggctcctgggtgggcggcagcctggatggcttcatgctgacccctgtgaccatgtccttccccttctgccgcagccgggagatcaaccacttcttctgtgagatcccagctgtgctgaagctgagctgcacagacaccagcctgtatgagaccctgatgtatgcctgctgcgtgctgatgctgctgatccccctgagcgtcatctctgtgtcctacacccacatcctgctgactgtgcacaggatgaacagcgctgagggccgcaggaaggcctttgccacctgcagcagccacatcatggtggtgtctgtgttctatggagctgccttctacaccaacgtgctgccccacagctaccacaccccagagaaggacaaggtggtgtctgccttctacaccatcctgacccccatgctgaaccccctcatctacagcctgaggaacaaggatgtggccgccgccctgaggaaggtgctgggccgctgtggcagcagccagagcatccgggtggccaccgtcatcagaaaaggatag

SEQ ID NO: 20475 - DNA, 975 bp, Artificial Sequence
  derived and/or modified sequence
atgggcatggagggcctgctgcagaacagcaccaacttcgtgctgacgggccttattacccacccagccttccctggcctgctgttcgccatcgtcttctctatttttgttgtggctatcacagccaacctcgtgatgatactgctcattcatatggattcccgcctgcacacacccatgtatttccttcttagccagctgtctattatggacacaatctacatctgtatcacagtccctaaaatgttgcaggatttattgtcgaaggacaagaccatttcttttctggggtgcgcagtgcagattttcctatatctcacgctaatcggaggggaattctttctgctcggtctcatggcctacgaccgctatgttgcagtttgcaatccacttcgttatccccttttaatgaatcggagagtgtgtctcttcatggtcgtgggctcctgggtcggggggagcttagatggattcatgctgactcccgtaaccatgtcctttccgttttgcagaagcagggaaatcaaccactttttctgtgagataccagccgtgctcaagctgtcatgcacagacacgtctttatatgagaccttaatgtacgcctgctgcgtcctcatgctcttgattcccttaagcgtaatttcagtcagttatacccatatcttgctgactgttcataggatgaatagtgccgagggccgcaggaaggcttttgctacttgtagctcccatatcatggtggtgtcggtcttttacggggcagctttttacactaatgtactgccacatagttaccatacccccgaaaaagacaaagtcgtgtcagccttctataccatcctcacaccaatgttgaacccactgatttactccctgagaaacaaggatgttgctgccgcccttcgcaaggtgctaggcagatgcggttcgtcacagagtatccgggtggcgacagtaatcaggaagggatag

SEQ ID NO: 20476 - DNA, 975 bp, Artificial Sequence
  derived and/or modified sequence
atggggatggagggcttgctgcagaactcaactaactttgtactcacaggcctcattacacaccccgcatttccgggtctgctgttcgccattgtgttttctatattcgtggtggccatcacagctaatctcgtgatgatcctactgatccacatggatagccggctacatacaccaatgtactttctcctctcccagctttctatcatggacaccatatatatttgtattactgtgccaaagatgttgcaggacttgctcagtaaagacaagaccatcagttttcttggctgtgccgtccaaattttcctgtacctgactcttattggaggagaattcttcctgctgggcctaatggcctacgatcggtacgtggccgtgtgtaatcctctcagatatcccctcttgatgaatcgcagggtgtgcctcttcatggtagtggggagctgggttgggggtagtttggacggctttatgctcaccccagttacaatgtcgtttccattctgcagaagccgagagatcaaccatttcttttgcgaaatacccgctgtcctcaaattgtcctgcaccgacactagcctttatgaaacattaatgtacgcctgctgcgttctcatgctcttgattcctcttagtgtgattagtgtcagctacactcacatactgcttacagtgcataggatgaatagcgccgagggtcgcagaaaagcattcgcaacatgcagttcacacatcatggtggtgagcgttttttacggagcagccttctacacgaacgtgctgcctcacagctatcatacaccagagaaggataaggtcgtcagtgcattctacaccatcctcacaccaatgctcaatcccttgatctatagcctccggaataaggatgtagccgctgccctgcggaaagtgctggggaggtgcggctctagccagagtatccgtgtagccacagtgatcagaaaggggtag

SEQ ID NO: 20477 - protein, 317 aa, Artificial Sequence
  derived and/or modified sequence
MLTFHNVCSVPSSFWLTGIPGLESLHVWLSIPFGSMYLVAVVGNVTILAVVKIERSLHQPMYFFLCMLAAIDLVLSTSTIPKLLGIFWFGACDIGLDACLGQMFLIHCFATVESGIFLAMAFDRYVAICNPLRHSMVLTYTVVGRLGLVSLLRGVLYIGPLPLMIRLRLPLYKTHVISHSYCEHMAVVALTCGDSRVNNVYGLSIGFLVLILDSVAIAASYVMIFRAVMGLATPEARLKTLGTCASHLCAILIFYVPIAVSSLIHRFGQCVPPPVHTLLANFYLLIPPILNPIVYAVRTKQIRESLLQIPRIEMKIR

SEQ ID NO: 20478 - DNA, 954 bp, Artificial Sequence
  derived and/or modified sequence
atgctgaccttccacaacgtgtgcagcgtgcccagcagcttctggctgaccggcatccccggcctggagagcctgcacgtgtggctgagcatccccttcggcagcatgtacctggtggccgtggtgggcaacgtgaccatcctggccgtggtgaagatcgagagaagcctgcaccagcccatgtacttcttcctgtgcatgctggccgccatcgacctggtgctgagcaccagcaccatccccaagctgctgggcatcttctggttcggcgcctgcgacatcggcctggacgcctgcctgggccagatgttcctgatccactgcttcgccaccgtggagagcggcatcttcctggccatggccttcgacagatacgtggccatctgcaaccccctgagacacagcatggtgctgacctacaccgtggtgggcagactgggcctggtgagcctgctgagaggcgtgctgtacatcggccccctgcccctgatgatcagactgagactgcccctgtacaagacccacgtgatcagccacagctactgcgagcacatggccgtggtggccctgacctgcggcgacagcagagtgaacaacgtgtacggcctgagcatcggcttcctggtgctgatcctggacagcgtggccatcgccgccagctacgtgatgatcttcagagccgtgatgggcctggccacccccgaggccagactgaagaccctgggcacctgcgccagccacctgtgcgccatcctgatcttctacgtgcccatcgccgtgagcagcctgatccacagattcggccagtgcgtgcccccccccgtgcacaccctgctggccaacttctacctgctgatcccccccatcctgaaccccatcgtgtacgccgtgagaaccaagcagatcagagagagcctgctgcagatccccagaatcgagatgaagatcagatag

SEQ ID NO: 20479 - DNA, 954 bp, Artificial Sequence
  derived and/or modified sequence
atgctcacgttccacaacgtgtgctctgtgccaagtagtttttggttaactggcatacccggccttgagtcactgcacgtctggctgtctattcccttcgggtccatgtacctggttgcagtggtcgggaatgtgaccatcttggccgttgtcaagatagagcgctcactacatcagccaatgtatttcttcctgtgtatgttggccgccatagatctggtactctcaacttcaaccattcctaagctgctggggatattttggtttggggcttgcgacatcggactggacgcctgccttggacagatgtttctcatccactgcttcgcaaccgtcgagtcggggatcttcctggctatggcctttgacaggtatgtggccatttgcaaccccctgcgacacagcatggttctgacctacactgtggtgggccggttggggttagtgtctcttcttaggggcgttctgtacatcgggccactgccactgatgattcggctgaggctgcccctttataaaacccacgttattagtcactcctattgtgaacacatggccgtggtggccctgacgtgcggcgattcacgagttaataatgtgtacgggctgtcgattgggttcttggtcttaatcctcgattctgtggccatcgcggcctcttacgtgatgatcttcagagcggtcatgggtcttgcaaccccggaagccagattgaagaccttgggtacatgtgcctctcacttatgcgctatcttgattttctatgttccgatcgcagtcagttccctgatacaccgttttggccagtgcgttccaccccccgtgcatacgctattggccaatttttatctgcttatcccccccatccttaacccaatcgtttatgccgttagaaccaagcagatccgcgagtcactactacagattccgcggattgaaatgaaaatcaggtag

SEQ ID NO: 20480 - DNA, 954 bp, Artificial Sequence
  derived and/or modified sequence
atgctgaccttccacaacgtgtgcagcgtgcccagcagcttctggctgaccggcatccctggcctggagagcctgcacgtgtggctgagcatccccttcggctccatgtacctggtggccgtggtgggcaatgtgaccatcctggccgtggtgaagattgaaagaagcctgcaccagcccatgtacttcttcctgtgcatgctggccgccatcgacctggtgctgagcaccagcaccatccccaagctgctgggcatcttctggtttggagcctgtgacatcggcctggatgcctgcctgggccagatgttcctgatccactgctttgccaccgtggagagcggcatcttcctggccatggcctttgacagatatgtggccatctgcaaccccctgcggcacagcatggtgctgacctacacagtggtgggccgcctgggcctggtgtccctgctgcggggcgtgctgtacatcggccccctgcccctgatgatccggctgcggctgcccctgtacaagacccacgtgatcagccacagctactgtgagcacatggctgtggtggccctgacctgtggggacagccgggtgaacaacgtgtatggcctgagcatcggcttcctggtgctgatcctggacagcgtggccatcgccgccagctatgtgatgatcttccgggctgtgatgggcctggccaccccagaggcccggctgaagaccctgggcacctgtgccagccacctgtgtgccatcctgatcttctacgtgcccatcgctgtgagcagcctcatccacagatttggccagtgtgtgcccccacctgtgcacaccctgctggccaacttctacctgctgatcccccccatcctgaaccccatcgtgtatgctgtgaggaccaagcagatccgggagagcctgctgcagatcccccgcatcgagatgaagatcagatag

SEQ ID NO: 20481 - DNA, 954 bp, Artificial Sequence
  derived and/or modified sequence
atgctgaccttccacaacgtgtgcagcgtgcccagcagcttctggctgacaggtatcccaggattggagtctctacatgtgtggctgagcattccctttggatctatgtatttggtagccgtcgttggaaatgtaactattttagcagttgtgaaaatcgaacgctccctgcatcagcctatgtattttttcctgtgcatgctggccgctattgacttggtactctctacctctaccattcctaagctgcttggcattttttggttcggtgcatgcgacattggtctggatgcatgcctcggacagatgtttctaattcactgcttcgccacagtagagagcggcattttcctggccatggcatttgatagatacgtggccatctgcaatcctcttcggcacagcatggtgctgacttacactgtcgtaggacgacttgggctggtttccctgctgagaggcgtcctctatattggtccactgcctctgatgatcaggctaagactaccactctataaaacacatgttatatcacactcctattgcgagcacatggccgtggtggccctaacttgcggcgactcccgtgttaataacgtgtacgggctatctatcggatttctggtgctgattttagattccgtagccattgccgctagctatgttatgattttccgggcggtgatgggactcgctacacccgaggcgcggctgaagacacttggcacttgtgcatcacacttatgtgcaatcctgattttctacgtgcctatcgctgtctcctctctgattcatagatttgggcagtgtgtgccacctcccgtccataccctcctagccaacttctatctgttgatccccccaatcctgaacccaattgtctacgcagtgagaactaagcagattagagaatccctgctccagatcccccgcatagagatgaagattcggtag

SEQ ID NO: 20482 - DNA, 954 bp, Artificial Sequence
  derived and/or modified sequence
atgctcacttttcataatgtctgctcagtacccagctccttctggctcactggcatcccagggctggagtccctacacgtctggctctccatcccctttggctccatgtacctggtggctgtggtggggaatgtgaccatcctggctgtggtaaagatagaacgcagcctgcaccagcccatgtactttttcttgtgcatgttggctgccattgacctggttctgtctacttccactatacccaaacttctgggaatcttctggttcggtgcttgtgacattggcctggacgcctgcttgggccaaatgttccttatccactgctttgccactgttgagtcaggcatcttccttgccatggcttttgatcgctacgtggccatctgcaacccactacgtcatagcatggtgctcacttatacagtggtgggtcgtttggggcttgtttctctcctccggggtgttctctacattggacctctgcctctgatgatccgcctgcggctgcccctttataaaacccatgttatctcccactcctactgtgagcacatggctgtagttgccttgacatgtggcgacagcagggtcaataatgtctatgggctgagcatcggctttctggtgttgatcctggactcagtggctattgctgcatcctatgtgatgattttcagggccgtgatggggttagccactcctgaggctaggcttaaaaccctggggacatgcgcttctcacctctgtgccatcctgatcttttatgttcccattgctgtttcttccctgattcaccgatttggtcagtgtgtgcctcctccagtccacactctgctggccaacttctatctcctcattcctccaatcctcaatcccattgtctatgctgttcgcaccaagcagatccgagagagccttctccaaataccaaggatagaaatgaagattagatga

SEQ ID NO: 20483 - DNA, 954 bp, Artificial Sequence
  derived and/or modified sequence
atgctgacctttcataacgtttgttctgtgccctccagcttttggctcactggaatcccgggattggagtctttgcacgtctggctctccataccattcggaagcatgtacctggttgcagtagtagggaatgttacaattctcgccgtggtaaaaatcgaaaggtctctgcaccagccaatgtatttcttcttatgcatgctggccgcaatcgacctggtgttaagcacgagtacgattcccaaactcctggggattttctggttcggggcatgcgacattggcctagatgcctgcctgggtcaaatgtttctgattcattgcttcgccacagttgaatcaggtatttttctcgctatggcctttgatcggtacgtagccatatgtaaccctttgcggcacagcatggtgttgacatacacggtagtcgggcgactcgggctggtcagcctgttacggggagtgctgtatattggcccactcccgttaatgataagactgcggctgcccctgtacaagacacacgtgatctcgcatagctactgtgaacacatggctgtggtggccctaacctgcggtgacagtcgggttaataacgtttatggccttagcattggtttcctagtgctgattctcgactccgttgctatcgcagcgtcttacgtgatgatcttccgcgctgtgatgggattggcaactccagaagcgcgactcaaaactttgggcacttgtgctagtcatctgtgcgccatcttgatcttctatgtgcctatcgctgttagctctctcatacaccgcttcggccagtgcgtgcccccacctgtgcataccttgctggcgaacttctacctgctgatcccacctatcctaaaccccattgtgtatgctgtgcgtaccaaacaaatacgagagtccctgctccagattccacggatcgaaatgaaaatacgatag

SEQ ID NO: 20484 - protein, 294 aa, Artificial Sequence
  derived and/or modified sequence
MERLTLTRTIGGPLLTATLLGKTTINDYQVIRMPFSHLSTYSLVWVMAAVVLCTAQVQVVTQDEREQLYTPASLKCSLQNAQEALIVTWQKKKAVSPENMVTFSENHGVVIQPAYKDKINITQLGLQNSTITFWNITLEDEGCYMCLFNTFGFGKISGTACLTVYVQPIVSLHYKFSEDHLNITCSATARPAPMVFWKVPRSGIENSTVTLSHPNGTTSVTSILHIKDPKNQVGKEVICQVLHLGTVTDFKQTVNKGYWFSVPLLLSIVSLVILLVLISILLYWKRHRNQDREP

SEQ ID NO: 20485 - DNA, 885 bp, Artificial Sequence
  derived and/or modified sequence
atggagagactgaccctgaccagaaccatcggcggccccctgctgaccgccaccctgctgggcaagaccaccatcaacgactaccaggtgatcagaatgcccttcagccacctgagcacctacagcctggtgtgggtgatggccgccgtggtgctgtgcaccgcccaggtgcaggtggtgacccaggacgagagagagcagctgtacacccccgccagcctgaagtgcagcctgcagaacgcccaggaggccctgatcgtgacctggcagaagaagaaggccgtgagccccgagaacatggtgaccttcagcgagaaccacggcgtggtgatccagcccgcctacaaggacaagatcaacatcacccagctgggcctgcagaacagcaccatcaccttctggaacatcaccctggaggacgagggctgctacatgtgcctgttcaacaccttcggcttcggcaagatcagcggcaccgcctgcctgaccgtgtacgtgcagcccatcgtgagcctgcactacaagttcagcgaggaccacctgaacatcacctgcagcgccaccgccagacccgcccccatggtgttctggaaggtgcccagaagcggcatcgagaacagcaccgtgaccctgagccaccccaacggcaccaccagcgtgaccagcatcctgcacatcaaggaccccaagaaccaggtgggcaaggaggtgatctgccaggtgctgcacctgggcaccgtgaccgacttcaagcagaccgtgaacaagggctactggttcagcgtgcccctgctgctgagcatcgtgagcctggtgatcctgctggtgctgatcagcatcctgctgtactggaagagacacagaaaccaggacagagagccctag

SEQ ID NO: 20486 - DNA, 885 bp, Artificial Sequence
  derived and/or modified sequence
atggagcgcctgacccttacaaggacaatcggcggcccactacttacagcgacactgttggggaaaacgacaatcaatgactaccaggtcatccggatgccattttctcatctcagcacctactcactcgtctgggtgatggctgctgttgtgttgtgtacggcgcaggtacaggtggtgacccaggatgagagagagcagctctatacgcctgcctcgctgaaatgtagtcttcagaatgcacaggaggccctcattgtgacatggcagaaaaaaaaagccgtctcccccgagaacatggtgacttttagcgagaaccatggcgtcgtgatccaaccagcctataaggataaaatcaacattacacagctcggcctgcaaaattccacaatcacattctggaacatcacgttagaagacgaaggctgttacatgtgcttattcaatacctttggatttggcaaaatatctggaacggcgtgcttgacggtttacgtgcaacccattgtaagtcttcactataaatttagcgaagatcacctcaacattacctgtagtgcaactgctcgtccagcaccaatggtcttttggaaagttcccaggtccggtatcgagaatagcaccgtcaccctgtcgcaccccaacgggacaacttctgtcacaagcatcttacacatcaaagaccccaaaaaccaggttgggaaagaggttatctgtcaagttctgcacctagggaccgttaccgactttaagcaaacagtcaacaaagggtactggttctccgtgcctttactcctgtcaatcgtttctttggttattttgctggtactgattagtatcttactttattggaagaggcatagaaatcaggatagagagccatag

SEQ ID NO: 20487 - DNA, 885 bp, Artificial Sequence
  derived and/or modified sequence
atggagcggctgaccctgaccaggaccatcggcggccccctgctgacagccaccctgctgggcaagaccaccatcaatgactaccaggtgatccgcatgcccttcagccacctgagcacctacagcctggtgtgggtgatggctgctgtggtgctgtgcacagcccaggtgcaggtggtgacccaggatgagcgggagcagctgtacaccccagccagcctgaagtgcagcctgcagaatgcccaggaggccctgattgtgacctggcagaagaagaaggctgtgtccccagagaacatggtgaccttctctgaaaatcatggagtggtgatccagcctgcctacaaggacaagatcaacatcacccagctgggcctgcagaacagcaccatcaccttctggaacatcaccctggaggatgagggctgctacatgtgcctcttcaacacctttggatttgggaagatctctggaacagcctgcctgactgtgtatgtgcagcccatcgtgtccctgcactacaagttcagcgaggaccacctgaacatcacctgcagcgccacagcccggcctgcccccatggtgttctggaaggtgcccaggagcggcatcgagaacagcacagtgaccctgagccaccccaacggcaccacctctgtgaccagcatcctgcacatcaaggaccccaagaaccaggtgggcaaggaggtgatctgccaggtgctgcacctgggcaccgtgacagacttcaagcagacagtgaacaagggctactggttctctgtgcccctgctgctgagcatcgtgtccctggtgatcctgctggtgctgatcagcatcctgctgtactggaagaggcacaggaaccaggaccgggagccctag

SEQ ID NO: 20488 - DNA, 885 bp, Artificial Sequence
  derived and/or modified sequence
atggagcggctgaccctgacccggaccatcggcggccccctgctgactgctaccctactgggcaagaccacaattaatgactaccaggttatcagaatgccttttagtcacctgtccacttattcactggtgtgggtgatggcggccgtcgtgttatgtaccgcgcaggttcaggttgtgactcaggacgaaagagagcaactttatacccccgcgtctctcaagtgctctctgcaaaatgcccaagaggctctgattgtaacttggcagaagaaaaaagccgtgtcccccgagaatatggtgactttctccgaaaaccatggagtggtgattcagcctgcctataaagataaaatcaatattacccagctgggactgcagaactcgaccattaccttttggaacattaccctggaagacgagggatgttacatgtgtctgttcaataccttcggcttcggcaagatatcaggtacggcttgcctgactgtgtacgtacagcccatcgtatccttgcattacaagttttctgaggaccatctcaacatcacctgctcagccacagctcggcctgcaccgatggtgttctggaaggtacccaggtctggcatcgaaaattccacggtcactctatctcaccctaatggaacgacgtctgtcacctcaatcctgcatatcaaggaccctaaaaatcaagtgggaaaggaagtgatatgccaagtgctgcacctgggaacagtaacggattttaagcagaccgttaacaagggatactggttcagtgtgcccctattgctgtctattgtctccctggtcatccttctggtgctaatttctatcctcctgtattggaaacggcacagaaaccaggatcgggaaccttag

SEQ ID NO: 20489 - DNA, 885 bp, Artificial Sequence
  derived and/or modified sequence
atggagcgcttaaccctgacaagaactataggtggacctctgttaacggctactttgctgggcaagacaactattaacgattaccaagtgatcaggatgcccttttctcatctgtccacttatagcctagtctgggttatggcagctgttgtgctttgcacggcccaggtgcaagttgtgacacaggacgagagagagcaactgtacactccagcttcactgaaatgttcgctccagaacgcccaggaagccctgatagtcacttggcagaagaagaaggctgtaagccctgaaaacatggtgacattctctgaaaaccacggcgtggtcatacagccggcttacaaagataaaattaacatcacccagcttgggctgcagaattccactattaccttttggaatataacgctggaggacgaggggtgttacatgtgtttattcaatacgttcggctttgggaagatatccgggaccgcttgcttaacagtctatgtgcagccaattgtgtcacttcactacaaattcagcgaggatcacctgaatatcacctgcagtgctacagcgaggcctgcaccaatggtcttttggaaggtgcctagaagtggaatcgagaacagtacggtcactctcagccacccaaacgggacgacttcagtcacttcaatccttcatataaaggatcccaaaaaccaggttggaaaggaagtgatatgtcaggtcctgcatctgggaaccgtgacggatttcaagcagacagtgaataaaggatattggttctcagtgcccctgcttctatccatcgtctcgctggtgatcctgctcgtgctgataagcatcttgctctactggaaacgccaccggaatcaagatcgagagccttag

SEQ ID NO: 20490 - DNA, 1524 bp, Artificial Sequence
  derived and/or modified sequence
agagctccaggcgcacatccgcagtcagccacctcgcgcgcgcctccaggagcaaggatggagaggctgactctgaccaggacaattgggggccctctccttacagctacactcctaggaaagaccaccatcaatgattaccaggtgatcaggatgcccttctctcatctgtctacctacagcctggtttgggtcatggcagcagtggtgctgtgcacagcacaagtgcaagtggtgacccaggatgaaagagagcagctgtacacacctgcttccttaaaatgctctctgcaaaatgcccaggaagccctcattgtgacatggcagaaaaagaaagctgtaagcccagaaaacatggtcaccttcagcgagaaccatggggtggtgatccagcctgcctataaggacaagataaacattacccagctgggactccaaaactcaaccatcaccttctggaatatcaccctggaggatgaagggtgttacatgtgtctcttcaatacctttggttttgggaagatctcaggaacggcctgcctcaccgtctatgtacagcccatagtatcccttcactacaaattctctgaagaccacctaaatatcacttgctctgccactgcccgcccagcccccatggtcttctggaaggtccctcggtcagggattgaaaatagtacagtgactctgtctcacccaaatgggaccacgtctgttaccagcatcctccatatcaaagaccctaagaatcaggtggggaaggaggtgatctgccaggtgctgcacctggggactgtgaccgactttaagcaaaccgtcaacaaaggctattggttttcagttccgctattgctaagcattgtttccctggtaattcttctcgtcctaatctcaatcttactgtactggaaacgtcaccggaatcaggaccgagagccctaaataagtcacacagcaccctgaaagtgattccctggtctacttgaatttgacacaagagaaaagcaggaggaaaaggggccattctccaaaggacctgaaagagcaaaagaggtgggagcgaaagccttaaggatcccacgactttttactgccatctgagctactcagtgtttgaatcccaagaggaagtcagtttacctctcaggtctgttgtaggacttgattttgtaaagcaatgccatgttatgtggttgaaagggcactggacttagttagtatcaggagcactgagctcacagactgacttgggctcctactggtggggacctctgttagtcactttacctcatccaaagtataaaggaattggaccaaataatttaccacatagctctaaaacttaatttaaaatgtaattccagaaaaaaaaagggaataagcaaagggggaagaattgaaagagagagagaagaaagaatacagagagcttaccttttgcctttctgttgatgttacatctcttcttcctatgttcttaggtctatgagtctgtttccccatcatttggtatctagtccagtt

SEQ ID NO: 20491 - protein, 699 aa, Artificial Sequence
  derived and/or modified sequence
MLKLSGEGLRDSYHSRRDQIALKNLQSDVTEAKSDFTKETLASQNTKMISSIVISQMIDENKSRENRASLPLPCAIAQSRAHHAKQSLANRSGVNIHRAFALLPGRLGIPAPSDERGPEAELPPKEERPCGGPRRGFASITITARRVGPPARALVWGTAGDSLCPKCRAEDTLFQAPPALANGAHPGRHQRSFACTEFSRNSSVVRLKVPEAHTGLCERRKYWVTHADDKETSFSPDTPLSGKSPLVFSSCVHLRVSQQCPDSIYYVDKSLSVPIEPPQIASPKMHRSVLSLNLNCSSHRLTADGVDGLVNREPISEALKQELLEGDQDLVGQRWNPGLQESHLKETPSLRRVHLGTGACPWSGSFPLENTELANVGANQVTVRKGEKDHTTHCHASDHANQLSIHIPGWSYRAVHTKVFSGSSKRQQGEVCMTVSAPPVEQKPTRHFLPIGDSSPSDDCLSRDLSEPTERRHQSFLKPRILFPGFLCPLQDVCASLQEDNGVQIESKFPKGDYTCCDLVVKIKECKKSEDPTTPEPSPAAPSPAPRDGAGSPGLSEDCSESQQTPARSLTLQEALEVRKPQFISRSQERLKKLEHMVQQRKAQRKEDLRQKQSLLPIRTSKKQFTIPHPLSDNLFKPKERCISEKEMHMRSKRIYDNLPEVKKKKEEQRKRVILQSNRLRAEVFKKQLLDQLLQRNAV

SEQ ID NO: 20492 - protein, 662 aa, Artificial Sequence
  derived and/or modified sequence
MLKLSGEGLRDSYHSRRDQIALKNLQSDVTEAKSDFTKETLASQNTKMISSIVISQMIDENKSRENRASLPLPCAIAQSRAHHAKQSLANRSGVNIHRAFALLPGRLGIPAPSDERGPEAELPPKEERPCGGPRRGFASITITARRVGPPARALVWGTAGDSLCPKCRAEDTLFQAPPALANGAHPGRHQRSFACTEFSRNSSVVRLKVPEAHTGLCERRKYWVTHADDKETSFSPDTPLSGKSPLVFSSCVHLRVSQQCPDSIYYVDKSLSVPIEPPQIASPKMHRSVLSLNLNCSSHRLTADGVDGLVNREPISEALKQELLEGDQDLVGQRWNPGLQESHLKETPSLRRVHLGTGACPWSGSFPLENTELANVGANQVTVRKGEKDHTTHCHASDHANQLSIHIPGWSYRAVHTKVFSGSSKRQQGEVCMTVSAPPVEQKPTRHFLPIGDSSPSDDCLSRDLSEPTERRHQSFLKPRILFPGFLCPLQDVCASLQEDNGVQIESKFPKGDYTCCDLVVKIKECKKSEDPTTPEPSPAAPSPAPRDGAGSPGLSEDCSESQQTPARSLTLQEALEVRKPQFISRSQERLKKLEHMVQQRKAQRKEDLRQKQSLLPIRTSKKQFTIPHPLSDNLFKPKERCISEKEMHMRSKRIYDNLPEV

SEQ ID NO: 20493 - protein, 602 aa, Artificial Sequence
  derived and/or modified sequence
MLKLSGEGLRDSYHSRRDQIALKNLQSDVTEAKSDFTKETLASQNTKMISSIVISQMIDENKSRENRASLPLPCAIAQSRAHHAKQSLANRSGVNIHRAFALLPGRLGIPAPSDERGPEAELPPKEERPCGGPRRGFASITITARRVGPPARALVWGTAGDSLCPKCRAEDTLFQAPPALANGAHPGRHQRSFACTEFSRNSSVVRLKVPEAHTGLCERRKYWVTHADDKETSFSPDTPLSGKSPLVFSSCVHLRVSQQCPDSIYYVDKSLSVPIEPPQIASPKMHRSVLSLNLNCSSHRLTADGVDGLVNREPISEALKQELLEGDQDLVGQRWNPGLQESHLKETPSLRRVHLGTGACPWSGSFPLENTELANVGANQVTVRKGEKDHTTHCHASDHANQLSIHIPGWSYRAGDYTCCDLVVKIKECKKSEDPTTPEPSPAAPSPAPRDGAGSPGLSEDCSESQQTPARSLTLQEALEVRKPQFISRSQERLKKLEHMVQQRKAQRKEDLRQKQSLLPIRTSKKQFTIPHPLSDNLFKPKERCISEKEMHMRSKRIYDNLPEVKKKKEEQRKRVILQSNRLRAEVFKKQLLDQLLQRNAV

SEQ ID NO: 20494 - DNA, 2100 bp, Artificial Sequence
  derived and/or modified sequence
atgctgaagctgagcggcgagggcctgagagacagctaccacagcagaagagaccagatcgccctgaagaacctgcagagcgacgtgaccgaggccaagagcgacttcaccaaggagaccctggccagccagaacaccaagatgatcagcagcatcgtgatcagccagatgatcgacgagaacaagagcagagagaacagagccagcctgcccctgccctgcgccatcgcccagagcagagcccaccacgccaagcagagcctggccaacagaagcggcgtgaacatccacagagccttcgccctgctgcccggcagactgggcatccccgcccccagcgacgagagaggccccgaggccgagctgccccccaaggaggagagaccctgcggcggccccagaagaggcttcgccagcatcaccatcaccgccagaagagtgggcccccccgccagagccctggtgtggggcaccgccggcgacagcctgtgccccaagtgcagagccgaggacaccctgttccaggccccccccgccctggccaacggcgcccaccccggcagacaccagagaagcttcgcctgcaccgagttcagcagaaacagcagcgtggtgagactgaaggtgcccgaggcccacaccggcctgtgcgagagaagaaagtactgggtgacccacgccgacgacaaggagaccagcttcagccccgacacccccctgagcggcaagagccccctggtgttcagcagctgcgtgcacctgagagtgagccagcagtgccccgacagcatctactacgtggacaagagcctgagcgtgcccatcgagcccccccagatcgccagccccaagatgcacagaagcgtgctgagcctgaacctgaactgcagcagccacagactgaccgccgacggcgtggacggcctggtgaacagagagcccatcagcgaggccctgaagcaggagctgctggagggcgaccaggacctggtgggccagagatggaaccccggcctgcaggagagccacctgaaggagacccccagcctgagaagagtgcacctgggcaccggcgcctgcccctggagcggcagcttccccctggagaacaccgagctggccaacgtgggcgccaaccaggtgaccgtgagaaagggcgagaaggaccacaccacccactgccacgccagcgaccacgccaaccagctgagcatccacatccccggctggagctacagagccgtgcacaccaaggtgttcagcggcagcagcaagagacagcagggcgaggtgtgcatgaccgtgagcgccccccccgtggagcagaagcccaccagacacttcctgcccatcggcgacagcagccccagcgacgactgcctgagcagagacctgagcgagcccaccgagagaagacaccagagcttcctgaagcccagaatcctgttccccggcttcctgtgccccctgcaggacgtgtgcgccagcctgcaggaggacaacggcgtgcagatcgagagcaagttccccaagggcgactacacctgctgcgacctggtggtgaagatcaaggagtgcaagaagagcgaggaccccaccacccccgagcccagccccgccgcccccagccccgcccccagagacggcgccggcagccccggcctgagcgaggactgcagcgagagccagcagacccccgccagaagcctgaccctgcaggaggccctggaggtgagaaagccccagttcatcagcagaagccaggagagactgaagaagctggagcacatggtgcagcagagaaaggcccagagaaaggaggacctgagacagaagcagagcctgctgcccatcagaaccagcaagaagcagttcaccatcccccaccccctgagcgacaacctgttcaagcccaaggagagatgcatcagcgagaaggagatgcacatgagaagcaagagaatctacgacaacctgcccgaggtgaagaagaagaaggaggagcagagaaagagagtgatcctgcagagcaacagactgagagccgaggtgttcaagaagcagctgctggaccagctgctgcagagaaacgccgtgtag

SEQ ID NO: 20495 - DNA, 1959 bp, Artificial Sequence
  derived and/or modified sequence
atgatcagcagcatcgtgatcagccagatgatcgacgagaacaagagcagagagaacagagccagcctgcccctgccctgcgccatcgcccagagcagagcccaccacgccaagcagagcctggccaacagaagcggcgtgaacatccacagagccttcgccctgctgcccggcagactgggcatccccgcccccagcgacgagagaggccccgaggccgagctgccccccaaggaggagagaccctgcggcggccccagaagaggcttcgccagcatcaccatcaccgccagaagagtgggcccccccgccagagccctggtgtggggcaccgccggcgacagcctgtgccccaagtgcagagccgaggacaccctgttccaggccccccccgccctggccaacggcgcccaccccggcagacaccagagaagcttcgcctgcaccgagttcagcagaaacagcagcgtggtgagactgaaggtgcccgaggcccacaccggcctgtgcgagagaagaaagtactgggtgacccacgccgacgacaaggagaccagcttcagccccgacacccccctgagcggcaagagccccctggtgttcagcagctgcgtgcacctgagagtgagccagcagtgccccgacagcatctactacgtggacaagagcctgagcgtgcccatcgagcccccccagatcgccagccccaagatgcacagaagcgtgctgagcctgaacctgaactgcagcagccacagactgaccgccgacggcgtggacggcctggtgaacagagagcccatcagcgaggccctgaagcaggagctgctggagggcgaccaggacctggtgggccagagatggaaccccggcctgcaggagagccacctgaaggagacccccagcctgagaagagtgcacctgggcaccggcgcctgcccctggagcggcagcttccccctggagaacaccgagctggccaacgtgggcgccaaccaggtgaccgtgagaaagggcgagaaggaccacaccacccactgccacgccagcgaccacgccaaccagctgagcatccacatccccggctggagctacagagccgtgcacaccaaggtgttcagcggcagcagcaagagacagcagggcgaggtgtgcatgaccgtgagcgccccccccgtggagcagaagcccaccagacacttcctgcccatcggcgacagcagccccagcgacgactgcctgagcagagacctgagcgagcccaccgagagaagacaccagagcttcctgaagcccagaatcctgttccccggcttcctgtgccccctgcaggacgtgtgcgccagcctgcaggaggacaacggcgtgcagatcgagagcaagttccccaagggcgactacacctgctgcgacctggtggtgaagatcaaggagtgcaagaagagcgaggaccccaccacccccgagcccagccccgccgcccccagccccgcccccagagacggcgccggcagccccggcctgagcgaggactgcagcgagagccagcagacccccgccagaagcctgaccctgcaggaggccctggaggtgagaaagccccagttcatcagcagaagccaggagagactgaagaagctggagcacatggtgcagcagagaaaggcccagagaaaggaggacctgagacagaagcagagcctgctgcccatcagaaccagcaagaagcagttcaccatcccccaccccctgagcgacaacctgttcaagcccaaggagagatgcatcagcgagaaggagatgcacatgagaagcaagagaatctacgacaacctgcccgaggtgaagaagaagaaggaggagcagagaaagagagtgatcctgcagagcaacagactgagagccgaggtgttcaagaagcagctgctggaccagctgctgcagagaaacgccgtgtag

SEQ ID NO: 20496 - DNA, 1989 bp, Artificial Sequence
  derived and/or modified sequence
atgctgaagctgagcggcgagggcctgagagacagctaccacagcagaagagaccagatcgccctgaagaacctgcagagcgacgtgaccgaggccaagagcgacttcaccaaggagaccctggccagccagaacaccaagatgatcagcagcatcgtgatcagccagatgatcgacgagaacaagagcagagagaacagagccagcctgcccctgccctgcgccatcgcccagagcagagcccaccacgccaagcagagcctggccaacagaagcggcgtgaacatccacagagccttcgccctgctgcccggcagactgggcatccccgcccccagcgacgagagaggccccgaggccgagctgccccccaaggaggagagaccctgcggcggccccagaagaggcttcgccagcatcaccatcaccgccagaagagtgggcccccccgccagagccctggtgtggggcaccgccggcgacagcctgtgccccaagtgcagagccgaggacaccctgttccaggccccccccgccctggccaacggcgcccaccccggcagacaccagagaagcttcgcctgcaccgagttcagcagaaacagcagcgtggtgagactgaaggtgcccgaggcccacaccggcctgtgcgagagaagaaagtactgggtgacccacgccgacgacaaggagaccagcttcagccccgacacccccctgagcggcaagagccccctggtgttcagcagctgcgtgcacctgagagtgagccagcagtgccccgacagcatctactacgtggacaagagcctgagcgtgcccatcgagcccccccagatcgccagccccaagatgcacagaagcgtgctgagcctgaacctgaactgcagcagccacagactgaccgccgacggcgtggacggcctggtgaacagagagcccatcagcgaggccctgaagcaggagctgctggagggcgaccaggacctggtgggccagagatggaaccccggcctgcaggagagccacctgaaggagacccccagcctgagaagagtgcacctgggcaccggcgcctgcccctggagcggcagcttccccctggagaacaccgagctggccaacgtgggcgccaaccaggtgaccgtgagaaagggcgagaaggaccacaccacccactgccacgccagcgaccacgccaaccagctgagcatccacatccccggctggagctacagagccgtgcacaccaaggtgttcagcggcagcagcaagagacagcagggcgaggtgtgcatgaccgtgagcgccccccccgtggagcagaagcccaccagacacttcctgcccatcggcgacagcagccccagcgacgactgcctgagcagagacctgagcgagcccaccgagagaagacaccagagcttcctgaagcccagaatcctgttccccggcttcctgtgccccctgcaggacgtgtgcgccagcctgcaggaggacaacggcgtgcagatcgagagcaagttccccaagggcgactacacctgctgcgacctggtggtgaagatcaaggagtgcaagaagagcgaggaccccaccacccccgagcccagccccgccgcccccagccccgcccccagagacggcgccggcagccccggcctgagcgaggactgcagcgagagccagcagacccccgccagaagcctgaccctgcaggaggccctggaggtgagaaagccccagttcatcagcagaagccaggagagactgaagaagctggagcacatggtgcagcagagaaaggcccagagaaaggaggacctgagacagaagcagagcctgctgcccatcagaaccagcaagaagcagttcaccatcccccaccccctgagcgacaacctgttcaagcccaaggagagatgcatcagcgagaaggagatgcacatgagaagcaagagaatctacgacaacctgcccgaggtgtag

SEQ ID NO: 20497 - DNA, 1809 bp, Artificial Sequence
  derived and/or modified sequence
atgctgaagctgagcggcgagggcctgagagacagctaccacagcagaagagaccagatcgccctgaagaacctgcagagcgacgtgaccgaggccaagagcgacttcaccaaggagaccctggccagccagaacaccaagatgatcagcagcatcgtgatcagccagatgatcgacgagaacaagagcagagagaacagagccagcctgcccctgccctgcgccatcgcccagagcagagcccaccacgccaagcagagcctggccaacagaagcggcgtgaacatccacagagccttcgccctgctgcccggcagactgggcatccccgcccccagcgacgagagaggccccgaggccgagctgccccccaaggaggagagaccctgcggcggccccagaagaggcttcgccagcatcaccatcaccgccagaagagtgggcccccccgccagagccctggtgtggggcaccgccggcgacagcctgtgccccaagtgcagagccgaggacaccctgttccaggccccccccgccctggccaacggcgcccaccccggcagacaccagagaagcttcgcctgcaccgagttcagcagaaacagcagcgtggtgagactgaaggtgcccgaggcccacaccggcctgtgcgagagaagaaagtactgggtgacccacgccgacgacaaggagaccagcttcagccccgacacccccctgagcggcaagagccccctggtgttcagcagctgcgtgcacctgagagtgagccagcagtgccccgacagcatctactacgtggacaagagcctgagcgtgcccatcgagcccccccagatcgccagccccaagatgcacagaagcgtgctgagcctgaacctgaactgcagcagccacagactgaccgccgacggcgtggacggcctggtgaacagagagcccatcagcgaggccctgaagcaggagctgctggagggcgaccaggacctggtgggccagagatggaaccccggcctgcaggagagccacctgaaggagacccccagcctgagaagagtgcacctgggcaccggcgcctgcccctggagcggcagcttccccctggagaacaccgagctggccaacgtgggcgccaaccaggtgaccgtgagaaagggcgagaaggaccacaccacccactgccacgccagcgaccacgccaaccagctgagcatccacatccccggctggagctacagagccggcgactacacctgctgcgacctggtggtgaagatcaaggagtgcaagaagagcgaggaccccaccacccccgagcccagccccgccgcccccagccccgcccccagagacggcgccggcagccccggcctgagcgaggactgcagcgagagccagcagacccccgccagaagcctgaccctgcaggaggccctggaggtgagaaagccccagttcatcagcagaagccaggagagactgaagaagctggagcacatggtgcagcagagaaaggcccagagaaaggaggacctgagacagaagcagagcctgctgcccatcagaaccagcaagaagcagttcaccatcccccaccccctgagcgacaacctgttcaagcccaaggagagatgcatcagcgagaaggagatgcacatgagaagcaagagaatctacgacaacctgcccgaggtgaagaagaagaaggaggagcagagaaagagagtgatcctgcagagcaacagactgagagccgaggtgttcaagaagcagctgctggaccagctgctgcagagaaacgccgtgtag

SEQ ID NO: 20498 - DNA, 3076 bp, Artificial Sequence
  derived and/or modified sequence
attctgagcctagccacagaggtaaactccggacatttttttctttcatgtcgccaaatacatccttgtcattaaaagacctttgaaactgagtaaaatggctttgaaacctcagtagaatatgctcaaactgtctggagaaggattacgggacagctaccacagtagaagagatcaaattgcccttaaaaatctccagtctgatgtcacagaggcaaaatctgacttcaccaaggagaccctggcatcacaaaacacaaaaatgatttcatccatagtcatctcccagatgattgatgagaataagtcaagagaaaacagggcctccttgcccctaccgtgtgccattgctcagtctcgtgcacatcacgccaagcaatctctggctaaccgcagcggagtcaacattcacagagcatttgcgttacttccgggcagattaggaatcccggcaccgtcagatgagcgaggacctgaggcagagctgccgcccaaagaggagagaccctgtgggggcccccgcagagggtttgcatccatcaccatcacggccagacgcgtgggccccccagcccgcgccctggtgtgggggactgctggggactctctgtgccccaagtgcagggctgaggacacactgttccaggcgcccccggctctggccaatggcgcccatccaggtcggcatcagagatcttttgcctgcacagagttctccagaaacagctccgtggtgcggctgaaggttcccgaggcccacactgggttgtgtgagagacgcaagtactgggtcacccatgcagacgacaaagagaccagtttttctccagacaccccactgtcaggaaagagcccgctggtgttcagttcctgtgtccacctcagggtgtctcagcagtgtccagattcaatctattacgtagacaagtctctctccgtccccattgagccacctcaaattgccagccccaaaatgcacagatccgtcctgtcgctcaacctcaattgtagttcccacagattaacagcagatggagtagatggcctagtgaacagagagccaataagcgaagccctgaagcaggagctcctggagggagaccaggacctcgtaggccagcgctggaacccaggtttacaagaaagtcacttgaaggaaaccccatcgttgaggcgggtgcatttggggaccggcgcttgtccttggagtggttcttttccattggaaaacacagaattggcaaatgtgggagctaaccaagtcactgtaagaaaaggggaaaaggaccatacaactcattgtcacgccagcgatcatgccaaccaactgtccattcacattcctggctggagttacagggcagtacacacaaaagtattttctggaagcagcaagaggcaacaaggagaagtatgtatgactgtgtctgctcctccagtggaacagaagcccactagacatttccttcccattggggatagctctccaagcgatgactgtctgtctagagacctttctgagcccacagagagacgacatcaaagcttcctgaaacccagaatcctttttcctgggtttctttgccccttacaagatgtatgtgcatctctgcaggaagacaatggtgttcagatagaaagcaagttccccaaaggagattacacatgctgtgacttggttgtaaaaataaaggaatgtaagaagagtgaggaccccaccacacctgagccctccccagcagcaccctcgccagcaccccgcgatggagcagggagccctggcctgtccgaagactgttctgagtctcagcaaacgcctgcaagatctttgaccttgcaagaagcactggaagttcgtaagcctcagttcatttctcgctcacaagaacggctgaagaagcttgaacacatggtccagcagaggaaagcccagcggaaggaggacctgaggcagaagcagagcctccttcccatccgcaccagcaagaagcagttcacgattccccatcctctgagtgataacttgttcaaacccaaagaacggtgcatttcagagaaggagatgcatatgcgatctaagagaatctatgataacttgccggaagttaaaaagaaaaaagaagaacaaaggaaaagggtgatcttacaaagtaacagactccgtgccgaagtcttcaaaaagcaattactggaccagctccttcaaaggaatgcggtctaaccacaggctgccctgctgaccacactacctggacctgggaggacttcgaatgctggataagccattaaacttagcattatcttcatcatgggaaaacacttattttactttcgattttttttttccataaaggaaaacatcacttcctgaattactgacccaagccaaacagaaacaataaccctcgagaaaataggtcaacaatctgttgtggggaaaccacctccatgtaacccactggatacagtccccttaatgtttttgcttctaaattgtaccttttgcttctgatttcttctcccctgctgtttcctgcccatcagagaggcctgatacaagcaagtttgtttacatccctggggaatcttttacatcaaacttttgggatccaaatccatctccttttaaatttcaatctcagcacctgccagttatgcaaatgccaaaatgtgggtcatcatatagtatatttgaaacctttctgaacatgtacaccacccaatgctagaggctgacttggaaaccggtgggtgcaatgcccgaggctgtggaacaatcagcccatctctttgtgacctggagcagtcagagggccctcagtcaccccgccccattcctcaccagagaaaagaatccatttctatggaagctctgacgtaacttcagtgttttctacaatactcctcctgccccgccccattaaaacagttcttttgttaagaaatagcctaatggtccaactttgctgtctgttcttccaaatgtttataatacacattatttataaatatgtctgtttgggaagctaagaacaagctagtttttacaacacaaatggaaataaatgcaattatt

SEQ ID NO: 20499 - DNA, 1414 bp, Artificial Sequence
  derived and/or modified sequence
attctgagcctagccacagaggtaaactccggacatttttttctttcatgtcgccaaatacatccttgtcattaaaagacctttgaaactgagtaaaatggctttgaaacctcagtagaatatgctcaaactgtctggagaaggattacgggacagctaccacagtagaagagatcaaattgcccttaaaaatctccagtctgatgtcacagaggcaaaatctgacttcaccaaggagaccctggcatcacaaaacacaaaaatgatttcatccatagtcatctcccagatgattgatgagaataagtcaagagaaaacagggcctccttgcccctaccgtgtgccattgctcagtctcgtgcacatcacgccaagcaatctctggctaaccgcagcggagtcaacattcacagagcatttgcgttacttccgggcagattaggaatcccggcaccgtcagatgagcgaggacctgaggcagagctgccgcccaaagaggagagaccctgtgggggcccccgcagagggtttgcatccatcaccatcacggccagacgcgtgggccccccagcccgcgccctggtgtgggggactgctggggactctctgtgccccaagtgcagggctgaggacacactgttccaggcgcccccggctctggccaatggcgcccatccaggtcggcatcagagatcttttgcctgcacagagttctccagaaacagctccgtggtgcggctgaaggttcccgaggcccacactgggttgtgtgagagacgcaagtactgggtcacccatgcagacgacaaagagaccagtttttctccagacaccccactgtcaggaaagagcccgctggtgttcagttcctgtgtccacctcagggtgtctcagcagtgtccagattcaatctattacgtagacaagtctctctccgtccccattgagccacctcaaattgccagccccaaaatgcacagatccgtcctgtcgctcaacctcaattgtagttcccacagattaacagcagatggagtagatggcctagtgaacagagagccaataagcgaagccctgaagcaggagctcctggagggagaccaggacctcgtaggccagcgctggaacccaggtttacaagaaagtcacttgaaggaaaccccatcgttgaggcgggtgcatttggggaccggcgcttgtccttggagtggttcttttccattggaaaacacagaattggcaaatgtgggagctaaccaagtcactgtaagaaaaggggaaaaggaccatacaactcattgtcacgccagcgatcatgccaaccaactgtccattcacattcctggctggagttacagggcagacttattacaagaaggacaacataagcagctatcaatgttccaaagataa

SEQ ID NO: 20500 - DNA, 2107 bp, Artificial Sequence
  derived and/or modified sequence
attctgagcctagccacagaggtaaactccggacatttttttctttcatgtcgccaaatacatccttgtcattaaaagacctttgaaactgagtaaaatggctttgaaacctcagtagaatatgctcaaactgtctggagaaggattacgggacagctaccacagtagaagagatcaaattgcccttaaaaatctccagtctgatgtcacagaggcaaaatctgacttcaccaaggagaccctggcatcacaaaacacaaaaatgatttcatccatagtcatctcccagatgattgatgagaataagtcaagagaaaacagggcctccttgcccctaccgtgtgccattgctcagtctcgtgcacatcacgccaagcaatctctggctaaccgcagcggagtcaacattcacagagcatttgcgttacttccgggcagattaggaatcccggcaccgtcagatgagcgaggacctgaggcagagctgccgcccaaagaggagagaccctgtgggggcccccgcagagggtttgcatccatcaccatcacggccagacgcgtgggccccccagcccgcgccctggtgtgggggactgctggggactctctgtgccccaagtgcagggctgaggacacactgttccaggcgcccccggctctggccaatggcgcccatccaggtcggcatcagagatcttttgcctgcacagagttctccagaaacagctccgtggtgcggctgaaggttcccgaggcccacactgggttgtgtgagagacgcaagtactgggtcacccatgcagacgacaaagagaccagtttttctccagacaccccactgtcaggaaagagcccgctggtgttcagttcctgtgtccacctcagggtgtctcagcagtgtccagattcaatctattacgtagacaagtctctctccgtccccattgagccacctcaaattgccagccccaaaatgcacagatccgtcctgtcgctcaacctcaattgtagttcccacagattaacagcagatggagtagatggcctagtgaacagagagccaataagcgaagccctgaagcaggagctcctggagggagaccaggacctcgtaggccagcgctggaacccaggtttacaagaaagtcacttgaaggaaaccccatcgttgaggcgggtgcatttggggaccggcgcttgtccttggagtggttcttttccattggaaaacacagaattggcaaatgtgggagctaaccaagtcactgtaagaaaaggggaaaaggaccatacaactcattgtcacgccagcgatcatgccaaccaactgtccattcacattcctggctggagttacagggcagtacacacaaaagtattttctggaagcagcaagaggcaacaaggagaagtatgtatgactgtgtctgctcctccagtggaacagaagcccactagacatttccttcccattggggatagctctccaagcgatgactgtctgtctagagacctttctgagcccacagagagacgacatcaaagcttcctgaaacccagaatcctttttcctgggtttctttgccccttacaagatgtatgtgcatctctgcaggaagacaatggtgttcagatagaaagcaagttccccaaaggagattacacatgctgtgacttggttgtaaaaataaaggaatgtaagaagagtgaggaccccaccacacctgagccctccccagcagcaccctcgccagcaccccgcgatggagcagggagccctggcctgtccgaagactgttctgagtctcagcaaacgcctgcaagatctttgaccttgcaagaagcactggaagttcgtaagcctcagttcatttctcgctcacaagaacggctgaagaagcttgaacacatggtccagcagaggaaagcccagcggaaggaggacctgaggcagaagcagagcctccttcccatccgcaccagcaagaagcagttcacgattccccatcctctgagtgataacttgttcaaacccaaagaacggtgcatttcagagaaggagatgcatatgcgatctaagagaatctatgataacttgccggaagtt

SEQ ID NO: 20501 - DNA, 2785 bp, Artificial Sequence
  derived and/or modified sequence
attctgagcctagccacagaggtaaactccggacatttttttctttcatgtcgccaaatacatccttgtcattaaaagacctttgaaactgagtaaaatggctttgaaacctcagtagaatatgctcaaactgtctggagaaggattacgggacagctaccacagtagaagagatcaaattgcccttaaaaatctccagtctgatgtcacagaggcaaaatctgacttcaccaaggagaccctggcatcacaaaacacaaaaatgatttcatccatagtcatctcccagatgattgatgagaataagtcaagagaaaacagggcctccttgcccctaccgtgtgccattgctcagtctcgtgcacatcacgccaagcaatctctggctaaccgcagcggagtcaacattcacagagcatttgcgttacttccgggcagattaggaatcccggcaccgtcagatgagcgaggacctgaggcagagctgccgcccaaagaggagagaccctgtgggggcccccgcagagggtttgcatccatcaccatcacggccagacgcgtgggccccccagcccgcgccctggtgtgggggactgctggggactctctgtgccccaagtgcagggctgaggacacactgttccaggcgcccccggctctggccaatggcgcccatccaggtcggcatcagagatcttttgcctgcacagagttctccagaaacagctccgtggtgcggctgaaggttcccgaggcccacactgggttgtgtgagagacgcaagtactgggtcacccatgcagacgacaaagagaccagtttttctccagacaccccactgtcaggaaagagcccgctggtgttcagttcctgtgtccacctcagggtgtctcagcagtgtccagattcaatctattacgtagacaagtctctctccgtccccattgagccacctcaaattgccagccccaaaatgcacagatccgtcctgtcgctcaacctcaattgtagttcccacagattaacagcagatggagtagatggcctagtgaacagagagccaataagcgaagccctgaagcaggagctcctggagggagaccaggacctcgtaggccagcgctggaacccaggtttacaagaaagtcacttgaaggaaaccccatcgttgaggcgggtgcatttggggaccggcgcttgtccttggagtggttcttttccattggaaaacacagaattggcaaatgtgggagctaaccaagtcactgtaagaaaaggggaaaaggaccatacaactcattgtcacgccagcgatcatgccaaccaactgtccattcacattcctggctggagttacagggcaggagattacacatgctgtgacttggttgtaaaaataaaggaatgtaagaagagtgaggaccccaccacacctgagccctccccagcagcaccctcgccagcaccccgcgatggagcagggagccctggcctgtccgaagactgttctgagtctcagcaaacgcctgcaagatctttgaccttgcaagaagcactggaagttcgtaagcctcagttcatttctcgctcacaagaacggctgaagaagcttgaacacatggtccagcagaggaaagcccagcggaaggaggacctgaggcagaagcagagcctccttcccatccgcaccagcaagaagcagttcacgattccccatcctctgagtgataacttgttcaaacccaaagaacggtgcatttcagagaaggagatgcatatgcgatctaagagaatctatgataacttgccggaagttaaaaagaaaaaagaagaacaaaggaaaagggtgatcttacaaagtaacagactccgtgccgaagtcttcaaaaagcaattactggaccagctccttcaaaggaatgcggtctaaccacaggctgccctgctgaccacactacctggacctgggaggacttcgaatgctggataagccattaaacttagcattatcttcatcatgggaaaacacttattttactttcgattttttttttccataaaggaaaacatcacttcctgaattactgacccaagccaaacagaaacaataaccctcgagaaaataggtcaacaatctgttgtggggaaaccacctccatgtaacccactggatacagtccccttaatgtttttgcttctaaattgtaccttttgcttctgatttcttctcccctgctgtttcctgcccatcagagaggcctgatacaagcaagtttgtttacatccctggggaatcttttacatcaaacttttgggatccaaatccatctccttttaaatttcaatctcagcacctgccagttatgcaaatgccaaaatgtgggtcatcatatagtatatttgaaacctttctgaacatgtacaccacccaatgctagaggctgacttggaaaccggtgggtgcaatgcccgaggctgtggaacaatcagcccatctctttgtgacctggagcagtcagagggccctcagtcaccccgccccattcctcaccagagaaaagaatccatttctatggaagctctgacgtaacttcagtgttttctacaatactcctcctgccccgccccattaaaacagttcttttgttaagaaatagcctaatggtccaactttgctgtctgttcttccaaatgtttataatacacattatttataaatatgtctgtttgggaagctaagaacaagctagtttttacaacacaaatggaaataaatgcaattatt

SEQ ID NO: 20502 - DNA, 2100 bp, Artificial Sequence
  derived and/or modified sequence
atgctgaagctttcaggtgagggtctccgggacagttaccactcacgacgagatcagatagccctgaaaaatctccagagtgatgtcacagaggccaaatctgacttcaccaaggaaactcttgcctcacagaatacaaaaatgattagcagcattgttatctctcagatgatcgacgagaataaatcgagagaaaacagagcttccctccccctgccatgtgcaatcgctcagagtcgtgcccaccatgcaaaacagagtctggctaatcggtcgggtgtcaacatccaccgggcattcgctcttctgccaggccggcttggcattcccgcgccctccgacgagaggggacctgaggctgaacttccacccaaggaggagcgcccgtgcggaggccctaggcgcggcttcgcctccataaccatcacagcccgtcgagtgggaccgcccgcccgagcactggtgtggggaacagccggcgatagtttgtgtcccaagtgtcgtgccgaggatacgcttttccaggctccacctgctctggcgaacggagcccatcctggccgccaccagcgtagctttgcgtgcacggagttttccaggaactcgagtgtagtgcgcctgaaggttccggaggctcacaccgggctgtgtgagcggcgcaaatattgggtgacacatgcagacgacaaggaaacatcatttagccccgataccccgttgtctggaaagagtccactcgtgttttcttcatgtgtacatttgcgcgtgtcccagcaatgcccagacagtatctattacgtggacaaatccttgtccgttcccattgaaccacctcagatcgcttcacccaagatgcatcgcagcgtcttgtcactaaatctgaattgtagttcgcatcggctgaccgcagatggcgtcgacggactcgtcaacagggaaccgataagcgaagcgcttaagcaagaactccttgagggggatcaagacctcgtgggacagcggtggaacccaggattgcaggagagccatcttaaggaaacaccctccctcaggcgggttcacctcgggaccggcgcctgtccatggtcgggctcttttcccttggaaaataccgagctggctaatgtaggcgctaaccaggtgactgtccggaagggagagaaagatcataccactcactgccatgcatctgatcatgctaaccagctcagcatacacattcccgggtggtcataccgggcggtccacacaaaggtcttttcaggcagttcgaagcgccagcagggtgaggtctgcatgacagtgtctgctccccctgtagaacagaagcctacccgtcacttcctgccgattggggattcatcccctagcgacgattgtctgagtcgggatttgagcgaaccaaccgaacgacgacaccagtcattcctaaagcccagaatcctattcccaggattcctttgtccgctgcaggacgtgtgtgcctctttgcaggaagacaacggagtgcagatcgaaagtaaattcccgaagggcgattatacctgctgcgacctggtggtgaagattaaggagtgtaagaagagtgaggaccccaccacaccagagcctagccctgctgcaccaagccctgcaccaagggatggggccggaagcccaggcctgtctgaagactgctcagagagccaacagaccccagcccggtccctgacactgcaggaagccctcgaagtgcggaagccacagtttatctctaggtcacaagaacgattgaaaaagctggagcacatggtgcagcagcggaaagctcagcgtaaggaagacttgcgccagaaacagtctctgctcccaatcagaacctcaaaaaagcagttcactatccctcaccctcttagcgacaatctcttcaaacccaaggaacggtgcatttcagagaaagaaatgcatatgagatctaagcggatttacgacaatttgcccgaggttaagaagaaaaaagaagaacagcgaaaacgggtcatactccagagtaacagactccgggccgaggtcttcaagaaacagctgcttgaccagctactgcagaggaacgctgtctag

SEQ ID NO: 20503 - DNA, 1959 bp, Artificial Sequence
  derived and/or modified sequence
atgatcagcagcattgtaatctctcagatgatcgacgagaacaagagccgggagaatcgtgcgtcattgcctctgccgtgcgctattgctcaaagtagggctcaccatgctaaacagtcgctcgcaaaccgctctggagtgaacatccacagggcgttcgccctgcttccgggcaggctgggaataccagccccgtccgatgaacggggccccgaggccgagctccctcccaaggaagagcggccatgcggcgggccccggagaggtttcgcgtctatcacaatcactgcgcgccgggttggcccgcccgcgagggcactcgtctggggaactgctggggacagcctctgccctaagtgccgggctgaagatacacttttccaagctccacctgcactcgccaacggtgcccacccagggagacaccagaggagtttcgcttgcacagaattctcccggaattcttcagtggtgcgcctgaaggttccggaagcccataccggcctatgtgaacgtcgtaagtactgggtaactcatgccgacgataaggagactagcttttcgccagatacccccctctccgggaagagtccactcgtgtttagttcctgtgtgcatcttagggtgagccagcaatgtcccgatagcatttattacgtggacaagagtctctccgtgcctatcgaaccaccacagattgcgtcacctaagatgcaccggtcagtgctttccctcaatctgaattgtagcagtcatcgactaacagccgacggtgtggacggccttgtcaaccgggaacctatctccgaagccctgaaacaggagctcctggagggcgatcaggacctagtgggccagagatggaatccgggcctccaggagagccatcttaaggaaactcctagcctcagacgagttcatttaggaacaggcgcttgcccatggagtggctccttccctctcgaaaacacagagctagcaaatgtaggcgccaaccaggttacggtcagaaaaggggaaaaggaccatacaactcactgccatgcgagcgatcacgcaaaccagctctccattcacattcccggatggtcttacagggccgtgcatacaaaggtgttcagtggttcgtctaaacgtcaacagggggaggtgtgtatgacagtgtcagcccctcccgtggaacagaagccgactcgccactttttgccaatcggcgattctagtccttctgacgactgtctgtctcgcgacctatccgagcctaccgaaaggcgccatcagagctttctcaaaccacgaatcttattccctggtttcctctgtcccctccaggatgtatgcgcctctctgcaggaggacaatggcgtgcagatagaatcaaagtttccgaaaggcgactatacatgttgcgatttggtggtgaaaattaaggaatgcaagaagtcagaagatcccacaacgccagagccgtcaccagccgctcccagtccagcaccccgcgatggtgccgggtctcccggcctcagcgaggactgctccgagagtcaacagacgccagccaggagtctcacactccaggaagccctagaggtaaggaagccccaatttatttcacggagtcaggaaaggctgaagaaattagaacatatggtgcaacagcggaaagcccagcggaaggaggacttgcgtcagaaacagtcactgctgcccatccgaactagcaagaagcaatttactatcccacacccccttagcgacaatctgtttaagcctaaggagcgatgtatatccgagaaagaaatgcacatgagatcgaagaggatttatgataacctccccgaggtgaagaaaaaaaaggaagaacagcgcaagcgggtgatcttgcagagcaatcgtctccgagccgaagtattcaaaaagcagcttctggaccagttattgcaaaggaacgctgtctag

SEQ ID NO: 20504 - DNA, 1989 bp, Artificial Sequence
  derived and/or modified sequence
atgctgaagctatctggggagggcttgagggactcgtaccactcacgaagagaccaaatcgctctgaaaaatctgcagtctgacgttacagaggcaaagtctgatttcaccaaggaaactctcgccagtcagaataccaagatgatttcaagcatcgtgattagtcagatgattgacgagaataagtcccgcgagaatcgcgcttcacttccccttccctgcgctatcgctcagtcaagggcacaccatgccaaacaatccttagcaaatagatctggtgttaacatccatcgagcttttgccctcctaccagggaggctgggcataccagcaccatcagacgagagaggacccgaagcagagctgccccctaaggaggagagaccttgcggcggtccccggagaggctttgcttccataaccattaccgcacgcagggtgggaccccccgctagggcactggtgtggggcaccgctggagactccctgtgccctaaatgccgcgctgaggacaccttgtttcaggctcctccggccctggctaatggggcacaccccgggcggcaccagaggtccttcgcatgtaccgagttcagccgtaattccagcgtagtgcgcctgaaggtcccagaggcccatacagggttgtgcgagcgccgcaaatactgggtcacacacgccgatgataaggagacctcttttagccctgatactcctctctctggcaagtctccactagtgtttagctcatgcgtgcatttacgcgtgagccagcaatgcccagactccatatactatgtcgacaaatcgttgtccgtccccatcgagccaccacagatagcttcacccaaaatgcatcgttccgtattgtccctaaatctgaactgcagctctcaccggctcacagctgatggcgtcgacgggctggttaatcgtgagccaataagcgaagcactgaagcaggaactactggaaggagaccaggacctcgtaggacaacgttggaacccaggcctgcaggagtctcacttaaaggagacaccttccctgcgaagagtgcacctgggaactggggcctgtccctggtccgggagtttccctctggagaacactgaactcgctaacgttggggctaatcaagtaacagttcggaaaggcgagaaggatcacaccactcattgccacgcctctgatcatgcgaaccagctgtctattcatatacccgggtggtcttacagagcagtccatactaaagtgttcagtggatcctctaagagacagcagggcgaggtctgtatgaccgtgagcgcacccccagttgaacagaaaccaactaggcatttcctgcccattggagattcctctccttccgatgattgtctgtcccgggatttaagcgagccaaccgagagaagacaccagtcttttctgaagcccaggattctatttcccggcttcttgtgcccacttcaggatgtgtgtgcctcactgcaggaggacaacggtgtgcaaattgagtccaagtttcccaaaggtgattacacctgttgtgaccttgtcgtgaagataaaggaatgtaagaagtccgaggatcccaccacccctgaaccttcccctgccgctcccagcccagccccaagggatggcgccggatcccctggactgagcgaagactgctcagagagtcagcagaccccggcgcggagtcttactctccaggaggctctagaggtccggaagccccaatttataagtcgctcccaggagaggttgaaaaaactcgagcacatggtacagcagcgcaaggctcagaggaaggaggacttacgccagaagcagtcccttttacccatccggacctctaagaagcagtttacaatacctcaccccctgtccgataacctcttcaagcctaaggagagatgtataagcgaaaaggagatgcatatgaggtctaagcggatctatgataacctgccggaggtgtag

SEQ ID NO: 20505 - DNA, 1809 bp, Artificial Sequence
  derived and/or modified sequence
atgcttaagcttagcggagaagggctgagagatagttaccactccagaagggatcagattgctttaaaaaacttgcagtcagacgtgaccgaagcaaaatcagattttacaaaggaaaccctggccagtcagaacacaaagatgattagctctatcgtaatttcgcagatgatcgacgagaataagtctcgagaaaatagagccagcctgcccctcccttgcgcaattgcacagagccgcgcgcaccatgccaagcagtccctcgcgaatagatctggcgttaatatacacagagcattcgccctgcttccagggaggttgggtatccccgccccatccgacgaaaggggtcccgaggccgaactgccacccaaggaagagcggccctgcggaggcccacgcagaggattcgctagtattaccatcacagcaaggcgtgtcggtccacctgcccgtgctttagtctggggcacagcgggcgacagcctctgccctaagtgcagggcggaggacactctcttccaggcccctccagcacttgctaatggggcccaccctggcaggcaccagcgaagttttgcctgcactgagttttcaagaaattcctcagtcgtccggcttaaggtacccgaggctcacactggcctttgtgagcgtaggaagtattgggtgacacatgctgatgataaggagacttccttctctccagacacgcccctcagtggtaaatcgcctctggtcttctcgtcttgtgttcatctccgcgtttctcagcaatgccctgactccatttattacgtggataagtcgctgtcggtccccatcgaacctccccagatcgcatcacccaagatgcatcggtccgtgctgagcctgaaccttaattgtagctctcacagactgactgccgacggagtggatggcctcgttaatcgggagcctataagcgaggctttaaagcaagaactgctggaaggagaccaagacctggtcggacagcgatggaacccagggctccaagagtcccatcttaaggaaaccccttcattaagaagagtccatcttggcaccggcgcctgcccttggagcggcagtttcccactggaaaatactgagctggcaaacgtgggggccaaccaggtgacggtccggaaaggcgagaaggaccacactacccattgtcatgccagcgatcatgcaaaccaattgtccatacatattcccgggtggagctatcgggcaggagactacacatgttgcgatcttgttgtgaaaattaaagaatgcaagaagtccgaggaccctaccacaccagagccgagcccggctgctcctagcccagctccgagagacggcgccgggtctccaggcctctccgaggactgttcagagtctcagcagacacccgctaggtccctcaccctgcaggaagctctggaggtgcgcaaaccccagtttatcagccgttcacaggaaaggcttaagaaactggaacacatggtccagcaaagaaaagcgcagcggaaggaggacctgcgccaaaagcagagtctactgcccatccggacgtcaaaaaaacaattcacaatcccgcacccgctgtctgataatctgtttaaacctaaggagagatgcattagcgaaaaggagatgcatatgcgcagcaaaaggatctatgataacttgcctgaggtaaagaagaagaaagaggagcagcggaagcgagttattctgcagagtaatcgcctgcgggcagaggtcttcaagaagcaattgctggaccaactgttacagagaaacgccgtgtag

SEQ ID NO: 20506 - DNA, 2100 bp, Artificial Sequence
  derived and/or modified sequence
atgctgaagctgtctggagagggcctgcgggacagctaccacagccggcgggaccagatcgccctgaagaacctgcagagtgatgtgacagaggccaagagtgacttcaccaaggagaccctggccagccagaacaccaagatgatcagcagcatcgtcatcagccagatgattgatgagaacaagagcagagaaaatagagccagcctgcccctgccctgtgccatcgcccagagccgggcccaccacgccaagcagagcctggccaacagaagtggagtgaacatccaccgggcctttgccctgctgcccggccgcctgggcatcccagcccccagtgatgagcggggccctgaggccgagctgccccccaaggaggagcggccctgtggcggcccccggcggggctttgccagcatcaccatcacagccaggagagtgggccccccagcccgggccctggtgtggggcacagctggggacagcctgtgccccaagtgcagagctgaggacaccctcttccaggcccccccagccctggccaacggggcccaccctggccgccaccagaggagctttgcctgcacagagttcagcaggaacagctctgtggtgcggctgaaggtgcctgaggcccacacaggcctgtgtgaaagaaggaagtactgggtgacccatgctgatgacaaggagaccagcttctccccagacacccccctgagcggcaagagccccctggtgttcagcagctgtgtgcacctgcgggtgtcccagcagtgcccagacagcatctactacgtggacaagagcctgtctgtgcccatcgagcccccccagatcgccagccccaagatgcacaggtctgtgctgagcctgaacctgaactgcagcagccaccggctgacagcagatggagtggatggcctggtgaaccgggagcccatcagcgaggccctgaagcaggagctgctggagggggaccaggacctggtgggccagcgctggaaccctggcctgcaggagagccacctgaaggagacccccagcctgcggcgggtgcacctgggcactggagcctgcccctggagcggcagcttccccctggagaacacagagctggccaacgtgggcgccaaccaggtgacagtgaggaaaggagagaaggaccacaccacccactgccacgccagtgaccacgccaaccagctgagcatccacatccctggctggagctacagagctgtgcacaccaaggtgttttctggcagcagcaagaggcagcagggcgaggtgtgcatgacagtgtctgcccctcctgtggagcagaagcccaccaggcacttcctgcccatcggggacagcagccccagtgatgactgcctgagccgggacctgtctgagcccacagaaagaagacaccagagcttcctgaagccccgcatcctcttccctggcttcctgtgccccctgcaggatgtgtgtgccagcctgcaggaggacaatggagtgcagatcgagagcaagttccccaagggggactacacctgctgtgacctggtggtgaagatcaaggagtgcaagaagtctgaggaccccaccaccccagagcccagccctgctgcccccagccctgcccccagagatggagctggcagccctggcctgtctgaggactgcagcgagagccagcagaccccagcccggagcctgaccctgcaggaggccctggaggtgaggaagccccagttcatcagccgcagccaggagcggctgaagaagctggagcacatggtgcagcagaggaaggcccagaggaaagaagacctgcggcagaagcagagcctgctgcccatccgcaccagcaagaagcagttcaccatcccccaccccctgagtgacaacctcttcaagcccaaggagcgctgcatcagcgagaaggagatgcacatgaggagcaagaggatctatgacaacctgcctgaggtgaagaagaagaaggaggagcagaggaagagggtcatcctgcagagcaaccggctgcgggcagaggtgttcaagaagcagctgctggaccagctgctgcagagaaatgctgtgtag

SEQ ID NO: 20507 - DNA, 1959 bp, Artificial Sequence
  derived and/or modified sequence
atgatcagcagcatcgtcatcagccagatgattgatgagaacaagagccgggagaacagagccagcctgcccctgccctgtgccatcgcccagagccgggcccaccacgccaagcagagcctggccaacagaagtggagtgaacatccaccgggcctttgccctgctgcccggccgcctgggcatcccagcccccagtgatgagcggggccctgaggccgagctgccccccaaggaggagcggccctgtggcggcccccggcggggctttgccagcatcaccatcacagcccggcgggtgggccccccagcccgggccctggtgtggggcacagctggggacagcctgtgccccaagtgcagagctgaggacaccctcttccaggcccccccagccctggccaatggagcccaccctggccgccaccagaggagctttgcctgcacagagttcagcaggaacagctctgtggtgcggctgaaggtgcctgaggcccacacaggcctgtgtgagaggaggaagtactgggtgacccatgctgatgacaaggagaccagcttctccccagacacccccctgagcggcaagagccccctggtgttcagcagctgtgtgcacctgcgggtgtcccagcagtgcccagacagcatctactacgtggacaagagcctgtctgtgcccatcgagcccccccagatcgccagccccaagatgcacaggtctgtgctgagcctgaacctgaactgcagcagccaccggctgacagcagatggagtggatggcctggtgaaccgggagcccatcagcgaggccctgaagcaggagctgctggagggggaccaggacctggtgggccagcgctggaaccctggcctgcaggagagccacctgaaggagacccccagcctgcggcgggtgcacctgggcaccggggcctgcccctggagcggcagcttccccctggagaacacagagctggccaacgtgggcgccaaccaggtgacagtgaggaagggggagaaggaccacaccacccactgccacgccagtgaccacgccaaccagctgagcatccacatccctggctggagctacagagctgtgcacaccaaggtgttcagcggcagcagcaagaggcagcagggcgaggtgtgcatgacagtgtctgcccctcctgtggagcagaagcccaccaggcacttcctgcccatcggggacagcagccccagtgatgactgcctgagccgggacctgtctgagcccacagagcggcggcaccagagcttcctgaagccccgcatcctcttccctggcttcctgtgccccctgcaggatgtgtgtgccagcctgcaggaggacaacggggtgcagatcgagagcaagttccccaagggggactacacctgctgtgacctggtggtgaagatcaaggagtgcaagaagtctgaggaccccaccaccccagagcccagccctgctgcccccagccctgcccccagagatggagctggcagccctggcctgtctgaggactgcagcgagagccagcagaccccagcccggagcctgaccctgcaggaggccctggaggtgaggaagccccagttcatcagccgcagccaggagcggctgaagaagctggagcacatggtgcagcagaggaaggcccagaggaaggaggacctgcggcagaagcagagcctgctgcccatccgcaccagcaagaagcagttcaccatcccccaccccctgagtgacaacctcttcaagcccaaggagcgctgcatcagcgagaaggagatgcacatgaggagcaagaggatctatgacaacctgcctgaggtgaagaagaagaaggaggagcagaggaagagggtcatcctgcagagcaaccggctgcgggcagaggtgttcaagaagcagctgctggaccagctgctgcagagaaatgctgtgtag

SEQ ID NO: 20508 - DNA, 1989 bp, Artificial Sequence
  derived and/or modified sequence
atgctgaagctgtctggagagggcctgcgggacagctaccacagccggcgggaccagatcgccctgaagaacctgcagagtgatgtgacagaggccaagagtgacttcaccaaggagaccctggccagccagaacaccaagatgatcagcagcatcgtcatcagccagatgattgatgagaacaagagcagagaaaatagagccagcctgcccctgccctgtgccatcgcccagagccgggcccaccacgccaagcagagcctggccaacagaagtggagtgaacatccaccgggcctttgccctgctgcccggccgcctgggcatcccagcccccagtgatgagcggggccctgaggccgagctgccccccaaggaggagcggccctgtggcggcccccggcggggctttgccagcatcaccatcacagccaggagagtgggccccccagcccgggccctggtgtggggcacagctggggacagcctgtgccccaagtgcagagctgaggacaccctcttccaggcccccccagccctggccaacggggcccaccctggccgccaccagaggagctttgcctgcacagagttcagcaggaacagctctgtggtgcggctgaaggtgcctgaggcccacacaggcctgtgtgaaagaaggaagtactgggtgacccatgctgatgacaaggagaccagcttctccccagacacccccctgagcggcaagagccccctggtgttcagcagctgtgtgcacctgcgggtgtcccagcagtgcccagacagcatctactacgtggacaagagcctgtctgtgcccatcgagcccccccagatcgccagccccaagatgcacaggtctgtgctgagcctgaacctgaactgcagcagccaccggctgacagcagatggagtggatggcctggtgaaccgggagcccatcagcgaggccctgaagcaggagctgctggagggggaccaggacctggtgggccagcgctggaaccctggcctgcaggagagccacctgaaggagacccccagcctgcggcgggtgcacctgggcactggagcctgcccctggagcggcagcttccccctggagaacacagagctggccaacgtgggcgccaaccaggtgacagtgaggaaaggagagaaggaccacaccacccactgccacgccagtgaccacgccaaccagctgagcatccacatccctggctggagctacagagctgtgcacaccaaggtgttttctggcagcagcaagaggcagcagggcgaggtgtgcatgacagtgtctgcccctcctgtggagcagaagcccaccaggcacttcctgcccatcggggacagcagccccagtgatgactgcctgagccgggacctgtctgagcccacagaaagaagacaccagagcttcctgaagccccgcatcctcttccctggcttcctgtgccccctgcaggatgtgtgtgccagcctgcaggaggacaatggagtgcagatcgagagcaagttccccaagggggactacacctgctgtgacctggtggtgaagatcaaggagtgcaagaagtctgaggaccccaccaccccagagcccagccctgctgcccccagccctgcccccagagatggagctggcagccctggcctgtctgaggactgcagcgagagccagcagaccccagcccggagcctgaccctgcaggaggccctggaggtgaggaagccccagttcatcagccgcagccaggagcggctgaagaagctggagcacatggtgcagcagaggaaggcccagaggaaagaagacctgcggcagaagcagagcctgctgcccatccgcaccagcaagaagcagttcaccatcccccaccccctgagtgacaacctcttcaagcccaaggagcgctgcatcagcgagaaggagatgcacatgaggagcaagaggatctatgacaacctgcctgaggtgtag

SEQ ID NO: 20509 - DNA, 1809 bp, Artificial Sequence
  derived and/or modified sequence
atgctgaagctgtctggagagggcctgcgggacagctaccacagccggcgggaccagatcgccctgaagaacctgcagagtgatgtgacagaggccaagagtgacttcaccaaggagaccctggccagccagaacaccaagatgatcagcagcatcgtcatcagccagatgattgatgagaacaagagcagagaaaatagagccagcctgcccctgccctgtgccatcgcccagagccgggcccaccacgccaagcagagcctggccaacagaagtggagtgaacatccaccgggcctttgccctgctgcccggccgcctgggcatcccagcccccagtgatgagcggggccctgaggccgagctgccccccaaggaggagcggccctgtggcggcccccggcggggctttgccagcatcaccatcacagccaggagagtgggccccccagcccgggccctggtgtggggcacagctggggacagcctgtgccccaagtgcagagctgaggacaccctcttccaggcccccccagccctggccaacggggcccaccctggccgccaccagaggagctttgcctgcacagagttcagcaggaacagctctgtggtgcggctgaaggtgcctgaggcccacacaggcctgtgtgaaagaaggaagtactgggtgacccatgctgatgacaaggagaccagcttctccccagacacccccctgagcggcaagagccccctggtgttcagcagctgtgtgcacctgcgggtgtcccagcagtgcccagacagcatctactacgtggacaagagcctgtctgtgcccatcgagcccccccagatcgccagccccaagatgcacaggtctgtgctgagcctgaacctgaactgcagcagccaccggctgacagcagatggagtggatggcctggtgaaccgggagcccatcagcgaggccctgaagcaggagctgctggagggggaccaggacctggtgggccagcgctggaaccctggcctgcaggagagccacctgaaggagacccccagcctgcggcgggtgcacctgggcactggagcctgcccctggagcggcagcttccccctggagaacacagagctggccaacgtgggcgccaaccaggtgacagtgaggaaaggagagaaggaccacaccacccactgccacgccagtgaccacgccaaccagctgagcatccacatccctggctggagctaccgggccggggactacacctgctgtgacctggtggtgaagatcaaggagtgcaagaagtctgaggaccccaccaccccagagcccagccctgctgcccccagccctgcccccagagatggagctggcagccctggcctgtctgaggactgcagcgagagccagcagaccccagcccggagcctgaccctgcaggaggccctggaggtgaggaagccccagttcatcagccgcagccaggagcggctgaagaagctggagcacatggtgcagcagaggaaggcccagaggaaggaggacctgcggcagaagcagagcctgctgcccatccgcaccagcaagaagcagttcaccatcccccaccccctgagtgacaacctcttcaagcccaaggagcgctgcatcagcgagaaggagatgcacatgaggagcaagaggatctatgacaacctgcctgaggtgaagaagaagaaggaggagcagaggaagagggtcatcctgcagagcaaccggctgcgggcagaggtgttcaagaagcagctgctggaccagctgctgcagagaaatgctgtgtag

SEQ ID NO: 20510 - DNA, 2100 bp, Artificial Sequence
  derived and/or modified sequence
atgctgaagctgagcggcgagggcctgcgggacagctaccacagccgccgggaccagattgcactgaagaacttgcagtccgacgtgaccgaggcgaagtcagacttcactaaagaaaccctcgcctctcagaacacaaaaatgattagctctatcgtcatttcacaaatgatagacgagaataagtcgcgggaaaatcgcgcttcacttcccctcccttgtgctatcgctcagtctcgggcccatcacgccaaacagtcactggctaacagatcgggagtgaatattcacagggcattcgccctactgcccgggcggctcggaatacccgccccgtcagacgagcgtggtcctgaagccgagctgccaccaaaggaagagcggccctgtggaggtccaagacgaggtttcgcctccattactatcacggctcgacgcgttggaccaccggcacgggccctggtatggggtactgctggagactcactctgccctaaatgtcgggccgaggacactctgtttcaggccccgcctgcactggctaacggagcacatcccggtcggcatcagcgttcatttgcctgtactgaattttccagaaattcatcagtcgtgagactcaaagtcccagaagcccacaccgggctctgtgagaggcgcaaatactgggtaactcatgctgacgacaaggaaaccagcttttcccccgataccccgctgagcgggaaatctcccttggtcttctcatcttgtgtgcatcttagagtatcacagcagtgtcctgatagtatctactacgtagacaaatccctgagcgtccctatagaaccccctcagatcgcatcccccaagatgcatcgtagtgtcctgagcctcaaccttaactgctccagccaccgacttactgccgacggggtggatggattagtgaatcgggagcctatttcggaggccttaaaacaggagctgcttgagggtgatcaggatctcgtggggcagcggtggaatcctggtttgcaggagtcccatctgaaagagactccatccctgcggcgggtgcacctgggaaccggcgcctgtccgtggtcaggcagctttccgcttgagaacactgaactggccaacgtgggcgccaaccaggtgaccgtgcgaaaaggagagaaagaccataccacccactgccatgcttccgaccacgcaaatcagctctcaattcacatccccggctggtcataccgggccgtgcacactaaagtgttttctggatcttcaaagcgccaacagggcgaggtgtgcatgactgtcagtgctccccccgtagagcaaaagcctacgcgtcactttctgccaataggcgatagctctcccagcgacgattgtctgtccagggatctctcggagccgaccgagagaagacaccagtcttttctaaaacccaggattctttttccaggcttcctgtgccctcttcaagacgtctgtgcctcattacaagaggacaatggcgttcagattgagtctaagttccctaagggagactacacatgctgtgatttggttgtcaagattaaggagtgtaaaaaatccgaggaccccactacaccagagccttcgcccgcagctccctcccccgcccctcgcgatggcgccggctccccgggcctgtccgaggactgttctgagagtcagcagactccggcaagatcgcttaccctgcaagaggccctcgaggtgagaaagccccagttcatttccagatcccaggaaaggttgaagaaactagagcacatggttcagcagcgtaaagcccaacgaaaagaagacttacggcagaagcaaagtctcttgccaataaggacaagtaagaagcagtttaccattccccatcccctcagcgataatttgtttaaaccaaaggaacgatgcatatctgagaaggaaatgcacatgcggagcaagcgcatctatgataatttacccgaggtgaaaaagaagaaggaggaacagaggaagcgagtaatacttcagtctaatagactgcgtgcagaggtgtttaaaaagcagctgcttgaccagctgctccagagaaatgctgtgtag

SEQ ID NO: 20511 - DNA, 1959 bp, Artificial Sequence
  derived and/or modified sequence
atgatcagcagcatcgtgatcagccagatgatcgacgagaacaagtcccgcgagaatcgggcgtccctgccactcccctgcgccatcgcccaaagcagggcccatcacgccaagcagagcctggccaatcggtcgggggtgaacattcatagggccttcgccctgctgcctggtcgactgggcatcccggctcccagcgatgagcgcgggcccgaagccgaactgccccctaaggaagagagaccgtgtggcgggccgaggagaggatttgcttcgataaccataaccgcaaggagagtgggccccccggccagggcgctagtttggggcactgccggagattctctatgcccaaagtgtcgagccgaggataccctgtttcaggctccacctgccttagccaatggtgcccaccctggcagacatcagcgctctttcgcctgcaccgagttctcccggaattcttccgtcgtccgcctcaaagtgcctgaggcccacaccggcctgtgcgagcgtcgaaagtattgggtgacacatgcggatgacaaggagacgtcattcagtcctgatacgcccctaagcgggaagtctcccctcgtcttttcgtcttgtgtccatcttcgagtcagtcagcagtgccctgactccatctattacgtggataagtcccttagcgtgcccattgagcctccccagatagcatctcccaaaatgcaccgcagcgtgctgagccttaatctgaactgtagctcacatcgcctgaccgccgacggcgtggatggactcgtcaatcgggagcctataagcgaggccctgaaacaggaactgctcgagggagaccaggacctggtcgggcagagatggaaccctgggctgcaggaaagccacttgaaagagaccccaagcctaagacgggtacatctggggacaggcgcatgcccatggagcgggtcattccctctcgagaatacagaattagcaaatgtgggtgccaaccaggtcaccgttcggaagggcgagaaggaccacacaacacactgccacgccagtgatcacgccaatcaactttctatccacattccaggctggtcgtatcgcgccgtgcataccaaggtgttttctgggtcctccaagcgccagcagggggaggtgtgcatgaccgtctcagcaccgcccgtcgagcagaaacccacaaggcactttcttcctatcggggattcttctccgtccgatgattgcctgtccagagatctatctgagcccaccgaaagaagacaccaaagcttcttgaagccaaggattctattccccggattcctgtgcccactacaggatgtttgcgcatctttgcaggaagacaacggagtacagatcgaaagtaaattccctaagggcgactatacatgctgcgacttagttgtcaaaatcaaggagtgcaaaaagtccgaggatccaactacgccagaaccaagccccgccgctccttcccccgccccgcgggacggagcgggcagtccggggctttctgaggattgctccgagtctcagcagacaccggctcgctcgttaactctgcaggaagccctggaggttcggaagccacagtttatctctaggtcccaggaaaggctcaaaaaactcgaacacatggtgcagcaaaggaaagctcagagaaaggaagatctgaggcaaaaacagtccctacttccgattcgcacctccaagaaacagttcacgatcccgcaccccctatcggacaacctctttaagccaaaggagcggtgtattagtgaaaaggaaatgcacatgaggtctaagcgtatctacgacaatttgccagaggtcaagaaaaaaaaagaagagcaaagaaagagggtaattttacagagcaacaggttgagggccgaagtgtttaaaaagcagttgctggaccaactgcttcagagaaatgccgtctag

SEQ ID NO: 20512 - DNA, 1989 bp, Artificial Sequence
  derived and/or modified sequence
atgctgaagctgagcggcgagggcctgcgggacagctaccacagccggcgtgatcagattgccctgaagaaccttcagtctgatgtgactgaggcgaaatccgactttaccaaggagacgttggccagccaaaataccaaaatgataagctcaatcgttatctctcagatgattgacgaaaataagtctcgagagaatcgcgctagcctcccattgccatgtgccatcgctcaatctcgggctcaccatgccaagcaatccctcgccaatagatccggagttaacatccaccgggcctttgctctcctgccaggcagacttggaattcccgccccgtccgacgagaggggcccagaggcagaactgcccccaaaagaagaacggccttgtggagggccccgacgcggctttgccagcattaccattactgctcgacgagtcgggccacctgctcgggcgttagtgtgggggactgccggggattctctgtgtccaaaatgtagggccgaggacacgttgtttcaggctcccccagccctggccaacggtgctcatcctggccgccaccaacgctccttcgcctgtactgagttttccaggaacagctctgttgttcgtctcaaagtgccagaggcccatacgggtctatgcgagcgcagaaaatactgggtgacccatgccgacgataaggagacgagtttctctccagatacgcctctctctggaaagtctcctctcgtgttttcatcctgtgtacatcttagggtgagtcaacagtgcccagattctatttactacgtcgataaaagcctgtcagtccctatcgagcctcctcagatcgccagccctaagatgcacagaagtgtgctctctttgaacttaaactgttcatctcacagactgaccgccgatggagtcgacggcttggtgaatcgcgagccgatatccgaggctcttaagcaggagctgctggaaggagaccaggatctggtaggccagcggtggaacccaggactgcaggaaagccatctgaaggaaacaccatcacttcgccgagttcatctaggtacaggagcctgcccctggagcgggagcttccctctggagaataccgagctggccaacgtgggagccaaccaagtgacagttcgaaagggggagaaggaccatactacacactgtcacgcctcagatcatgcgaaccagttatctatacatatcccgggatggagctatcgggcagtgcacactaaagttttcagcgggagctccaagcgccagcagggagaagtttgtatgaccgtgtcagcaccacctgtcgagcagaaaccaacccgacactttttacccatcggggattcatccccaagtgatgattgtctctcaagggacttgagcgagcctaccgaacgaaggcatcagagttttcttaagccacgcatcttgtttcccgggttcttatgtcccctgcaggatgtttgtgcctctctacaggaggataacggagtccagattgagtcgaaattcccgaaaggagactacacctgctgtgacctggtcgtgaaaattaaggaatgtaagaagagcgaagaccctactactcccgagccctctcctgctgccccaagccctgctccacgcgatggcgcaggttctcccggtctatcagaagattgcagcgagtcccaacaaacccccgccagaagtctaacgttgcaagaggccttggaagtgagaaagccacaatttatctcgcgaagccaggagcggttgaagaagcttgagcacatggtgcagcagcggaaagcacaacgtaaggaagacctgaggcagaagcagagtcttctgccaatcaggacaagcaagaaacagtttacaataccgcaccctctaagcgacaatctctttaaacccaaagagcgatgcatatctgagaaggagatgcacatgcgctctaaacgtatctatgataacctccctgaggtgtag

SEQ ID NO: 20513 - DNA, 1809 bp, Artificial Sequence
  derived and/or modified sequence
atgctgaagctgagcggcgagggcctgcgggacagctaccacagccggcgcgaccagatcgctctaaagaacctgcagtccgatgtgacagaggccaagagtgatttcacgaaggagacactggcaagccagaatacgaaaatgatttccagcatcgtgatttcccagatgatcgacgagaataaaagtcgggagaatagagcttcactgcccctgccttgtgcaattgcgcagtccagagctcaccatgccaagcagtccctggccaaccgttccggcgtgaatattcaccgcgcctttgcactgcttccaggcagactgggaattcccgccccttcggatgagagaggcccggaagccgagcttccgccgaaagaggagcgaccctgtggaggcccacggaggggatttgcttcgatcacaataaccgccaggcgcgtcgggccacctgctcgcgccctggtgtggggaacagctggcgactcactctgtccaaaatgcagggctgaagacacattatttcaagcgcctcctgcactcgctaatggtgcgcacccaggtagacaccaacgtagcttcgcctgcaccgagttttctagaaactcttctgtggtaagattgaaggtgccagaagctcataccgggctgtgcgagagacgcaaatactgggtcacccatgcagacgacaaggagacaagtttctctcctgacacaccactctcaggcaagtcccccctggttttctcttcctgcgtacacttgcgtgtcagccagcagtgccctgactccatctactacgtcgacaaatctctctccgtgcctatagagcccccgcagattgcaagccccaagatgcatcgcagcgtactgtctctgaatctgaattgctctagccacaggttaacagccgatggagtcgacgggctcgttaatcgagaacctattagcgaggcactgaagcaggagctcctcgagggagatcaagacctcgtcggccagaggtggaatcctggactgcaggaatctcacttgaaagaaacccctagcctacgcagggttcatttgggcaccggggcctgtccatggtccggctcttttcctcttgagaacacagaactggccaatgtcggggcgaaccaggtgacagtcaggaaaggcgagaaggaccatacaacccactgccatgcttctgaccatgccaatcagttgagcatacatattcctggatggagctatagggcaggggactacacatgctgcgacctggtcgtgaagataaaggagtgtaaaaagtccgaggacccaactaccccggagccttcccccgctgcaccaagtcccgccccacgagatggggctgggtcccccgggctgtctgaagattgtagcgaatctcagcagacacccgctagatcattaacattacaggaagccctagaggtgaggaaaccccaattcatttcaagaagccaagaacgacttaagaaacttgagcacatggtacagcagaggaaggcccagcgcaaggaagacttgcggcagaagcagtcactcctgcctattaggacctcgaagaaacagttcaccattccgcaccctctctcagacaatctgtttaagcccaaagaaagatgcatatcagaaaaagagatgcatatgcggtccaaacgtatatatgacaacctgccagaagttaagaagaaaaaggaggagcaacggaaacgggtgatactccaatccaaccggctgagagccgaggtttttaaaaaacaactcctagatcagctccttcagagaaacgctgtgtag

SEQ ID NO: 20514 - DNA, 2100 bp, Artificial Sequence
  derived and/or modified sequence
atgttgaaactgtcaggcgaggggctgcgggattcttaccatagtcgcagggaccagatcgctttgaagaacctccagagtgatgtgaccgaagccaagagtgactttacaaaagaaacactagccagtcagaatacgaagatgatctcctccattgttatatcacagatgatcgatgagaataaaagccgggagaacagggcaagccttcctcttccctgtgctatcgcccaaagtcgtgcccatcatgcaaagcagagcctggcaaaccggagtggcgttaacatacaccgtgccttcgccctgttgcccggacgactgggcatcccagcgccatcagatgagagaggcccagaagccgagttgccacctaaggaagaaagaccttgtggagggcctcggagaggattcgcctctattactatcaccgccaggcgggtcggcccacccgcacgcgcactggtgtggggtactgcaggtgacagcctgtgtcccaagtgtagagcggaagatacactgtttcaagctcccccagcgctggccaacggtgctcatcctggcagacatcagaggagtttcgcctgtaccgagttttctcgcaactcaagcgtggtcaggttgaaggtgccagaagcccataccgggctttgcgagagacgcaagtactgggttacgcatgccgacgataaggaaacttctttttcacccgacactccactgagtggtaaaagtcctttggtgttcagctcttgcgtacatttaagggtgagtcagcaatgtcccgactccatttattacgtggataaaagccttagtgtaccaatcgagccaccacagatagcctcccccaaaatgcatcgctctgtcctatccctgaatttgaattgctcgtctcaccggctgactgctgatggggtggacggattggtcaacagagagcccattagcgaggcacttaagcaggaacttctggagggggatcaagatttagttgggcagcgttggaatccagggctgcaggagtcccacctgaaggaaacaccttcgcttcggcgagtccacctcgggaccggggcatgcccctggagtggctccttccccttagaaaacacggagctggccaacgttggtgctaaccaggttaccgtgagaaagggtgaaaaggaccatactacccactgtcacgcgagcgaccatgcaaaccagctgagcatccacatacccggatggtcctatagagccgtccacaccaaagtcttcagcggcagttccaagaggcagcaaggcgaagtgtgtatgactgtgtctgcaccccctgttgagcagaaacctacgagacactttctgccaataggcgatagtagcccatcagacgattgtctctcacgggacctctccgagccaacagagagacggcatcagtcctttttaaagcccagaatcctgtttcctggcttcctatgcccactgcaggatgtgtgtgcctcccttcaagaagacaatggcgtgcagatcgagagcaaatttcccaagggggactacacctgctgtgacttggtcgtcaagatcaaggaatgtaagaaatccgaggacccaaccacccctgagcccagccctgccgctccctccccggcaccccgtgatggcgctggtagcccagggttgtccgaagattgctcagaatctcagcaaacccccgctcgaagtctgaccttgcaggaagccctggaggtgcggaaaccacagtttatttcaagaagtcaggaacggctgaaaaaactggaacatatggtgcaacagcgcaaggcacagaggaaggaggatctccggcaaaagcagtcccttcttcccatacgtactagcaaaaagcagttcaccataccacaccccctatccgacaatctctttaagcctaaggagcggtgcatctcagagaaggaaatgcacatgaggagcaagcgcatctacgacaacctgccagaggtgaaaaagaaaaaagaggaacagcggaagcgagttattcttcagtcaaaccgcttgagggccgaagtgttcaagaaacagttgctggaccagctgctgcagcggaatgcagtgtag

SEQ ID NO: 20515 - DNA, 1959 bp, Artificial Sequence
  derived and/or modified sequence
atgattagcagtatagtgatctcccagatgatcgacgagaacaaatctcgagaaaacagagcctctctgccgctgccctgcgctattgcccagtcgcgtgcacatcacgccaaacagtccttagcaaatcggtccggcgtaaatatccatcgcgcatttgccctgttgcctgggcgtctcggaatacctgctcccagcgatgagcggggacctgaggcggaactccctccgaaggaggagcgaccatgtgggggacccagacggggtttcgcatcaataactattacagccaggcgggtgggcccaccagctcgtgccctggtgtggggcactgctggcgactcgttatgccccaaatgccgtgccgaagacaccctcttccaagcgcctcccgcattggctaacggggctcaccccggacgccaccagagatcattcgcatgcactgaatttagccgaaacagctccgtggttaggctgaaggtcccagaagcccacactggactgtgcgaacgtaggaaatactgggtgacccatgccgatgataaggaaacaagtttttcgcccgatacacctctgtcagggaagagccctcttgtgtttagctcatgcgttcacctaagggtcagtcagcaatgcccagactcaatctactatgttgataagagcctgtccgtgccaatcgaacctcctcagattgctagtcctaagatgcatcgtagcgtcctgagtctcaacctcaactgctccagccataggctgaccgctgacggggttgacggactggtaaatagggaacccatctcagaagcgcttaaacaggagctcttggaaggcgaccaggatctggtcgggcaaagatggaacccgggattgcaggaatcgcatctcaaagagactccatcattgcgtagagtccacctgggaacaggagcatgcccttggtctggatcctttcctctcgagaacacagagttggccaatgttggcgcaaatcaagttacagttcgtaagggagagaaagatcatactacccactgccacgcctccgatcacgctaaccagttgtctattcatatacctggctggtcttatagagccgtccacaccaaggtgttctccggatcctccaaaagacaacagggagaagtgtgcatgacagtgtcagccccacccgtcgaacagaaacctactcggcattttcttccaattggcgattccagcccgagcgacgactgcctgagccgggaccttagcgaaccaactgagcgcagacatcagagttttctcaagccacgcatcctatttccagggttcctatgtcctcttcaggatgtatgcgcttcacttcaggaggacaatggcgtccagatcgaatctaaatttcccaaaggggattacacatgttgtgatctcgtagtgaagatcaaagagtgtaaaaaatctgaagaccctactacccctgagcctagtccagccgctccctctcctgcccctagggatggggctggctctccaggcttgagcgaagactgttcagagagccaacagactcccgcacgtagccttactctacaagaagcgcttgaagtacgaaaaccgcagtttattagccgatcccaggaaaggctgaaaaaattggagcacatggttcaacagcggaaggcgcagcgaaaggaggatctgagacagaagcagtctttgctgcctatccgtacatctaagaaacagtttaccattccccaccctttatccgataatttgtttaagccaaaggaacgttgcatctcagaaaaagaaatgcacatgcggtcgaagcgaatttacgataacctcccggaggttaaaaagaagaaggaagagcaacgcaagagagtaattcttcagtccaatcgactgagagcagaagtgttcaagaaacagctgctcgatcagctcctgcaaaggaatgccgtatag

SEQ ID NO: 20516 - DNA, 1989 bp, Artificial Sequence
  derived and/or modified sequence
atgttaaaactgagcggggagggcctgagggactcttaccactcacggagggaccagattgcactgaagaatctccagagcgatgtcacagaagctaagtctgacttcactaaggaaaccctcgcctctcagaatacaaaaatgatcagctcaattgttatttctcagatgattgacgagaacaagagtcgggaaaacagggctagcctgcctttgccttgtgctattgcccagtctcgtgcgcaccacgcgaagcagtccctggcaaatcggagtggcgttaatatccatagggcatttgctctactgcctggcaggttggggattcctgctccatccgatgagagagggcctgaagctgagctgccccctaaggaggaacgtccctgtgggggaccccgtagagggttcgcctctattacaatcactgctagaagagtcggccctccagccagagcgttggtttggggtacggccggtgacagtttatgtcccaagtgccgagctgaagacacactgttccaagcccctccggcactcgctaacggcgctcaccccggacgccaccaaaggagcttcgcctgtacagagttcagtagaaattcttccgtcgttagactaaaggtgcctgaggcacacactggcctgtgtgagcgtaggaagtactgggtgactcatgcagatgacaaggagaccagcttttcccctgacacaccactcagtggcaaaagccctctggtgtttagcagctgtgttcacctgcgggtctctcagcagtgtccggactcgatctattacgtagataagtcactcagtgtaccaattgagccacctcagattgccagtcccaagatgcaccgctcagtcttgtccctaaacctgaactgcagctcccacagacttaccgctgacggagtggatggactagtcaatcgcgagcctatttccgaagctctgaagcaggaacttctggaaggcgaccaggacttagtaggtcaacgatggaaccctggactccaagaatctcatctgaaggagaccccttcattgcggagagtccatctgggcaccggcgcttgcccgtggagcggatcatttccattagagaatactgagctggccaacgtaggtgccaatcaggtgaccgttcggaagggcgagaaggatcacaccacccattgtcacgcttcagaccacgccaatcagctgtccatacacatccctggctggtcttaccgggctgtccacactaaggtgtttagcggcagctctaagcgccagcaaggcgaagtttgtatgactgtcagcgcgcctccagtagagcaaaagccaactaggcattttcttcctattggggattcctctccctctgacgattgcttatcccgtgatctgtctgaacctaccgaacgacggcaccagtcttttctgaagcctagaattctgttccctgggtttctgtgtccactccaggatgtgtgcgccagtcttcaggaggataacggagttcagattgaatccaaatttcccaaaggtgactacacatgttgcgacctcgttgtgaaaattaaggagtgtaagaagagcgaggatccaaccactccagaaccttcccccgctgctcccagcccagccccaagggacggtgccggatcccccggactcagcgaggactgctcagagtctcagcagacccccgcaaggtccttgacactgcaggaggccttagaggtgcggaaaccccagtttatctctcgctcacaggaacgattaaagaagctggagcacatggtgcagcaaaggaaagcccagcggaaggaagatctccggcagaagcagagtcttctccccatacgtacttctaagaagcagttcacaatcccacaccccctctccgataatctgtttaagcctaaagagagatgcattagtgaaaaggagatgcacatgcggtccaagagaatttacgacaatcttcctgaagtgtag

SEQ ID NO: 20517 - DNA, 1809 bp, Artificial Sequence
  derived and/or modified sequence
atgcttaaactttccggcgaaggtctcagagattcttaccattctaggcgtgaccaaattgcgctgaagaacttgcagagcgatgtaacagaggcgaaatctgactttaccaaagaaaccttagccagtcagaacacaaaaatgatttccagcatcgtgattagccaaatgattgatgagaataaatctagggagaaccgcgcaagcctgcctctgccttgcgccattgcccagtcgagagcgcaccatgcaaagcagtcactggcaaatcgctcaggtgtgaatatccacagagcatttgcgctcctgccagggagactgggcatccccgcaccgtccgacgaaaggggcccagaggcagagctcccgccaaaggaggagcgcccatgtggtggcccacgccgagggtttgcatctatcacgattaccgcgagacgggtcggccctccagctagggcactagtttggggtaccgccggagattccctgtgccccaaatgccgcgcagaggacacgcttttccaagcacctccagctcttgctaacggagcccatcctggtagacaccaacgaagctttgcctgcacggaattctctagaaattcttccgtcgtccggttaaaagttccagaagctcacacgggtctctgtgagcgacgaaagtactgggtgacacacgctgatgacaaggagacatctttctcccccgacacacccttgtcgggtaagagcccccttgtatttagttcctgcgttcacctcagagttagtcaacagtgtccagactcaatttattacgtggacaaaagtttgtctgtgccaatcgaacccccacagattgcgtcgcccaagatgcaccgttccgtcctatccctgaacctgaattgttcatcacatcgcctcactgctgatggggtagatggtctggtcaaccgtgagcctatcagtgaggcgctgaaacaggagctgctggagggggaccaagaccttgtcgggcagaggtggaatccgggactccaggagtctcacctgaaggagactcctagcttacggcgtgtccatctaggtaccggcgcttgtccatggagtgggtctttccccctggagaataccgaactggcaaatgtcggcgcaaatcaggtcacagttaggaaaggagaaaaagaccataccacccattgtcatgcatctgatcatgctaatcagttgagcatccatattcctggctggtcttacagggcaggggattacacttgttgtgacctggtggttaaaatcaaggagtgtaagaagtcggaagatcccaccacgcccgagccatcccccgcagccccaagtccagcgcctcgggatggtgccggaagcccaggcctttcagaagactgctcagaaagccagcagacacccgctcgctcgcttactctgcaggaggctctcgaggtccggaaacctcagttcatctctaggtcacaggaacggctgaagaagcttgagcatatggtgcaacaaagaaaagcgcaaaggaaggaagatctcaggcagaaacagtcgctcctgcccatccggacatcgaaaaaacaattcaccattccccatcccctcagcgacaacttatttaagcctaaagaaagatgcatttccgaaaaggaaatgcacatgaggagcaaacgcatctacgacaacttgcccgaagttaaaaaaaaaaaggaagaacagcgcaaaagagtcatcctgcaatctaacaggctgagagcggaggtctttaaaaagcaattgttggatcagttgcttcaacgcaacgctgtgtag

SEQ ID NO: 20518 - protein, 617 aa, Artificial Sequence
  derived and/or modified sequence
MALPQGLLTFRDVAIEFSQEEWKCLDPAQRTLYRDVMLENYRNLVSLDISSKCMMKEFSSTAQGNREVIHTGTLQRHESHHTGDFRFQEIDKDIHNLEFQWQEDERNSHEAPMTEIKKLTGSADRYDQRHAGNKPIKDQLGSSFHSHLPELHMFQTQGKIGNQVEKSINDASSISTSQRISCRPKTHISNNYGNNFRNSSLLTQKQEVHMREKSFQCNESGKAFNYSSLLRKHQIIHLGEKQYKCDVCGKVFNRKRNLVCHRRCHTGEKPYRCNECGKTFSQTYSLTCHRRLHTGEKPYKCEECDKAFSFKSNLKRHRRIHAGEKPYKCNECGKTFSQTSSLTCHRRLHTGEKPFKCNECGKTFSRKSSLTCHHRLHTGEKPYKCNECGKTFSQELTLKCHRRLHTGEKPYKCNECGKVFNKKANLARHHRLHSGEKPYKCTECVKTFSRNSALVIHKAIHIGEKRYKCNECGKTFSRISALVIHTAIHTGEKPYKCNECGKGFNRKTHLACHHRLHTGEKPYKCNECGKVFNRKTHLAHHHRLHTGDKPYKCNECGKVFNQKAHLARHHRLHTGEKPYKCNECGKVFNQKANLARHHRLHTGEKPYKFNECGKAFN

SEQ ID NO: 20519 - DNA, 1854 bp, Artificial Sequence
  derived and/or modified sequence
atggccctgccccagggcctgctgaccttcagagacgtggccatcgagttcagccaggaggagtggaagtgcctggaccccgcccagagaaccctgtacagagacgtgatgctggagaactacagaaacctggtgagcctggacatcagcagcaagtgcatgatgaaggagttcagcagcaccgcccagggcaacagagaggtgatccacaccggcaccctgcagagacacgagagccaccacaccggcgacttcagattccaggagatcgacaaggacatccacaacctggagttccagtggcaggaggacgagagaaacagccacgaggcccccatgaccgagatcaagaagctgaccggcagcgccgacagatacgaccagagacacgccggcaacaagcccatcaaggaccagctgggcagcagcttccacagccacctgcccgagctgcacatgttccagacccagggcaagatcggcaaccaggtggagaagagcatcaacgacgccagcagcatcagcaccagccagagaatcagctgcagacccaagacccacatcagcaacaactacggcaacaacttcagaaacagcagcctgctgacccagaagcaggaggtgcacatgagagagaagagcttccagtgcaacgagagcggcaaggccttcaactacagcagcctgctgagaaagcaccagatcatccacctgggcgagaagcagtacaagtgcgacgtgtgcggcaaggtgttcaacagaaagagaaacctggtgtgccacagaagatgccacaccggcgagaagccctacagatgcaacgagtgcggcaagaccttcagccagacctacagcctgacctgccacagaagactgcacaccggcgagaagccctacaagtgcgaggagtgcgacaaggccttcagcttcaagagcaacctgaagagacacagaagaatccacgccggcgagaagccctacaagtgcaacgagtgcggcaagaccttcagccagaccagcagcctgacctgccacagaagactgcacaccggcgagaagcccttcaagtgcaacgagtgcggcaagaccttcagcagaaagagcagcctgacctgccaccacagactgcacaccggcgagaagccctacaagtgcaacgagtgcggcaagaccttcagccaggagctgaccctgaagtgccacagaagactgcacaccggcgagaagccctacaagtgcaacgagtgcggcaaggtgttcaacaagaaggccaacctggccagacaccacagactgcacagcggcgagaagccctacaagtgcaccgagtgcgtgaagaccttcagcagaaacagcgccctggtgatccacaaggccatccacatcggcgagaagagatacaagtgcaacgagtgcggcaagaccttcagcagaatcagcgccctggtgatccacaccgccatccacaccggcgagaagccctacaagtgcaacgagtgcggcaagggcttcaacagaaagacccacctggcctgccaccacagactgcacaccggcgagaagccctacaagtgcaacgagtgcggcaaggtgttcaacagaaagacccacctggcccaccaccacagactgcacaccggcgacaagccctacaagtgcaacgagtgcggcaaggtgttcaaccagaaggcccacctggccagacaccacagactgcacaccggcgagaagccctacaagtgcaacgagtgcggcaaggtgttcaaccagaaggccaacctggccagacaccacagactgcacaccggcgagaagccctacaagttcaacgagtgcggcaaggccttcaactag

SEQ ID NO: 20520 - DNA, 1854 bp, Artificial Sequence
  derived and/or modified sequence
atggccttaccccaaggtctgctcaccttccgcgacgttgccatagagtttagccaggaggagtggaagtgtctggacccagcccagcgcactctatatcgagacgtgatgcttgagaactatcggaatctggtgtctttggacatatccagcaaatgcatgatgaaggagtttagcagcacagcccaaggcaaccgcgaagtaatccatactgggacccttcagcgacacgaatcccaccacaccggtgattttaggttccaggaaatcgataaggacattcacaacctagaatttcaatggcaggaggacgagagaaattctcatgaggcgcctatgaccgagattaagaaactgaccgggagcgcagacagatacgatcagagacacgcaggaaacaaaccgatcaaagatcagctgggcagctcctttcatagccacctccctgagctccacatgttccagacccaaggcaaaattggaaatcaagtggagaaatctatcaacgatgcctcctcaattagcacttcccagagaatcagctgccgtcctaagacacatatttccaacaactacggcaacaattttagaaactcgtcacttcttacccaaaaacaggaggtgcatatgcgcgagaagtccttccaatgcaacgaaagcggaaaagcattcaactacagctcactgctgaggaagcaccagatcatccacctcggcgagaaacaatacaaatgtgacgtgtgcggaaaggtgttcaaccgcaagaggaatctagtctgtcatcgcagatgccatacaggcgagaaaccctatcgctgcaatgaatgcggcaaaaccttttctcagacctacagcctcacatgccatcggagactacacacaggcgaaaaaccatacaaatgtgaggaatgtgacaaagctttttctttcaagagcaatcttaaaagacatcgccgaattcacgctggcgagaaaccttataagtgtaatgagtgcggcaaaacctttagccaaacctcatctttgacatgccatcggcggctgcacactggggaaaagccattcaaatgtaacgaatgtggtaagaccttctcccgcaagtcatcactgacatgccaccaccgacttcacacaggtgagaagccctataaatgtaacgaatgtggaaaaacttttagccaagaactgacactcaaatgccacagacgcttacacacgggggagaagccttacaagtgcaatgagtgtggcaaggttttcaataaaaaagccaatctcgctcgacaccatagacttcacagtggtgagaagccgtacaagtgcactgaatgcgtaaagacattttcacgcaatagcgctctggtaattcataaggccattcatattggggaaaaacgctataagtgcaacgagtgcggaaagaccttcagtcgcatcagcgctttagttatccatactgcaatacatacaggcgaaaagccctacaagtgcaatgaatgcggcaaggggttcaatcgaaaaacgcacctagcttgccaccaccggctgcacacgggagaaaagccttataaatgtaacgagtgcggtaaagtgttcaacagaaagacccatctggcccatcaccatagactccatactggggacaagccttacaaatgtaatgagtgcggcaaggtatttaatcaaaaggcccatctggctcgacaccaccgcctgcatacgggggagaagccttacaagtgcaatgagtgtggaaaagtgtttaaccagaaggcaaacctggctcggcatcataggctgcacaccggcgaaaaaccttataaattcaatgaatgcggaaaagccttcaactag

SEQ ID NO: 20521 - DNA, 1854 bp, Artificial Sequence
  derived and/or modified sequence
atggccctgccccagggcctgctgaccttcagagatgtggccatcgagttcagccaggaggagtggaagtgcctggaccctgcccagaggaccctgtacagagatgtgatgctggagaactacagaaacctggtgtccctggacatcagcagcaagtgcatgatgaaggagttcagcagcacagcccagggcaaccgggaggtgatccacacaggcaccctgcagagacatgagagccaccacactggagacttccgcttccaggagattgacaaggacatccacaacctggagttccagtggcaggaggatgagaggaacagccatgaggcccccatgacagagatcaagaagctgaccggcagcgctgacagatatgaccagagacatgctggcaacaagcccatcaaggaccagctgggcagcagcttccacagccacctgcctgagctgcacatgttccagacccagggcaagattggcaaccaggtggagaagagcatcaatgatgccagcagcatcagcaccagccagaggatcagctgccggcccaagacccacatcagcaacaactacggcaacaacttcaggaacagcagcctgctgacccagaagcaggaggtgcacatgagggagaagagcttccagtgcaatgaaagtggcaaggccttcaactacagcagcctgctgaggaagcaccagatcatccacctgggggagaagcagtacaagtgtgatgtgtgtgggaaggtgttcaacaggaagaggaacctggtgtgccaccggcgctgccacactggagagaagccctaccgctgcaatgaatgtgggaagaccttcagccagacctacagcctgacctgccaccggcggctgcacactggagagaagccctacaagtgtgaagaatgtgacaaggccttctccttcaagagcaacctgaagaggcaccggcgcatccacgccggggagaagccctacaagtgcaatgaatgtgggaagaccttcagccagaccagcagcctgacctgccaccggcggctgcacactggagagaagcccttcaagtgcaatgaatgtgggaagaccttcagcaggaagagcagcctgacctgccaccaccggctgcacactggagagaagccctacaagtgcaatgaatgtgggaagaccttcagccaggagctgaccctgaagtgccaccggcggctgcacactggagagaagccctacaagtgcaatgaatgtgggaaggtgttcaacaagaaggccaacctggcccggcaccaccggctgcacagcggggagaagccctacaagtgcacagaatgtgtgaagaccttcagcaggaacagcgccctggtgatccacaaggccatccacatcggggagaagcgctacaagtgcaatgaatgtgggaagaccttcagccgcatcagcgccctggtgatccacacagccatccacactggagagaagccctacaagtgcaatgaatgtgggaagggcttcaacaggaagacccacctggcctgccaccaccggctgcacactggagagaagccctacaagtgcaatgaatgtgggaaggtgttcaacaggaagacccacctggcccaccaccaccggctgcacactggagacaagccctacaagtgcaatgaatgtgggaaggtgttcaaccagaaggcccacctggcccggcaccaccggctgcacactggagagaagccctacaagtgcaatgaatgtgggaaggtgttcaaccagaaggccaacctggcccggcaccaccggctgcacactggagagaagccctacaagttcaatgaatgtgggaaggccttcaactag

SEQ ID NO: 20522 - DNA, 1854 bp, Artificial Sequence
  derived and/or modified sequence
atggccctgccccagggcctgctgaccttccgggacgtggccatcgaattctcccaggaagaatggaagtgtctggacccggcgcaaagaacactgtaccgggacgtgatgttagagaactaccgaaacttggttagtttggatattagctccaagtgcatgatgaaggaattctcatccacagcgcaaggaaatcgcgaagtaattcatacaggaaccctccagcgccatgagagccaccataccggtgatttcagatttcaagaaatcgataaagacatccacaatttagaatttcaatggcaggaagatgagcgtaacagtcacgaggctcccatgactgagataaaaaaactgaccggtagcgctgaccggtacgatcagagacacgcaggcaacaagccgatcaaagaccagctggggagcagttttcactctcatctgcctgaactgcatatgtttcagacacaggggaagatcggtaaccaagtggagaagtctatcaatgatgcctcctcaatctccacctctcaaaggatctcctgccgcccaaaaactcacatttcaaataactacggcaacaacttcaggaactcttccctgctgacccaaaagcaggaggtgcatatgagggaaaaaagctttcaatgtaacgagtcagggaaggccttcaactatagctccttactccgcaagcaccagatcatacatcttggggagaagcagtataagtgcgatgtgtgcggaaaggtattcaataggaaacgcaatctagtctgtcatcgaaggtgccatacaggcgagaagccttaccgctgtaatgagtgcggaaaaacattctctcagacatactccctgacctgtcatcgcagactccatactggtgagaagccttataaatgcgaggaatgtgacaaggcgtttagcttcaagtctaatctcaagcgacatagacgaatccatgccggggaaaagccgtataaatgtaacgagtgcgggaagacctttagtcagacctcatctctgacatgccataggcgcctgcatactggcgaaaaaccatttaagtgtaacgagtgcgggaaaaccttttcacggaagagttccctcacttgccatcaccgcttgcatacaggggagaagccatataaatgcaacgagtgcggcaaaacgtttagccaggagctgactctgaagtgtcacagacgtctgcatacaggagagaaaccatacaaatgcaacgagtgcggaaaggtgttcaacaagaaggctaacctcgctcgacaccaccggttacactccggcgaaaagccgtataaatgtacagagtgcgtgaagacatttagcagaaattccgcccttgttatccataaggccattcatattggggagaagcgatataagtgtaatgagtgtggcaaaacattctcgcgcattagtgctctggtgatccatacagcaatccatactggcgaaaaaccatacaagtgcaatgaatgtggcaaaggcttcaatcgcaaaacgcacctggcctgtcaccataggcttcatacaggtgaaaagccatacaaatgcaacgagtgcgggaaggtgttcaatcgtaagacacatctggctcaccaccaccgcctgcacacaggggataaaccgtacaagtgtaacgaatgcggcaaagtttttaatcagaaagcccatctggcccggcatcaccggttgcacaccggtgagaaaccatataaatgtaacgaatgtggtaaagtatttaaccaaaaggcaaatcttgcaaggcaccaccgattgcacacaggagaaaagccttacaagtttaatgaatgtggcaaagcctttaattag

SEQ ID NO: 20523 - DNA, 1854 bp, Artificial Sequence
  derived and/or modified sequence
atggcattgccgcaaggtttactaacctttcgtgacgtcgcaattgagttcagccaggaagaatggaaatgtctggacccggctcagagaacattgtacagggatgtgatgctcgagaattatcggaacctggtttctctggacatctcttccaagtgtatgatgaaggagttcagttcaacagctcaaggcaatagagaggtaattcatactggaactttgcagcggcacgaatcacaccatacaggagattttaggtttcaggaaattgataaagatatccacaatttagagttccagtggcaagaagacgagcgaaattctcatgaagcacccatgaccgaaataaagaaacttacaggaagcgcggacagatatgaccaacggcatgccggaaacaaacctatcaaggaccagcttggcagctctttccacagccatcttcctgagctgcatatgtttcagacgcagggaaagatcggcaatcaggtggaaaaatctattaatgacgcctctagtataagcacctcccagaggatcagctgccgccctaagacacatatatcaaacaactatggaaataatttcaggaacagctcacttcttactcagaagcaggaggtacatatgcgggagaaatccttccaatgtaatgagagtggcaaagcctttaactatagttccctgcttagaaaacaccaaatcatccacctgggcgagaagcagtataaatgcgacgtgtgcggcaaggtgtttaacaggaaaagaaacctcgtgtgccaccggagatgccacaccggggaaaagccctacagatgtaacgagtgtggcaagacctttagccaaacttactcgctgacatgccatcgccgactccatacaggcgagaagccttacaaatgcgaggaatgcgacaaagctttcagcttcaaatccaacttgaagcggcaccgccgtatccacgcaggagagaagccctacaagtgtaatgagtgtgggaagacgtttagccagacatcatccttgacgtgccaccgacgcctgcacacaggggaaaaaccgttcaaatgtaatgagtgcggcaagaccttctccaggaaaagctctctaacgtgtcaccacaggctccacaccggagagaaaccgtacaaatgcaacgagtgcgggaaaacattcagccaggagctcacattgaaatgtcacagacgccttcataccggggagaagccctataaatgtaacgagtgtggaaaggtgtttaacaaaaaggctaatctggccaggcatcaccgtcttcacagcggcgagaagccttataagtgcaccgaatgcgtcaaaaccttttctcgcaatagtgccctggttatccacaaggccatccatataggagaaaagcgttataaatgcaatgaatgtggaaagaccttctctagaattagtgcattagtaatacacaccgcaatccacaccggcgaaaaaccatacaagtgcaacgagtgcggcaaaggatttaacaggaagacacatcttgcctgtcatcataggcttcacaccggcgagaaaccttataagtgcaacgaatgtgggaaagtgttcaatagaaagacacacctggcacatcaccataggctacacaccggtgacaagccttataaatgtaatgagtgcggcaaggtcttcaaccaaaaagcccacctggccaggcatcaccggctgcacacaggcgagaagccatacaaatgcaatgaatgtggtaaggtgtttaaccagaaggcaaatttggcacgtcatcatcggcttcatacaggggagaaaccatataagttcaacgaatgtggaaaggccttcaactag

SEQ ID NO: 20524 - DNA, 6151 bp, Artificial Sequence
  derived and/or modified sequence
agattcgcgaaaacccggaagcggatcgcgtggagtgacggtcccacggcagcgcgattgacttctaaagactcttggtatgtgaggaagaaacctggaagaggaagaggaaagcaaaggagtcagggatggctcttcctcagggtctattgacattcagggatgtggccatagaattctctcaggaggagtggaaatgcctggaccctgctcagaggactctatacagggacgtgatgctggagaattataggaacctggtctccctggatatctcttccaaatgcatgatgaaggagttctcatcaacagcacaaggcaatagagaagtgatccacacagggacattgcaaagacatgaaagtcatcacactggagactttcgctttcaggaaattgataaagatattcataacttagagtttcagtggcaagaagatgaaagaaatagccatgaagcacccatgacagaaatcaaaaagttgactggtagtgcagaccgatatgatcaaaggcatgctggaaacaagcctattaaagatcagcttggatcaagctttcattcgcatctgcctgaactccacatgtttcagacccaagggaaaattggtaatcaagtggagaagtctatcaacgatgcttcctcaatttcaacatcccaaagaatttcttgtaggcccaaaacccatatttctaataactatgggaataatttccggaattcttcgttactcacacaaaaacaggaggtacacatgagagaaaagtctttccaatgtaatgagagtggcaaagcctttaattatagctcactcttaaggaaacatcaaataatccatttaggagagaaacaatataaatgtgatgtatgtggcaaggtctttaatcggaagcgaaacctagtgtgccatcgtagatgtcacactggggagaaaccttacaggtgtaatgagtgtggcaagactttcagtcagacgtattcccttacatgccatcgtagacttcatactggagagaaaccttacaaatgtgaagaatgtgacaaagctttcagtttcaaatcaaaccttaaaagacataggagaattcatgctggagaaaaaccatacaagtgtaatgaatgtggcaagacctttagtcagacgtcatcccttacatgccatcgtagacttcatactggagagaaacctttcaagtgtaatgagtgtggcaagacctttagtcggaagtcatcccttacatgccatcatagacttcatacgggagagaaaccttataagtgtaatgaatgtggcaagaccttcagtcaggagttaacccttaaatgccatcgtagacttcataccggagagaagccttacaagtgtaatgaatgtggcaaggtttttaataaaaaggcaaaccttgcacgtcatcatagacttcatagtggagagaaaccctacaagtgtactgagtgtgtcaagacgttcagtcgaaattcagcccttgtaattcataaggctattcatattggagagaaacgttacaagtgtaatgagtgtggcaagacgttcagtcgaatttcagccctcgtaattcatacggcaattcatactggagagaaaccttacaagtgtaatgaatgtggcaagggttttaatcggaaaacacaccttgcatgtcatcatagacttcatactggagagaaaccttacaagtgtaatgaatgtggcaaggtttttaatcgaaaaacacaccttgcacatcatcatagacttcatactggagataaaccttacaagtgtaatgaatgtggcaaggtttttaatcaaaaagcacaccttgcacgtcaccatagacttcatactggagagaaaccttacaagtgtaatgaatgtggcaaggtttttaatcaaaaagcaaaccttgcacgtcatcatagacttcatactggagagaaaccttacaagtttaatgagtgtggcaaagcttttaattgaaaagcaaagcttgcacatcatcatacaattcatactggaaagaaacaagtgcaatgagtgtggcaagaccttctgtcacaattcagtccttgtaattcataagaattcatactggagagaaacaagtgtaatgaacgttgcaaaatttttaatcaacaagcacaccttccacgtcatcatagacttcatagtggagagaaaccttagaaatgtgaagcatgtgacaaagtttacagtggcaaatcgagcctcaaaagacaggagaattcatactggagagaaagcttacaaaggtgaagaatatcacagagttttcagtcacaagtcaaaccttgaaagacataaaataaatcatactgcagagaaaccataaaattgtaagagttcgtgacaaggctttcgggcatgactcacacctggcacaacatcctagaatttatactggagagaaaccttacaagtgtaatgagtctggcaaagccttaatgagcagtcaacacttactcaccatcaggcaatccatggtgaaggaaacttgactaatgtaatgattgtcaccaagtcttcagtaacgctacaaccattgcaaatcattggagaacccataaggaagagagatcatacaagtgtaataatcggcaaatttttcagacatcgtccataccttgcagttcattggcgaactcatactggagacaaaccttataaatgtcatgattgaggcaaggtcttcagtcaagcttcatcctatgcaaaacataggagaattcatacaggagagaaacctcacgtgtgatgattgtggcaaagcctttacttcacgttcacacctccttagacatcagagaatgcacactggacggaaatcttacaaatgtcatcagtgtggcaaggttttcagtctgacttcactccttgcagaatatcagaaaattcattttgagataattgttccaaatgcaatgagtagagcaaaccatcaagcagtaattgacattaaagtgtttatgttaagaggattgggccaggtacagtgtctcacacctgtaatcccagcactttgggaggccaaggcgggtagatcacttgaggtcaggagtttcagatcagtctggccaacaaacatgagccacttttcccagtttgctttttgttctttaacaaaaactgatagggatttttatgggtaccgtgttgaatctaaatcacattgggttatataatcatttaacaatattaatttttccaatccatcaatatgggttatatgtctgtatatgtttttaatcatattgatgtatatttgtagatttcaaggtacaaacttctcacctttttacttttatttctatttctttaagttctctagcaaatggaagtgtttttaaattttcttttaaaattgtttattgttacaaacttctcatctttttgcttttattcctaagtatttcttactttaagttctctagcaaatggaagtgtttttaaattttcttttaaaattgtttattgttaatgtatggaaattcagctaatttttggtgctgatattgtactgtgcagatacactgaatctgtttattacttccagtagtattttggttgagtctttgtgattttctacacagaagatcatgtcatctacaaacacatataattttacttctttctttctgatttggatgggtttgatttcttttgctatttcattgctctggctaggacagccagtatttattgaatagaaggggtgagagcattcttccatcatgtgagatcctacaggaaaatcattccatgttccctgcttcgttatctactcgttggtcatttcatggatggcctttctattgttgaggtaaatttccttttctgtctattttgttcagaatttctatgatgagtggattttgaattttgtgaaatactttttctccatctattgagatgatgtggttttcatctttcattctgttcaagtggcatatcacattgatttgcttgactatgttgaaccatccttgcatcccagaaataagtggcacttgagtatctacagtcctttttacatcctcttgaatacagctttttagtacaaggggtcttcaagaagttcatggaaaaatacatattttgcatattatgagaaaattgtgtatgaatttcccagtttttgcaccaaaataaactggtacgaatctgttatgtctgaacaggtcctagtttgaggcacccagaaggataagacatgagttttaaaagagactttctctgccgggcgcagtggctcatgcctgtaatcccaacactttgggaggccaaggtgggtggatcacctgagatccagagttcgagaccagcctcaccaacatggagaaacagcatctctactaaaaatacaaaattagccaggcatggtggcaaatgcctgtaatcccagatactctggaggctgaggcaggagaatggcttgaacccgggaggcagagattgctgtgagccgagattgcaccattgcactccagcctggtcaacaagagcgaaactctgtctcaaaaaaaaaaaaaagaaaagaaaagaaaagagactctatcaaagcaatataaatcctgctaaaattgaaacaaaaaggagcatcaaatttacagtgagaccagatgcagtggctcaggcctgtaatcccagcactttcagaggccaagacaggtgggtcatgtaagcccaggtattcaagacaagcctgggcaacatggtgaaacccccttgtctacaaaaaatacaaaaattagctgggcacggtagcacatgcatgcagggccagctgctgtggagtctgtggtaggaggatagctcgagcctgggaggttgaggctgcagtgagctatgatcatgccactgcattccagcatgggtgatggagcgagatactggctcaaaaaaaaaaatacttcttgtaaagtttgggtagaggaataatgaaatcattgatgctttatgaaaagattatggagatgatgcccagaagaaataaacagtttgtaaatggataacttagtttgagttgggacaagacaatgttgaaggtgatgcatggagtggcaggcacaccatccacatcagtttttttgtttgtttttgttgttgttgtttttttgagatggtgtctcgctctgtctcccaggctggaatgcagtggtgcaatctcggctcactgcaacctctgcctcccgggttcaagtgattctcctgtctctgcctccttagtagctgggactacaggcgcgtgccaccacatcagctaatttttgtatttttagtaagacggggtttcaccatgttggcaaggctggtcttgaactcctgacctcacgatctgcccacctcagcctcccaaagtgtggagattacaggcatgagccaccatgccccttgcacatcagttttacaaaaaaatttatcttgtttgtgccacaatgaagaggactgacaggtaacagcagaaacaatagtcaggagtttgagaacaggctgattaacatggtgaaaccccgtctctactaaaaatacaaaaattagctgggtgtggtggcgggtgcttgtaatcccagttactcaggaggctgaggctgcattatcgctttaacctggggggcggaggttgcagtgagccaagatgggggcaataagagcaaaactttgtctcaaaaaaaaataaataaataaaaaataaaatatgtcaagccccttctcttcctgtctcctctcgtggtgtgtacttgactccccttctcgccagatctcacaggactttcagatttaagcaatacctggccaagaaacaaaagcaaaatcattccattcccccagtggattcagatcaaaactggtaataaaatcaggtacgactccaaaaggagacattggagaagaacgaagcggggtctataaggaattgcacgtgagatggcacacatatttatgctgtgtgagcattacaatcgcgttaccatatcaagctgaaaatgtcaccactatctggagtgttggaaatgttttattgggaatatgttttttctctgaatctgctatgaacacgtcagttgggtgggttcagtaataaatatgtgagacttttcatttcaaaataaaaaaggcaaatgatgtaa

SEQ ID NO: 20525 - protein, 483 aa, Artificial Sequence
  derived and/or modified sequence
MWLGTSGKSGLPGHCLENPLQECHPAQLEEWALKGISRPSVISQPEQKEEPWVLPLQNFEARKIPRESHTDCEHQVAKLNQDNSETAEQCGTSSERTNKDLSHTLSWGGNWEQGLELEGQHGTLPGEGQLESFSQERDLNKLLDGYVGEKPMCAECGKSFNQSSYLIRHLRTHTGERPYTCIECGKGFKQSSDLVTHRRTHTGEKPYQCKGCEKKFSDSSTLIKHQRTHTGERPYECPECGKTFGRKPHLIMHQRTHTGEKPYACLECHKSFSRSSNFITHQRTHTGVKPYRCNDCGESFSQSSDLIKHQRTHTGERPFKCPECGKGFRDSSHFVAHMSTHSGERPFSCPDCHKSFSQSSHLVTHQRTHTGERPFKCENCGKGFADSSALIKHQRIHTGERPYKCGECGKSFNQSSHFITHQRIHLGDRPYRCPECGKTFNQRSHFLTHQRTHTGEKPFHCSKCNKSFRQKAHLLCHQNTHLI

SEQ ID NO: 20526 - protein, 79 aa, Artificial Sequence
  derived and/or modified sequence
MWLGTSGKSGLPGHCLENPLQECHPAQLEEWALKGISRPSVISQPEQKEEPWVLPLQNFEARKIPRESHTDCEHQVAKL

SEQ ID NO: 20527 - DNA, 1452 bp, Artificial Sequence
  derived and/or modified sequence
atgtggctgggcaccagcggcaagagcggcctgcccggccactgcctggagaaccccctgcaggagtgccaccccgcccagctggaggagtgggccctgaagggcatcagcagacccagcgtgatcagccagcccgagcagaaggaggagccctgggtgctgcccctgcagaacttcgaggccagaaagatccccagagagagccacaccgactgcgagcaccaggtggccaagctgaaccaggacaacagcgagaccgccgagcagtgcggcaccagcagcgagagaaccaacaaggacctgagccacaccctgagctggggcggcaactgggagcagggcctggagctggagggccagcacggcaccctgcccggcgagggccagctggagagcttcagccaggagagagacctgaacaagctgctggacggctacgtgggcgagaagcccatgtgcgccgagtgcggcaagagcttcaaccagagcagctacctgatcagacacctgagaacccacaccggcgagagaccctacacctgcatcgagtgcggcaagggcttcaagcagagcagcgacctggtgacccacagaagaacccacaccggcgagaagccctaccagtgcaagggctgcgagaagaagttcagcgacagcagcaccctgatcaagcaccagagaacccacaccggcgagagaccctacgagtgccccgagtgcggcaagaccttcggcagaaagccccacctgatcatgcaccagagaacccacaccggcgagaagccctacgcctgcctggagtgccacaagagcttcagcagaagcagcaacttcatcacccaccagagaacccacaccggcgtgaagccctacagatgcaacgactgcggcgagagcttcagccagagcagcgacctgatcaagcaccagagaacccacaccggcgagagacccttcaagtgccccgagtgcggcaagggcttcagagacagcagccacttcgtggcccacatgagcacccacagcggcgagagacccttcagctgccccgactgccacaagagcttcagccagagcagccacctggtgacccaccagagaacccacaccggcgagagacccttcaagtgcgagaactgcggcaagggcttcgccgacagcagcgccctgatcaagcaccagagaatccacaccggcgagagaccctacaagtgcggcgagtgcggcaagagcttcaaccagagcagccacttcatcacccaccagagaatccacctgggcgacagaccctacagatgccccgagtgcggcaagaccttcaaccagagaagccacttcctgacccaccagagaacccacaccggcgagaagcccttccactgcagcaagtgcaacaagagcttcagacagaaggcccacctgctgtgccaccagaacacccacctgatctag

SEQ ID NO: 20528 - DNA, 240 bp, Artificial Sequence
  derived and/or modified sequence
atgtggctgggcaccagcggcaagagcggcctgcccggccactgcctggagaaccccctgcaggagtgccaccccgcccagctggaggagtgggccctgaagggcatcagcagacccagcgtgatcagccagcccgagcagaaggaggagccctgggtgctgcccctgcagaacttcgaggccagaaagatccccagagagagccacaccgactgcgagcaccaggtggccaagctgtag

SEQ ID NO: 20529 - DNA, 1452 bp, Artificial Sequence
  derived and/or modified sequence
atgtggcttgggaccagcggcaagtcaggactgcccggccactgtctggaaaatcccttacaggagtgccatcccgctcaactagaagagtgggcgctgaagggtatctcacggccttccgtcattagccagcctgagcaaaaagaggaaccttgggttctgcctttacagaattttgaagcacgaaaaattccgcgggagtcccataccgattgtgaacaccaggttgcaaaactgaatcaggataattccgagactgccgaacagtgtggaacatcttcagaacgtactaacaaggacctttcccataccttatcttggggagggaactgggagcaagggctcgaactggagggtcagcatgggaccttgccaggagaggggcagctcgaaagcttctctcaggaaagagatctcaataagctgttggatgggtacgtgggcgagaagccgatgtgtgccgagtgcggaaaatccttcaaccagagctcatatttgattcggcacctgaggactcataccggcgagcggccttacacctgtatcgaatgtggtaaggggtttaaacaaagctccgacctggtgactcatagacgcacccatacaggtgagaagccctaccagtgcaaaggctgtgagaagaagtttagtgatagtagtacactcattaagcaccaacgtacccacaccggagaacggccgtatgagtgtcccgaatgtggcaaaaccttcggtcggaagccacacttgattatgcatcagcggacccacacgggagaaaagccatacgcctgtctggagtgccacaaatccttctctcgcagttctaactttattacccaccaaaggacacatacaggagtgaaaccgtatcgctgcaatgactgcggagagtctttttcacagagctccgacctgattaagcaccagcgcacccataccggggaaaggccttttaaatgtcctgagtgtggcaagggattccgtgactccagtcacttcgtggcccatatgagcacacatagtggagaaagacccttctcctgccctgattgccacaagtccttcagccagagttcacaccttgtaacacatcaaaggacacacacaggagagcgcccctttaaatgcgaaaattgcggaaaaggcttcgctgatagcagcgcgctgatcaaacaccagcgaattcacacgggtgaacgaccatacaagtgtggagaatgcggaaagagttttaatcagtctagtcattttattactcatcagagaatccacctgggcgaccggccgtatcggtgccccgaatgcggcaagaccttcaatcagcggtcccactttttaacccaccagcgcacacacaccggagagaagcccttccactgttccaagtgcaataagtccttccgccagaaggcacatctgctatgccatcaaaatacccatctgatttag

SEQ ID NO: 20530 - DNA, 240 bp, Artificial Sequence
  derived and/or modified sequence
atgtggttaggcactagcggcaagtccggtctgcccggccattgcctagagaatccgcttcaggaatgtcaccccgctcaactcgaggagtgggctctgaaaggtatcagtcgtccttccgtaatcagccagccagagcagaaggaagagccgtgggtgcttccattgcagaacttcgaagctagaaaaattcctagggagtctcacacggattgcgagcaccaggttgctaaactctag

SEQ ID NO: 20531 - DNA, 1452 bp, Artificial Sequence
  derived and/or modified sequence
atgtggctgggcaccagcggcaagagcggcctgcccggccactgcctggagaaccccctgcaggagtgccacccagcccagctggaggagtgggccctgaagggcatcagccggcccagcgtcatcagccagcctgagcagaaggaggagccctgggtgctgcccctgcagaactttgaggccaggaagatcccccgggagagccacacagactgtgagcaccaggtggccaagctgaaccaggacaacagcgagacagctgagcagtgtggcaccagcagcgagaggaccaacaaggacctgagccacaccctgtcctggggcggcaactgggagcagggcctggagctggagggccagcacggcaccctgcctggagagggccagctggagagcttcagccaggagcgggacctgaacaagctgctggatggctacgtgggggagaagcccatgtgtgctgaatgtgggaagagcttcaaccagagcagctacctgatccgccacctgcggacccacactggagagcggccctacacctgcattgaatgtgggaagggcttcaagcagagcagtgacctggtgacccacaggaggacccacactggagagaagccctaccagtgcaagggctgtgagaagaagttcagtgacagcagcaccctcatcaagcaccagaggacccacactggagagcggccctatgagtgcccagaatgtgggaagaccttcggcaggaagccccacctgatcatgcaccagaggacccacactggagagaagccctatgcctgcctggagtgccacaagagcttcagccgcagcagcaacttcatcacccaccagaggacccacactggagtgaagccctaccgctgcaatgactgtggggagagcttcagccagagcagtgacctgatcaagcaccagaggacccacactggagagcggcccttcaagtgcccagaatgtgggaagggcttccgggacagcagccactttgtggcccacatgagcacccacagcggggagcggcccttcagctgcccagactgccacaagagcttcagccagagcagccacctggtgacccaccagaggacccacactggagagcggcccttcaagtgtgagaactgtgggaagggctttgctgacagcagcgccctgatcaagcaccagaggatccacactggagagcggccctacaagtgtggagaatgtgggaagagcttcaaccagagcagccacttcatcacccaccagaggatccacctgggggaccggccctaccgctgcccagaatgtgggaagaccttcaaccagaggagccacttcctgacccaccagaggacccacactggagagaagcccttccactgcagcaagtgcaacaagagcttccggcagaaggcccacctgctgtgccaccagaacacccacctgatctag

SEQ ID NO: 20532 - DNA, 240 bp, Artificial Sequence
  derived and/or modified sequence
atgtggctgggcaccagcggcaagagcggcctgcccggccactgcctggagaaccccctgcaggagtgccacccagcccagctggaggagtgggccctgaagggcatcagccggcccagcgtcatcagccagcctgagcagaaggaggagccctgggtgctgcccctgcagaactttgaggccaggaagatcccccgggagagccacacagactgtgagcaccaggtggccaagctgtag

SEQ ID NO: 20533 - DNA, 1452 bp, Artificial Sequence
  derived and/or modified sequence
atgtggctgggcaccagcggcaagagcggcctgcccggccactgcctggagaatcccttacaggagtgccatcccgctcagctggaggagtgggcgctgaaaggcatctcccggccatccgtgatcagccaacctgaacagaaagaagagccctgggtgctacctctgcagaattttgaagctcgaaaaatccccagggaaagtcacacagactgcgagcaccaggttgcgaagctaaatcaagataattcagagacagccgaacaatgtggaaccagttctgagcgtactaataaagacctgagtcacactctatcctggggaggtaactgggagcagggtctggagcttgagggccaacatggcacactccctggcgaaggccaactcgaatccttcagccaggaaagggatctgaataaacttctcgatggctatgtcggcgagaagcccatgtgtgcggaatgcggcaagtcgtttaatcagtcttcgtacctcatcaggcaccttcggacacatactggcgagagaccctacacctgtattgaatgcggcaagggattcaagcagtcctctgacctggttacccaccgaaggactcacacaggggaaaaaccctaccaatgtaaaggatgtgagaaaaagttcagtgactccagtacgcttatcaaacaccagcgtactcacaccggcgagaggccctatgaatgccccgaatgcggcaaaacctttggccgaaaaccacacctgatcatgcaccagcggacccataccggggagaagccctatgcgtgtttagagtgccataaatcattttctaggtctagtaacttcattacacatcagcgcacacatacaggtgtaaagccttacagatgcaatgattgcggtgaaagcttctcacagagtagtgacttaatcaagcatcagcgcacacatacaggcgagcggcccttcaaatgtccagagtgcgggaaaggatttagagatagctcgcatttcgttgcacatatgtcaacgcactcgggtgagagacccttcagttgtccagattgccacaagtcattctctcagtccagccacctggtgacccaccagagaacccacacaggcgagcgaccatttaagtgtgaaaattgtgggaaaggctttgctgactcctccgccttgataaaacaccaacgcatccacactggcgagaggccgtacaagtgcggtgaatgcggtaagtcctttaaccagagctctcacttcataacacatcagaggatccaccttggtgatagaccttatcggtgtcctgaatgcggcaagactttcaatcaacggagccacttcctgactcaccaacgtactcatacaggggaaaaaccattccactgctctaagtgtaataaatctttcagacaaaaggcacacctactatgtcatcagaatacacatctgatctag

SEQ ID NO: 20534 - DNA, 240 bp, Artificial Sequence
  derived and/or modified sequence
atgtggctgggcaccagcggcaagagcggcctgcccggccactgcttagaaaatccactgcaggagtgtcatcccgcacagctggaagagtgggctttgaaaggtatttctcggcctagcgtcataagccagccagaacagaaggaagagccttgggtgctgcccttacaaaactttgaggcaaggaagattcctcgagaaagccacacggattgcgagcaccaggtcgcaaaactgtag

SEQ ID NO: 20535 - DNA, 1452 bp, Artificial Sequence
  derived and/or modified sequence
atgtggctcggcacatctggcaagagtggtctgccgggacattgcctggaaaacccactacaggaatgccatccggcacagctcgaagaatgggccctgaagggcatttctcgcccttcggtgatctcccagcctgaacagaaggaagagccgtgggtgctgcccctccaaaacttcgaagctcgcaagattcccagggaatcccacacggactgtgaacatcaagtagcgaagctgaatcaggataacagcgagacggcagagcagtgcggcacaagcagcgagcgcactaacaaagacctctcccacaccctctcttgggggggtaattgggaacaggggcttgagctcgaggggcagcacgggactcttcctggagaggggcagctcgaaagcttctctcaggaaagagatttgaacaaactgctggatggctacgtgggggaaaaacctatgtgtgctgaatgcggcaaaagctttaaccagtctagttatcttattcgccacctgcgcacccacaccggggaaagaccatacacttgcatcgagtgcggcaagggtttcaagcaaagcagtgatctcgtcacacatagacgtactcatacaggtgagaaaccctatcagtgtaaggggtgcgagaaaaagttctctgattcctccaccctgattaaacaccaaaggacccataccggggagaggccgtacgagtgcccggaatgtggaaagacatttgggaggaagccccatctcataatgcaccaacgtactcacacaggagaaaagccctacgcctgcttagagtgccacaaatctttctccaggtccagcaatttcatcacccaccagcgtacacacacgggcgtcaagccctataggtgtaacgactgcggggagagtttttcacagagttcagaccttatcaaacaccagcgtacgcacacgggagagagaccattcaagtgtcccgagtgcggcaaggggtttagggattcgtcccactttgtggcccacatgtcgacccatagcggcgagaggcctttttcttgccctgactgtcacaaatcattctctcagtctagtcatctggtcactcaccagagaacgcatacaggtgagcggccatttaaatgcgaaaattgtgggaaggggtttgcagattcgagcgccctgatcaagcaccaacgaatacacaccggcgagagaccttacaagtgcggggagtgcggaaaatcctttaaccaatcttcccatttcattacccaccaacggattcacctgggcgaccgcccttaccggtgtccggaatgtggtaagacttttaaccaacgctcacacttccttacccaccagagaactcatacgggggagaagcctttccattgtagtaaatgtaataagagtttccgacagaaggctcatctgctatgccatcagaacactcatcttatttag

SEQ ID NO: 20536 - DNA, 240 bp, Artificial Sequence
  derived and/or modified sequence
atgtggttagggacatcaggaaagagtggcctgcccggacactgcttggagaatcccctgcaggaatgtcatcccgcacagctcgaggaatgggccctcaagggcatcagtaggccttcagtcatcagtcaaccagagcaaaaagaagagccctgggtgctgccgctgcagaattttgaagccaggaagatcccgagggaatcccacacagactgtgagcaccaggtggctaagttgtag

SEQ ID NO: 20537 - DNA, 3202 bp, Artificial Sequence
  derived and/or modified sequence
actttccggccgctggctgtcgaagccggagtcccacctgtgtccccacagccctgtcacgaatcccggtcgggttctgggaggcacagcctcggggttgcgggccgggtgcggctcggcggtggaggactcacttcctgctccatccccggctgggccctggggcggaactgatgacgcttgataatgtggctggggacttcagggaagagtgggttacctggacactgcttagagaatcctctccaggaatgccacccagcacagttagaagaatgggctctcaaaggaatttccaggcctagtgtaatctcccagccggagcagaaagaagagccatgggtcctaccactccaaaactttgaggcgaggaagatcccgagggaaagccacacagactgtgagcatcaggtggcaaagctcaatcaggacaattctgaaacagcagaacaatgtggaacatcctcagaaaggaccaataaagatctttctcatactcttagttggggaggaaactgggagcaaggcctagaattagaagggcaacatggaacccttccaggagagggccagctggagtccttttcacaggagagggatttaaacaagctcctggatggatatgtaggagagaagcctatgtgtgcagaatgcgggaaaagctttaaccagagttcctatctcataagacacctaagaacccacactggcgagaggccctatacgtgcattgagtgtgggaaaggcttcaaacagagctcagaccttgtcacccatcgcagaacacacacaggagagaagccctaccaatgcaaggggtgtgagaagaaattcagcgacagctcaacactcatcaaacatcagagaacccacacaggggagagaccctatgagtgcccagagtgtggaaagacttttgggcggaagccacacctcataatgcaccaaagaacccacacaggcgagaagccctacgcgtgcctggaatgtcacaaaagcttcagtcgaagctcaaatttcatcactcaccagaggacccacacaggggtgaagccttacaggtgtaatgactgtggggagagttttagccagagctcggatttgattaagcaccaacgaacccacacgggagaacggcccttcaaatgcccggagtgcgggaagggcttcagagatagttctcattttgtagctcacatgagcactcattcaggagagaggcctttcagttgtcctgactgccacaaaagcttcagtcagagctcacatttggtcacgcaccaaagaacacacacaggtgagagaccttttaagtgcgaaaactgtgggaaaggattcgccgacagctccgccctcattaagcaccaacgaatccacaccggagaaagaccctacaaatgtggagagtgtgggaagagcttcaatcagagctcccactttattacccatcagcgaatccacttaggagacaggccctatcgatgtcctgagtgtggcaagaccttcaatcagcgttcccatttcctcacacaccagagaacgcatacaggagaaaaacctttccactgtagtaaatgtaacaagagcttccgtcagaaagcgcatcttttatgccatcaaaacacccatttgatttaggaagtagtctttggtgttcagctgctcccttgcacattttcattgctactgtcttcaagcaccccaaatagagaaaacctgggcgtcagtggctcaatttgggccctgatctattctccctctttcttgtctatgttataacagagaggataaacttaaagggtccaaataacggtccgaatacaaaaggcattccttcagtgtgtgactgactcttagggaaatgtgagtttaatagttgatgcccgccaggcgtggtggctcacccctgtaatcccagcacttttgggaggccaaggtgggtggatcacttgaggtcaggagttgagaccagcctggtgagcatggtgaaacctcatctctactaaaaatgcaaaaattagctgggcatggtggcacgtgcctgtagtcccagctactcgggaggccgaggcagaagaatcatttgaactcagaaggtgcaggttgcagtgagttgagatcatgccactgcactccagcctgggcaacagagagagactctgtctccaaaaaaattaaaaagttgatgcctagttactaaatgagaagtgagaaaaatgtggcctagagatcacatgttcaccacctagtacagtgcctggcacaacatagatgctcaataactaaatggtcccatcattattaatgattaatagttgaggtcttatataaaggctttaatgcagtacctggcccttaaaagacactcagtacaagattggtggcttttatcagtcttattactcaattagaaatttattagtgtagtccccccgccccaaactcagaacgtgaaagaaattagattggaactagaaggtttggggttggaatacacaaattgaataaaatggaaatgcactgccagttcagtgctgtgcaggcattagtcaccagaggtctcactgccatgacaaggccaaattatcgtagaggatgtttgcggtcttgtgacttggaggctgaaagaatttcagaagctcttttaaatggcagtgtatggcagtgtatctaccagaggtttgctgtcatctgacacagagaaaatatcctacaatgaacaagccagagggacctggtagaggactataaaattgtggaagcaaaattgctgagaatgtcaaatgatattacagggatcctccctggcatttagctgaaggaagcaactcttgttttctaatttgctgggtcattggccatttagttttaggttaatataattctctgatccttttagggccatccaggttatgcactagtacattcctacattcaattgaaataaattgagggacggcaagtgtgttggaaagaacaccgacttcattgagaaggtaaagtatttgagtcctggccctgacgcttaatttggccagactttcatcttctcccagcctcaagttttacctacctcacaaggttgttgtgaggatctaaaaatacacacacacacacacacacacacacacacacacacactttgttggttaactataaatgtaatatctctatgttataattctgttgctaatgtcttttt

SEQ ID NO: 20538 - DNA, 284 bp, Artificial Sequence
  derived and/or modified sequence
ctgatgcacattgaggtctcttgctttaggaactgatgacgcttgataatgtggctggggacttcagggaagagtgggttacctggacactgcttagagaatcctctccaggaatgccacccagcacagttagaagaatgggctctcaaaggaatttccaggcctagtgtaatctcccagccggagcagaaagaagagccatgggtcctaccactccaaaactttgaggcgaggaagatcccgagggaaagccacacagactgtgagcatcaggtggcaaagct

SEQ ID NO: 20539 - protein, 219 aa, Artificial Sequence
  derived and/or modified sequence
MDPAPGVLDPRAAPPALLGTPQAEVLEDVLREQFGPLPQLAAVCRLKRLPSGGYSSTENLQLVLERRRVANAKERERIKNLNRGFARLKALVPFLPQSRKPSKVDILKGATEYIQVLSDLLEGAKDSKKQDPDEQSYSNNSSESHTSSARQLSRNITQHISCAFGLKNEEEGPWADGGSGEPAHACRHSVMSTTEIISPTRSLDRFPEVELLSHRLPQV

SEQ ID NO: 20540 - DNA, 722 bp, Artificial Sequence
  derived and/or modified sequence
ctgccatggaccccgcgcccggcgtcctagatccccgcgccgcgccgcccgcgctcctgggcaccccgcaagccgaggtgctggaggacgtgttgcgggagcagttcgggccgctgccccagctggccgctgtctgccggctcaagcggctgccctcgggcggctactcgtccactgaaaacctccagttggtgctggagcggcggcgtgtggccaacgccaaggagcgtgagcggataaaaaatctcaaccgtggttttgccagattgaaggcacttgtgccatttcttccccaaagcaggaagcccagcaaagttgatatccttaaaggtgcgactgaatatatacaggttctcagtgatcttttggaaggagccaaagactcaaagaaacaagacccagatgagcagagctatagtaacaacagttctgaatcacatacatcctcggcaagacagctgtcaagaaacatcacccaacatatcagctgtgctttcggcttgaagaatgaagaggaagggccttgggcagatggtggcagtggtgagccagcacacgcttgtcgccacagtgtgatgtctacgactgaaattatctccccaaccagaagtctggatagattcccagaagtagaactgctgagtcacagacttccacaagtatgaaaaatgaaaaggcccagggttaccttctagagacaaataaatgcagtcttgaaagtt

SEQ ID NO: 20541 - DNA, 660 bp, Artificial Sequence
  derived and/or modified sequence
atggatccggccccaggggtcttagatccgagagctgccccccctgccctgttggggacacctcaggctgaagtgctcgaggatgtcctgagggaacagttcggacccctgccacagttagccgcagtgtgcagactgaagaggctgccgtctggggggtattcctccacggaaaatctgcagctcgtgcttgaacgtcgacgtgttgccaatgccaaagaaagagaacggattaagaacttaaatcgagggttcgccagactgaaagccctagtgccattcctgccgcagtctagaaagccgtccaaagtggatatcctgaaaggagccaccgaatatatacaggtcctcagcgatttattggaaggcgctaaagactcaaagaagcaggacccggatgaacaaagctatagtaacaacagctctgagagccacactagctcagctcgtcaactctcgagaaatataacgcagcacatcagctgtgccttcggcttaaaaaatgaggaggagggtccatgggccgacggcggtagcggtgagccagcgcacgcctgccgccatagcgtcatgtcaaccacggaaataatcagccccactaggtctcttgatcgctttccagaggtcgagcttctctcacataggttgccccaggtgtag

SEQ ID NO: 20542 - DNA, 660 bp, Artificial Sequence
  derived and/or modified sequence
atggaccctgcccctggggtgctggacccccgggccgcccccccagccctgctgggcaccccccaggccgaggtgctggaggatgtgctgcgggagcagtttggccccctgccccagctggccgctgtgtgccgcctgaagaggctgcccagcggcggctacagcagcacagagaacctgcagctggtgctggagaggagaagagtggccaatgccaaggagcgggagcgcatcaagaacctgaacagaggatttgcccggctgaaggccctggtgcccttcctgccccagagcaggaagcccagcaaggtggacatcctgaagggggccacagagtacatccaggtgctgagtgacctgctggagggcgccaaggacagcaagaagcaggaccctgatgagcagagctacagcaacaacagcagcgagagccacaccagcagcgcccggcagctgagcaggaacatcacccagcacatcagctgtgccttcggcctgaagaatgaggaggagggcccctgggcagatggcggcagcggggagcccgcccacgcctgccgccacagcgtgatgagcaccacagagatcatcagccccaccaggagcctggaccgcttccctgaggtggagctgctgagccaccggctgccccaggtgtag

SEQ ID NO: 20543 - DNA, 660 bp, Artificial Sequence
  derived and/or modified sequence
atggaccccgcccccggcgtgctggacccccgggccgccccccccgccctgttaggaaccccgcaagcagaggtgttagaagatgtgctcagggagcaatttggaccccttccacaacttgctgctgtctgcaggttaaagaggcttccgtcaggtggttattcttctactgagaacctgcagttagtccttgaacggagacgggtggctaacgcaaaggaaagggaacgcattaagaaccttaacaggggcttcgccaggctaaaagcccttgtgcctttcctcccccaaagccgtaaaccgtctaaggttgacatcttgaagggcgccaccgagtatatccaggtgctgagcgatctgctcgagggagcaaaagactccaaaaagcaggacccagatgaacagtcctacagcaataattcctcagaatcccatacgtccagtgcccggcagctcagtcgtaacatcacacaacacattagttgcgccttcggcttaaagaacgaggaggagggcccatgggccgatggtgggagcggcgaacccgctcacgcctgcaggcatagcgtgatgtctactaccgaaatcattagcccgaccaggtccttagatcggttccccgaggtggagctcctcagccaccgccttccacaagtctag

SEQ ID NO: 20544 - DNA, 660 bp, Artificial Sequence
  derived and/or modified sequence
atggatccagccccaggcgtgttggatccacgggctgctccgcctgcgctgctgggtactccccaggctgaggtcctggaagacgtcctaagggagcaattcgggcctctcccgcagttggccgctgtttgccgcctgaaacggctgcccagtggcggatacagcagtactgagaaccttcagctagttctcgaacgccgtagagttgccaacgccaaagagcgggagcggataaaaaatctgaaccggggattcgctagactcaaggccctggtccctttcttaccccagagccgcaagccaagtaaggtggatatccttaagggagctacagaatacatccaagtgttgtctgacctcctggaaggcgctaaggattccaagaaacaagaccccgatgaacagtcatattcaaacaactcttcagagtctcatacctcatctgcacggcagttgagcagaaacatcacacagcacatcagctgcgcattcggtctaaagaacgaggaagagggcccttgggctgatggaggtagcggggagccagctcacgcctgtagacattctgtgatgagcactacagaaatcataagcccgaccaggtctcttgaccggttccctgaagtagagctgttgagccacaggctcccccaagtatag

SEQ ID NO: 20545 - DNA, 660 bp, Artificial Sequence
  derived and/or modified sequence
atggaccccgcccccggcgtgctggaccccagagccgccccccccgccctgctgggcaccccccaggccgaggtgctggaggacgtgctgagagagcagttcggccccctgccccagctggccgccgtgtgcagactgaagagactgcccagcggcggctacagcagcaccgagaacctgcagctggtgctggagagaagaagagtggccaacgccaaggagagagagagaatcaagaacctgaacagaggcttcgccagactgaaggccctggtgcccttcctgccccagagcagaaagcccagcaaggtggacatcctgaagggcgccaccgagtacatccaggtgctgagcgacctgctggagggcgccaaggacagcaagaagcaggaccccgacgagcagagctacagcaacaacagcagcgagagccacaccagcagcgccagacagctgagcagaaacatcacccagcacatcagctgcgccttcggcctgaagaacgaggaggagggcccctgggccgacggcggcagcggcgagcccgcccacgcctgcagacacagcgtgatgagcaccaccgagatcatcagccccaccagaagcctggacagattccccgaggtggagctgctgagccacagactgccccaggtgtag

SEQ ID NO: 20546 - protein, 160 aa, Artificial Sequence
  derived and/or modified sequence
MAPALWRACNGLMAAFFALAALVQVNDPDAEVWVVVYTIPAVLTLLVGLNPEVTGNVIWKSISAIHILFCTVWAVGLASYLLHRTQQNILHEEEGRELSGLVIITAWIILCHSSSKNPVGGRIQLAIAIVITLFPFISWVYIYINKEMRSSWPTHCKTVI

SEQ ID NO: 20547 - DNA, 483 bp, Artificial Sequence
  derived and/or modified sequence
atggcccccgccctgtggagagcctgcaacggcctgatggccgccttcttcgccctggccgccctggtgcaggtgaacgaccccgacgccgaggtgtgggtggtggtgtacaccatccccgccgtgctgaccctgctggtgggcctgaaccccgaggtgaccggcaacgtgatctggaagagcatcagcgccatccacatcctgttctgcaccgtgtgggccgtgggcctggccagctacctgctgcacagaacccagcagaacatcctgcacgaggaggagggcagagagctgagcggcctggtgatcatcaccgcctggatcatcctgtgccacagcagcagcaagaaccccgtgggcggcagaatccagctggccatcgccatcgtgatcaccctgttccccttcatcagctgggtgtacatctacatcaacaaggagatgagaagcagctggcccacccactgcaagaccgtgatctag

SEQ ID NO: 20548 - DNA, 483 bp, Artificial Sequence
  derived and/or modified sequence
atggcccccgctctatggcgtgcctgcaacgggctgatggcagcgttttttgcccttgccgccctggttcaggtcaacgatccagacgccgaggtttgggtggtcgtgtacaccattcccgccgttctgaccctgctggttggcctgaaccctgaggtgaccgggaatgtaatctggaaatcgatttcagctattcatatcttgttctgtaccgtgtgggcggtgggtttggcatcatacctcctgcaccgaacacagcagaatatactccatgaggaagaaggtcgggagctgagtgggttagtcataattactgcctggatcattctgtgccactcctcatcgaagaatcccgtcggggggcgaatccagctcgccatagccattgtaattaccctgttcccgttcatcagttgggtttatatctacatcaacaaagagatgcgaagctcgtggccaactcactgtaaaacagtcatttag

SEQ ID NO: 20549 - DNA, 483 bp, Artificial Sequence
  derived and/or modified sequence
atggccccagccctgtggagggcctgcaatggcctgatggccgccttctttgccctggccgccctggtgcaggtgaatgaccctgatgctgaggtgtgggtggtggtgtacaccatcccagctgtgctgaccctgctggtgggcctgaaccctgaggtgactggaaatgtcatctggaagagcatcagcgccatccacatcctcttctgcaccgtgtgggccgtgggcctggccagctacctgctgcacaggacccagcagaacatcctgcacgaggaggagggccgggagctgagcggcctggtgatcatcacagcctggatcatcctgtgccacagcagcagcaagaaccctgtgggcggccgcatccagctggccatcgccatcgtcatcaccctcttccccttcatctcctgggtgtacatctacatcaacaaggagatgaggagctcctggcccacccactgcaagacagtcatctag

SEQ ID NO: 20550 - DNA, 483 bp, Artificial Sequence
  derived and/or modified sequence
atggcccccgccctgtggcgggcctgcaacggcctgatggccgccttttttgctctggcagctctagttcaagtgaacgaccctgacgcagaagtgtgggtagttgtgtacactatacctgctgtattgactctgctggtaggactcaaccccgaagtcaccggtaatgtgatctggaaatccatctcggccattcacatactgttttgtaccgtgtgggcagtggggcttgcgtcttacctgcttcatcgaacccaacagaatatcttacacgaagaagaagggcgcgagctgagcggcctcgttattattaccgcctggataattctgtgtcacagctcatcaaagaatcccgtaggcggcagaattcaactcgctatcgccattgtcattactttgtttccgttcattagctgggtttacatttacataaataaagaaatgcgctccagctggcccacccactgcaagacggtcatttag

SEQ ID NO: 20551 - DNA, 483 bp, Artificial Sequence
  derived and/or modified sequence
atggctcccgctttgtggcgagcttgtaacggtctaatggccgcatttttcgccctggcagccctagtgcaggtgaatgatcccgatgccgaggtctgggtggtggtgtatacgatccctgccgtcctgactctgctagtggggttaaacccagaagtcactggcaatgtcatctggaaaagcatttctgcaatccatatcctgttctgtacagtgtgggctgtgggcctcgctagttacctcctgcaccggacccaacagaatatactccatgaggaagagggcagagaactatctggacttgtgatcattacagcctggatcattttgtgtcatagctcgagcaagaacccagttggcggaaggattcagttggcaattgcaatcgttattactcttttcccttttatttcctgggtgtatatctacatcaataaggagatgcggtcatcatggccaacacattgtaagaccgtcatatag

SEQ ID NO: 20552 - DNA, 3119 bp, Artificial Sequence
  derived and/or modified sequence
tctttccttctttctttttctttctttctctttcttcctctctcccctcccgcctgccttccttccttttttccttcttttttttctttcttctttttttttttttttgtgaggaaggtagctttagtgaaaacagggtttggagttgaacctatacgggttcaaattcgacttccgtccaccaccgagacctgcgctccctgagggactcgctttcccatccgcgaaaccaggacggcgccgcctacaccccgcggcgttcggggcgggctgaatgggtcgctgagtgggggctacacccacgcccttcgctccccgcccccgggcggagcgacggccacggcagtgtccccaaggcaccgaaaccgaggcgggggtctcggtccctccgcgcaaggaggaaggcggaccgtacgtggcaggactcaccgccccgcacgtggcaggactcaccgccccgcgccgtgttctccgagccatggcgccagcgctgtggcgggcctgcaacggactcatggccgccttcttcgcgctggcggccttggtgcaggtaaatgacccagatgcagaggtgtgggtggtggtgtacacaatccctgcagtactgaccctgcttgttggacttaaccctgaagtcacaggtaatgttatttggaaaagtatctctgcaatacacatactcttttgtacggtgtgggctgttggcttggcgtcctacctcttgcatcgtacacaacagaacatcttacatgaggaagaaggcagggagctgtctggtctggtgattattacagcatggattatcctgtgccacagttcctcaaagaatccagttggtggaagaattcaattggctattgccattgtaatcacacttttcccatttatctcatgggtctacatatatattaacaaggaaatgcggtcctcttggccaactcactgcaagacagtaatttaaataaattcaagaacttcgtttttaaaatgaatattttcaatcaattttttataaacattaggggaacaagccaggagtttatttcaggtaatttgggctaatagttttaaaactccaaataactttttaagggtgcatataattcgatgtaagattggatgggacaagtaagagatggtctgatattttccagacgactttctgcagggtcttgtgtcataatgtagtggaaaaggctagagaatagaagtttaaaaatacgagttctaacttaactttgtaactatgtaatttgggcaaatatataaacctcctggtggatatttatctataaaataggattaatgccagatctacttacttacacagtaacaaggatcaatctagataatgtaagaacactctgaagatataaagtgtttggaaagattacggagggctgcccatgattaaaatagaggggagcagggattgggtaatatactgaaatagacattcaagagagggctataccccgatctttttttttttttaagacagtcccactctattgcccaggctggagtgcagtggcatgatcatggctcactgcagtcctgacctcccggggctcaggtgatcctcctacctcagcctcccaagaagctacgactacaagtgtgcaccaccatgcccggctaaatttttttaaattttttgtagaggcagggtttcaccgtgttgtccaggctggtcttgaattcctgagttcaagcgatctgtccaccttggcctcccaaagtgctgggattacaggtgtgagccaccatgcccagtccagccctaaactaatcttatccagagctggcatagtgcagtgaactaaaggagaactctagatgaatcaaatgagcaggcatgtcttggaaagaaagggaagctggatagaataaaggaattagggaccaaacaagaaggcaatagggactataactacattctaaatgagaaataaggtcaaaatctatatacattctttataaatggatgtccaaagtaatcctagggaggagagcttttttttttttcatttccattttcatttaaaaatggatacttgattattggaaaacttacaattgtgtttggaacaacttgggtatttgaatctaattttccaattgcaaattttatgatacctaaatacagataaagtatttccaatgaaaatttagtgtccaaatgagtggggctataaatgtaaaatacactggattttaaagacatggtagaaaaagaacagaaaatattttttgtattgattacatgttgaaacaatattttggctataatgggttaaatatactattaaagttgattttatctgtttctgtttacttttatttacgtggcttacattgcatttctgttggacagtcctgtatttaagtatctagatggcaacattttacatacacaagcatcaaactctgtggtcagatactgttttttctgatctaggaaagagatctgggaaatacttcactcaaaaagaacgagtagtgccttccacaggttaggagagtgtaaatgagtctggtagtttgtctatttttattgtctttattactatagtaaatattctataaatatttgttaaaggaggtatgtgtattttgtttttgttattggcacagtggccactgaatggtgagaaattatctaagattaagacttgaatgagtaaaaagggggaaaacaaatctagttgatattaaaacagtcaaagtgaaacttaagggtcagtaaaatacacataaaggatttgagttttccagtgtatattttgcttacatatttgtggcttttataactcctttagtattaataaactactgaagtcacatgcaaaaaaaaaacagactcatttgcaaattccctgtgggctctatccattgaccaagtcatgtttacttctgtgcttaaagacagtaatgttcaagatgtgctttcatcatgtatgcctctcccatatcagactacgaaattatgtgactattcatagtctctttcgcatcttcagttaagcatataaaaggcacttttggtggaatagtcttttgaagagtattaatgaaattgaatttaagtattattattaaatttaatatttctatta

SEQ ID NO: 20553 - protein, 692 aa, Artificial Sequence
  derived and/or modified sequence
MDHHIPMHALPEEIQKMLPEEKVCKYCGVSYLILHEFKAMEEKVKAMEKEMKFYQGSVDREKRLQEKLHSLSQELEQYKIDNKSKTERIYDVGMQLKSQQNEFQKVKKQLSHLQDELKIKYRQSYIFSQRLSEYKYFWNKTLSLLTFTKRELTSIKNEVYDNYQNWTSLKGAVFLQIKSISETALTEIDILNKSLTVSQRNKVCLEKEMKNLKLLSDAAILRSQQIRTSRQQEVNLQTRCYDLQKEVLDLQCLVEALGLKLQKAVTEMDNYKEMLMNKSNEADDCQRELKKLKFESIISESQHTMLLKEKEDSLMTCQQIYKALQEELTVKEKQEEDIKRRINLAENELEITKTLLNQTREEVLTLKNERELMLISHQKSIEQLQETLRQKLLSDDNWKEKIEAELAKERAQHLVEFEEQALLFKEETKLQLDIEKEKHQDVIQKYKKEQEELQMKISDLITGATRDLRQEVTTLKEKLHKSHIRYTEESNSKEKEIENLKNLVAEFESRLKKEIDSNDSVSENLRKEMEQKSDELKRVMLAQTQLIEQFNQSQEENTFLQETVRRECEERFELTEALSQAREQLLELSKLRGSLPFSPCSLSKGSLTSPAAAVSNHGERSLARLNSEKGIQIPNLRGVSKPTTFPTSDKPKRVRSGVPILPQPHPPRGGASSANETRQRLAAILRRRRSQQ

SEQ ID NO: 20554 - DNA, 2079 bp, Artificial Sequence
  derived and/or modified sequence
atggaccaccacatccccatgcacgccctgcccgaggagatccagaagatgctgcccgaggagaaggtgtgcaagtactgcggcgtgagctacctgatcctgcacgagttcaaggccatggaggagaaggtgaaggccatggagaaggagatgaagttctaccagggcagcgtggacagagagaagagactgcaggagaagctgcacagcctgagccaggagctggagcagtacaagatcgacaacaagagcaagaccgagagaatctacgacgtgggcatgcagctgaagagccagcagaacgagttccagaaggtgaagaagcagctgagccacctgcaggacgagctgaagatcaagtacagacagagctacatcttcagccagagactgagcgagtacaagtacttctggaacaagaccctgagcctgctgaccttcaccaagagagagctgaccagcatcaagaacgaggtgtacgacaactaccagaactggaccagcctgaagggcgccgtgttcctgcagatcaagagcatcagcgagaccgccctgaccgagatcgacatcctgaacaagagcctgaccgtgagccagagaaacaaggtgtgcctggagaaggagatgaagaacctgaagctgctgagcgacgccgccatcctgagaagccagcagatcagaaccagcagacagcaggaggtgaacctgcagaccagatgctacgacctgcagaaggaggtgctggacctgcagtgcctggtggaggccctgggcctgaagctgcagaaggccgtgaccgagatggacaactacaaggagatgctgatgaacaagagcaacgaggccgacgactgccagagagagctgaagaagctgaagttcgagagcatcatcagcgagagccagcacaccatgctgctgaaggagaaggaggacagcctgatgacctgccagcagatctacaaggccctgcaggaggagctgaccgtgaaggagaagcaggaggaggacatcaagagaagaatcaacctggccgagaacgagctggagatcaccaagaccctgctgaaccagaccagagaggaggtgctgaccctgaagaacgagagagagctgatgctgatcagccaccagaagagcatcgagcagctgcaggagaccctgagacagaagctgctgagcgacgacaactggaaggagaagatcgaggccgagctggccaaggagagagcccagcacctggtggagttcgaggagcaggccctgctgttcaaggaggagaccaagctgcagctggacatcgagaaggagaagcaccaggacgtgatccagaagtacaagaaggagcaggaggagctgcagatgaagatcagcgacctgatcaccggcgccaccagagacctgagacaggaggtgaccaccctgaaggagaagctgcacaagagccacatcagatacaccgaggagagcaacagcaaggagaaggagatcgagaacctgaagaacctggtggccgagttcgagagcagactgaagaaggagatcgacagcaacgacagcgtgagcgagaacctgagaaaggagatggagcagaagagcgacgagctgaagagagtgatgctggcccagacccagctgatcgagcagttcaaccagagccaggaggagaacaccttcctgcaggagaccgtgagaagagagtgcgaggagagattcgagctgaccgaggccctgagccaggccagagagcagctgctggagctgagcaagctgagaggcagcctgcccttcagcccctgcagcctgagcaagggcagcctgaccagccccgccgccgccgtgagcaaccacggcgagagaagcctggccagactgaacagcgagaagggcatccagatccccaacctgagaggcgtgagcaagcccaccaccttccccaccagcgacaagcccaagagagtgagaagcggcgtgcccatcctgccccagccccacccccccagaggcggcgccagcagcgccaacgagaccagacagagactggccgccatcctgagaagaagaagaagccagcagtag

SEQ ID NO: 20555 - DNA, 2079 bp, Artificial Sequence
  derived and/or modified sequence
atggaccaccacatcccaatgcatgccctgcccgaagaaatccagaagatgttacccgaggaaaaagtgtgcaaatactgcggagtttcctatttaatcttacacgagtttaaagctatggaggagaaggtgaaggctatggagaaggaaatgaagttctaccagggctcggtcgaccgagagaaaagactgcaggagaaactccacagcctgtctcaagagctagaacagtacaaaattgataacaagtctaaaactgagcgcatatatgatgtcggtatgcagctcaagtcccagcagaatgagttccagaaagtgaaaaagcagctgtcccatctgcaggacgagttgaaaattaaatatcgtcaatcctatatcttttcccaaagattgtcagaatataaatatttctggaataaaaccctgtcactgttgaccttcacgaaaagggaacttacatccattaaaaatgaagtgtacgataactatcagaactggacttcactcaagggggctgtctttctccagattaagtccatttccgagacagcactcaccgaaattgatatcctgaataagagccttacagtgtcccaaagaaataaagtgtgcctagagaaggagatgaagaacctgaaactcctttcagatgccgccattctgcgtagccagcagatcagaacctcacggcagcaggaagttaatttacaaacaagatgttatgatctgcagaaagaggtcctagacctgcagtgcctggtcgaggcactagggctgaagctgcagaaggctgtcaccgaaatggacaactataaggaaatgttgatgaataaatcaaacgaggccgacgactgtcagcgcgagctgaaaaagttaaaattcgagagtatcatctccgagtctcagcacaccatgttgcttaaggaaaaggaggattccctcatgacctgtcagcagatttacaaggctttgcaagaggaactaactgtgaaagaaaagcaggaagaagacatcaagaggaggatcaatctcgccgaaaatgaacttgagatcacgaaaacgcttttaaaccaaacgagggaggaagtgctgacattaaagaacgagcgggagctaatgttaatttctcatcagaaatcaatcgagcaactacaagagaccctacggcaaaagctcctgagtgatgataactggaaggaaaagattgaagctgaactcgccaaagagcgggcccagcacctggtcgaattcgaggagcaggcactgctgttcaaagaagaaaccaagctacagctggatatcgaaaaggagaagcaccaagacgtcatccagaaatataagaaggagcaggaagaattgcagatgaagatttctgacttgattaccggggctacacgagaccttaggcaggaggttacaacactcaaagaaaaactgcacaagagtcacatcaggtatacagaggagagtaatagtaaagaaaaggagatagagaatctgaagaatctcgtcgcggaatttgagagcagactgaaaaaagaaatcgattccaatgatagtgtgtctgagaatctgcgcaaagaaatggaacaaaagagcgacgagttaaagcgagtgatgctcgcgcagacacagctgattgagcagttcaaccaatcccaggaagaaaacaccttcctccaagaaactgtgcgccgggaatgtgaggaaagatttgaactgaccgaggcccttagccaggcaagggagcagttgctggagctgtctaaattgcgcggttccttgcctttcagcccctgttctctttccaaaggaagcctgacatctcccgcggcggcggtgagtaatcacggcgaacgtagcttggcccgtttgaattccgaaaaagggatacaaatcccgaacctgaggggagtttctaagcctaccactttccctacgagcgacaaacccaaaagggtacgctcgggcgtccccattttgccccagcctcatccccctcggggaggcgccagcagcgccaatgagacacggcaacggctcgctgcgatcctgaggaggcggagatctcagcagtag

SEQ ID NO: 20556 - DNA, 2079 bp, Artificial Sequence
  derived and/or modified sequence
atggaccaccacatccccatgcacgccctgcctgaggagatccagaagatgctgcctgaggagaaggtgtgcaagtactgcggcgtgtcctacctgatcctgcacgagttcaaggccatggaggagaaggtgaaggccatggagaaggagatgaagttctaccagggctctgtggaccgggagaagaggctgcaggagaagctgcacagcctgagccaggagctggagcagtacaagattgacaacaagagcaagacagagcgcatctatgatgtgggcatgcagctgaagagccagcagaatgagttccagaaggtgaagaagcagctgagccacctgcaggatgagctgaagatcaagtaccggcagagctacatcttcagccagaggctgtctgagtacaagtacttctggaacaagaccctgagcctgctgaccttcaccaagcgggagctgaccagcatcaagaatgaggtgtatgacaactaccagaactggaccagcctgaagggagctgtgttcctgcagatcaagagcatcagcgagacagccctgacagaaattgacatcctgaacaagagcctgactgtgtcccagaggaacaaggtgtgcctggagaaggagatgaagaacctgaagctgctgagtgatgctgccatcctgcggagccagcagatccgcaccagccggcagcaggaggtgaacctgcagacccgctgctatgacctgcagaaggaggtgctggacctgcagtgcctggtggaggccctgggcctgaagctgcagaaggctgtgacagagatggacaactacaaggagatgctgatgaacaagagcaatgaagcagatgactgccagcgggagctgaagaagctgaagtttgagagcatcatcagcgagagccagcacaccatgctgctgaaggagaaggaggacagcctgatgacctgccagcagatctacaaggccctgcaggaggagctgactgtgaaggagaagcaggaggaggacatcaagaggcgcatcaacctggccgagaatgagctggagatcaccaagaccctgctgaaccagacccgggaggaggtgctgaccctgaagaatgaaagagagctgatgctgatcagccaccagaagagcattgagcagctgcaggagaccctgcggcagaagctgctgagtgatgacaactggaaggagaagattgaggccgagctggccaaggagcgggcccagcacctggtggagtttgaggagcaggccctgctcttcaaggaggagaccaagctgcagctggacatcgagaaggagaagcaccaggatgtgatccagaagtacaagaaggagcaggaggagctgcagatgaagatcagtgacctgatcaccggggccacccgggacctgcggcaggaggtgaccaccctgaaggagaagctgcacaagagccacatccgctacacagaggagagcaacagcaaggagaaggagattgagaacctgaagaacctggtggccgagtttgagagccggctgaagaaggagattgacagcaatgacagcgtgtctgagaacctgaggaaggagatggagcagaagagtgatgagctgaagagggtgatgctggcccagacccagctgattgagcagttcaaccagagccaggaggagaacaccttcctgcaggagaccgtgagaagagaatgtgaggagagatttgagctgacagaggccctgagccaggcccgggagcagctgctggagctgagcaagctgcggggcagcctgcccttcagcccctgcagcctgagcaagggcagcctgaccagccctgctgctgctgtgagcaaccacggggagaggagcctggcccggctgaacagcgagaagggcatccagatccccaacctgcggggcgtgtccaagcccaccaccttccccaccagtgacaagcccaagagggtgcgcagcggcgtgcccatcctgccccagccccaccccccccggggcggggccagcagcgccaatgagacccggcagaggctggccgccatcctgcggcggcggcgcagccagcagtag

SEQ ID NO: 20557 - DNA, 2079 bp, Artificial Sequence
  derived and/or modified sequence
atggaccaccacatccccatgcacgccctgcccgaggagatccagaagatgctacccgaggagaaggtttgtaagtattgcggagtctcctatctgatcctccacgagttcaaagccatggaagaaaaagtgaaggcaatggaaaaagaaatgaagttttaccaggggtcagtcgacagggaaaaacgcctccaggaaaagctacattcactctctcaggaactagaacagtataaaatagataacaaaagcaagaccgagagaatctacgacgtgggaatgcagctcaagtcacaacagaacgagtttcagaaggtcaaaaaacagttgtcccatctccaggatgaacttaaaatcaagtatcgacagtcgtatatattttcccaaagactcagtgagtataagtatttttggaacaagacgctctccctgttgacattcacaaaaagggaacttacctctattaagaatgaagtgtacgacaattatcagaactggacatcccttaagggtgccgtgttcctccagatcaagagtattagtgagactgcgttgaccgaaatagacatcctcaacaagagtcttacagtgtctcagaggaataaagtgtgccttgagaaagagatgaagaacctgaagctgctgtctgatgccgccatcctgcggagccagcagattcggactagtcgacagcaggaagtgaatctgcaaactcgatgttatgaccttcaaaaagaggtactagatctgcagtgtctcgtcgaagcgttaggactaaagctgcagaaggctgtcactgagatggataactataaagagatgttgatgaataaatccaacgaggccgatgattgccagagggaactgaagaagctgaaattcgagtccattatcagcgagtctcagcataccatgctcctaaaggagaaggaggatagcctgatgacctgccagcaaatatacaaagccttgcaggaggagttgaccgtgaaggagaagcaggaagaggatattaagcgacgcatcaatctggcagaaaatgaactggagataacaaagacccttctaaatcagacccgcgaggaggtgctgacactgaagaatgaacgcgaacttatgctcatctcacatcagaagtctatcgagcagctgcaggagacactgcgccaaaagttgctcagcgatgataactggaaggagaaaattgaagccgagcttgccaaagagcgcgcccagcatctggtggaatttgaggagcaagcactgcttttcaaagaggaaacaaagctgcagctggacatcgagaaggaaaaacatcaggacgtgattcagaaatataagaaagagcaggaggagcttcagatgaagatttccgatctaatcacaggtgccacaagggacctgaggcaagaggtaacaacactcaaagaaaaactccacaagagtcacatcaggtacacggaagagtctaactcaaaagaaaaggaaatcgagaacctgaagaatcttgttgctgaattcgaaagtaggctaaagaaagagattgattcaaatgactctgtctccgagaatctacggaaggagatggagcagaaatccgacgagctaaagcgcgttatgctggcacagacacaactaattgagcaattcaaccagtcccaagaggaaaacacatttctccaggaaaccgttaggcgagaatgtgaggagagatttgagctgacagaggcgctttcccaggctagagaacagctgctcgagttgagcaagctgcgtggaagcctgcccttttcgccgtgctctctgagcaagggttccctcacttctccagctgctgccgtttcaaatcacggcgagagatccctggcacgattgaattccgagaaaggcatccagattcccaacctgaggggagttagcaagcctaccacattccccaccagcgataagccaaaaagagtcagaagtggtgtgccaattctcccccagccacacccacctcgggggggggcttcctccgcgaatgagacacgtcagcggctggcagccatcctgcgtcggaggcggtctcaacaatag

SEQ ID NO: 20558 - DNA, 2079 bp, Artificial Sequence
  derived and/or modified sequence
atggaccaccacatcccaatgcacgctctccccgaggagatacagaagatgctccctgaggagaaagtctgcaagtactgtggggtcagctatctcatattgcacgaattcaaagcaatggaggagaaggtgaaggccatggagaaggagatgaagttctatcaggggtctgtggatcgggaaaagaggctccaggaaaagttgcacagtttaagccaggaactcgagcagtacaagattgataataaatccaagactgagcgaatctatgatgtcggcatgcaactgaagtctcagcaaaacgaatttcaaaaagttaagaaacagctcagtcacctgcaggatgaactgaaaataaagtacagacagagttatatcttcagccagaggctgagcgaatacaagtacttctggaacaagacccttagcctactgactttcacgaagcgggagctaacttcaattaagaatgaagtctacgataattaccagaattggactagtctgaaaggagccgtgttcctgcagattaagtcaatctctgaaaccgccctcaccgaaatcgacattctgaataaatcactgacagtgtcacagcgcaacaaggtatgtctagaaaaggagatgaaaaatttgaaactgttgtcagatgcagctattctgcgatcacagcagatcaggacttcccgtcaacaggaggtaaaccttcagaccagatgctacgatctgcagaaagaagtcttagatctccagtgtcttgtggaggctctcggattgaaactccaaaaggccgtgacagagatggacaattataaagagatgctaatgaataagtccaacgaggccgacgattgtcaacgagagttgaagaagttaaaatttgagtccattatctctgaaagccagcacacaatgctgctgaaagaaaaagaagacagccttatgacttgccagcaaatatataaagccctgcaggaggagctgacggtcaaggagaagcaggaggaggatataaaacggagaataaacctggcggaaaatgaactcgagattacaaagacattgctgaaccaaaccagagaagaagtgctgactctgaagaatgagagggaactgatgctaatttcccatcagaaaagcattgagcaactccaggaaactctccgtcaaaagctgctgtccgacgataattggaaggagaagattgaggcagaacttgctaaagaacgtgctcagcaccttgtagagtttgaggagcaggctctgctgtttaaagaagagaccaaactgcaacttgatatagagaaggaaaaacatcaggatgtgatccagaaatacaaaaaagaacaggaggagctccaaatgaagatttctgatctgataacaggggcaacccgcgacctcagacaagaagtgaccacactgaaggagaagcttcataagtcacatataaggtacacagaggagtcaaacagcaaagagaaggaaatcgaaaatctgaaaaacttggttgccgagtttgaatctaggctcaaaaaggaaatcgactctaacgactcggtatcggaaaatctacgcaaggaaatggaacagaagtctgacgagctgaagcgcgtgatgctggcgcagacacagctgatcgaacagttcaaccagtctcaggaggaaaacacctttcttcaagaaactgtgagaagagaatgcgaggagcgcttcgaattgaccgaggctctcagccaggctcgagaacagctgctagagcttagcaagctccggggatcgctgcctttttcaccatgttccctatcaaaaggaagtttgactagtcccgcagctgcggtcagcaatcacggagagcgtagcctggcacgactgaattcagaaaagggaattcagatcccaaaccttagaggggtaagtaaacctacgacctttcccacaagcgacaaacccaaaagagtgcgctccggggtccctatcctgccacagccgcacccacccagaggcggtgcttctagtgccaacgagacccgccagcggttagctgccatccttcggaggcggagaagccagcagtag

SEQ ID NO: 20559 - protein, 250 aa, Artificial Sequence
  derived and/or modified sequence
MAEGGASKGGGEEPGKLPEPAEEESQVLRGTGHCKWFNVRMGFGFISMINREGSPLDIPVDVFVHQSKLFMEGFRSLKEGEPVEFTFKKSSKGLESIRVTGPGGSPCLGSERRPKGKTLQKRKPKGDRCYNCGGLDHHAKECSLPPQPKKCHYCQSIMHMVANCPHKNVAQPPASSQGRQEAESQPCTSTLPREVGGGHGCTSPPFPQEARAEISERSGRSPQEASSTKSSIAPEEQSKKGPSVQKRKKT

SEQ ID NO: 20560 - DNA, 753 bp, Artificial Sequence
  derived and/or modified sequence
atggctgaaggcggtgccagcaagggagggggtgaagagccgggcaagctccctgaacctgctgaggaagagagtcaggtgttgagagggacaggacactgtaaatggtttaacgttaggatgggatttggatttatctccatgattaatagagagggcagtccccttgatatcccagttgacgtctttgtccaccagagtaaactgtttatggaaggtttcaggagccttaaggaaggcgagccggtggagttcaccttcaagaagtcaagcaaggggctagagtcaatccgggtgacggggcctgggggtagcccatgtttgggaagtgaaagacgcccaaaagggaagactctgcagaagaggaaaccaaaaggcgatcgttgttacaactgcgggggcctggaccaccatgcaaaagaatgttctcttccgcctcagccaaaaaagtgtcattactgccagtccatcatgcatatggtggctaattgtccccacaaaaacgtggctcagcctccggcgtcctctcaaggccggcaggaggccgagtctcagccttgcacatctaccttaccccgagaggtgggcggtgggcacggttgcacatccccaccgttcccccaagaagcgcgtgccgagatctcagaacgaagtggacggagccctcaggaggcttctagcaccaagagcagcatagcacccgaagagcagtctaaaaaagggccatctgtacagaaacgcaaaaagacctag

SEQ ID NO: 20561 - DNA, 753 bp, Artificial Sequence
  derived and/or modified sequence
atggccgagggcggggccagcaagggcggcggggaggagcccgggaagctgcctgagcctgctgaggaggagagccaggtgctgcggggcaccggccactgcaagtggttcaacgtgaggatgggcttcggcttcatctccatgatcaaccgggagggcagccccctggacatccctgtggatgtgtttgtgcaccagagcaagctgttcatggagggcttccgcagcctgaaggagggggagcctgtggagttcaccttcaagaagagcagcaagggcctggagagcatccgggtgacaggccctgggggcagcccctgcctgggcagcgagcggcggcccaagggcaagaccctgcagaagaggaagcccaagggggaccgctgctacaactgtggcggcctggaccaccacgccaaggaatgttccctgcccccccagcccaagaagtgccactactgccagagcatcatgcacatggtggccaactgcccccacaagaatgtggcccagcccccagccagcagccagggccggcaggaggccgagagccagccctgcaccagcaccctgccccgggaggtgggcggcggccacggctgcaccagcccccccttcccccaggaggcccgggcagagatcagcgagaggagcggccgcagcccccaggaggccagcagcaccaagagcagcatcgcccctgaggagcagagcaagaagggccccagcgtgcagaagaggaagaagacctag

SEQ ID NO: 20562 - DNA, 5505 bp, Artificial Sequence
  derived and/or modified sequence
aattgacaaagtcacgtgtgctcagggggccagaaactggagagaggagagaaaaaaatcaaaagaaggaaagcacattagaccatgcgagctaaatttgtgatcgcacaaaatcaagatgttagattgatgcagaagatcactccgttccaaagggaaagttttcatctcacgagtttggagctgagggcccgtggggcaacatggccgaaggcggggctagcaaaggtggtggagaagagcccgggaagctgccggagccggcagaggaggaatcccaggttttgcgcggaactggccactgtaagtggttcaatgtgcgcatgggatttggattcatctccatgataaaccgagagggaagccccttggatattccagtcgatgtatttgtacaccaaagcaaactattcatggaaggatttagaagcctaaaagaaggagaaccagtggaattcacatttaaaaaatcttccaaaggccttgagtcaatacgggtaacaggacctggtgggagcccctgtttaggaagtgaaagaagacccaaagggaagacactacagaaaagaaaaccaaagggagatagatgctacaactgtggtggccttgatcatcatgctaaggaatgtagtctacctcctcagccaaagaagtgccattactgtcagagcatcatgcacatggtggcaaactgcccacataaaaatgttgcacagccacccgcgagttctcagggaagacaggaagcagaatcccagccatgcacttcaactctccctcgagaagtgggaggcgggcatggctgtacatcaccaccgtttcctcaggaggctagggcagagatctcagaacggtcaggcaggtcacctcaagaagcttcctccacgaagtcatctatagcaccagaagagcaaagcaaaaaggggccttcagttcaaaaaaggaaaaagacataacaggtcttcttcatatgttctttcctttacccggttgcaaagtctacctcatgcaagtataggggaacagtatttcacaagcagtagctgacctgggattttaactactattggggaactgtgaattttttaaacagacaaatcactctaagcaaattacatttgagcagggtgtcatgttttatgttaattcagagaataagatactatgtctgtcaatatgtgcatgtgtgagagggagagagcctgagtctgtgtgtgtacatgaggatttttatataggaatgtagacacatatataaagaggctttgtctttatatatttgtgtatagatcaaagcacacaccctctctcatataattggatatttccaagaattgaaaacccatgtgaagcattatagatagttttaaatttaacccactggagttttcttgaaataccacttcttttatattatataaaactaaaaacacgactgttaccttttgtgtgaaccaaaggatacttcagatctcagagctgccaattatggggtactaaaggtttttaagacatccagttctcccgaatttgggattgcctctttttcttgaaatctctggagtagtaatttttttcccccttttttgaaggcagtaccttaacttcatatgcctctgactgccataagcttttttgattctgggataacataactccagaaaagacaatgaatgtgtaatttgggccgatatttcactgttttaaattctgtgtttaattgtaaaattagatgcctattaagagaaatgaaggggaggatcatcttagtggcttgttttcagtagtattttaatatcagcttcttgtaaccttttccatgttgtgagggttgtaagggattgtgtggcaacagcagcttcccttggctaactcaatcttctacccattgcttagagcagggagccctccttatttactactgaagaccttagagaactccaattgtttggcatatatttttggtggtggtttttattcctcctggagagttatctaatttgtttctaaaacaaacaagcagcaaagaaatgaattaaatactggggttgagaattaaaattaagtggatgttcacagttgcccaatatatatgacctgcaaatgatacgaaaaagtgcagcatttagtggcagttaacaagagtgacaagcctggggcagaggtaccaaacctctcccaccagagagctagaagtattttatacagtaactttgatcttatggaagtgaccttcaatgcttattctgaagtaacctatatggtggatacaggatgaacattcagtgccagggagaatcttctcaggttggttctcgttagagtgataaactggctaggggccatagtattggtcctgttaggtttcggtcatggaaaaaaaaattattttggggtcatcctggctctagatgttatgggcaaatttctgaaacatctgcaagaaggtaccagttaattatagtgcttaatattgggaataagattaagcattataattataatgtatgggcctgttggtgtaagctcagataattaaataaaaatagcatgactcaaatgagacatattctgctgaacagtttctacttcctctcccgcctgtcctgtcatgggagacgtgtatagttgctgctgtttcagcaaaccaccataagacgaaaatgcctcaggttgggttgccagtcctttacaactcagcttgaatttcacaacagtgattgtgagaatctgcgtggtatacactgaaatatcggtgtgctgtgatgcaaagcttacctttgacgatattgaatgtgatatagctgtagagaagtacttccttgccttatgtgaggatttcaaacttatttaaattatgtagacaaatcaaagtggcattgcttaatttttagcaggcataataagcaagttaacagtaaaatgcaaaacatgataagcgttgctcaatttttagcaggtataataagcaggttaacagtaaaaatgcaaaacatgatagataagtcactttgaaaattcaaaccaaagttccttcaccttatggaaataggaaattatggacttcaaaattggacacttcctgtttacaaaaagaaattcagagctaaaatcatggtaaaaaaaaatagaaacacttgagaactatggtctttatgggtgcaatttgaaatccttttcatcatcttaccagactaaactaagagcacataccaaacctatcttatggttgaaagttggggtttattttttatatgagaatattatcactattacataacatactcaggacaaagaactttgctcagggaacataccatgtaatatttttgttgtttctttacagactagtctacagtcctgcttactcaaaacaaaccaaataacttatacctttatataagtattatgtactgatgatagtaactacctctgagtttgacacagatcaaaatttttgaatatcagatatcagttatcctatttttatttcatgtgaaaactcctctaaagcagattccctcaactctgtgcatatgtgaatatcactgatgtgaacacattgttcatttacataggtaaaatattactctgtttacagcaaaaggctacctcatagttgatacatagcacacctgtatgtatgctgttccagccttacaggtggctgataattctctggtacagaacctttttatctgtattataaatagcaattcacaactgcatgtttctgacaaacacttgtgaataatgaagcatctcgttttagttagcaaagtctccaaacatttccttaaaataatcatgtatttagtttaaagaattatgggcactgttcaacttaagcaaaacagaacacggaagcagtcttagaagcaccactttgcccagaggtggaggttggaaggggtagcagggagaggggttggtgtatgcaggtattcatgctaggcaaagagtttaaaagacgccaatgtccttcatttactgtctgtgctgccctgaagccaagcgtattgcagcattatagccccaggcacataactaactagcactggcttgccaaggaatgaacatgcaatgccattactagctattgagggaaaagggtctgtgtgaagcatcactttgcagggattactaatggtggggcagcaggtctgtgaattaagttatctcttgacctcaccctcatgtcaacacaaatgtaattcctaaacaagatgcattgccagtctcttagccctgtaagctgatcttttgctacatggcagactataatgaaaacatttttatacttgggtttctagtcttcactagaaggccttggatgtatttttgcagttgaaagatttagaaagatttttacctgcttataacttggaagtttagagtgcaatgtaagaaaaaagatcaagaaatgtcatgttattagcatcagtccacctccaatattgccgatactttttttattctggctcagttttattttgcaccagtgcggccccaagttactgctggttgtatttagtttgtgaataggagcccataagtgttaatagactttgtaacattcactataagatgaattatacaggacatgggaaatctcattaagtcttaaagttaatttaaattaatttatctgttttctctaagaaatgtttatcataaaatatatatgtgtatttcccctttggttataaaatttgggaaagtatgtacaagtgcagctgcactgactttaattttctagatgtcttaatgagatttatttgttttagagaagaacatcttgttaaaagcatcaaactctgtcttacatagctgtcaacagcctctttaagatgtggtggttgtatgatctgtgtcttaattgttcagttagagtgagaagttgacctatgattcatttttaaattttatatttggaacaaagctgcaagttatggtaaagtactgtactgtgagaagtattatgatatttaatgcatctgtggcttaacacttgtgagagttaccagcttgaaaatgatggtgttgactacctcttgaatcacatctatcaaccactggcacctaccaccaagctggcttcaattagtatgtgttgctttttggtattaacaactaaccgtactagagaccaaagtgaaccctgatttttatatgtctttaataatggtgttttatctagtgtttttaaattatcctgtgtagtatttagattacctcattgtccattttgactcatgttgtttacaagtgaaaataaaaacacttgaactgtatgtttttaaaagacaaaaaaggggtagatgtttggaatgcgtttcactcgcatgcagtcatctggagggactgaagcactgtttgcctttctgtacactctgggttttatattctcatttcatgcctaatgtcttattctgtcaattatggatatgttgaggtttaaaaaaattacttgattaaaaataaaacatataacgttggcattta

SEQ ID NO: 20563 - DNA, 753 bp, Artificial Sequence
  derived and/or modified sequence
atggccgagggcggcgccagcaagggcggcggcgaggagcccggcaagttgcccgagccagctgaggaagagtctcaggtgctgagaggtaccggccattgcaaatggttcaatgtgcgtatgggcttcggatttatttcaatgatcaatcgtgagggctccccactggatattcccgtagatgtgtttgtgcatcagagcaaactttttatggagggctttaggtccctgaaggaaggcgagccagtggagttcacgttcaagaagtccagtaagggtctcgaatctatacgggtaaccggacctggcggcagcccatgcctggggtccgaaagaaggccaaagggaaaaaccctgcaaaagagaaagcctaaaggagaccgctgttataattgtggtggactagatcaccacgccaaggagtgctcgctgcctccccagccaaagaaatgccattactgtcagtcaatcatgcatatggtggctaattgcccacacaagaatgtggcccagccccctgcttctagtcaaggcagacaagaagcagagagtcaaccctgcaccagcacgctgcctagggaggtgggcgggggccacggctgcacatcacctccgtttcctcaggaggctcgtgccgaaatttctgagcgttctgggcggagcccgcaggaggcttccagtactaagtcttcaatagcccccgaggagcaatcaaaaaaaggaccatctgttcaaaaaaggaaaaagacttag

SEQ ID NO: 20564 - DNA, 753 bp, Artificial Sequence
  derived and/or modified sequence
atggcggaaggaggagcatctaaggggggaggcgaagagcctggaaagcttccagaacctgcagaagaagagagtcaggttctgaggggaacaggtcactgtaagtggttcaatgtgagaatgggattcggttttatatcgatgatcaacagggaggggagtccactcgatatccctgtggacgtgtttgtacaccaatcaaaactgtttatggaaggattcagatcgctaaaggagggagagcccgtggaattcactttcaaaaaatcttctaaaggtttagaatcaattagggtgacagggcctggagggtctccatgcctcggcagcgagaggaggcctaaaggaaaaaccctgcaaaaaaggaagcctaaaggagacaggtgttacaattgtggcggactcgatcaccacgctaaagaatgctccctacccccacaacctaagaaatgtcactactgccagagcattatgcatatggtcgccaattgccctcataaaaacgtagcacagccacccgcttcatctcaaggcaggcaggaagcggagtcccaaccctgtacctcaacgctcccccgtgaagttggtggaggccacggatgcacatcgcccccttttcctcaggaggcaagggccgagatctcggagaggagcggaaggagcccacaagaagcctccagcacaaagagttcaatcgctcccgaggagcagagcaaaaagggcccatccgtgcagaagcggaagaaaacatag

SEQ ID NO: 20565 - DNA, 753 bp, Artificial Sequence
  derived and/or modified sequence
atggccgagggcggcgccagcaagggcggcggcgaggagcccggcaagctgcccgagcccgccgaggaggagagccaggtgctgagaggcaccggccactgcaagtggttcaacgtgagaatgggcttcggcttcatcagcatgatcaacagagagggcagccccctggacatccccgtggacgtgttcgtgcaccagagcaagctgttcatggagggcttcagaagcctgaaggagggcgagcccgtggagttcaccttcaagaagagcagcaagggcctggagagcatcagagtgaccggccccggcggcagcccctgcctgggcagcgagagaagacccaagggcaagaccctgcagaagagaaagcccaagggcgacagatgctacaactgcggcggcctggaccaccacgccaaggagtgcagcctgcccccccagcccaagaagtgccactactgccagagcatcatgcacatggtggccaactgcccccacaagaacgtggcccagccccccgccagcagccagggcagacaggaggccgagagccagccctgcaccagcaccctgcccagagaggtgggcggcggccacggctgcaccagcccccccttcccccaggaggccagagccgagatcagcgagagaagcggcagaagcccccaggaggccagcagcaccaagagcagcatcgcccccgaggagcagagcaagaagggccccagcgtgcagaagagaaagaagacctag

SEQ ID NO: 20566 - protein, 438 aa, Artificial Sequence
  derived and/or modified sequence
MHPLPGYWSCYCLLLLFSLGVQGSLGAPSAAPEQVHLSYPGEPGSMTVTWTTWVPTRSEVQFGLQPSGPLPLRAQGTFVPFVDGGILRRKLYIHRVTLRKLLPGVQYVYRCGSAQGWSRRFRFRALKNGAHWSPRLAVFGDLGADNPKAVPRLRRDTQQGMYDAVLHVGDFAYNLDQDNARVGDRFMRLIEPVAASLPYMTCPGNHEERYNFSNYKARFSMPGDNEGLWYSWDLGPAHIISFSTEVYFFLHYGRHLVQRQFRWLESDLQKANKNRAARPWIITMGHRPMYCSNADLDDCTRHESKVRKGLQGKLYGLEDLFYKYGVDLQLWAHEHSYERLWPIYNYQVFNGSREMPYTNPRGPVHIITGSAGCEERLTPFAVFPRPWSAVRVKEYGYTRLHILNGTHIHIQQVSDDQDGKIVDDVWVVRPLFGRRMYL

SEQ ID NO: 20567 - DNA, 1317 bp, Artificial Sequence
  derived and/or modified sequence
atgcacccattacccggttattggtcttgctactgcctcctgttactgtttagcttgggcgtgcagggcagcctgggagccccaagtgccgcacccgagcaggtccacctttcttaccctggagagccaggttctatgacggttacatggacgacctgggtgccgacgcgatctgaagtgcagttcggtcttcaacctagcggtccactgccacttcgggcacaaggcacctttgttccttttgtggacggcggtattctacgtcgcaaactctacattcacagggtaacccttcggaaacttttgcctggagtacagtatgtgtaccggtgtggatcagcccaaggatggtctcgcagatttcggtttagggctctgaagaatggcgcacattggtcccctcgcctagctgtcttcggggacctgggagccgacaacccaaaagccgtgcctcgcttaaggcgagacacacagcagggtatgtacgatgccgtcttacatgttggcgattttgcctataacctcgaccaagacaacgccagagtcggtgaccggttcatgcgcttgattgagcccgtcgccgcaagtctcccctacatgacctgtccgggtaaccacgaagaacgttacaatttttccaactataaagccaggttttctatgcccggagataatgagggtttgtggtactcttgggatttaggacctgcccacatcatttcattttccacagaggtctatttcttcctacactacgggaggcatctggttcaaaggcagttcaggtggttggaatcagacctgcaaaaggccaataagaatagagcagccagaccatggattattactatggggcaccgtcccatgtattgcagtaatgctgatctggatgactgcactcggcacgagagcaaagtgcgaaaaggcctccagggaaagctatacggtctggaagatttattctataaatatggagtggatctgcagctttgggcccacgaacattcttatgagagactgtggcctatttacaattaccaggtttttaacggaagccgcgagatgccctataccaatccgagaggcccagttcatattattacggggagtgccggatgtgaagagcggctgactccatttgctgtcttcccacgcccatggagtgcagtgcgggttaaagaatatggctatactcggctccacatccttaacggaactcacatacacattcagcaggtatctgacgatcaggatggcaaaatcgtcgacgacgtctgggtggtgagacccctgtttgggaggcggatgtacctgtag

SEQ ID NO: 20568 - DNA, 1317 bp, Artificial Sequence
  derived and/or modified sequence
atgcacccattgcccgggtactggtcttgttattgccttctgctattgttttccctgggggtccagggatctttaggtgccccctctgcggccccagagcaggtgcatctatcctaccccggtgagccagggtcaatgacagttacttggacaacatgggtccctaccagatccgaagttcaattcggattgcagccaagtgggcctctgcctctcagggctcagggaacattcgtccctttcgtggacggcggcatcttgaggcgaaagttgtacatccatagagtgactttacgcaagctattgcccggtgtacagtacgtctatcgctgtgggtccgcccagggttggtcacgccggttcagattccgtgccctaaagaatggagcccactggtccccgcgactggcagtgtttggagatttaggtgccgacaatcccaaggcagtacctagattaaggagggacacccagcaggggatgtacgatgctgtgctgcacgtgggagactttgcatataatctggatcaagataatgctcgtgttggcgataggtttatgcggcttatcgaacccgttgcagcttcattaccgtacatgacttgcccgggcaatcacgaggaaagatacaacttcagcaactacaaggcccgcttcagtatgccaggagacaacgagggcctgtggtacagctgggatttgggccccgcccatatcatctccttctccacagaggtttatttttttcttcattacggtaggcacttggtgcagaggcaattccggtggctcgaatcagatctgcagaaagccaataagaacagagctgcccggccttggataatcacaatggggcaccgcccaatgtattgtagtaatgctgatctggacgattgtacacggcatgagagcaaagtgagaaaggggcttcaaggaaagctctacggcttagaggacttgttttataagtacggcgtcgacctgcagctgtgggcgcatgaacactcttacgaacgcctgtggcccatctacaactatcaggtatttaacggatcacgggaaatgccctatactaaccccagaggaccagtgcacatcattaccggatccgctggctgcgaggaaagactgacgcctttcgcggtgttccctcgcccatggagcgccgtacgtgttaaggagtacggttatacccgtctgcacatcctgaacggtacccacattcacattcagcaggtttcggacgatcaggacggtaagatcgtggacgacgtctgggtggtgcgaccacttttcggccgacggatgtatttgtag

SEQ ID NO: 20569 - DNA, 1317 bp, Artificial Sequence
  derived and/or modified sequence
atgcatccactgcccggttactggtcctgttactgtctgctcctgctgttctcgctcggcgtacagggttcactcggcgcaccttccgcggcccctgagcaagttcacctgagttaccccggggaacccggtagtatgacagtgacatggacaacttgggtcccaacccgcagcgaggttcaattcggtctgcaaccctcaggccccctgcccctgcgggcacagggaacattcgtgccctttgttgacggcggcatcctgagaagaaaactctacatccatcgagttaccctccgaaaactccttccaggcgtccaatatgtgtatagatgcggctcggcacagggatggagcagaagattcagattccgtgctcttaaaaacggcgcacactggtccccgcgccttgccgtcttcggagatctgggggccgataacccaaaagccgtgccacggcttcgccgcgacactcagcagggcatgtacgacgctgtattacacgttggagactttgcatacaatctagatcaggacaacgcccgtgtgggagatcgcttcatgcgtctgatcgaaccagttgccgcctcgctgccatatatgacctgcccaggtaatcacgaagaacgttataatttctctaactacaaagcccggtttagcatgcccggggacaatgagggactctggtactcatgggatttaggacctgcccacatcatctccttctccactgaggtgtattttttcctgcactacggaagacatcttgtgcaacgacagttcaggtggctggagagtgatttacagaaagcaaacaaaaaccgagccgcccgaccttggattatcaccatgggccaccgtcccatgtactgttcgaacgccgacctagatgactgtactagacacgaaagtaaggtgcgcaaaggacttcaaggaaaactatatggattagaagatctgttctacaagtatggggtggatttgcagctgtgggcacatgagcactcttacgaaagactctggcccatctataattaccaggtctttaacggatcacgcgagatgccatatacaaacccaagaggccccgtgcacatcatcactggatctgcaggctgcgaagagagactgacaccctttgccgtcttccctcgaccctggtcagctgtcagagtgaaggaatacggttataccaggctccacatcttgaatggcacccatattcatattcaacaggtatctgacgaccaggacggcaagattgtggacgatgtatgggtggtgagacctcttttcggacggcgaatgtacctgtag

SEQ ID NO: 20570 - DNA, 1317 bp, Artificial Sequence
  derived and/or modified sequence
atgcaccccctgcccggctactggagctgctactgcctgctgctgctgttcagcctgggcgtgcagggcagcctgggcgcccccagcgccgcccccgagcaggtgcacctgagctaccccggcgagcccggcagcatgaccgtgacctggaccacctgggtgcccaccagaagcgaggtgcagttcggcctgcagcccagcggccccctgcccctgagagcccagggcaccttcgtgcccttcgtggacggcggcatcctgagaagaaagctgtacatccacagagtgaccctgagaaagctgctgcccggcgtgcagtacgtgtacagatgcggcagcgcccagggctggagcagaagattcagattcagagccctgaagaacggcgcccactggagccccagactggccgtgttcggcgacctgggcgccgacaaccccaaggccgtgcccagactgagaagagacacccagcagggcatgtacgacgccgtgctgcacgtgggcgacttcgcctacaacctggaccaggacaacgccagagtgggcgacagattcatgagactgatcgagcccgtggccgccagcctgccctacatgacctgccccggcaaccacgaggagagatacaacttcagcaactacaaggccagattcagcatgcccggcgacaacgagggcctgtggtacagctgggacctgggccccgcccacatcatcagcttcagcaccgaggtgtacttcttcctgcactacggcagacacctggtgcagagacagttcagatggctggagagcgacctgcagaaggccaacaagaacagagccgccagaccctggatcatcaccatgggccacagacccatgtactgcagcaacgccgacctggacgactgcaccagacacgagagcaaggtgagaaagggcctgcagggcaagctgtacggcctggaggacctgttctacaagtacggcgtggacctgcagctgtgggcccacgagcacagctacgagagactgtggcccatctacaactaccaggtgttcaacggcagcagagagatgccctacaccaaccccagaggccccgtgcacatcatcaccggcagcgccggctgcgaggagagactgacccccttcgccgtgttccccagaccctggagcgccgtgagagtgaaggagtacggctacaccagactgcacatcctgaacggcacccacatccacatccagcaggtgagcgacgaccaggacggcaagatcgtggacgacgtgtgggtggtgagacccctgttcggcagaagaatgtacctgtag

SEQ ID NO: 20571 - DNA, 2913 bp, Artificial Sequence
  derived and/or modified sequence
gtaggcggcaagaggcctcggcacccgcgaactcataaataccggggcggcgctggtggcgggagaggcgcgtgcgggcagccggcgcccccgaggcacctggataaccacccatcttgaaggagacctccctgccctgcctctgttgtcccccagagcactgcctgatcatcctctgttccccatcctcccagcccttcctgctgtacctgtggggagctgatctcctcagtccccctgcttttccccggtctgccatcaccaccccaccaccatgcacccccttcctggctactggtcctgttactgtctactcctgctattctccttgggagtccaggggtccctgggggctcccagcgctgccccagagcaagtccatctgtcttacccaggtgagccaggctccatgactgtaacttggaccacatgggtcccaacccgctctgaagtgcaattcgggttgcagccgtcggggcccctgcccctccgcgcccagggcaccttcgtcccctttgtggacgggggcattctccggcggaagctctacatacaccgagtcacgcttcgcaagctgctgccaggggttcagtatgtttatcgctgtggcagtgcgcagggctggagccgtcggttccgcttcagggccctcaagaatggggcccactggagtccccgtctggctgtgtttggagacctgggggctgacaacccgaaggccgtcccccggctgcgcagggacacccagcagggcatgtatgacgccgttctccatgtgggagactttgcctacaacctggatcaggacaacgcccgtgttggggataggttcatgcggctcattgaacccgtggctgccagcctgccgtacatgacatgccctgggaatcatgaagaacgctacaacttctctaactacaaggctcgcttcagcatgccgggggataatgagggcctgtggtacagctgggatctgggtcccgcccacatcatctccttctccaccgaggtctatttctttctccattatggccgccacttggtacagaggcagtttcgctggctggagagcgacctccagaaagccaataagaaccgggcagcccggccgtggatcatcactatggggcaccggcccatgtactgctccaacgcagatctggacgactgcacacgacatgaaagcaaggtccgcaaaggcctccaaggcaagctgtacgggttggaggatcttttctacaaatatggagtggatctgcagctgtgggctcatgagcactcgtatgaacgactgtggccaatttacaactaccaggtatttaacggcagccgagagatgccctacaccaacccgcgagggcctgtccacatcatcacaggatctgctggctgtgaggagcggctgacgccctttgctgtcttcccgaggccctggagtgccgtgcgtgtgaaggagtacgggtatacgcggctgcacatcctcaacgggacccacatccacatccagcaggtgtcggacgaccaggatgggaagatcgtagatgatgtctgggtggtgagacccctgtttggccggaggatgtacctctagggatggcggcagctctcctccagaagcctaggttttgccgccttggctgctgtgaccagaaactgcccaggcctgggtggggagttgggtgggccctgactcccctgccctccagaggccccatgtagggtacatgcagccctatggagctggggcagctgttccctcctggagaggtgggagtcctggctggctgtggagggagggcaggtgtgcgggcacagagtgacacacggcaggtttctgctggcagggccccaccctcctgcatagctctgatcgggcgaggtgcccacggggcttcaggaatgaagaggcttaagctctggctccatggattctgcacatctgcgggggatgccgctgggcttcctcctctcctgcccacctggcaagggcatcgccaggtgggcacaaccgtcatgacactactcaccagcaggtggcgtcaggggctttttcttctgagcccggcactgagagttggtctgaagcctggctccttcttcactgctccaggactgctatgaagagtcccttcatgcctcagtttcccagcctggcaccatcttattcgggaagaggagacgtgttaacactcttgcctcctagctaggacagatgacaaaccgcaagagccacagacttgccagttccttccctctttccttcctttctttcccttcttttatttattgaatcataatttattgagcatctaccatgtgccaggctctgttctcagtgctggagagacagctgtgaatgagacagagatctcggccctcacagagctgacatcctaaccagagagttggacaaaaatcacgataaatgagttggttaaatagcgatttgtgagtagaaaacgcagggacggtgagagagcagtttcaattttcagggggatctcactgagagggcaacatttgatctgaaggaggtggggaaggagccaagtgggcagacatctgggggaagagcattccaggcagaggaacagccagtgcaaaggccctgagacagaaatgtgcctggccggctgggtacagtaactcacatctgtagtcccagcactttgggaggccgaggcgggcagatcacttgagcccaggagtttgagaccagcctgggcaacacagcgaaaccctttctctaccaaaaatatgaaatttagctgggcatggtggtgtgtgcctgtagtcccagctgctcaggaggctgaggcgggaggatggcttgagcccaggaggttgaggctgcagtgagccatgattgcgccactgcaccccagcctgggcaacagagcaagaccctgtctc

SEQ ID NO: 20572 - DNA, 1317 bp, Artificial Sequence
  derived and/or modified sequence
atgcatcccctgccgggctactggagctgttactgcttattactactgtttagtctgggtgtgcaggggagtcttggggcccctagcgccgcccctgaacaggtgcacctgtcttacccaggcgagccgggatccatgacagttacttggacaacttgggtacctacacgcagcgaagttcagttcgggctgcagccatccggacccctgccactccgcgctcagggaacgttcgtcccatttgtcgatggaggaatcctgcgccggaagctgtatatacatcgggtcacattaaggaagctgctgccaggagttcaatacgtataccggtgcggaagcgcccaaggctggtcgcgccgattcagatttagagcactcaagaatggggcgcactggtccccgaggctggctgtctttggagatttgggtgctgacaatcccaaggctgtgcctagacttcgtcgcgacacgcagcaggggatgtatgacgcagtactccacgtcggcgactttgcctataacttggaccaggacaacgccagagtcggtgaccggttcatgagactcatagaaccggttgctgctagtttaccatatatgacatgccctggaaaccacgaggagaggtataatttcagcaactacaaggcgcggttttctatgcctggggataacgaggggctctggtactcctgggatctcgggccagctcatattatttccttctctactgaggtgtacttttttctgcattatggtaggcacctggttcagcggcagtttcgctggctggagtctgatttacaaaaagctaacaaaaatcgggccgcaagaccttggatcattacaatgggccataggccaatgtactgctctaacgccgaccttgacgactgcacacggcatgaatccaaggtgagaaaagggctgcaaggcaagctgtacggcctggaggatctgttctacaaatacggagtcgatctacagctttgggcacacgaacactcttacgaaagactgtggccaatttataattaccaagtgttcaatggcagccgggagatgccttacacgaatcctagggggcccgtccacattattactgggagcgccggatgtgaagaaagattgaccccctttgctgtctttccgaggccttggagcgctgttagggtaaaagagtacgggtacacccgcctgcatattctcaacggtacccatattcacatccagcaagttagcgatgaccaggatggtaaaatagtggacgacgtgtgggtagtacggccgctgtttggccgccgaatgtacctatag

SEQ ID NO: 20573 - DNA, 1317 bp, Artificial Sequence
  derived and/or modified sequence
atgcaccccctgcccggctactggagctgctactgcctgctgctgctcttcagcctgggcgtgcagggcagcctgggcgcccccagcgctgcccctgagcaggtgcacctgagctacccaggagagcccggctccatgacagtgacctggaccacctgggtgcccaccaggtctgaggtgcagtttggcctgcagcccagcggccccctgcccctgcgggcccagggcacctttgtgccctttgtggatggcggcatcctgcggaggaagctgtacatccaccgggtgaccctgaggaagctgctgcccggggtgcagtatgtgtaccgctgtggcagcgcccagggctggagccgccgcttccgcttccgggccctgaagaatggagcccactggagcccccggctggccgtgtttggagacctgggcgctgacaaccccaaggctgtgccccggctgcggcgggacacccagcagggcatgtatgatgctgtgctgcacgtgggggactttgcctacaacctggaccaggacaatgcccgggtgggggaccgcttcatgaggctcatcgagcctgtggccgccagcctgccctacatgacctgccccggcaaccacgaggagcgctacaacttcagcaactacaaggcccgcttctccatgcctggggacaatgaaggcctgtggtacagctgggacctgggccctgcccacatcatctccttcagcacagaggtgtacttcttcctgcactacggccgccacctggtgcagaggcagttccgctggctggagagtgacctgcagaaggccaacaagaacagagctgcccggccctggatcatcaccatgggccaccggcccatgtactgcagcaatgctgacctggatgactgcaccaggcatgagagcaaggtgaggaagggcctgcagggcaagctgtatggcctggaggacctcttctacaagtatggagtggacctgcagctgtgggcccacgagcacagctatgagcggctgtggcccatctacaactaccaggtgttcaacggcagccgggagatgccctacaccaacccccggggccctgtgcacatcatcaccggcagcgctggctgtgaggagcggctgaccccatttgctgtgttcccccggccctggagcgctgtgcgggtgaaggagtatggctacacccggctgcacatcctgaatggcacccacatccacatccagcaggtgtctgatgaccaggacggcaagatcgtggatgatgtgtgggtggtgcggcccctgtttggccgcaggatgtacctgtag

SEQ ID NO: 20574 - DNA, 1317 bp, Artificial Sequence
  derived and/or modified sequence
atgcaccccctgcccggctactggagctgctactgcctgctgctgctgttttcacttggcgtccaggggagtctaggcgcgccctctgcagcaccggagcaggtgcatctctcgtatcccggtgaacccgggagcatgaccgtgacgtggacaacttgggtgcccacgagaagtgaagtccagttcggcctgcagccctctggcccattgccgctccgtgctcagggcacttttgtgccctttgtggatggtggaattcttaggagaaaactgtacatccacagagtgacactgaggaagctccttcccggcgtgcagtatgtgtaccggtgcggatccgcacaaggctggagtcggcggttccgattcagggccctgaaaaatggcgcccactggtccccacggctggcagtcttcggtgacttgggagctgacaaccccaaggcggtgcctaggctcaggagggacacccaacaggggatgtacgatgccgttctgcacgtgggggacttcgcctacaacctcgatcaagacaatgcaagagtcggtgatcggtttatgaggctgattgaacccgtggcagcatctttaccctacatgacctgtcccgggaatcatgaagagcgctataactttagcaactataaggccagatttagcatgcctggtgataatgaaggactatggtactcttgggacttaggtccggcgcacataatcagcttttcaacagaggtctatttcttcctccactatgggaggcacctggtgcagaggcaatttcggtggctcgagtccgacctgcagaaggccaacaagaatagagccgcccgaccgtggatcattaccatggggcaccgtcccatgtactgttccaatgccgacctggacgactgtacgaggcatgagagtaaggtccgaaagggcctgcagggaaaactgtacggactggaagacctgttctataagtatggcgtggacctgcagctatgggcacacgagcacagttatgagcgcctctggccaatctacaactatcaagtcttcaatggctctcgcgaaatgccatatacaaacccacgagggccggtgcatattatcacgggctctgctggctgtgaagaaaggctaacaccgtttgccgtattcccaagaccttggagcgctgtccgggtgaaagagtatgggtacacaaggctgcatatcctgaatgggacacacatccacatccagcaggtctctgacgaccaagacggcaagatcgtggatgacgtgtgggtggtcaggcctcttttcggtcgccggatgtatctctag

SEQ ID NO: 20575 - RNA, 1317 nt, Artificial Sequence
  derived and/or modified sequence
augcacccauugcccggguacuggucuuguuauugccuucugcuauuguuuucccuggggguccagggaucuuuaggugcccccucugcggccccagagcaggugcaucuauccuaccccggugagccagggucaaugacaguuacuuggacaacaugggucccuaccagauccgaaguucaauucggauugcagccaagugggccucugccucucagggcucagggaacauucgucccuuucguggacggcggcaucuugaggcgaaaguuguacauccauagagugacuuuacgcaagcuauugcccgguguacaguacgucuaucgcuguggguccgcccaggguuggucacgccgguucagauuccgugcccuaaagaauggagcccacugguccccgcgacuggcaguguuuggagauuuaggugccgacaaucccaaggcaguaccuagauuaaggagggacacccagcaggggauguacgaugcugugcugcacgugggagacuuugcauauaaucuggaucaagauaaugcucguguuggcgauagguuuaugcggcuuaucgaacccguugcagcuucauuaccguacaugacuugcccgggcaaucacgaggaaagauacaacuucagcaacuacaaggcccgcuucaguaugccaggagacaacgagggccugugguacagcugggauuugggccccgcccauaucaucuccuucuccacagagguuuauuuuuuucuucauuacgguaggcacuuggugcagaggcaauuccgguggcucgaaucagaucugcagaaagccaauaagaacagagcugcccggccuuggauaaucacaauggggcaccgcccaauguauuguaguaaugcugaucuggacgauuguacacggcaugagagcaaagugagaaaggggcuucaaggaaagcucuacggcuuagaggacuuguuuuauaaguacggcgucgaccugcagcugugggcgcaugaacacucuuacgaacgccuguggcccaucuacaacuaucagguauuuaacggaucacgggaaaugcccuauacuaaccccagaggaccagugcacaucauuaccggauccgcuggcugcgaggaaagacugacgccuuucgcgguguucccucgcccauggagcgccguacguguuaaggaguacgguuauacccgucugcacauccugaacgguacccacauucacauucagcagguuucggacgaucaggacgguaagaucguggacgacgucuggguggugcgaccacuuuucggccgacggauguauuuguag

SEQ ID NO: 20576 - RNA, 1317 nt, Artificial Sequence
  derived and/or modified sequence
augcauccacugcccgguuacugguccuguuacugucugcuccugcuguucucgcucggcguacaggguucacucggcgcaccuuccgcggccccugagcaaguucaccugaguuaccccggggaacccgguaguaugacagugacauggacaacuugggucccaacccgcagcgagguucaauucggucugcaacccucaggcccccugccccugcgggcacagggaacauucgugcccuuuguugacggcggcauccugagaagaaaacucuacauccaucgaguuacccuccgaaaacuccuuccaggcguccaauauguguauagaugcggcucggcacagggauggagcagaagauucagauuccgugcucuuaaaaacggcgcacacugguccccgcgccuugccgucuucggagaucugggggccgauaacccaaaagccgugccacggcuucgccgcgacacucagcagggcauguacgacgcuguauuacacguuggagacuuugcauacaaucuagaucaggacaacgcccgugugggagaucgcuucaugcgucugaucgaaccaguugccgccucgcugccauauaugaccugcccagguaaucacgaagaacguuauaauuucucuaacuacaaagcccgguuuagcaugcccggggacaaugagggacucugguacucaugggauuuaggaccugcccacaucaucuccuucuccacugagguguauuuuuuccugcacuacggaagacaucuugugcaacgacaguucagguggcuggagagugauuuacagaaagcaaacaaaaaccgagccgcccgaccuuggauuaucaccaugggccaccgucccauguacuguucgaacgccgaccuagaugacuguacuagacacgaaaguaaggugcgcaaaggacuucaaggaaaacuauauggauuagaagaucuguucuacaaguaugggguggauuugcagcugugggcacaugagcacucuuacgaaagacucuggcccaucuauaauuaccaggucuuuaacggaucacgcgagaugccauauacaaacccaagaggccccgugcacaucaucacuggaucugcaggcugcgaagagagacugacacccuuugccgucuucccucgacccuggucagcugucagagugaaggaauacgguuauaccaggcuccacaucuugaauggcacccauauucauauucaacagguaucugacgaccaggacggcaagauuguggacgauguauggguggugagaccucuuuucggacggcgaauguaccuguag

SEQ ID NO: 20577 - protein, 139 aa, Artificial Sequence
  derived and/or modified sequence
MPWRAGNGVGLEAQAGTQEAGPEEYCQEELGAEEEMAARAAWPVLRSVNSRELSRIIICNHSPRIVLPVWLNYYGKLLPYLTLLPGRDFRIHNFRSHPWLFRDARTHDKLLVNQTELFVPSSNVNGQPVFANITLQCIP

SEQ ID NO: 20578 - DNA, 420 bp, Artificial Sequence
  derived and/or modified sequence
atgccctggagagccggcaacggcgtgggcctggaggcccaggccggcacccaggaggccggccccgaggagtactgccaggaggagctgggcgccgaggaggagatggccgccagagccgcctggcccgtgctgagaagcgtgaacagcagagagctgagcagaatcatcatctgcaaccacagccccagaatcgtgctgcccgtgtggctgaactactacggcaagctgctgccctacctgaccctgctgcccggcagagacttcagaatccacaacttcagaagccacccctggctgttcagagacgccagaacccacgacaagctgctggtgaaccagaccgagctgttcgtgcccagcagcaacgtgaacggccagcccgtgttcgccaacatcaccctgcagtgcatcccctag

SEQ ID NO: 20579 - DNA, 1014 bp, Artificial Sequence
  derived and/or modified sequence
gttttcaccatgttggccaggctggtctggaaccccgacttcaggtgatccacgttggcctcccaaagtgttgggattacaggtgtgaaccactgcgcctggccatgaagtgtccaataaatattagattgacataaagaaccctcaggtgtgctatctcatggaataccctcaaattcctctctggatcttcctatcacagttgtattattggggtcccatttggatctctcccactataggtagctcttcagtgggacgggctaggtaagagaggctgggagtaagtctgtctgatctaggatgtcttgcttaccacccaggtagggggttatatactcccagcctttctgattccattgtaactcttgccgaaatccgggtgaacggaagtagtctctttaagaactggtatgggcaggcccaagttgtcaaggcttcggaggtaatgccctggagagcggggaacggggtgggtttagaggcccaggcgggcacccaggaggcaggcccagaagagtactgccaggaagagttgggcgccgaggaggagatggcagccagagcagcatggcctgtgctgcgctctgtgaactcacgcgagctctcccggatcatcatctgcaatcacagcccacgaatcgtgctgcctgtgtggctcaactactatggcaagctgctgccctacctgacgctgctgcccggcagggacttccgcatccacaacttccgaagccacccttggctcttcagagatgcaaggacacatgataagcttctggttaaccaaactgaattgtttgtgccatcttccaatgttaatggacagcctgtttttgccaacatcacactgcagtgtataccctgaaagagcaatgcctccaggttgtcggaagcctagtcaagcccaagaattacaggagactggacatcgtcagatcactctatgacgatctggaagatcatccaaatgtgattgaaagacctggagcggctgacgcaggagcacagtga

SEQ ID NO: 20580 - DNA, 420 bp, Artificial Sequence
  derived and/or modified sequence
atgccctggagagcagggaacggagtgggattggaggcgcaggccggcactcaagaggccggcccagaagaatactgccaagaggaacttggcgccgaagaggaaatggcagctcgggccgcatggcccgtgctccgatctgtcaacagccgcgaactgtcccgaattataatatgcaaccactccccccgcatcgtcctgcctgtctggttgaactattatggcaagctacttccataccttacattacttcctggacgagactttaggatccataactttcgctctcacccctggctgttcagagacgcgaggacccatgataagctgctagtgaaccagaccgagctgttcgttccgtccagcaacgtcaacggtcaaccagtgttcgccaacattacactgcagtgtatcccctag

SEQ ID NO: 20581 - DNA, 420 bp, Artificial Sequence
  derived and/or modified sequence
atgccctggagggctggaaatggagtgggcctggaggcccaggccggcacccaggaggccggccctgaggagtactgccaggaggagctgggcgctgaggaggagatggccgcccgggccgcctggcctgtgctgcggtctgtgaacagccgggagctgagccgcatcatcatctgcaaccacagccccagaattgtgctgcctgtgtggctgaactactacggcaagctgctgccctacctgaccctgctgcccggccgggacttccgcatccacaacttccgcagccacccctggctgttcagagatgcccggacccatgacaagctgctggtgaaccagacagagctgtttgtgcccagcagcaatgtgaatggccagcctgtgtttgccaacatcaccctgcagtgcatcccctag

SEQ ID NO: 20582 - DNA, 420 bp, Artificial Sequence
  derived and/or modified sequence
atgccctggcgggccggcaacggcgtgggcctggaggcccaggccggcacccaagaagcagggcccgaggaatactgtcaggaggagttaggggcggaggaggaaatggccgcccgcgccgcctggccagtgctccgctccgtcaattctagagaactctcccggatcattatctgcaatcacagcccacgtattgtgctaccagtttggcttaattactatgggaagctgcttccctatctcacgctgttaccagggagagattttcgtattcacaacttccggtcccacccctggctgttccgtgatgctcgcacccacgataagttgctggtcaaccagacagagctcttcgtgccgtcttcaaatgtgaatggccagccagtgtttgcaaatatcacacttcagtgtatcccatag

SEQ ID NO: 20583 - DNA, 420 bp, Artificial Sequence
  derived and/or modified sequence
atgccctggcgggctggtaatggagtgggccttgaagcccaagctggtactcaggaggcgggacccgaagagtactgccaggaggagcttggtgccgaggaggaaatggcagccagggctgcttggccagtgcttcgcagtgtcaacagcagagagctgagcagaataattatctgcaaccactctccgcgtattgtgctgccagtgtggctgaattactatggcaagctgctgccatatctgacactccttccagggcgagactttaggattcacaattttcgcagccacccctggctgttcagggacgctcgtacccatgataagctgctagtcaatcagactgagttgtttgtcccaagcagtaacgttaacggacagcctgtcttcgctaatattacactgcaatgtattccctag

SEQ ID NO: 20584 - protein, 445 aa, Artificial Sequence
  derived and/or modified sequence
MKNPEAQQDVSVSQGFRMLFYTMKPSETSFQTLEEVPDYVKKATPFFISLMLLELVVSWILKGKPPGRLDDALTSISAGVLSRLPSLFFRSIELTSYIYIWENYRLFNLPWDSPWTWYSAFLGVDFGYYWFHRMAHEVNIMWAGHQTHHSSEDYNLSTALRQSVLQIYTSWIFYSPLALFIPPSVYAVHLQFNLLYQFWIHTEVINNLGPLELILNTPSHHRVHHGRNRYCIDKNYAGVLIIWDKIFGTFEAENEKVVYGLTHPINTFEPIKVQFHHLFSIWTTFWATPGFFNKFSVIFKGPGWGPGKPRLGLSEEIPEVTGKEVPFSSSSSQLLKIYTVVQFALMLAFYEETFADTAALSQVTLLLRVCFIILTLTSIGFLLDQRPKAAIMETLRCLMFLMLYRFGHLKPLVPSLSSAFEIVFSICIAFWGVRSMKQLTSHPWK

SEQ ID NO: 20585 - DNA, 1338 bp, Artificial Sequence
  derived and/or modified sequence
atgaagaatcccgaggctcaacaagacgtcagcgtgtcccagggctttcgcatgctcttttataccatgaagccctccgagacgtctttccagacactcgaggaggtccccgattacgttaagaaggcaacaccattctttatcagtttgatgcttctggagctggtagtcagttggattttgaaagggaaacctcccgggcgtctcgatgatgccctcacctccatctctgctggcgtgcttagtcggctaccatcccttttctttaggtcaatagagctgaccagctatatatatatttgggaaaattacaggctgtttaacttaccctgggattcgccatggacttggtattctgccttccttggggtagatttcggctactactggtttcataggatggcccacgaggtcaacattatgtgggcgggccatcagacacaccactctagtgaagattacaacctgtcaactgcgttacggcagtcagtgctgcagatatacactagctggattttttacagtccactcgctttgttcatacccccgagcgtgtacgcggtgcatctccaatttaatttgttataccagttttggattcatactgaggtgatcaataacctgggaccattggagttaatcctcaacacaccatcacaccaccgagtacatcacgggaggaataggtactgcatagacaaaaactacgcaggggtactgatcatatgggacaagatattcggcacctttgaagctgagaatgagaaggtcgtttacggactgacacatcccatcaacacatttgagcccattaaggtccaattccatcatctgttcagcatttggactacattctgggccacgcctgggttttttaacaagtttagcgtgattttcaagggaccaggctggggacccggaaaaccaaggctgggcttgagtgaggagattcccgaagtgacaggcaaggaagtgcctttctctagcagctctagtcaactgctcaagatatatactgtcgtgcaatttgccctgatgctggccttttatgaagagaccttcgctgataccgccgcgctctctcaggtgacactcctgctgagggtctgctttatcatactgaccctaacaagtattggattcctcttagaccagcgccctaaagccgctatcatggagacccttaggtgcttgatgtttcttatgctgtaccgattcgggcacctcaagcctctggtgcctagtctgtccagcgcgttcgagattgtgttctccatctgtattgcattctggggagttcgcagcatgaaacagctgactagccacccttggaaatag

SEQ ID NO: 20586 - DNA, 1338 bp, Artificial Sequence
  derived and/or modified sequence
atgaagaaccctgaggcccagcaggatgtgtctgtgtcccagggcttcaggatgctgttctacaccatgaagcccagcgagaccagcttccagaccctggaggaggtgcctgactatgtgaagaaggccacccccttcttcatcagcctgatgctgctggagctggtggtgtcctggatcctgaagggcaagcccccaggccgcctggatgatgccctgaccagcatctctgctggggtgctgagccggctgcccagcctcttcttccgcagcattgagctgaccagctacatctacatctgggagaactaccgcctcttcaacctgccctgggacagcccctggacctggtacagcgccttcctgggcgtggactttggctactactggttccacaggatggcccacgaggtgaacatcatgtgggccggccaccagacccaccacagcagcgaggactacaacctgagcacagccctgcggcagagcgtgctgcagatctacacctcctggatcttctacagccccctggccctcttcatcccccccagcgtgtatgctgtgcacctgcagttcaacctgctgtaccagttctggatccacacagaggtgatcaacaacctgggccccctggagctgatcctgaacacccccagccaccaccgggtgcaccacggcaggaaccgctactgcatcgacaagaactatgccggcgtgctgatcatctgggacaagatcttcggcacctttgaagcagaaaatgagaaggtggtgtatggcctgacccaccccatcaacacctttgagcccatcaaggtgcagttccaccacctgttcagcatctggaccaccttctgggccaccccaggcttcttcaacaagttcagcgtcatcttcaagggccctggctggggccctgggaagccccggctgggcctgtctgaggagatccctgaggtgacaggcaaggaggtgcccttcagcagcagcagcagccagctgctgaagatctacacagtggtgcagtttgccctgatgctggccttctatgaggagacctttgctgacacagctgccctgagccaggtgaccctgctgctgcgggtgtgcttcatcatcctgaccctgaccagcatcggcttcctgctggaccagaggcccaaggccgccatcatggagaccctgcgctgcctgatgttcctgatgctgtaccgcttcggccacctgaagcccctggtgcccagcctgagcagcgcctttgagatcgtgttcagcatctgcatcgccttctggggcgtgcgctccatgaagcagctgaccagccacccctggaagtag

SEQ ID NO: 20587 - DNA, 2475 bp, Artificial Sequence
  derived and/or modified sequence
ctctctacacagaatcggctgttgagtgtgctctcagtggagctttggttttagctgttctctgacaaagagcttgttctgagctgcacatctcgtcctctttgttcagcctcaggcttcaagcattgaatcctaaatattctccagctgggaatcagacaagggcagaaatgaagaacccagaagcccagcaggatgtttcagtttcccagggatttcgcatgttgttttacacgatgaaacccagtgaaacttcattccaaacattagaagaggtgcctgattatgtaaaaaaggcaactccatttttcatttctttgatgctgcttgaacttgttgtcagctggattctcaaaggaaagccaccaggtcgcctggatgatgctttaacgtcaatctcagctggtgttctgtctcgacttccaagtctatttttcaggagcattgaactgaccagttatatttatatctgggagaactacaggctgttcaatttgccttgggattctccatggacttggtattcagccttcttaggagttgactttggctactactggttccatcgtatggctcatgaagttaatattatgtgggccggacaccaaacacatcatagttctgaagactataacttatccacagcactgagacagtctgtcctccagatatatacttcctggattttctactctcccctggccctcttcatacccccttcagtatatgctgttcatcttcaattcaatcttctttaccaattttggatccatacagaggtcatcaataaccttggtcctttggaactgattcttaatactcctagccatcatagggttcatcatggcagaaatcgttattgcatagacaaaaattatgctggtgttcttattatttgggataaaatttttgggacatttgaagcagaaaatgaaaaagttgtatatggcttaacacatcccattaatacatttgaaccaatcaaagtgcagttccatcacttattttccatatggactacattctgggccacacctggattcttcaataagttttctgtcatatttaagggaccgggatggggtccaggtaaaccaagacttggtctcagtgaagaaattccagaggtcaccggcaaagaagttcccttctcatcatcttcatctcagctattaaagatatatacagttgtacagtttgctctgatgttggcattttatgaagagacctttgcagatacagctgcactgtcgcaagttactctccttctgagggtttgcttcattatcctgaccttgacttccattggatttcttctggatcaaagacccaaggcagctattatggaaactctccgttgcttgatgttcttaatgctgtaccgatttggtcacctgaagcctcttgtcccttcattgtcatctgcttttgagattgttttttccatttgcattgctttctggggagttagaagcatgaaacaactcacctctcacccttggaaataacctgaatttgtacataattctcttcttttaatgagttgtccacacgcatattatgactgcatattaaaatgtaattattttatgtaatgcttatatgaactatttcttcaatgaaaagtaaaattacttatttactattgtttgcctttcacatttgttattttctattaaaaattaaagtcagttttggttacttcccccctttactacaattaaaaaaagatttcaaatataatgatgttatattaactgatagccttatatgacaagtataaaaagaagggatgaaacttaaaaacagtaaaaacaagaaggaatattgcctttacatcaatttgaaaacaatgtttcctttgatgtttgctaaaattatgcatagatacatgtttgtagtcataaaaatgtattacattggttgtcttcctaaggccacagttacctttgcaatccatataacctaagaagctgcattccagaaaaagacatcactgaggccaggcgcggtggctcacccctgtaatcccagcactttgtggggctgaggtgggcggatcatgaggtccagagatagagaccatcctggccaacatggtgaagtcctgtctctactaaaaatataaaaatttagctggacatggtggtgtgcgcctgtagtcccagctactctggaggctgaggcaggagaatcgcttgaacctgggaggcagaagttggagtgagtggagattgcaccactgcactccagcctgggcgacagagcgagactccgtctcaaagaaaaaagacatcactgaaagaaaaatgaacagaatttgtcagaattagttttttcaacaggttactttgtcatacatttctctaatatgcttggtcaatttgttttggcagactgggcagcatgcagcaattctgcattatttaaagttatcagaacaatgttaattctctaaataaaattacccaaggt

SEQ ID NO: 20588 - DNA, 1338 bp, Artificial Sequence
  derived and/or modified sequence
atgaagaaccccgaggcccagcaggacgtgagcgtgagccagggctttcgcatgctgttctacacgatgaaaccctctgagacttccttccagaccctcgaagaagtaccagactacgtcaaaaaggcaacgcctttcttcatttcactgatgctgctcgagttggtggtcagctggatccttaagggcaaaccacccggccgcctggacgatgccctaacctccatctctgccggagtgctcagtcgcctgcctagcttgttctttagatcaatcgaattaacatcgtacatatacatttgggagaactatcgcctttttaatctgccttgggacagcccttggacgtggtactcggcttttctgggtgtagatttcggctattactggttccatagaatggcgcatgaggtcaatatcatgtgggccggacatcagacgcaccatagcagcgaagactacaatttgtctactgcccttcgccagtccgttttgcagatttatacgagctggatcttctacagtcccctggcattgttcatccctccctccgtgtacgccgttcatttacagttcaacctgctctaccagttttggatacatactgaggtgataaacaacctgggcccccttgaactgatcctaaatacccctagtcatcatagagttcaccacggtagaaatcggtattgtattgacaaaaactatgccggcgtcctgatcatttgggataaaatatttggtacctttgaggcggaaaatgagaaggtggtatacggcctgactcaccctatcaatacctttgagcctattaaggttcagttccaccatttattttctatctggaccacgttctgggcaacaccgggattctttaataaatttagtgtcatctttaagggaccagggtggggccccggcaagcctcgactagggctaagcgaggaaatccctgaagtgacgggtaaggaagtgccctttagttcctcatcgagtcagctattaaagatctacaccgtagtccaatttgccttgatgctggcattttacgaggaaacctttgctgataccgcagctttgagccaggttacactcctgctgcgtgtgtgttttatcatccttacactgacctccatcgggttcttgttggaccagcgacctaaagcagccataatggagaccttacgctgcctaatgttcttgatgttgtaccgctttgggcatctgaaaccattggtgccaagcctgagtagcgccttcgaaattgtcttctctatttgcatcgcattttggggggttcgctccatgaagcagctgacctcacacccttggaagtag

SEQ ID NO: 20589 - DNA, 1338 bp, Artificial Sequence
  derived and/or modified sequence
atgaaaaatccagaggcccagcaggatgtttctgtgagccaaggattccgcatgctcttttacactatgaaaccttccgagacaagttttcagaccctggaggaggtcccagactacgtcaagaaagctacccctttttttatatcacttatgctgctggaactcgttgtgagctggattctgaagggaaagcccccaggccgtctagacgacgctcttacttcaattagcgccggagttctgtccagactgcctagcctctttttccggtcgatcgagctgacttcttatatttatatttgggaaaactataggctgttcaaccttccctgggatagtccgtggacctggtattcagctttcctgggggtagactttgggtattactggttccatcgcatggcccatgaggtgaacattatgtgggccggacaccaaactcaccactcctctgaagactacaatttatcaactgcactacgtcagagtgtcctgcaaatatatacttcatggatcttctatagcccactcgctttgttcattcctcccagcgtctacgccgttcatctgcagtttaacctgctgtatcagttttggatccacactgaggtgattaacaatctaggcccactggagctgatacttaacacaccatctcatcatcgagtccaccacgggagaaaccgctactgtatagacaaaaactatgcaggagtgctgatcatttgggataaaatctttggcacctttgaggcggaaaacgaaaaggtggtttacggattgacgcaccctattaacacatttgagccaatcaaggtccaattccatcatctgtttagtatatggaccacattctgggctacacctgggttctttaacaagttcagcgtaatttttaaagggccaggatggggtcccggaaagccaaggctgggcttgagcgaggaaattccagaggtcacagggaaggaggtgcctttctcctcctcttccagccagctgctgaagatttacaccgtggttcagttcgctctaatgttggccttttatgaagaaacattcgctgatacagccgctctgtcacaggtgacactgctgctgagagtatgttttattattttgactctgacaagtatcggttttctgctggatcagcgtccaaaggctgcaattatggaaacccttaggtgcctgatgtttttgatgctctacagattcggtcacttgaaacccctggtgccgagcctgtcgagtgccttcgaaatcgtcttctccatctgcattgcattctggggcgtccgctccatgaagcagttgactagccatccctggaagtag

SEQ ID NO: 20590 - DNA, 1338 bp, Artificial Sequence
  derived and/or modified sequence
atgaagaaccccgaggcccagcaggacgtgagcgtgagccagggcttcagaatgctgttctacaccatgaagcccagcgagaccagcttccagaccctggaggaggtgcccgactacgtgaagaaggccacccccttcttcatcagcctgatgctgctggagctggtggtgagctggatcctgaagggcaagccccccggcagactggacgacgccctgaccagcatcagcgccggcgtgctgagcagactgcccagcctgttcttcagaagcatcgagctgaccagctacatctacatctgggagaactacagactgttcaacctgccctgggacagcccctggacctggtacagcgccttcctgggcgtggacttcggctactactggttccacagaatggcccacgaggtgaacatcatgtgggccggccaccagacccaccacagcagcgaggactacaacctgagcaccgccctgagacagagcgtgctgcagatctacaccagctggatcttctacagccccctggccctgttcatcccccccagcgtgtacgccgtgcacctgcagttcaacctgctgtaccagttctggatccacaccgaggtgatcaacaacctgggccccctggagctgatcctgaacacccccagccaccacagagtgcaccacggcagaaacagatactgcatcgacaagaactacgccggcgtgctgatcatctgggacaagatcttcggcaccttcgaggccgagaacgagaaggtggtgtacggcctgacccaccccatcaacaccttcgagcccatcaaggtgcagttccaccacctgttcagcatctggaccaccttctgggccacccccggcttcttcaacaagttcagcgtgatcttcaagggccccggctggggccccggcaagcccagactgggcctgagcgaggagatccccgaggtgaccggcaaggaggtgcccttcagcagcagcagcagccagctgctgaagatctacaccgtggtgcagttcgccctgatgctggccttctacgaggagaccttcgccgacaccgccgccctgagccaggtgaccctgctgctgagagtgtgcttcatcatcctgaccctgaccagcatcggcttcctgctggaccagagacccaaggccgccatcatggagaccctgagatgcctgatgttcctgatgctgtacagattcggccacctgaagcccctggtgcccagcctgagcagcgccttcgagatcgtgttcagcatctgcatcgccttctggggcgtgagaagcatgaagcagctgaccagccacccctggaagtag

SEQ ID NO: 20591 - protein, 98 aa, Artificial Sequence
  derived and/or modified sequence
MASLLCCGPKLAACGIVLSAWGVIMLIMLGIFFNVHSAVLIEDVPFTEKDFENGPQNIYNLYEQVSYNCFIAAGLYLLLGGFSFCQVRLNKRKEYMVR

SEQ ID NO: 20592 - protein, 137 aa, Artificial Sequence
  derived and/or modified sequence
MGWLRPGPRPLCPPARASWAFSHRFPSPLAPRRSPTPFFMASLLCCGPKLAACGIVLSAWGVIMLIMLGIFFNVHSAVLIEDVPFTEKDFENGPQNIYNLYEQVSYNCFIAAGLYLLLGGFSFCQVRLNKRKEYMVR

SEQ ID NO: 20593 - DNA, 297 bp, Artificial Sequence
  derived and/or modified sequence
atggccagcctgctgtgctgcggccccaagctggccgcctgcggcatcgtgctgagcgcctggggcgtgatcatgctgatcatgctgggcatcttcttcaacgtgcacagcgccgtgctgatcgaggacgtgcccttcaccgagaaggacttcgagaacggcccccagaacatctacaacctgtacgagcaggtgagctacaactgcttcatcgccgccggcctgtacctgctgctgggcggcttcagcttctgccaggtgagactgaacaagagaaaggagtacatggtgagatag

SEQ ID NO: 20594 - DNA, 414 bp, Artificial Sequence
  derived and/or modified sequence
atgggctggctgagacccggccccagacccctgtgcccccccgccagagccagctgggccttcagccacagattccccagccccctggcccccagaagaagccccacccccttcttcatggccagcctgctgtgctgcggccccaagctggccgcctgcggcatcgtgctgagcgcctggggcgtgatcatgctgatcatgctgggcatcttcttcaacgtgcacagcgccgtgctgatcgaggacgtgcccttcaccgagaaggacttcgagaacggcccccagaacatctacaacctgtacgagcaggtgagctacaactgcttcatcgccgccggcctgtacctgctgctgggcggcttcagcttctgccaggtgagactgaacaagagaaaggagtacatggtgagatag

SEQ ID NO: 20595 - DNA, 297 bp, Artificial Sequence
  derived and/or modified sequence
atggctagcctgttgtgctgcggccccaagctggccgcttgcgggatcgtgttgtccgcttggggagtgattatgctaattatgcttggaattttcttcaatgtacatagcgcagtcctgatagaggacgtgcccttcacagaaaaggactttgagaatggaccgcagaacatttacaatttgtacgagcaggtaagttacaactgtttcattgctgcggggctctatttactgctaggtggtttctccttttgccaggtacgtctcaacaagagaaaagaatatatggtaagatag

SEQ ID NO: 20596 - DNA, 414 bp, Artificial Sequence
  derived and/or modified sequence
atggggtggctgagaccgggtccccggccgctctgccctcctgcgagagcgtcctgggcattctctcaccgctttccatcccctctggccccccggcgcagccccacacctttctttatggctagtctgttgtgctgcggccctaagcttgccgcttgcggcatcgtgctctctgcttggggcgtcattatgttgatcatgctgggcatcttcttcaacgtacatagcgccgtgcttattgaagatgtgcccttcaccgagaaggactttgaaaatggcccacagaatatatacaatctgtacgagcaagtgtcctacaattgtttcatcgccgcagggttgtatttactgttgggcgggttttctttctgtcaggtacgactgaacaaacgcaaggagtacatggtcaggtag

SEQ ID NO: 20597 - DNA, 297 bp, Artificial Sequence
  derived and/or modified sequence
atggccagcctgctgtgctgcggccccaagctggccgcctgtggcatcgtgctgagcgcctggggcgtcatcatgctgatcatgctgggcatcttcttcaacgtgcacagcgctgtgctgattgaagatgtgcccttcacagagaaggactttgaaaatggcccccagaacatctacaacctgtatgagcaggtgtcctacaactgcttcatcgctgctggcctgtacctgctgctgggcggcttctccttctgccaggtgcggctgaacaagaggaaggagtacatggtgaggtag

SEQ ID NO: 20598 - DNA, 414 bp, Artificial Sequence
  derived and/or modified sequence
atgggctggctgcggcccggcccccggcccctgtgccccccagcccgggcctcctgggccttcagccaccgcttccccagccccctggccccccggcgcagccccacccccttcttcatggccagcctgctgtgctgcggccccaagctggccgcctgtggcatcgtgctgagcgcctggggcgtcatcatgctgatcatgctgggcatcttcttcaacgtgcacagcgctgtgctgattgaagatgtgcccttcacagagaaggactttgaaaatggcccccagaacatctacaacctgtatgagcaggtgtcctacaactgcttcatcgccgccggcctgtacctgctgctgggcggcttctccttctgccaggtgcggctgaacaagaggaaggagtacatggtgaggtag

SEQ ID NO: 20599 - DNA, 297 bp, Artificial Sequence
  derived and/or modified sequence
atggccagcctgctgtgctgcggccccaagctggccgcctgcggcatagtgctcagcgcctggggggtcatcatgctcattatgctggggattttttttaacgtccactcagctgttctgatcgaagacgtacccttcacggagaaagatttcgaaaatggaccgcaaaatatctacaacttgtacgagcaagtctcttacaactgttttattgccgctggcttgtacctgctgctgggaggcttttctttttgtcaggtacggctcaataagcgcaaggagtacatggtgcgatag

SEQ ID NO: 20600 - DNA, 414 bp, Artificial Sequence
  derived and/or modified sequence
atgggctggctgcggcccggcccccggcccctgtgcccccccgccagagcctcctgggcgttcagccatcggtttcccagtcctcttgccccccgaagatctcccaccccctttttcatggcttcattactatgctgcggacctaaactggccgcctgcggtattgtactgtcggcatggggagtcattatgctgataatgctgggtattttcttcaacgtccacagtgccgttctaatcgaagatgtgcccttcacagaaaaggatttcgagaacggccctcagaatatctataacctttatgaacaggtgagctacaattgtttcatcgccgccggactctatctgttactcggaggtttctctttctgccaagtgaggctgaataagcgaaaggaatacatggtccgctag

SEQ ID NO: 20601 - DNA, 297 bp, Artificial Sequence
  derived and/or modified sequence
atggctagtcttctttgctgcggacccaaactcgctgcttgcggaatcgtgctctccgcttggggagtgattatgctcattatgctcggaatctttttcaatgtgcactcggctgtgctgatcgaagacgttcctttcacagagaaagatttcgaaaatggtcctcagaacatttacaacttgtacgagcaggtgagctataactgcttcatcgcagctggactgtatttactgctcggcggattctccttttgtcaggtcagactcaataagcgtaaggaatacatggtgcgttag

SEQ ID NO: 20602 - DNA, 414 bp, Artificial Sequence
  derived and/or modified sequence
atgggttggctaaggcctggcccacgcccactttgtcccccagccagagcatcgtgggccttctcccaccggttcccctcacccctggcacccaggcgttctcccacccctttctttatggccagcctgctgtgctgcggcccaaagttagcagcatgtgggatcgttctctcagcatggggtgtcattatgctaattatgcttgggattttttttaacgtgcacagcgccgttctaattgaagacgtacctttcacagaaaaggattttgagaacggtccccagaatatttataacttgtacgaacaggtcagctataattgcttcattgctgctgggctctacctgctcttgggcggtttctccttctgtcaggttaggttgaacaaacgtaaagagtatatggtcagatag

SEQ ID NO: 20603 - DNA, 747 bp, Artificial Sequence
  derived and/or modified sequence
ttccccaggagcagttttggtttcagacggcgccgtctcccgcgaaagtcctgagaggagcccagccttttccgcctgccgcccccggatgggatggttgaggccggggccacgccccctctgcccccctgcgagggcatcctgggctttctcccaccgctttccgagcccgcttgcacctcggcgatccccgactcccttctttatggcgtcgctcctgtgctgtgggccgaagctggccgcctgcggcatcgtcctcagcgcctggggagtgatcatgttgataatgctcggaatatttttcaatgtccattccgctgtgttgattgaggacgttcccttcacggagaaagattttgagaatggcccccagaacatatacaacctttacgagcaagtcagctacaactgtttcatcgctgcaggcctttacctcctcctcggaggcttctctttctgccaagttcggctcaataagcgcaaggaatacatggtgcgctagggccccggcgcgtttccccgctccagcccctcctctatttaaagactccctgcaccgtgtcacccaggtcgcgtcccacccttgccggcgccctctgcgggactgggtttcccgggcgagagactgaatcccttctcccatctctggcatccggcccccgtggagagggctgaggctggggggctgttccgtttctccacccttcgctgtgtcccgtatctcaataaagagaatctgctctcttc

SEQ ID NO: 20604 - DNA, 810 bp, Artificial Sequence
  derived and/or modified sequence
aacaaaccggaggccctcgctcttccaatactcacgccctagctacagaggtcaaggaaggtttccccaggagcagttttggtttcagacggcgccgtctcccgcgaaagtcctgagaggagcccagccttttccgcctgccgcccccggatgggatggttgaggccggggccacgccccctctgcccccctgcgagggcatcctgggctttctcccaccgctttccgagcccgcttgcacctcggcgatccccgactcccttctttatggcgtcgctcctgtgctgtgggccgaagctggccgcctgcggcatcgtcctcagcgcctggggagtgatcatgttgataatgctcggaatatttttcaatgtccattccgctgtgttgattgaggacgttcccttcacggagaaagattttgagaatggcccccagaacatatacaacctttacgagcaagtcagctacaactgtttcatcgctgcaggcctttacctcctcctcggaggcttctctttctgccaagttcggctcaataagcgcaaggaatacatggtgcgctagggccccggcgcgtttccccgctccagcccctcctctatttaaagactccctgcaccgtgtcacccaggtcgcgtcccacccttgccggcgccctctgcgggactgggtttcccgggcgagagactgaatcccttctcccatctctggcatccggcccccgtggagagggctgaggctggggggctgttccgtttctccacccttcgctgtgtcccgtatctcaataaagagaatctgctctcttca

SEQ ID NO: 20605 - protein, 2367 aa, Artificial Sequence
  derived and/or modified sequence
MGTRGAVMPPPMWGLLGCCFVCAWALGGPRPIRSLPPLSSQVKPGSVPMQVPLEGAEAALAYLYSGDAQQLSQVNCSERYEARGAGAMPGLPPSLQGAAGTLAQAANFLNMLLQANDIRESSVEEDVEWYQALVRSVAEGDPRVYRALLTFNPPPGASHLQLALQATRTGEETILQDLSGNWVQEENPPGDLDTPALKKRVLTNDLGSLGSPKWPQADGYVGDTQQVRLSPPFLECQEGRLRPGWLITLSATFYGLKPDLSPEVRGQVQMDVDLQSVDINQCASGPGWYSNTHLCDLNSTQCVPLESQGFVLGRYLCRCRPGFYGASPSGGLEESDFQTTGQFGFPEGRSGRLLQCLPCPEGCTSCMDATPCLVEEAAVLRAAVLACQACCMLAIFLSMLVSYRCRRNKRIWASGVVLLETVLFGFLLLYFPVFILYFKPSVFRCIALRWVRLLGFAIVYGTIILKLYRVLQLFLSRTAQRSALLSSGRLLRRLGLLLLPVLGFLAVWTVGALERGIQHAPLVIRGHTPSGRHFYLCHHDRWDYIMVVAELLLLCWGSFLCYATRAVLSAFHEPRYMGIALHNELLLSAAFHTARFVLVPSLHPDWTLLLFFFHTHSTVTTTLALIFIPKFWKLGAPPREEMVDEVCEDELDLQHSGSYLGSSIASAWSEHSLDPGDIRDELKKLYAQLEVHKTKEMAANNPHLPKKRGSSCQGLGRSFMRYLAEFPEALARQHSRDSGSPGHGSLPGSSRRRLLSSSLQEPEGTPALHKSRSTYDQRREQDPPLLDSLLRRKLAKKASRTESRESVEGPPALGFRSASAHNLTVGERLPRARPASLQKSLSVASSREKALLMASQAYLEETYRQAKEREERKKAKAAMASLVRRPSARRLERPRGAPLSAPPSPAKSSSVDSSHTSGRLHEEARRRLPHPPIRHQVSTPILALSGGLGEPRMLSPTSTLAPALLPALAPTPAPALAPVPVSPQSPNLLTYICPWENAELPAKQENVPQEGPSGPERGHHSPAPARARLWRALSVAVEKSRAGENEMDAEDAHHQREANDVDEDRPKIFPKSHSLKAPVQQGSMRSLGLAIKALTRSRSTYREKESVEESPEGQNSGTAGESMGAPSRSPRLGRPKAVSKQAALIPSDDKESLQNQQNAHTSRMLQVCQREGSREQEDRGRRMTQGLGERKAERAGKTGLAMLRQVSRDKNIKQSKETPVGWQELPKAGLQSLGSADHRVAEVCPWEVTESETRQPDSGNKAEICPWETSEGAPESRALRQDPGDSQKKRGEARGKSEPIDVVPMMRKKPERLVREQEAVCPWESADRGGLSPGSAPQDPGRIRDKSEAGDSVEARKVEKPGWEAAGPEAHTPDITKAEPCPWEASEGGEDGKPAQEAVKDLPQEKQKTRKATFWKEQKPGGDLESLCPWESTDFRGPSAVSIQAPGSSECSGSLGSGIAEVCLWEAGDAPAIQKAEICPWELDDNVMGQEMLSLGTGRESLQEKEKASRKGSFGEMGEQTVKAVQKLSQQQESVCPRESTVPGHSSPCLDNSSSKAGSQFLCNGGSRATQVCPQEDLRPEAQEATPAKTEICPWEVNERTREEWTSAQVPRGGESQKDKEKMPGKSEIEDVTAWEKPEGQIQKQEAVGPWESVDPGSFSPQPRPQDTERPQTLLQMSGSVGSKAADICPLDVEENLTAGKAEICPWEVGAGAGEERALGAEAIRKSPNDTGKVSADLGPRERAVTAPEKPQKPTPEWEVACPWGSVGPGACSQHPGTLDADGPKAGFQELDHMGCRPGEVCPWEAQEAATSEKAKICPWEVSEGTTGKGLDQKAGSESAEQREKALEKGRLTSLGEDVSKGMAKLCQQQETICIWENKDLRESPAQAPKISDLPSSMSSEVAEGHSLEATEKGDLRQDPKTGSFPEHITQEKAPAADTEEFTTEDGEKTSHELQSVCPWETTAPADSVSHLDRQRPDQPKASSQRLVSTGGRAADVCPWDVPDAGVYKSDSSAKAETCPWEVTERIPVKGVSRQDGKGDSQEEKGRAPEKSEPKGVPVQKKPEMADFRQQEAVCPWESQDGKGLSPQPAPDASDRSRGSSEAAGSVETRVAEVCLWEVVEAPSAKKAEICPWEAGGGAAEEGEQERESQGQGEMFLQKAGPGGTEEHFSKAAAKPREQEAVCPGEGTGSGGLLPQSGALDPELKVSPKEAGSMGSRMAELCQWEITDPEGNKIKGTMADICPGEETGVPSEESGLLALTATRREFFPTAPEKPLCLLVHGPLDHFFPESKIPCPKVSRPASTFTLEGVRELQGPSGLEPRTSLAPEPSLQEAESQSSSLTEDSGQVAFEAQYEEFTPPTVYPWDWE

SEQ ID NO: 20606 - DNA, 7104 bp, Artificial Sequence
  derived and/or modified sequence
atgggcaccagaggcgccgtgatgcccccccccatgtggggcctgctgggctgctgcttcgtgtgcgcctgggccctgggcggccccagacccatcagaagcctgccccccctgagcagccaggtgaagcccggcagcgtgcccatgcaggtgcccctggagggcgccgaggccgccctggcctacctgtacagcggcgacgcccagcagctgagccaggtgaactgcagcgagagatacgaggccagaggcgccggcgccatgcccggcctgccccccagcctgcagggcgccgccggcaccctggcccaggccgccaacttcctgaacatgctgctgcaggccaacgacatcagagagagcagcgtggaggaggacgtggagtggtaccaggccctggtgagaagcgtggccgagggcgaccccagagtgtacagagccctgctgaccttcaaccccccccccggcgccagccacctgcagctggccctgcaggccaccagaaccggcgaggagaccatcctgcaggacctgagcggcaactgggtgcaggaggagaacccccccggcgacctggacacccccgccctgaagaagagagtgctgaccaacgacctgggcagcctgggcagccccaagtggccccaggccgacggctacgtgggcgacacccagcaggtgagactgagcccccccttcctggagtgccaggagggcagactgagacccggctggctgatcaccctgagcgccaccttctacggcctgaagcccgacctgagccccgaggtgagaggccaggtgcagatggacgtggacctgcagagcgtggacatcaaccagtgcgccagcggccccggctggtacagcaacacccacctgtgcgacctgaacagcacccagtgcgtgcccctggagagccagggcttcgtgctgggcagatacctgtgcagatgcagacccggcttctacggcgccagccccagcggcggcctggaggagagcgacttccagaccaccggccagttcggcttccccgagggcagaagcggcagactgctgcagtgcctgccctgccccgagggctgcaccagctgcatggacgccaccccctgcctggtggaggaggccgccgtgctgagagccgccgtgctggcctgccaggcctgctgcatgctggccatcttcctgagcatgctggtgagctacagatgcagaagaaacaagagaatctgggccagcggcgtggtgctgctggagaccgtgctgttcggcttcctgctgctgtacttccccgtgttcatcctgtacttcaagcccagcgtgttcagatgcatcgccctgagatgggtgagactgctgggcttcgccatcgtgtacggcaccatcatcctgaagctgtacagagtgctgcagctgttcctgagcagaaccgcccagagaagcgccctgctgagcagcggcagactgctgagaagactgggcctgctgctgctgcccgtgctgggcttcctggccgtgtggaccgtgggcgccctggagagaggcatccagcacgcccccctggtgatcagaggccacacccccagcggcagacacttctacctgtgccaccacgacagatgggactacatcatggtggtggccgagctgctgctgctgtgctggggcagcttcctgtgctacgccaccagagccgtgctgagcgccttccacgagcccagatacatgggcatcgccctgcacaacgagctgctgctgagcgccgccttccacaccgccagattcgtgctggtgcccagcctgcaccccgactggaccctgctgctgttcttcttccacacccacagcaccgtgaccaccaccctggccctgatcttcatccccaagttctggaagctgggcgccccccccagagaggagatggtggacgaggtgtgcgaggacgagctggacctgcagcacagcggcagctacctgggcagcagcatcgccagcgcctggagcgagcacagcctggaccccggcgacatcagagacgagctgaagaagctgtacgcccagctggaggtgcacaagaccaaggagatggccgccaacaacccccacctgcccaagaagagaggcagcagctgccagggcctgggcagaagcttcatgagatacctggccgagttccccgaggccctggccagacagcacagcagagacagcggcagccccggccacggcagcctgcccggcagcagcagaagaagactgctgagcagcagcctgcaggagcccgagggcacccccgccctgcacaagagcagaagcacctacgaccagagaagagagcaggacccccccctgctggacagcctgctgagaagaaagctggccaagaaggccagcagaaccgagagcagagagagcgtggagggcccccccgccctgggcttcagaagcgccagcgcccacaacctgaccgtgggcgagagactgcccagagccagacccgccagcctgcagaagagcctgagcgtggccagcagcagagagaaggccctgctgatggccagccaggcctacctggaggagacctacagacaggccaaggagagagaggagagaaagaaggccaaggccgccatggccagcctggtgagaagacccagcgccagaagactggagagacccagaggcgcccccctgagcgccccccccagccccgccaagagcagcagcgtggacagcagccacaccagcggcagactgcacgaggaggccagaagaagactgccccacccccccatcagacaccaggtgagcacccccatcctggccctgagcggcggcctgggcgagcccagaatgctgagccccaccagcaccctggcccccgccctgctgcccgccctggcccccacccccgcccccgccctggcccccgtgcccgtgagcccccagagccccaacctgctgacctacatctgcccctgggagaacgccgagctgcccgccaagcaggagaacgtgccccaggagggccccagcggccccgagagaggccaccacagccccgcccccgccagagccagactgtggagagccctgagcgtggccgtggagaagagcagagccggcgagaacgagatggacgccgaggacgcccaccaccagagagaggccaacgacgtggacgaggacagacccaagatcttccccaagagccacagcctgaaggcccccgtgcagcagggcagcatgagaagcctgggcctggccatcaaggccctgaccagaagcagaagcacctacagagagaaggagagcgtggaggagagccccgagggccagaacagcggcaccgccggcgagagcatgggcgcccccagcagaagccccagactgggcagacccaaggccgtgagcaagcaggccgccctgatccccagcgacgacaaggagagcctgcagaaccagcagaacgcccacaccagcagaatgctgcaggtgtgccagagagagggcagcagagagcaggaggacagaggcagaagaatgacccagggcctgggcgagagaaaggccgagagagccggcaagaccggcctggccatgctgagacaggtgagcagagacaagaacatcaagcagagcaaggagacccccgtgggctggcaggagctgcccaaggccggcctgcagagcctgggcagcgccgaccacagagtggccgaggtgtgcccctgggaggtgaccgagagcgagaccagacagcccgacagcggcaacaaggccgagatctgcccctgggagaccagcgagggcgcccccgagagcagagccctgagacaggaccccggcgacagccagaagaagagaggcgaggccagaggcaagagcgagcccatcgacgtggtgcccatgatgagaaagaagcccgagagactggtgagagagcaggaggccgtgtgcccctgggagagcgccgacagaggcggcctgagccccggcagcgccccccaggaccccggcagaatcagagacaagagcgaggccggcgacagcgtggaggccagaaaggtggagaagcccggctgggaggccgccggccccgaggcccacacccccgacatcaccaaggccgagccctgcccctgggaggccagcgagggcggcgaggacggcaagcccgcccaggaggccgtgaaggacctgccccaggagaagcagaagaccagaaaggccaccttctggaaggagcagaagcccggcggcgacctggagagcctgtgcccctgggagagcaccgacttcagaggccccagcgccgtgagcatccaggcccccggcagcagcgagtgcagcggcagcctgggcagcggcatcgccgaggtgtgcctgtgggaggccggcgacgcccccgccatccagaaggccgagatctgcccctgggagctggacgacaacgtgatgggccaggagatgctgagcctgggcaccggcagagagagcctgcaggagaaggagaaggccagcagaaagggcagcttcggcgagatgggcgagcagaccgtgaaggccgtgcagaagctgagccagcagcaggagagcgtgtgccccagagagagcaccgtgcccggccacagcagcccctgcctggacaacagcagcagcaaggccggcagccagttcctgtgcaacggcggcagcagagccacccaggtgtgcccccaggaggacctgagacccgaggcccaggaggccacccccgccaagaccgagatctgcccctgggaggtgaacgagagaaccagagaggagtggaccagcgcccaggtgcccagaggcggcgagagccagaaggacaaggagaagatgcccggcaagagcgagatcgaggacgtgaccgcctgggagaagcccgagggccagatccagaagcaggaggccgtgggcccctgggagagcgtggaccccggcagcttcagcccccagcccagaccccaggacaccgagagaccccagaccctgctgcagatgagcggcagcgtgggcagcaaggccgccgacatctgccccctggacgtggaggagaacctgaccgccggcaaggccgagatctgcccctgggaggtgggcgccggcgccggcgaggagagagccctgggcgccgaggccatcagaaagagccccaacgacaccggcaaggtgagcgccgacctgggccccagagagagagccgtgaccgcccccgagaagccccagaagcccacccccgagtgggaggtggcctgcccctggggcagcgtgggccccggcgcctgcagccagcaccccggcaccctggacgccgacggccccaaggccggcttccaggagctggaccacatgggctgcagacccggcgaggtgtgcccctgggaggcccaggaggccgccaccagcgagaaggccaagatctgcccctgggaggtgagcgagggcaccaccggcaagggcctggaccagaaggccggcagcgagagcgccgagcagagagagaaggccctggagaagggcagactgaccagcctgggcgaggacgtgagcaagggcatggccaagctgtgccagcagcaggagaccatctgcatctgggagaacaaggacctgagagagagccccgcccaggcccccaagatcagcgacctgcccagcagcatgagcagcgaggtggccgagggccacagcctggaggccaccgagaagggcgacctgagacaggaccccaagaccggcagcttccccgagcacatcacccaggagaaggcccccgccgccgacaccgaggagttcaccaccgaggacggcgagaagaccagccacgagctgcagagcgtgtgcccctgggagaccaccgcccccgccgacagcgtgagccacctggacagacagagacccgaccagcccaaggccagcagccagagactggtgagcaccggcggcagagccgccgacgtgtgcccctgggacgtgcccgacgccggcgtgtacaagagcgacagcagcgccaaggccgagacctgcccctgggaggtgaccgagagaatccccgtgaagggcgtgagcagacaggacggcaagggcgacagccaggaggagaagggcagagcccccgagaagagcgagcccaagggcgtgcccgtgcagaagaagcccgagatggccgacttcagacagcaggaggccgtgtgcccctgggagagccaggacggcaagggcctgagcccccagcccgcccccgacgccagcgacagaagcagaggcagcagcgaggccgccggcagcgtggagaccagagtggccgaggtgtgcctgtgggaggtggtggaggcccccagcgccaagaaggccgagatctgcccctgggaggccggcggcggcgccgccgaggagggcgagcaggagagagagagccagggccagggcgagatgttcctgcagaaggccggccccggcggcaccgaggagcacttcagcaaggccgccgccaagcccagagagcaggaggccgtgtgccccggcgagggcaccggcagcggcggcctgctgccccagagcggcgccctggaccccgagctgaaggtgagccccaaggaggccggcagcatgggcagcagaatggccgagctgtgccagtgggagatcaccgaccccgagggcaacaagatcaagggcaccatggccgacatctgccccggcgaggagaccggcgtgcccagcgaggagagcggcctgctggccctgaccgccaccagaagagagttcttccccaccgcccccgagaagcccctgtgcctgctggtgcacggccccctggaccacttcttccccgagagcaagatcccctgccccaaggtgagcagacccgccagcaccttcaccctggagggcgtgagagagctgcagggccccagcggcctggagcccagaaccagcctggcccccgagcccagcctgcaggaggccgagagccagagcagcagcctgaccgaggacagcggccaggtggccttcgaggcccagtacgaggagttcaccccccccaccgtgtacccctgggactgggagtag

SEQ ID NO: 20607 - DNA, 7980 bp, Artificial Sequence
  derived and/or modified sequence
gtcctgagagctgccccaaggatgggcaccaggggagcggtcatgccccctcctatgtgggggctgctgggctgctgttttgtctgtgcctgggctctggggggtccacggcccatccgctctctgccccctctgtcttcccaagtcaagccaggatctgtacccatgcaggtgcccctagagggggccgaggccgccctcgcttatctctactctggagatgcccagcagctatcacaggtgaattgcagtgagcgctatgaagcgcgtggggcaggagccatgccagggctccccccaagcctacagggggcagcgggcacccttgcccaggccgccaattttctcaacatgctgctgcaagccaacgacatccgtgagtccagtgtggaggaggatgtggaatggtaccaggcactggtccgcagcgtggccgagggggacccaagagtgtacagggctttgctgacctttaaccctccaccaggggccagccacctacagctggccctgcaggccacccggactggggaggaaaccatcctgcaggacttgtctgggaactgggtgcaggaggagaaccctcctggggacctggacacccctgccctgaagaagcgagtgttgaccaatgacctagggagcctcggcagccccaagtggccgcaggcagatggatatgtgggggacacgcagcaggtgaggctgtctcctcctttcctggaatgccaggagggacggctccgacctggatggctgatcacactctctgccaccttctatggactcaagccagacctcagcccagaagtcagggggcaggtgcagatggacgtagatctccagagtgtggacatcaatcagtgtgcaagtggcccaggctggtactctaacacacacctgtgtgatctcaacagcacccagtgtgttcccctggagagtcagggctttgttcttggccgctacctctgccgctgccgacctggattctacggggcaagcccctctggggggttagaggagagtgacttccagactaccgggcaattcgggttcccagaaggcagatctgggagactgctgcagtgtctgccatgtcctgagggctgcaccagctgcatggatgccacaccgtgcctggtggaagaggccgcggtgctgcgggccgctgtgctggcctgccaggcctgctgcatgctggccatcttcctgagcatgctggtctcctaccgctgccgccggaacaagaggatctgggcatctggagtggtcctgctggaaactgtcctttttggattcctgctgctttactttcctgtcttcatcctatacttcaagcccagtgtattccgctgcatcgctcttcgctgggtgcggctgctgggttttgccatcgtctacggcaccatcatactcaagctttacagagtgctgcagctgtttctgtctcgaacggcccagcggagtgcccttctgagcagcgggcggctgctgcggcgcctggggctgctcctgctacctgtgctgggcttcctggctgtgtggaccgtgggcgccctggagcgaggcatccagcacgcacctctggtgatccgaggccacactcccagtggccgccatttctacctctgtcaccacgaccgctgggactacatcatggttgtggctgagctgctgctgctgtgctggggcagcttcctctgctacgccacacgggctgtgctctcggccttccatgagccacgctacatgggcatcgccctgcacaatgagctactgctttccgctgccttccacacagccaggtttgtgctggttccctctctgcacccggactggaccctcctcctcttcttcttccacacccacagcacagtcaccaccacgctggctctgatcttcatccctaagttctggaagctgggggctcctccccgggaggagatggtggatgaggtgtgtgaggacgagctggacctgcagcactcaggctcctaccttggcagcagcatcgcctcagcctggagtgagcacagcctggaccctggagacattcgggacgagctgaagaagctctatgcccagctagaggtccacaaaaccaaggaaatggccgcaaacaacccccacctgcccaagaagcgaggcagctcatgccagggactgggccgctccttcatgaggtacctggcggaattccccgaggccctggccaggcagcactcccgggactcaggatccccaggccacggcagcctgcccggctcctcccgccgccggctcctcagctccagcctccaggaacccgaggggacaccagctctgcacaagtcccgcagcacctatgaccagcgcagggagcaggacccgcctcttcttgactcactgctgaggaggaagctggccaagaaggcctctcgaacagagagccgggagtcggtggaggggccccctgccctgggcttcaggtcagccagcgcccacaacctgacggtgggagagaggctacccagagcccggcccgcctctctgcagaagtcgctcagtgtggccagctccagggaaaaggccttgctcatggccagccaggcctacctggaggagacctaccggcaagcaaaggagcgggaggagcggaagaaggccaaggcagccatggccagcctggtgcggaggccatcagccaggaggctggagcggcctcgaggggcccccctgtcagctccaccttcccctgccaagagcagcagcgtggacagctctcacacctctgggaggcttcatgaggaggctaggagaaggctgcctcatccacccatcaggcaccaggtttctacccccatcttggccctgtctgggggcctgggagagccaaggatgctatctcccacctccaccttggctccagctctgctgccagctctagctccaaccccagcccctgccctggcaccagtcccagtatccccacaaagccccaacttactcacctacatctgcccctgggagaacgcagaactgccagccaagcaagaaaatgtgccccaggaaggcccctcagggccagagcgaggccaccactcccctgccccagctcgagccaggctctggagggccctctctgttgcagtagagaaaagcagggctggggagaatgagatggacgcagaggatgcacatcaccagagggaagctaatgatgtggacgaagacaggcccaagatcttccctaaatcccacagcctcaaggcccctgttcagcagggttccatgcgcagcctggggctggcgattaaagctctgacccgttctcggagcacctacagagagaaggagagtgtggaggagagtcccgaggggcagaacagcgggactgcgggagagagtatgggggcaccctcccgatcgcccaggctaggccggcccaaggcggtgagtaagcaggccgctcttatcccctccgatgacaaggagtccctccagaaccaacagaacgctcacaccagcaggatgctccaagtctgtcaacgggagggcagcagggaacaagaagacagaggcaggaggatgacccagggtctaggggaacggaaagctgagagagcaggtaaaacagggcttgccatgctgaggcaagtttccagggacaaaaacatcaagcaatcaaaagaaacccctgtcgggtggcaggaactgcccaaagctggcctccagtccctcggcagcgctgaccacagggtggcagaggtatgcccctgggaggtcactgaatcagaaacgcgtcagccagacagtggcaacaaggccgaaatctgcccctgggagacgagtgaaggagccccagagtcgagggcactaagacaagacccaggtgactcccaaaaaaagagaggggaggcccggggaaaatcagagcccatagatgtggttcccatgatgcggaaaaagccagagaggctggtgagggagcaggaagcagtgtgtccctgggagagtgccgatcgaggaggtctgtcccctgggtcagctcctcaggaccctggcagaatcagagacaaatctgaggcgggggacagtgtggaggccaggaaggtggagaagcctgggtgggaagctgctggcccagaagctcatacccctgacatcaccaaggcagagccgtgtccctgggaggcaagtgaaggaggcgaggatgggaaaccagcccaagaggcagtgaaggatctccctcaggaaaagcagaaaaccaggaaagcaaccttttggaaagaacagaaaccgggaggagacttggagtctctttgtccatgggagagtacagatttccggggcccctcagcagtctcaattcaggccccaggaagctcagagtgttcagggagtttgggcagtggcattgctgaagtgtgtctgtgggaggcaggagatgctcctgctatccagaaagcagagatctgtccctgggagctggatgataacgtgatggggcaggaaatgctgagtctggggacaggtagagaatctcttcaagaaaaggaaaaagcctccagaaaaggaagctttggagagatgggggaacaaactgtgaaagcagtgcagaaattaagtcaacagcaggagtcagtttgtcccagggagagcacggtccctgggcactccagcccatgtctagacaattcctcatccaaagctggtagccaattcctatgcaatggaggaagcagagcaacgcaggtgtgtccacaggaagatctcaggccggaggcacaggaagcaacacctgccaaaacagaaatctgtccctgggaggtaaatgaaagaacaagagaggaatggacatcagcacaggtgccaagaggaggagaatctcaaaaggacaaggagaaaatgcctggaaaatcggaaatcgaagatgtcacagcttgggaaaagcctgaggggcagatccaaaagcaagaagcggtcggcccctgggagagtgtggaccctggcagcttctccccacaaccacgtcctcaagacacagagagaccccaaacccttctccagatgtcaggcagtgtgggaagcaaagctgccgacatttgccctttggatgtggaggaaaacttgactgctgggaaggcagaaatctgtccctgggaggtgggtgctggagcaggggaggaaagggctttgggagctgaggccattaggaaatctccaaatgatacaggcaaggtttctgcagatcttggacccagggagagagctgttactgctccagagaagccacagaagccaaccccagagtgggaggtggcttgtccctgggggagtgtgggtccaggggcctgttctcagcatccaggtactctagatgctgatggaccaaaagctgggttccaggaactggatcatatgggctgcaggccaggtgaagtgtgtccctgggaagcacaggaagctgctaccagtgaaaaagccaagatctgtccctgggaggtaagtgaaggaactactgggaagggattggaccaaaaggcagggagtgaatcagcagagcagagggagaaagctctagaaaaggggagactcacttccctgggagaagacgtatcaaaagggatggcaaaactgtgtcaacaacaggaaactatttgtatttgggagaacaaggacttgagggaatcccctgctcaggcccccaagatctcagacttgcccagcagcatgagtagtgaagtggcagagggacattccttggaagcaacagagaagggggacctgagacaagacccaaagacaggttccttcccagaacacataacccaagaaaaagctccagctgcagacacagaagaattcactactgaagatggggaaaaaacaagccatgagctacaatccgtctgtccatgggagaccactgccccagcagattccgtctctcacctagacagacagcgccctgaccaacctaaagctagctcccagagactggtcagcactgggggcagggccgctgacgtgtgcccatgggatgttcctgatgcaggtgtgtataaatctgacagcagtgccaaggctgagacctgtccctgggaagtgactgaaagaatccctgtcaaaggggtgtcaaggcaggatggaaaaggggactctcaagaagagaaaggcagagccccagaaaaatcagagccaaaaggtgtgccagttcagaaaaagccagagatggcagacttcaggcagcaggaggctgtgtgtccctgggagagtcaagatggcaagggtctgtccccacagccagccccagatgcttctgacagaagcagaggcagttctgaggcagcaggcagtgtggagaccagggtagcggaagtgtgtctgtgggaagtggtagaggctccctctgccaagaaagcagagatctgcccttgggaggcgggtggaggagcagcagaggaaggggaacaggaaagagaatcacaagggcaaggagagatgttccttcagaaggcaggacctggagggacggaagaacacttctcaaaagcagcagcaaagcccagagagcaggaggcagtctgccctggggaaggcacaggctcaggagggctcttgccccagtcaggtgccctggacccagaactcaaagtcagccccaaggaagcaggcagcatgggaagcaggatggcagagctgtgccaatgggaaatcacagatccagaaggaaataaaataaagggtaccatggcagacatctgtcctggggaggaaactggagtcccatctgaggaatctggcctcctggctttaacagcaactcggagagaatttttccccacagctcctgaaaaaccactatgccttttagtccatgggcctctggatcacttctttccagaaagcaaaatcccctgccccaaggtaagcaggccagccagtactttcactctagaaggtgtcagagaactacaaggaccttcagggcttgagccaaggaccagcttagccccagagccaagtctccaggaagctgagtctcagtcttcgtccttaactgaagactcaggccaagtggcttttgaagctcagtatgaagaattcacccctcccactgtctatccttgggattgggagtaacagccttattaggtgaggtcaaacacagagctagctttcaggagccaaggccctttccaagtccaggtgttcccaaagagctgaatcaaagacagcttggccacttcccctccttgagaagaccagaagtcaacccatcccaaagacaaactgcatgaaaagggtacagcttagaccccaatgggaaggcccaccctctctttacttctaacttttcttcctgtttgaggaaacaaagactggacactctacttctaaggacgcctcccatccacctacagtactcacaacacaaaccacccgagtctggacactcacccacaaagccactgttagggatgaaaaaagtcagttgtgcccagcctaccttctctcacagggggacccaattctctgaagtctacgatggagcattttttgagaagaaactaaaccatacaaagtgttggcaacgtagggatggtggaccacagaaggctataaaggccaccatagaaagctgaagagccatttaattgaagcggaagataaattgggggaaaagctaaaatgactcaaaataggggcctgaaaatgctttaaggaccttgtcattttgactttgaatctcctgtttctgctttattgcttctcatacctgccctgcttgactgctgaagcagaaacaatcaggcacgctgacacccttatcagcatctggcatccaaagcaacatcagagagagagaacacagaagaaaagcaattgccccaggtcctccccacagtcaagggagctcttccttccagacatccttgtgtgcctcttgctagttttttagggggtctccccctcttcctgccctagctctcacca

SEQ ID NO: 20608 - DNA, 7104 bp, Artificial Sequence
  derived and/or modified sequence
atgggaacacgaggggccgttatgccgccacctatgtggggcctgctgggttgctgttttgtttgtgcatgggccctcggtggccctaggcccattcgctctcttcccccactgagctctcaggtgaaaccgggcagcgtacccatgcaggtgccgctggagggggccgaggctgccttagcctacctctactccggcgatgcccaacagctgagccaagtgaattgctcggagcggtacgaggccagaggtgcaggggcaatgccaggactcccccctagtcttcagggtgcagctggaactctggcccaggccgcaaattttctcaatatgctactccaggccaatgatattcgagaaagttcagtcgaggaagatgttgaatggtatcaggcattggtgaggtccgttgccgagggtgatccaagagtgtatagagcattgctcacatttaatccacctccaggggcttcacatctccagctggcattgcaggccacgcggaccggagaagagacaatcctgcaggacctgtctggaaactgggttcaggaagaaaacccgcctggtgatttggacacacccgccctgaaaaaacgcgttctcaccaacgatctgggctccctcgggtccccaaagtggcctcaggcagatggatacgtgggcgacacccaacaggtgcgactgagccctccgttccttgaatgtcaagaaggacgtttgaggcctgggtggctgatcacactctcggccacattctacggcctgaagcctgatctatcccctgaggtgcgcggacaggtccagatggatgttgacctgcagagcgtggacattaaccagtgcgccagcggcccagggtggtacagtaacacacacttgtgtgacctcaatagcacacaatgtgtacctctggagtcgcagggcttcgtgcttggacgctatttatgccgttgccgccccggcttctatggtgctagcccgtcaggcggtttggaggaaagtgacttccagaccacagggcaatttggattccctgaggggaggagcgggcggctgctgcagtgtttgccttgccccgaaggttgcacaagttgcatggatgccacaccttgtttggtggaggaagctgctgttctgcgcgctgccgtcttagcttgccaggcatgctgcatgctcgccatcttcctgtcgatgctcgtctcataccgctgccggcggaacaaaaggatctgggcatctggtgtcgtgctgctcgagacagtcctttttggatttctattattatatttccccgtatttatcctgtattttaagcctagcgtttttcgttgtatcgcattacggtgggttagactcttgggttttgccattgtttacggaactatcattttgaaactgtaccgggttctgcagctcttcctgagccgcacggctcagaggtctgccctgctctccagtggccgactccttcgccgcttgggcctcctgttactgcccgtcctgggatttctggctgtgtggactgtgggggccctggagagaggaattcagcacgcgcctttggtcattcgggggcataccccgtccggacgacacttctacttatgtcatcacgatagatgggattatattatggtggtggccgaactgttgctgctctgctggggttcatttctctgctatgccacccgggccgtcttatcagcctttcatgaaccacgctacatgggaatcgcactgcacaatgaattgctgctctccgccgccttccatacagcccggttcgtcttagtgccatctctacaccctgattggaccctcctgttgtttttttttcacacacatagcacagtcacaacgaccttggccctgatcttcattccaaaattttggaaactgggagcccctccacgagaagagatggtggatgaggtatgcgaagatgaacttgaccttcagcattcaggttcgtacctgggttcctctattgcgagcgcgtggtcagagcattctttagaccccggcgatataagagatgaattgaagaaactgtacgcccaactggaagtccacaagactaaagaaatggctgctaataatccccacctacccaaaaagaggggctcatcctgccaggggctgggacggtccttcatgcgttatttagccgaatttcccgaagcactggcaaggcagcattcaagggactcagggtcccctgggcacggaagcctgccagggagctctaggaggcgcctcctttcaagtagtctgcaggaaccggaaggaacaccagctcttcacaagtcaagatctacctacgatcaaaggagggaacaggacccccccctactcgattccttgttaaggcggaagctcgctaagaaagccagcaggactgagagccgcgagagtgttgagggtccaccggccctaggctttagaagtgcaagtgctcacaatctgaccgtcggagagaggctcccaagggcacgtccagcctctttgcaaaaaagtcttagtgtagccagcagcagagagaaggccttgctgatggccagccaggcgtacctggaggagacttatcgccaggccaaggaacgcgaggagagaaaaaaagctaaagcagcaatggcctctttagtgcggcgaccctcagcccggcgcctggagcggcctcgaggcgctcctctgtcggcgcctccctcaccggctaaaagtagttctgttgacagctcccacacgtcggggaggttgcacgaagaggcccgccgacggttaccccacccccccatcagacatcaagtatctacaccaatcctcgcgctgtctgggggccttggggagccccggatgctcagtccaacctctacacttgcccctgccctactgccagccctcgctccgactcccgccccagccctggcccccgtgcctgtcagtccccagagtcccaacttgcttacctacatatgcccttgggagaatgccgaattaccagccaaacaggagaacgtgccccaggagggcccgagtggtcctgagcgaggtcatcattccccagccccagcacgtgctcggttgtggagagccctctccgtagcagtcgagaagagcagagccggtgagaatgagatggacgccgaggatgctcaccaccagagggaagccaatgatgtggacgaagatcgacccaagatctttcctaaatctcactcgctaaaagccccggttcagcaaggatccatgaggtccctggggctggccataaaggcattgacccgtagccgctctacttacagagagaaagagtcggtggaagagagtcctgagggccaaaactcaggaacggcaggtgagtcaatgggagctccatcccgaagccctcgattgggtagaccaaaagccgtctccaagcaggctgctctgatcccctccgacgataaagagtcccttcagaaccagcagaatgcccatacttcaaggatgttacaggtgtgccagagggagggctcacgtgagcaagaggatagaggccggcggatgacccagggtcttggggaaagaaaggctgaaagagctggaaagactggtttggccatgcttagacaagtgtcgcgggacaaaaatattaaacagagcaaagaaacgccagttggatggcaggagctacccaaagcaggcctccaaagcctgggatctgctgaccatcgcgtggctgaggtctgcccttgggaggtcaccgagtccgaaacccgccaaccggacagcggcaacaaggcggaaatctgcccttgggaaacatctgagggtgcacccgagtcccgggctctgcgtcaagacccgggtgattctcaaaagaaaaggggggaagcccgggggaaaagcgagccaatcgatgtggtgcccatgatgagaaagaagccagaacgcctggttcgggaacaggaagccgtgtgcccctgggaatcagcagatcgaggagggcttagtccaggaagcgctccgcaagacccaggacgtattagagataagtcagaagctggcgactccgtcgaggcaaggaaggtagaaaagcctggttgggaggcagcaggaccagaggcccacacgcccgatattaccaaagctgagccttgcccctgggaagcttcagaaggcggagaggatggaaagcctgcccaagaggcagtgaaagatctgcctcaggagaaacagaagacaaggaaggcaacattctggaaggagcagaagcccggtggcgacctggaatctctctgcccctgggagagcacggatttcaggggaccgtcagcagtttcaatccaggctcctggctccagcgaatgttctggctctctgggcagtggaatagctgaagtgtgcctgtgggaagccggcgatgccccagccatccagaaagccgaaatctgcccttgggagctcgatgataatgtgatggggcaggaaatgctaagcctgggaacaggtcgggaatcactccaggaaaaggagaaggctagccggaagggatccttcggagagatgggagaacagacggttaaggcagtgcagaagctctcccagcaacaggagagcgtgtgccctcgggagagtacagtgcccgggcacagctcaccctgcctggacaactcctcctccaaagctggatctcagttcttatgcaacggtgggtctagggccacacaagtgtgccctcaagaggaccttcggcccgaagctcaggaagccacgcccgcaaagacagagatatgtccatgggaggttaatgagagaactcgggaggaatggacatccgcacaggttccccgtggaggggagagccaaaaggacaaagaaaagatgcccggaaagtcggaaatcgaagatgtgactgcatgggagaaaccggaggggcaaattcagaagcaggaggcagttggaccgtgggagtcagtcgaccctggatctttcagcccccaaccgaggccccaggatacagagcggcctcagactttgctccagatgagcggcagtgtcggctccaaagctgccgatatctgtcctcttgatgtggaggaaaacctgacagcaggaaaggcggaaatttgtccatgggaagtcggtgccggcgctggcgaggaaagagccttaggagcggaggctatccgcaagagtcccaatgacactggtaaagtgagtgccgacctgggccctcgggagagggccgtgacagccccggaaaaacctcagaaacctacccccgagtgggaggtcgcgtgtccctggggatctgtcggtccaggagcctgttcccaacatcctggtacacttgatgccgacgggcctaaggcaggcttccaagaactagaccacatggggtgccgaccaggagaggtttgcccttgggaagcccaggaggccgctacgtccgagaaggctaaaatctgcccgtgggaagtctccgaaggaaccacgggaaagggcttggatcagaaagccggctctgaatcggccgagcaacgggaaaaagcccttgagaagggccggttgacctcattgggcgaagacgtgagcaaggggatggcaaaactctgtcagcagcaagagactatctgcatctgggaaaataaggatctccgcgaatccccagcacaggctcctaaaattagtgacctcccatcaagtatgagctctgaagtcgccgagggacatagtcttgaggctaccgaaaaaggagatctcaggcaagaccctaaaacaggatcattcccggagcacattacccaggagaaagccccagcagcagacacggaggagttcactacagaggacggggagaaaacttcacacgagttgcagtcagtctgcccgtgggaaactacagcgcctgccgactcagtgtcacatctagatcgtcagcgcccggatcaaccaaaggcatcgagccagcggcttgtctcaacgggggggcgcgcagcagatgtctgtccttgggatgtgcccgatgccggggtgtataagtcggactcctccgcaaaggccgagacatgcccttgggaggtcactgaacgtatcccggtgaagggagtgagccggcaggacgggaaaggggacagccaggaggaaaaggggcgcgctcctgaaaagtcagaacctaaaggggtcccggtgcaaaagaaacccgaaatggccgacttcaggcagcaggaggctgtgtgcccatgggaaagtcaggacggtaagggtctcagccctcaaccagcccccgatgctagcgacagatctaggggtagtagtgaggctgctgggtcagtggaaacaagagtggcagaggtttgcctgtgggaagtagtcgaggccccaagcgctaaaaaagccgagatttgtccatgggaggctggggggggcgcagcggaggagggagaacaggagagggagagtcaggggcagggagaaatgttcctccagaaagccggccccggaggtaccgaggagcatttctcaaaagctgcagccaaaccaagagaacaggaggctgtgtgtcccggagagggtacaggctccggcggcctgctcccccagtcaggagccttggatccagagctgaaggtaagcccaaaagaggcaggaagcatgggatcaagaatggctgagctttgtcaatgggagattactgacccggaaggtaataagatcaagggtacgatggctgacatctgcccaggtgaggagacaggggtgccttccgaagagtctggattacttgcactgacagctacaagaagagagttcttccctacagcaccagagaaacccctctgcctactcgtacacgggcccctagaccacttctttcctgaatccaaaattccctgccccaaggtgagccgtcccgccagtaccttcacccttgaaggcgttcgtgagcttcaaggacccagcggtttagagccacgcacctcgctggcaccagagccttcgctgcaggaagcggagagccagagttctagcctgactgaagactcaggacaggttgcattcgaagctcagtacgaggagtttacaccccctacagtgtatccttgggattgggagtag

SEQ ID NO: 20609 - DNA, 7104 bp, Artificial Sequence
  derived and/or modified sequence
atgggcaccagaggagctgtgatgcccccacccatgtggggcctgctgggctgctgctttgtgtgtgcctgggccctgggcggcccccggcccatccgcagcctgccccccctgagcagccaggtgaagccaggctctgtgcccatgcaggtgcccctggagggcgctgaggccgccctggcctacctgtacagcggagatgcccagcagctgagccaggtgaactgcagcgagagatatgaggcccggggagctggggccatgcctggcctgccccccagcctgcagggcgctgctggcaccctggcccaggccgccaacttcctgaacatgctgctgcaggccaatgacatccgggagagctctgtggaggaggatgtggagtggtaccaggccctggtgcgctctgtggccgagggggacccccgggtgtaccgggccctgctgaccttcaaccccccacctggggccagccacctgcagctggccctgcaggccaccaggactggagaggagaccatcctgcaggacctgagcggcaactgggtgcaggaggagaaccccccaggggacctggacaccccagccctgaagaagagggtgctgaccaatgacctgggcagcctgggcagccccaagtggccccaggctgatggctacgtgggggacacccagcaggtgcggctgagcccccccttcctggagtgccaggagggccgcctgcggcccggctggctgatcaccctgagcgccaccttctacggcctgaagccagacctgagccctgaggtgcggggccaggtgcagatggatgtggacctgcagagcgtggacatcaaccagtgtgccagcggccctggctggtacagcaacacccacctgtgtgacctgaacagcacccagtgtgtgcccctggagagccagggctttgtgctgggccgctacctgtgccgctgcaggcctggcttctacggggccagccccagcggcggcctggaggagagtgacttccagaccaccggccagtttggcttccctgagggccgcagcggccgcctgctgcagtgcctgccctgcccagagggctgcaccagctgcatggatgccaccccctgcctggtggaggaggccgctgtgctgcgggctgctgtgctggcctgccaggcctgctgcatgctggccatcttcctgtccatgctggtgtcctaccgctgcagaagaaacaagaggatctgggccagcggcgtggtgctgctggagaccgtgctgtttggcttcctgctgctgtacttccctgtgttcatcctgtacttcaagcccagcgtcttccgctgcatcgccctgcgctgggtgcggctgctgggctttgccatcgtgtatggcaccatcatcctgaagctgtacagagtgctgcagctgttcctgagcaggacagcccagaggtctgccctgctgagcagcggccgcctgctgcggcggctgggcctgctgctgctgcctgtgctgggcttcctggccgtgtggacagtgggcgccctggagcggggcatccagcacgcccccctggtgatccggggccacacccccagcggccgccacttctacctgtgccaccacgaccgctgggactacatcatggtggtggccgagctgctgctgctgtgctggggcagcttcctgtgctacgccaccagggctgtgctgagcgccttccacgagccccgctacatgggcatcgccctgcacaatgagctgctgctgtctgctgccttccacacagccaggtttgtgctggtgcccagcctgcacccagactggaccctgctgctcttcttcttccacacccacagcacagtgaccaccaccctggccctgatcttcatccccaagttctggaagctgggcgccccaccccgggaggagatggtggatgaggtgtgtgaagatgagctggacctgcagcacagcggcagctacctgggcagcagcatcgccagcgcctggagcgagcacagcctggaccccggggacatcagagatgagctgaagaagctgtatgcccagctggaggtgcacaagaccaaggagatggccgccaacaacccccacctgcccaagaagaggggcagcagctgccagggcctgggccgctccttcatgagatacctggccgagttccctgaggccctggcccggcagcacagccgggacagcggcagccctggccacggcagcctgcccggcagcagcagaagaaggctgctgagcagcagcctgcaggagcctgagggcaccccagccctgcacaagagccgcagcacctatgaccagaggcgggagcaggacccccccctgctggacagcctgctgcggaggaagctggccaagaaggccagcaggacagagagccgggagagcgtggagggccccccagccctgggcttccgcagcgccagcgcccacaacctgactgtgggggagcggctgccccgggcccggcctgccagcctgcagaagagcctgtctgtggccagcagccgggagaaggccctgctgatggccagccaggcctacctggaggagacctaccggcaggccaaggagcgggaggagaggaagaaggccaaggccgccatggccagcctggtgcggcggcccagcgcccggcggctggagcggcccaggggggcccccctgagcgccccacccagccctgccaagagcagctctgtggacagcagccacaccagcggccgcctgcacgaggaggcccggcggcggctgccccacccccccatccgccaccaggtgtccacccccatcctggccctgagcggcggcctgggggagcccaggatgctgagccccaccagcaccctggccccagccctgctgcctgccctggcccccaccccagccccagccctggcccctgtgcctgtgagcccccagagccccaacctgctgacctacatctgcccctgggagaatgctgagctgcctgccaagcaggagaatgtgccccaggagggccccagcggccctgagcggggccaccacagccctgccccagcccgggcccggctgtggagggccctgtctgtggccgtggagaagagccgggccggggagaatgagatggatgctgaagatgcccaccaccagcgggaggccaatgatgtggatgaagatcggcccaagatcttccccaagagccacagcctgaaggcccctgtgcagcagggctccatgaggagcctgggcctggccatcaaggccctgaccaggagccgcagcacctaccgggagaaggagagcgtggaggagagccctgagggccagaacagcggcacagctggggagagcatgggcgcccccagccgcagcccccggctgggccggcccaaggctgtgtccaagcaggccgccctgatccccagtgatgacaaggagagcctgcagaaccagcagaatgcccacaccagcaggatgctgcaggtgtgccagcgggagggcagccgggagcaggaggaccggggccgcaggatgacccagggcctgggggagaggaaggccgagagagctgggaagacaggcctggccatgctgcggcaggtgtcccgggacaagaacatcaagcagagcaaggagacccctgtgggctggcaggagctgcccaaggccggcctgcagagcctgggcagcgctgaccaccgggtggccgaggtgtgcccctgggaggtgacagaaagtgagacccggcagcctgacagcggcaacaaggccgagatctgcccctgggagaccagcgagggcgcccctgagagccgggccctgcggcaggaccccggggacagccagaagaagagaggagaggcccggggcaagtctgagcccattgatgtggtgcccatgatgaggaagaagccagagcggctggtgcgggagcaggaggccgtgtgcccctgggagagcgctgacagaggaggcctgagccctggcagcgccccccaggaccccggccgcatccgggacaagtctgaggccggggacagcgtggaggccaggaaggtggagaagccaggctgggaggccgccggccctgaggcccacaccccagacatcaccaaggccgagccctgcccctgggaggccagcgagggcggggaggatggcaagccagcccaggaggccgtgaaggacctgccccaggagaagcagaagaccaggaaggccaccttctggaaggagcagaagccaggaggagacctggagagcctgtgcccctgggagagcacagacttccggggccccagcgctgtgtccatccaggcccctggcagcagcgagtgcagcggcagcctgggcagcggcattgctgaggtgtgcctgtgggaggccggagatgccccagccatccagaaggccgagatctgcccctgggagctggatgacaacgtgatgggccaggagatgctgagcctgggcaccggccgggagagcctgcaggagaaggagaaggccagcaggaagggcagctttggagagatgggagagcagacagtgaaggctgtgcagaagctgagccagcagcaggagagcgtgtgcccccgggagagcacagtgcccggccacagcagcccctgcctggacaacagcagcagcaaggccggcagccagttcctgtgcaatggaggcagccgggccacccaggtgtgcccccaggaggacctgcggcctgaggcccaggaggccaccccagccaagacagagatctgcccctgggaggtgaatgaaagaacccgggaggagtggaccagcgcccaggtgccccggggcggggagagccagaaggacaaggagaagatgcctgggaagtcagaaattgaagatgtgacagcctgggagaagccagagggccagatccagaagcaggaggccgtgggcccctgggagagcgtggaccccggcagcttcagcccccagccccggccccaggacacagagcggccccagaccctgctgcagatgagcggctctgtgggcagcaaggctgctgacatctgccccctggatgtggaggagaacctgacagctgggaaggccgagatctgcccctgggaggtgggcgctggggccggggaggagcgggccctgggcgctgaggccatcaggaagagccccaatgacaccgggaaggtgtctgctgacctgggcccccgggagagagctgtgacagcccctgagaagccccagaagcccaccccagagtgggaggtggcctgcccctggggctctgtgggccctggggcctgcagccagcaccctggcaccctggatgctgatggccccaaggccggcttccaggagctggaccacatgggctgcaggcctggagaggtgtgcccctgggaggcccaggaggccgccaccagcgagaaggccaagatctgcccctgggaggtgtctgagggcaccaccgggaagggcctggaccagaaggccggcagcgagagcgctgagcagcgggagaaggccctggagaagggccgcctgaccagcctgggagaagatgtgtccaagggcatggccaagctgtgccagcagcaggagaccatctgcatctgggagaacaaggacctgcgggagagccctgcccaggcccccaagatcagtgacctgcccagctccatgagcagcgaggtggccgagggccacagcctggaggccacagagaagggggacctgcggcaggaccccaagacaggcagcttccctgagcacatcacccaggagaaggccccagctgctgacacagaggagttcaccacagaagatggagagaagaccagccatgagctgcagagcgtgtgcccctgggagaccacagccccagctgacagcgtgagccacctggaccggcagaggccagaccagcccaaggccagcagccagaggctggtgtccactggaggccgggctgctgatgtgtgcccctgggatgtgcctgatgctggggtgtacaagagtgacagcagcgccaaggccgagacctgcccctgggaggtgacagagcgcatccctgtgaagggcgtgtcccggcaggacggcaagggggacagccaggaggagaagggccgggcccctgagaagtctgagcccaagggcgtgcctgtgcagaagaagccagagatggctgacttccggcagcaggaggccgtgtgcccctgggagagccaggacggcaagggcctgagcccccagcctgccccagatgccagtgacaggagccggggcagcagcgaggccgccggctctgtggagaccagggtggccgaggtgtgcctgtgggaggtggtggaggcccccagcgccaagaaggccgagatctgcccctgggaggccggcggcggcgctgctgaggagggggagcaggagcgggagagccagggccagggcgagatgttcctgcagaaggccggccctgggggcacagaggagcacttcagcaaggctgctgccaagccccgggagcaggaggccgtgtgccctggagagggcaccggcagcggcggcctgctgccccagagcggggccctggaccctgagctgaaggtgagccccaaggaggccggctccatgggcagcaggatggccgagctgtgccagtgggagatcacagatcctgagggcaacaagatcaagggcaccatggctgacatctgccctggagaggagactggagtgcccagcgaggagagcggcctgctggccctgacagccacccggcgggagttcttccccacagcccctgagaagcccctgtgcctgctggtgcacggccccctggaccacttcttccctgagagcaagatcccctgccccaaggtgtccaggcctgccagcaccttcaccctggagggcgtgcgggagctgcagggccccagcggcctggagcccaggaccagcctggcccctgagcccagcctgcaggaggccgagagccagagcagcagcctgacagaggacagcggccaggtggcctttgaggcccagtatgaggagttcaccccacccaccgtgtacccctgggactgggagtag

SEQ ID NO: 20610 - DNA, 7104 bp, Artificial Sequence
  derived and/or modified sequence
atgggcacccggggcgccgtgatgcccccccccatgtggggcctgctaggctgttgttttgtgtgcgcttgggctctgggaggccccaggcctattaggtccctgcctcccctcagcagccaggtgaagccgggcagcgtgcccatgcaagtgcccctcgaaggggccgaggccgccctcgcatatctctatagcggcgacgcccagcagctatctcaggttaactgttctgaacgctacgaggctcgaggagcaggcgccatgcccggcttaccaccctcactacagggtgcagccgggacactggcccaggcagccaacttcttgaatatgctgctgcaggcgaatgacattagggaaagcagcgttgaagaagacgtggaatggtaccaggccctcgtcaggagcgtggctgaaggcgaccctcgggtgtatagggcactgctgaccttcaaccctcccccaggcgccagccatcttcagctggcactccaggctaccagaactggagaagagaccattctccaggaccttagcgggaactgggtgcaagaggagaacccacctggagacctagacacgcccgccttgaaaaagcgcgtcctgaccaatgatttgggatccctgggcagtcccaagtggccgcaggctgacggctacgtcggagacacccagcaggtgagactgtctcccccttttctcgagtgccaggaggggcggcttcgtccggggtggctcattactctgagcgccacattctacggactgaagcctgatctgtcccctgaggtgagggggcaagtacagatggacgtagatctgcagagcgtcgatataaatcagtgcgcaagtggacccgggtggtacagcaacacgcacttgtgcgatctgaattccacccagtgcgttcctctagagtcgcagggctttgtcttgggccggtacctgtgcaggtgccggcccgggttttatggtgcttccccttccgggggcttagaggaaagtgattttcagaccactggccagttcggtttcccagagggccgaagcggtcgtctgctgcagtgtctgccatgtcctgagggatgtaccagctgtatggatgccacgccttgcctggtggaagaagccgccgttctgagggctgctgtccttgcctgccaggcctgttgcatgctggcaatcttcctgtcaatgttagtgagttatcgctgcagacggaacaaacgcatttgggccagcggcgttgtgctgttggaaactgtgctcttcggattcctgttactgtacttccccgtgtttattttatactttaagccaagcgtattccgctgcattgctctcagatgggtgcgtttgctggggtttgctattgtctacggcacaatcatcctgaaattgtatcgagtgctccagctattcctgtcacgaactgcacaaaggtccgcactcctctcatctggtcgcctgctgcgacggctcggcttactcttgctcccggtcctcggttttcttgcagtctggaccgtgggagccctggaacgtgggatccagcatgcgcccctcgtgatccgaggccatacaccctcgggcagacacttctacctgtgccatcacgaccgttgggattatattatggttgttgcagagctgctgctgctgtgctgggggagttttctctgttatgccacacgcgctgtgctgagcgcctttcacgagcctcggtacatgggaatcgctctgcacaacgagcttttacttagtgccgcatttcatactgcacgctttgtgcttgttcctagcctgcatcccgattggacgctcctgttgttcttcttccacacacactctacggtcacaaccaccctggcactgattttcataccaaaattctggaagctgggcgcaccgcccagggaagagatggttgacgaagtctgtgaagacgaactagacctccagcactctggttcctaccttggcagcagcattgcatctgcctggtcagagcacagtttggacccgggcgacattagggatgagctgaagaagctatatgcgcagttggaggtgcacaaaactaaagagatggccgctaacaacccacacttgcctaagaagcgcggctcgtcatgtcagggcctcggacggagctttatgcgatacctggccgagttcccagaagccctggctcggcagcactctagggattcgggcagcccgggccacggttccttaccaggcagcagtagacgccgtctcctgtcttcaagccttcaggagccagaaggcacaccagccctacacaaaagtcgctccacctatgaccagaggcgggagcaggacccacctctactagactctctgctgcgtcgtaagctggcaaaaaaggcctcccgcactgagtcaagagaatccgtggaaggacctcctgccttaggattccggtctgcctcagctcacaacttgaccgtgggcgagcgcctgccacgagcccggcctgcttccctgcagaagtccctgagcgtcgcctccagtagggaaaaagcgttgctaatggctagccaggcatacctggaggaaacatatcgacaggctaaagagcgggaggagagaaaaaaggccaaagcggcaatggccagcctggtgcggaggccaagtgcccggaggctggagagaccacggggcgctcctctctccgccccgccttcccccgccaaaagtagctctgtggacagtagccataccagcgggcgtctgcacgaagaagctcgtagacgtcttccgcatcctcccattagacaccaggtgagcacccctatactggcgctgtcaggcggactgggcgagccacgaatgcttagtccaactagcacactggctccggccctcctccccgcattagctccaacacctgccccagcactggctcctgtgcccgtcagcccccagtcacctaacctgctgacctacatttgtccttgggaaaacgccgaactccccgcaaaacaggaaaatgtgcctcaggaggggccatcggggcccgagagagggcatcacagccccgcacctgccagagcccgactgtggcgggcgttatcagtggctgtggaaaaatctcgagcaggtgagaatgagatggatgccgaagacgcacatcaccaacgggaagccaacgatgtggatgaagatcggcccaagatttttcctaagtcccactctcttaaagcaccagtgcagcagggatcgatgcgctcgctgggcctggccatcaaagcactcactcgatctcgcagtacttatcgggagaaagagtcggtcgaggaatccccagagggtcagaatagtggaactgctggggagtccatgggcgctccaagccgttcgccgagattgggtagacccaaggccgtgtcaaaacaggccgcccttatcccttctgatgacaaggaaagcctgcagaaccagcagaatgcgcatactagcaggatgcttcaggtgtgccagagagaggggtcaagagaacaggaggacagaggacgaagaatgacgcaggggctgggcgaaaggaaggctgagagagcggggaaaaccggactggctatgctgcggcaggtcagtagagataaaaatatcaaacaatccaaagaaactccagtggggtggcaggagcttcctaaggccgggctccagagcctgggatccgccgaccatagagtcgccgaggtctgtccttgggaagttacggagagcgagactcgtcagcccgacagcgggaataaagccgagatctgcccttgggagaccagtgagggagcccctgaatcccgggctcttcgtcaggaccccggcgatagccagaagaaacggggtgaagcaaggggaaaatccgagcctatagacgtcgtgcctatgatgagaaagaaacctgaacgcctggtacgtgagcaggaagccgtgtgtccttgggagtctgccgatcggggcggcctgtctcccgggagcgccccacaggatcctggtagaattagggacaaatccgaagcaggtgactcagtggaggcacgcaaagtggaaaaacctggttgggaagccgccggtccggaagcccatacacctgatattacaaaagccgagccttgtccttgggaagctagcgagggtggagaagacggcaaacccgctcaggaagcagttaaagatctacctcaggagaagcagaagactcgcaaggcaactttctggaaggagcagaaacccggaggagatctggaatcattgtgcccgtgggagtctacggacttccggggaccctctgccgtgagcattcaggccccggggagtagcgagtgctccggctctctcggtagcggcatcgcagaagtttgcctctgggaagccggagacgcacccgccatccaaaaagctgaaatatgcccctgggaattagacgacaacgtgatgggccaagagatgttgtccttgggcaccggccgcgagtcactgcaggagaaagagaaagccagtcgcaaaggctcattcggcgagatgggggagcagactgtgaaagccgtccagaaactctctcaacaacaggagtcagtctgtccgcgagagagcactgtcccagggcactcaagcccctgcttggataacagcagctccaaagcaggttcccagtttttatgcaacggaggctcaagagctacccaagtctgtcctcaagaggacctacgtcccgaggcacaagaagccaccccagcgaaaaccgagatatgtccttgggaagtgaacgaaaggactcgcgaggagtggactagcgcccaggtcccccggggcggggaaagtcaaaaagacaaggaaaaaatgcccggcaagtcggaaattgaggacgtaacagcctgggagaaacctgaaggccagatacagaagcaggaggctgtgggaccttgggagagtgttgatccgggatccttttcaccacagcccagaccccaggacactgaaagacctcagacattgctgcaaatgtctggctcagtcggcagcaaggcggctgacatctgccctcttgatgtagaagagaacctcactgcgggcaaggccgagatttgcccctgggaggtgggtgctggtgctggcgaggaaagggctctgggggccgaagctattcgcaagtctccaaacgatactggcaaggttagcgcagatctggggccaagggagcgcgcggtcacagcccccgaaaagccccagaaacctacgcctgagtgggaagtggcctgtccgtggggctctgttggtcctggcgcttgcagtcaacacccgggcaccctcgatgccgatggccccaaggcgggcttccaggagctagatcacatgggctgccggcctggagaggtgtgtccctgggaggcccaggaagcggctacttcggaaaaggcaaagatctgcccatgggaagtgagcgaggggaccaccggaaaggggcttgatcagaaagctggttcagaaagtgctgaacagagagagaaggccttggaaaagggacgtctgaccagtctgggtgaggacgtgtcgaagggaatggctaaactatgccaacaacaggagactatttgtatctgggaaaacaaggatctgagggagtcccccgcccaagcccctaagattagcgatctgccgagttctatgtcctctgaagtcgctgaggggcactctctggaggcgacagagaagggagacctgaggcaggaccctaaaactgggtcttttccagaacacatcactcaggagaaagctcccgctgccgatactgaggagtttaccaccgaggacggcgaaaagacctcgcacgagctccagtcagtttgcccctgggagaccacggccccagccgacagtgtttctcacctggatcgacaaagaccagaccaaccaaaagctagttctcaaaggctcgttagcacagggggaagagctgccgatgtgtgcccctgggatgtgcctgacgctggtgtatataaatcagatagcagtgccaaggctgagacttgcccttgggaggttacagagcggatacctgtgaagggtgtcagtcgccaggatggaaagggtgactcccaggaagaaaagggccgggctcctgagaagtcagagcccaaaggcgtgcctgttcaaaagaagcctgaaatggccgactttagacagcaggaagcagtctgcccctgggaaagtcaggacgggaagggactgtctccacaacccgcccccgacgccagcgaccgatccaggggcagctccgaggccgctggaagtgtggagactcgtgtggctgaggtatgtctttgggaggtagttgaagccccatccgccaaaaaagccgagatctgtccatgggaggccggcggaggcgccgctgaagagggcgaacaagaacgcgaaagccaaggacaaggggagatgttcctccaaaaagctggacctggaggtacagaggagcatttttccaaagcggccgcgaagcccagagaacaggaggccgtctgtcccggcgagggaacgggcagtggcgggttgctaccgcaatcgggagctctcgacccagaattaaaagtgtcacccaaggaagctggatctatgggctcaagaatggcagagttatgtcagtgggagatcaccgatccagaggggaacaagattaagggaacaatggccgacatttgccctggagaagaaacaggcgtgccctcagaagaatctggactgctggccctcactgctacgagacgggagttcttccctacagctcctgagaagccgttgtgtttacttgtgcacggcccactggatcacttctttccagagagcaaaataccctgccctaaggtaagtagacccgccagtaccttcaccctggagggcgtcagagagctgcagggaccttcaggactggagccaagaacatccctggcgcccgaaccatccttgcaggaagctgagtctcaatcttcctccttgaccgaagattctggtcaggtggcttttgaagcacagtacgaagagtttaccccccctacggtgtatccgtgggattgggagtag

SEQ ID NO: 20611 - DNA, 7103 bp, Artificial Sequence
  derived and/or modified sequence
atgggcaccaggggggctgtaatgcccccacctatgtggggcctgctcggctgctgcttcgtctgcgcgtgggctctgggaggcccacgccctatccgttcactaccaccactcagttcccaagtcaaacccggatccgtgcctatgcaggtgccccttgagggggcagaggcagcattagcgtacctgtatagcggcgacgcacagcagcttagtcaggtaaattgttccgaacgttatgaggccaggggtgccggtgcaatgccgggactccctccgtctctccagggggctgcagggactttagcccaggcggctaattttctgaacatgctgcttcaggcaaatgacattagagaatcctcagtggaggaggatgtagagtggtatcaggcgcttgtgcgtagcgtagctgagggcgatccccgtgtgtatcgggcactgctaacctttaacccaccaccaggggctagccacctccaactggcattgcaggccactcgcacaggagaggaaaccattctccaggacttaagcggcaattgggtacaggaggagaacccacctggggacctcgatactcctgcactgaaaaagagagttctcactaacgatctggggtctcttggctctccaaaatggccccaggctgatggctatgtaggcgacacccagcaggtgcggctctctccgccatttctcgagtgccaggagggacgattaagacctggctggttaataaccctgtccgccacattttacgggcttaaacctgacctatcccctgaggtgagaggacaggtgcagatggacgtggacctccagtcggttgacataaaccaatgtgcctcaggaccaggctggtattctaatactcacttatgcgacctcaactctacacagtgcgtgcctttggagtctcagggttttgtgcttggaaggtatctttgccgctgtcgaccgggattctatggcgcatctccctccggcggactggaagagtcagactttcagactacagggcagtttgggtttcccgagggacgttcgggaagactgcttcagtgtctaccttgccccgagggctgcacgtcatgtatggatgctactccatgtcttgtggaagaggcagcagtccttcgggcagccgtgttagcctgccaagcttgttgcatgctggcaatctttctgagcatgctggtctcctatagatgtcgtcgcaataagcggatctgggcaagtggagtggttcttcttgaaacagttctcttcgggtttctgcttctgtactttcctgtgttcattctttatttcaagccaagcgtatttcggtgtatcgcccttcgctgggtgcgtctgttaggctttgctattgtatatggtaccataatccttaaactatacagggtcctgcagctcttcctgagtaggacggcacaacgttccgccttgctctcatccggcagactcctgagaagactcggactgctcctattaccagtactggggttcctggcagtgtggaccgttggggctttggaacggggtatccaacacgcgcctctggtcatccggggacataccccttctggccgtcatttttacctgtgccatcacgatcgatgggattacatcatggtggtcgctgagctactgctcctgtgttggggatctttcttatgctacgccacaagagccgtgctctctgcctttcatgagccccgatatatgggaattgcactgcacaacgaactccttctcagcgcagcctttcacactgcacgcttcgtgctggtgccgtcacttcacccggactggaccctgctgcttttcttttttcatacccactccactgttactaccactctcgctctgatctttatccctaagttttggaagctgggagcccctccaagggaggaaatggtggacgaagtgtgcgaggacgagcttgacctgcagcatagtgggagctacctgggctcctcaatcgctagcgcttggtccgagcacagcttagatcctggcgatattcgcgatgaacttaaaaaattgtatgcgcagctggaagtgcataagaccaaagagatggcagctaataatccacatctgcccaaaaaacgcggttccagctgtcaagggctgggcaggagtttcatgcgatacctggcagaattccccgaggcattagctcggcagcactctcgggacagcgggagcccgggacacggcagtcttcccggtagtagcaggaggaggctcctgtcttcctctctgcaggaacctgagggcactcctgcacttcacaaatctcgctcgacctatgaccagcggagggaacaggacccaccactcctcgacagtctcctgagaagaaagctggctaaaaaagcctccagaacggaatccagagagagtgtcgagggaccaccagctctgggattccggtccgctagtgctcataacctgaccgtaggtgagcgcctccccagggcaaggcccgctagtctgcagaagtcgttgagtgtcgcctcgagtagggagaaagctcttttgatggcctcgcaggcctacttggaagagacataccgccaggctaaagagcgtgaggagaggaaaaaggcaaaggccgcaatggcctccctggtgaggcggccttcagctaggcggctcgagagacccaggggcgctccactgagcgcccctccctccccagccaaatctagctctgtggactcctcgcatactagcgggcgtctccatgaggaggctcgaagaagactcccacatcctccaatcagacaccaggtcagcacaccgatactggccctctccggaggacttggagagcccaggatgctatcacccacctctaccttggcacctgcactccttccagccctcgccccaacaccagcacctgccctcgccccagttccagtgagtccccagtctccaaacttgctcacgtatatctgtccatgggaaaacgccgagctgccagcgaagcaggagaatgttccacaagaggggccaagcggcccagaacggggtcaccattctccggctccagctcgtgcccgactatggcgcgcactgagcgtggccgttgagaaatcccgcgctggtgagaatgagatggatgccgaagatgcacaccaccagcgggaggctaatgacgtggatgaggacaggccgaagatatttcctaagtcccattccctcaaggcaccagtgcaacagggctctatgagaagcctaggcctggctatcaaggctttgacaaggagcaggtcgacatatcgagaaaaagagtccgtcgaggagtcccccgagggtcaaaactccggtaccgcaggtgaatctatgggagctcccagccgttctcctaggctaggacgcccaaaagcagttagcaagcaggcagccctgattccctcagacgacaaggagtcccttcaaaatcaacagaacgcccatacatcccgaatgttgcaggtttgccagagggagggttctagggagcaggaggatagaggcagacgtatgacacaggggctcggggagagaaaggcagagcgagccggtaagaccggcctggccatgttgcgccaggtgtccagggataagaatatcaaacagtcaaaagaaactcctgttggctggcaggagctgcccaaggccggtttgcagtctttgggctcagcagaccaccgggtggctgaggtatgcccctgggaagttacagagtcagaaactcgccagcctgactcagggaataaggccgagatttgtccttgggagacaagcgagggggcaccagagtcaagggcgttacggcaggatcctggagacagccagaagaagagaggagaggccagaggcaagtccgagccaatagatgtggtgcccatgatgcggaaaaagcctgaaagattggtgcgcgaacaggaggcagtatgcccctgggagagcgctgatagaggcggtctgagcccgggatccgctccccaagacccaggcagaatccgggataagtccgaagccggagattccgtggaagctcgaaaggtagaaaaaccaggatgggaggccgcagggccagaggctcatacccccgacataaccaaggctgagccatgcccctgggaagcgagcgagggcggtgaagatggtaaacctgcacaagaggcagtcaaagacttacctcaggaaaaacaaaagaccagaaaagcaaccttttggaaggagcagaaacccggtggggatctggagtctctgtgcccctgggagtctactgactttcggggtccctcagctgtgagtatacaggcgcctggctcttcggagtgtagtggaagcttggggtctggaattgccgaggtatgcttgtgggaggccggtgacgcgccagcaattcagaaagcagaaatttgcccctgggaacttgacgataacgttatgggtcaggagatgctgtcgctcggtaccggacgagagtcgctccaagaaaaggaaaaagcctcacggaaggggagctttggggaaatgggtgagcagactgtgaaagccgtgcagaaactaagtcaacagcaggaatccgtctgcccacgagagagcaccgtccccggacactctagtccctgtttagacaacagtagctctaaggccggaagccagtttctatgtaacggcggatcgcgggctacccaggtctgtccacaggaagaccttaggccagaggcccaagaggctacgcctgctaaaacagagatttgtccctgggaagtgaacgagcgaacacgggaggagtggaccagcgcacaagtccctcgaggcggagagtcgcagaaggacaaagaaaaaatgcccggtaagtccgaaatagaagacgtcaccgcatgggaaaagcctgaaggacagatccagaaacaggaagccgttgggccttgggagagtgtcgatcctggcagctttagtcctcagcctagaccccaggatactgaaagacctcagaccctgttacagatgagcggctccgtcgggtccaaagcagccgacatttgtccattagatgtggaagagaacctgacagccggaaaggccgaaatttgtccatgggaagtgggggcaggggctggggaggaacgcgctttgggcgctgaagctatccgcaaatcaccaaatgatacaggcaaggttagtgccgatcttggaccaagggagcgtgctgtgaccgctcctgagaaacctcaaaagcctacgccagagtgggaagtggcatgcccctggggatctgtgggacctggggcatgcagtcaacaccctggcaccctggacgcggatggccctaaagccggttttcaagaactggaccacatggggtgtcggccaggagaagtttgcccatgggaggcacaggaggctgcaacttctgaaaaggctaagatttgtccctgggaagtaagcgaaggaacgaccggcaaggggttggatcagaaagctgggtcggaatctgcggagcagagggagaaggccctcgagaaaggccgtctaacttctttaggggaagatgtgagcaagggcatggctaagttgtgccagcagcaagagacaatctgcatttgggaaaataaagatttaagggagtcccccgcacaagcccctaagatcagtgatttgccaagttcaatgagtagcgaggtggctgaagggcacagcttggaggccacagaaaagggcgacctcaggcaggaccctaagaccgggagttttccagaacacattacacaggagaaggccccagcagctgacacagaagaattcacaactgaggatggagaaaagacatcgcatgagttgcagtcagtgtgcccatgggagacaaccgcaccggcagactctgtctcgcaccttgataggcaacgccctgatcagccgaaggcttcctcccagaggttagtttcaaccggagggagggcagctgacgtgtgtccttgggacgtgcctgatgctggcgtgtataagtccgacagctctgctaaggccgagacatgcccatgggaggttactgagcgcatccctgtcaaaggagtgtcccggcaggacgggaagggcgactcgcaggaggagaaaggccgagcccctgaaaaaagcgagccaaaaggagtgcctgtgcagaagaaaccggaaatggcagacttcagacagcaggaggctgtatgcccctgggaatcacaagatggtaagggactgagtccccagcccgcacccgatgcttcggacagaagtaggggatccagcgaagcagccggttcagtggaaactcgtgtggcggaggtgtgtttgtgggaggtggtggaagcacctagcgctaagaaggccgagatctgcccgtgggaggccggagggggtgccgcagaggagggtgaacaggaaagagaaagccagggacaaggcgaaatgttcctccagaaggccggtcccggaggaaccgaggagcacttcagcaaggcagcagccaagccaagggagcaggaggctgtctgtccaggagaagggactgggagtgggggtctgctgccccaatctggagctctcgacccagagcttaaagtgtcacccaaagaagccggaagcatgggcagccgtatggccgagctgtgccagtgggaaattactgaccccgagggcaataaaatcaaaggcactatggccgatatctgccccggtgaagaaacgggagtgcccagcgaggagtcagggctcttggctttgactgcgactcggagagagtttttccccactgctcctgagaaaccactctgtttgctggtgcatggcccactggatcatttcttccccgaatctaaaatcccttgtcccaaggtcagcagacccgcaagcacttttaccctggaaggcgtgcgagaactccagggcccttcaggtctcgagccgaggacaagcctggctccggagccttctctgcaggaggcggagtcacagtcaagttctttaactgaggatagtggtcaggtggcatttgaggcgcagtatgaggagttcactccaccaaccgtgtatccgtgggactgggaata

SEQ ID NO: 20612 - protein, 114 aa, Artificial Sequence
  derived and/or modified sequence
MSQAELSTCSAPQTQRIFQEAVRKGNTQELQSLLQNMTNCEFNVNSFGPEGQTALHQSVIDGNLELVKLLVKFGADIRLANRDGWSALHIAAFGGHQDIVLYLITKAKYAASGR

SEQ ID NO: 20613 - DNA, 345 bp, Artificial Sequence
  derived and/or modified sequence
atgagccaggccgagctgagcacctgcagcgccccccagacccagagaatcttccaggaggccgtgagaaagggcaacacccaggagctgcagagcctgctgcagaacatgaccaactgcgagttcaacgtgaacagcttcggccccgagggccagaccgccctgcaccagagcgtgatcgacggcaacctggagctggtgaagctgctggtgaagttcggcgccgacatcagactggccaacagagacggctggagcgccctgcacatcgccgccttcggcggccaccaggacatcgtgctgtacctgatcaccaaggccaagtacgccgccagcggcagatag

SEQ ID NO: 20614 - DNA, 345 bp, Artificial Sequence
  derived and/or modified sequence
atgtcacaggccgaattgtctacgtgttctgcgcctcaaacacagcggattttccaggaagctgtgcggaagggtaatacccaggaattgcaaagccttctgcagaacatgacaaattgcgaattcaacgttaattctttcggcccagagggacagactgccttacatcagagtgtgatcgacgggaacctcgagttggtaaagctcctggttaaattcggggccgatatcaggcttgctaatagagatggttggtcggccctacatatagcagcgttcggtggccatcaggatatagttctatacttgatcacaaaggcaaagtacgctgcctctggccgttag

SEQ ID NO: 20615 - DNA, 345 bp, Artificial Sequence
  derived and/or modified sequence
atgagccaggccgagctgagcacctgcagcgccccccagacccagaggatcttccaggaggccgtgaggaagggcaacacccaggagctgcagagcctgctgcagaacatgaccaactgtgagttcaacgtgaacagctttggacctgagggccagacagccctgcaccagagcgtgattgatggcaacctggagctggtgaagctgctggtgaagtttggagctgacatccggctggccaacagagatggctggagcgccctgcacatcgccgcctttggaggccaccaggacatcgtgctgtacctgatcaccaaggccaagtatgctgccagcggccgctag

SEQ ID NO: 20616 - DNA, 345 bp, Artificial Sequence
  derived and/or modified sequence
atgagccaggccgagctgagcacctgcagcgccccccagacccagcgcattttccaggaggctgttcgaaagggtaacacccaggaactgcagtctttgctgcaaaatatgacaaattgcgagttcaatgtgaatagtttcggaccagagggtcagaccgctcttcaccaaagcgtgatcgatggcaaccttgaactggtgaaactcctggtgaaattcggcgccgatatccgactagccaatcgggatggctggtctgccctccatattgctgccttcggcggccaccaagatatcgtgctctatctcataactaaggctaaatatgctgccagtggccgctag

SEQ ID NO: 20617 - DNA, 2621 bp, Artificial Sequence
  derived and/or modified sequence
ggcgccttgggaccgcgtgggagccgcagccgaaccgagtagggaccgggaccgcgcggcgccgccgtccccggccgggcccggcccccgcgagccgagcgcgcgcccccgtcgcccacccgggcgcggctggatgcggcggggtccccgcggcggcgacccccggccccgagcgcccggagcgcccagaggcggcgtgcggggcccggggacgccgcgccctccatgcgccgaggcgcgccccgagacagccgggggcccgcgccgcagccgccgcccgcgctgagccccggcccggcccgcggcccgcgcccggcggcagcatgagccaggccgagctgtccacctgctccgcgccgcagacgcagcgcatcttccaggaggctgtgcgcaagggcaacacgcaggagctgcagtcgctgctgcagaacatgaccaactgcgagttcaacgtgaactcgttcgggcccgagggccagacggcgctgcaccagtcggtcatcgacggcaacctggagctcgtgaagctgctggtcaagttcggcgccgacatccgcctggccaaccgcgacggctggagcgcgctgcacatcgccgcgttcggtggccaccaggacatcgtgctctatctcatcaccaaggcgaagtacgcggccagcggccggtgatgcccgccgggaccccggaccccggccctgcgcccgcgtcgtctctgctgtaccttcccgccaactacctcggtgcgcgcccggctcgcaggccccgccagaaggcccgtggccacggcgaatacggcgcgtgcgtcccggccccagggtccggcagccccgccggccgagcgcctccctgcggcctagccgggcccggccgggccggagcagcttcccacggcccccacccgctcgcctgcccgccgcctcgcgggtgggggcggggcgcgggctccagccccttttgaaatttgagtctcgcaaccagcaagttcggaatcccgagataccggatcctctgcgcaaaatgttttctcccgaaggtgaaaggcgggcggcgggagccgaaggcggactcggagcgctccgccgccgccttcaggacccgcccgcaggcccgggacgcgccgatgccggctgcagccgaggagcagccccgaggtccgaggtccgcgccgctggcgcgcggccgaggagacgctcggctgttcgctgttgctggtgttctaaactatttatcttgtgtgtgtacatttgtgggtggagtttgtgcgcctggtttttttgtttggaaaacactgcgtggtcaatgtggttatgggggggagtgatgcatttttttctagtcttaaaactaaaaacttgagtctaccatttcttggttgcactgaaaataccgcccagcctgatggtgttcccgtgctgtccctcccccttcccttctccccgcgtctacctccccaccccgttctgttccccctccctccttctccctctccctcaaatccgtgagttttggaagccccagggcctctctcccccgcccctcctggatgaggccaccatcccccaaaccggcttgttttgcagtttccccaggatcctggaagctcgctggcgctcgagggtggcggggacacgggggggtgggtgaaggttcgttaccttttctagtgcgttctatcatagttaacggttgcacacttttttaaaaaaagtaaatggatttgccacaattaaatgtcataacatttatgacagaatataaaatattaacatattttaagccaagttttaggtgtattttttgaatcttggttataaacccaattttaaagggcgatgtatccagcgttgtgaaggcaacagagtgtacccatatttatatttttataaaatacctataagactgtgaatctcttgtgctaatggctgagttaattgaaggatcgttttgcccctttttagcctcccagagcttcgaggactcaattcgaacccgaaatcctgccgtgggggaggggttgcgtcgagacctgggcccggggaggttctcctgcgtcactttctgtcctgaaaggcgcccttcctggtttctgtggctccaattttctatgcagccccacaccccttgttgttttgatcctgagaaataaaagggaggctgaattattcaaatttaaatgaggtttccccttcatggaagtgctgctgacccttcgtgcagaaatggggagcacttgaggacacaggtgggtggaggccctttgtgcgtggctggtcgtattcgggcagccctccgtcgctttttataaaactttgtgtgagaagaatatattgataatgtcagtgaaacaagcagacattgaaatggaggcacagattactccacaaggagttcttctgtatattttttctagatgcaaatacctttttaattatgttaattaatgttaagactttctaggcttatatcgaagctgtgtgtgggtcacggggtgatcactgctaactggataaagtttgtgcagcacattcctgagtgtacgatattgacctgtagcccagcgtgaaaaatttataaataaatttttcattgatctttttatattaaaaaaaagtttcttggtc

SEQ ID NO: 20618 - DNA, 345 bp, Artificial Sequence
  derived and/or modified sequence
atgtcccaagcggagttatccacttgttctgctccacagacccagcgcattttccaagaagcagttcggaagggtaacacacaggaactgcagtccctgttgcagaacatgacaaattgtgaattcaatgtgaatagctttgggcctgaggggcagacagctcttcatcaatcagtcatcgatggaaatcttgagctggtaaagctgctggtcaaattcggcgcagatatccgactcgctaaccgagatggatggtctgccctgcacatcgccgcatttggcggacaccaggatatcgtgctgtatctcatcactaaagctaaatacgccgcttccgggaggtag

SEQ ID NO: 20619 - protein, 504 aa, Artificial Sequence
  derived and/or modified sequence
MTPSPLLLLLLPPLLLGAFPPAAAARGPPKMADKVVPRQVARLGRTVRLQCPVEGDPPPLTMWTKDGRTIHSGWSRFRVLPQGLKVKQVEREDAGVYVCKATNGFGSLSVNYTLVVLDDISPGKESLGPDSSSGGQEDPASQQWARPRFTQPSKMRRRVIARPVGSSVRLKCVASGHPRPDITWMKDDQALTRPEAAEPRKKKWTLSLKNLRPEDSGKYTCRVSNRAGAINATYKVDVIQRTRSKPVLTGTHPVNTTVDFGGTTSFQCKVRSDVKPVIQWLKRVEYGAEGRHNSTIDVGGQKFVVLPTGDVWSRPDGSYLNKLLITRARQDDAGMYICLGANTMGYSFRSAFLTVLPDPKPPGPPVASSSSATSLPWPVVIGIPAGAVFILGTLLLWLCQAQKKPCTPAPAPPLPGHRPPGTARDRSGDKDLPSLAALSAGPGVGLCEEHGSPAAPQHLLGPGPVAGPKLYPKLYTDIHTHTHTHSHTHSHVEGKVHQHIHYQC

SEQ ID NO: 20620 - protein, 152 aa, Artificial Sequence
  derived and/or modified sequence
MTPSPLLLLLLPPLLLGAFPPAAAARGPPKMADKVVPRQVARLGRTVRLQCPVEGDPPPLTMWTKDGRTIHSGWSRFRVLPQGLKVKQVEREDAGVYVCKATNGFGSLSVNYTLVVLDDISPGKESLGPDSSSGGQEDPASQQWARPRFTQP

SEQ ID NO: 20621 - protein, 80 aa, Artificial Sequence
  derived and/or modified sequence
MTPSPLLLLLLPPLLLGAFPPAAAARGPPKMADKVVPRQVARLGRTVRLQCPVEGDPPPLTMWTKDGRTIHSGWSRFRVL

SEQ ID NO: 20622 - protein, 441 aa, Artificial Sequence
  derived and/or modified sequence
MADKVVPRQVARLGRTVRLQCPVEGDPPPLTMWTKDGRTIHSGWSRFRVLPQGLKVKQVEREDAGVYVCKATNGFGSLSVNYTLVVLDDISPGKESLGPDSSSGGQEDPASQQWARPRFTQPSKMRRRVIARPVGSSVRLKCVASGHPRPDITWMKDDQALTRPEAAEPRKKKWTLSLKNLRPEDSGKYTCRVSNRAGAINATYKVDVIQRTRSKPVLTGTHPVNTTVDFGGTTSFQCKVRSDVKPVIQWLKRVEYGAEGRHNSTIDVGGQKFVVLPTGDVWSRPDGSYLNKLLITRARQDDAGMYICLGANTMGYSFRSAFLTVLPDPKPPGPPVASSSSATSLPWPVVIGIPAGAVFILGTLLLWLCQAQKKPCTPAPAPPLPGHRPPGTARDRSGDKDLPSLAALSAGPGVGLCEEHGSPAAPQHPTVVVAPDLCNFM

SEQ ID NO: 20623 - DNA, 3100 bp, Artificial Sequence
  derived and/or modified sequence
gcgcccccaatgtccccaggtccggacaggccgagatgacgccgagccccctgttgctgctcctgctgccgccgctgctgctgggggccttcccgccggccgccgccgcccgaggccccccaaagatggcggacaaggtggtcccacggcaggtggcccggctgggccgcactgtgcggctgcagtgcccagtggagggggacccgccgccgctgaccatgtggaccaaggatggccgcaccatccacagcggctggagccgcttccgcgtgctgccgcaggggctgaaggtgaagcaggtggagcgggaggatgccggcgtgtacgtgtgcaaggccaccaacggcttcggcagcctgagcgtcaactacaccctcgtcgtgctggatgacattagcccagggaaggagagcctggggcccgacagctcctctgggggtcaagaggaccccgccagccagcagtgggcacgaccgcgcttcacacagccctccaagatgaggcgccgggtgatcgcacggcccgtgggtagctccgtgcggctcaagtgcgtggccagcgggcaccctcggcccgacatcacgtggatgaaggacgaccaggccttgacgcgcccagaggccgctgagcccaggaagaagaagtggacactgagcctgaagaacctgcggccggaggacagcggcaaatacacctgccgcgtgtcgaaccgcgcgggcgccatcaacgccacctacaaggtggatgtgatccagcggacccgttccaagcccgtgctcacaggcacgcaccccgtgaacacgacggtggacttcggggggaccacgtccttccagtgcaaggtgcgcagcgacgtgaagccggtgatccagtggctgaagcgcgtggagtacggcgccgagggccgccacaactccaccatcgatgtgggcggccagaagtttgtggtgctgcccacgggtgacgtgtggtcgcggcccgacggctcctacctcaataagctgctcatcacccgtgcccgccaggacgatgcgggcatgtacatctgccttggcgccaacaccatgggctacagcttccgcagcgccttcctcaccgtgctgccagacccaaaaccgccagggccacctgtggcctcctcgtcctcggccactagcctgccgtggcccgtggtcatcggcatcccagccggcgctgtcttcatcctgggcaccctgctcctgtggctttgccaggcccagaagaagccgtgcacccccgcgcctgcccctcccctgcctgggcaccgcccgccggggacggcccgcgaccgcagcggagacaaggaccttccctcgttggccgccctcagcgctggccctggtgtggggctgtgtgaggagcatgggtctccggcagccccccagcacttactgggcccaggcccagttgctggccctaagttgtaccccaaactctacacagacatccacacacacacacacacacactctcacacacactcacacgtggagggcaaggtccaccagcacatccactatcagtgctagacggcaccgtatctgcagtgggcacgggggggccggccagacaggcagactgggaggatggaggacggagctgcagacgaaggcaggggacccatggcgaggaggaatggccagcaccccaggcagtctgtgtgtgaggcatagcccctggacacacacacacagacacacacactgcctggatgcatgtatgcacacacatgcgcgcacacgtgctccctgaaggcacacgtacgcacacacgcacatgcacagatatgccgcctgggcacacagataagctgcccaaatgcacgcacacgcacagagacatgccagaacatacaaggacatgctgcctgaacatacacacgcacacccatgcgcagatgtgctgcctggacacacacacacacacggatatgctgtctggacgcacacacgtgcagatatggtatccggacacacacgtgcacagatatgctgcctggacacacagataatgctgccttgacacacacatgcacggatattgcctggacacacacacacacacgtgtgcacagatatgctgtctggacacgcacacacatgcagatatgctgcctggacacacacttccagacacacgtgcacaggcgcagatatgctgcctggacacacgcagatatgctgtctagtcacacacacacgcagacatgctgtccggacacacacacgcatgcacagatatgctgtccggacacacacacgcacgcagatatgctgcctggacacacacacagataatgctgcctcaacactcacacacgtgcagatattgcctggacacacacatgtgcacagatatgctgtctggacatgcacacacgtgcagatatgctgtccggatacacacgcacgcacacatgcagatatgctgcctgggcacacacttccggacacacatgcacacacaggtgcagatatgctgcctggacacacgcagactgacgtgcttttgggagggtgtgccgtgaagcctgcagtacgtgtgccgtgaggctcatagttgatgagggactttccctgctccaccgtcactcccccaactctgcccgcctctgtccccgcctcagtccccgcctccatccccgcctctgtcccctggccttggcggctatttttgccacctgccttgggtgcccaggagtcccctactgctgtgggctggggttgggggcacagcagccccaagcctgagaggctggagcccatggctagtggctcatccccactgcattctccccctgacacagagaaggggccttggtatttatatttaagaaatgaagataatattaataatgatggaaggaagactgggttgcagggactgtggtctctcctggggcccgggacccgcctggtctttcagccatgctgatgaccacaccccgtccaggccagacaccaccccccaccccactgtcgtggtggccccagatctctgtaattttatgtagagtttgagctgaagccccgtatatttaatttattttgttaaacatgaaagtgcatcctttccctcc

SEQ ID NO: 20624 - DNA, 3639 bp, Artificial Sequence
  derived and/or modified sequence
actttgcacgctcgcagccacgtttccgcacacctgtcccctttccacgcacctgtgtccggcagcccgcacatctgtgggagcgctgcctcctcgccagctgtccgggaagttcagcgccgctctcccacgggcgtgagaccgccccacccacctgtccgtgactgcagctccggccgggagggcggcagcaggtgagaggctgggaggcctcaggtgggaacatacctttggccaaaggcaccaggtaacccgaacgccccggggaggacccctgcctgcatcgccgcggccgtccccccctaccccgtccccagcagctccggctgggcgaggccctgcttctcccttctgctcccgaagaccccccggggcgcagacctggaagcctcgaagctcccgcggccgtccagtccgcccccttctgagcaaccagagagcggtctgggcccggcccggggctgcgcagaggtcagactgccgcgggcagggccggagcctgctctgggggtcgcggaggtgtctcgagagttgaggacccgacccgggcgcgcgcgggcgcaggtccggacaggccgagatgacgccgagccccctgttgctgctcctgctgccgccgctgctgctgggggccttcccgccggccgccgccgcccgaggccccccaaagatggcggacaaggtggtcccacggcaggtggcccggctgggccgcactgtgcggctgcagtgcccagtggagggggacccgccgccgctgaccatgtggaccaaggatggccgcaccatccacagcggctggagccgcttccgcgtgctgccgcaggggctgaaggtgaagcaggtggagcgggaggatgccggcgtgtacgtgtgcaaggccaccaacggcttcggcagcctgagcgtcaactacaccctcgtcgtgctggatgacattagcccagggaaggagagcctggggcccgacagctcctctgggggtcaagaggaccccgccagccagcagtgggcacgaccgcgcttcacacagccctccaagatgaggcgccgggtgatcgcacggcccgtgggtagctccgtgcggctcaagtgcgtggccagcgggcaccctcggcccgacatcacgtggatgaaggacgaccaggccttgacgcgcccagaggccgctgagcccaggaagaagaagtggacactgagcctgaagaacctgcggccggaggacagcggcaaatacacctgccgcgtgtcgaaccgcgcgggcgccatcaacgccacctacaaggtggatgtgatccagcggacccgttccaagcccgtgctcacaggcacgcaccccgtgaacacgacggtggacttcggggggaccacgtccttccagtgcaaggtgcgcagcgacgtgaagccggtgatccagtggctgaagcgcgtggagtacggcgccgagggccgccacaactccaccatcgatgtgggcggccagaagtttgtggtgctgcccacgggtgacgtgtggtcgcggcccgacggctcctacctcaataagctgctcatcacccgtgcccgccaggacgatgcgggcatgtacatctgccttggcgccaacaccatgggctacagcttccgcagcgccttcctcaccgtgctgccagacccaaaaccgccagggccacctgtggcctcctcgtcctcggccactagcctgccgtggcccgtggtcatcggcatcccagccggcgctgtcttcatcctgggcaccctgctcctgtggctttgccaggcccagaagaagccgtgcacccccgcgcctgcccctcccctgcctgggcaccgcccgccggggacggcccgcgaccgcagcggagacaaggaccttccctcgttggccgccctcagcgctggccctggtgtggggctgtgtgaggagcatgggtctccggcagccccccagcacttactgggcccaggcccagttgctggccctaagttgtaccccaaactctacacagacatccacacacacacacacacacactctcacacacactcacacgtggagggcaaggtccaccagcacatccactatcagtgctagacggcaccgtatctgcagtgggcacgggggggccggccagacaggcagactgggaggatggaggacggagctgcagacgaaggcaggggacccatggcgaggaggaatggccagcaccccaggcagtctgtgtgtgaggcatagcccctggacacacacacacagacacacacactgcctggatgcatgtatgcacacacatgcgcgcacacgtgctccctgaaggcacacgtacgcacacacgcacatgcacagatatgccgcctgggcacacagataagctgcccaaatgcacgcacacgcacagagacatgccagaacatacaaggacatgctgcctgaacatacacacgcacacccatgcgcagatgtgctgcctggacacacacacacacacggatatgctgtctggacgcacacacgtgcagatatggtatccggacacacacgtgcacagatatgctgcctggacacacagataatgctgccttgacacacacatgcacggatattgcctggacacacacacacacacgtgtgcacagatatgctgtctggacacgcacacacatgcagatatgctgcctggacacacacttccagacacacgtgcacaggcgcagatatgctgcctggacacacgcagatatgctgtctagtcacacacacacgcagacatgctgtccggacacacacacgcatgcacagatatgctgtccggacacacacacgcacgcagatatgctgcctggacacacacacagataatgctgcctcaacactcacacacgtgcagatattgcctggacacacacatgtgcacagatatgctgtctggacatgcacacacgtgcagatatgctgtccggatacacacgcacgcacacatgcagatatgctgcctgggcacacacttccggacacacatgcacacacaggtgcagatatgctgcctggacacacgcagactgacgtgcttttgggagggtgtgccgtgaagcctgcagtacgtgtgccgtgaggctcatagttgatgagggactttccctgctccaccgtcactcccccaactctgcccgcctctgtccccgcctcagtccccgcctccatccccgcctctgtcccctggccttggcggctatttttgccacctgccttgggtgcccaggagtcccctactgctgtgggctggggttgggggcacagcagccccaagcctgagaggctggagcccatggctagtggctcatccccactgcattctccccctgacacagagaaggggccttggtatttatatttaagaaatgaagataatattaataatgatggaaggaagactgggttgcagggactgtggtctctcctggggcccgggacccgcctggtctttcagccatgctgatgaccacaccccgtccaggccagacaccaccccccaccccactgtcgtggtggccccagatctctgtaattttatgtagagtttgagctgaagccccgtatatttaatttattttgttaaacatgaaagtgcatccttt

SEQ ID NO: 20625 - DNA, 1663 bp, Artificial Sequence
  derived and/or modified sequence
aaatttgtccgctaatggcgcaggcgattatctgcggggcgctgagtgttgtgtgtcctgcgggcagggccggagttacaagcgccaggaatccagacggtgtttggagagggggggcggcgggggagcccggtccggacaggccgagatgacgccgagccccctgttgctgctcctgctgccgccgctgctgctgggggccttcccgccggccgccgccgcccgaggccccccaaagatggcggacaaggtggtcccacggcaggtggcccggctgggccgcactgtgcggctgcagtgcccagtggagggggacccgccgccgctgaccatgtggaccaaggatggccgcaccatccacagcggctggagccgcttccgcgtgctgccgcaggggctgaaggtgaagcaggtggagcgggaggatgccggcgtgtacgtgtgcaaggccaccaacggcttcggcagcctgagcgtcaactacaccctcgtcgtgctggatgacattagcccagggaaggagagcctggggcccgacagctcctctgggggtcaagaggaccccgccagccagcagtgggcacgaccgcgcttcacacagccctccaagatgaggcgccgggtgatcgcacggcccgtgggtagctccgtgcggctcaagtgcgtggccagcgggcaccctcggcccgacatcacgtggatgaaggacgaccaggccttgacgcgcccagaggccgctgagcccaggaagaagaagtggacactgagcctgaagaacctgcggccggaggacagcggcaaatacacctgccgcgtgtcgaaccgcgcgggcgccatcaacgccacctacaaggtggatgtgatccagcggacccgttccaagcccgtgctcacaggcacgcaccccgtgaacacgacggtggacttcggggggaccacgtccttccagtgcaaggtgcgcagcgacgtgaagccggtgatccagtggctgaagcgcgtggagtacggcgccgagggccgccacaactccaccatcgatgtgggcggccagaagtttgtggtgctgcccacgggtgacgtgtggtcgcggcccgacggctcctacctcaataagctgctcatcacccgtgcccgccaggacgatgcgggcatgtacatctgccttggcgccaacaccatgggctacagcttccgcagcgccttcctcaccgtgctgccagacccaaaaccgccagggccacctgtggcctcctcgtcctcggccactagcctgccgtggcccgtggtcatcggcatcccagccggcgctgtcttcatcctgggcaccctgctcctgtggctttgccaggcccagaagaagccgtgcacccccgcgcctgcccctcccctgcctgggcaccgcccgccggggacggcccgcgaccgcagcggagacaaggaccttccctcgttggccgccctcagcgctggccctggtgtggggctgtgtgaggagcatgggtctccggcagccccccagcacttactgggcccaggcccagttgctggccctaagttgtaccccaaactctacacagacatccacacacacacacacacacactctcacacacactcacacgtggagggcaaggtccaccagcacatccactatcagtgctag

SEQ ID NO: 20626 - DNA, 562 bp, Artificial Sequence
  derived and/or modified sequence
gctaatggcgcaggcgattatctgcggggcgctgagtgttgtgtgtcctgcgggcagggccggagttacaagcgccaggaatccagacggtccggacaggccgagatgacgccgagccccctgttgctgctcctgctgccgccgctgctgctgggggccttcccgccggccgccgccgcccgaggccccccaaagatggcggacaaggtggtcccacggcaggtggcccggctgggccgcactgtgcggctgcagtgcccagtggagggggacccgccgccgctgaccatgtggaccaaggatggccgcaccatccacagcggctggagccgcttccgcgtgctgccgcaggggctgaaggtgaagcaggtggagcgggaggatgccggcgtgtacgtgtgcaaggccaccaacggcttcggcagcctgagcgtcaactacaccctcgtcgtgctggatgacattagcccagggaaggagagcctggggcccgacagctcctctgggggtcaagaggaccccgccagccagcagtgggcacgaccgcgcttcacacagccct

SEQ ID NO: 20627 - DNA, 2304 bp, Artificial Sequence
  derived and/or modified sequence
gccgccccgccccgagaccgggcccgggggcgcggggcggcgggatgcggcgcccggggcggcgatgaccgcggagcgcacgccgcgggcccggccctgaccccgccgcccgcccgctgagccccccgccgaggtccggacaggccgagatgacgccgagccccctgttgctgctcctgctgccgccgctgctgctgggggccttcccgccggccgccgccgcccgaggccccccaaagatggcggacaaggtggtcccacggcaggtggcccggctgggccgcactgtgcggctgcagtgcccagtggagggggacccgccgccgctgaccatgtggaccaaggatggccgcaccatccacagcggctggagccgcttccgcgtgctgccgcaggggctgaaggtgaagcaggtggagcgggaggatgccggcgtgtacgtgtgcaaggccaccaacggcttcggcagcctgagcgtcaactacaccctcgtcgtgctggatgacattagcccagggaaggagagcctggggcccgacagctcctctgggggtcaagaggaccccgccagccagcagtgggcacgaccgcgcttcacacagccctccaagatgaggcgccgggtgatcgcacggcccgtgggtagctccgtgcggctcaagtgcgtggccagcgggcaccctcggcccgacatcacgtggatgaaggacgaccaggccttgacgcgcccagaggccgctgagcccaggaagaagaagtggacactgagcctgaagaacctgcggccggaggacagcggcaaatacacctgccgcgtgtcgaaccgcgcgggcgccatcaacgccacctacaaggtggatgtgatccagcggacccgttccaagcccgtgctcacaggcacgcaccccgtgaacacgacggtggacttcggggggaccacgtccttccagtgcaaggtgcgcagcgacgtgaagccggtgatccagtggctgaagcgcgtggagtacggcgccgagggccgccacaactccaccatcgatgtgggcggccagaagtttgtggtgctgcccacgggtgacgtgtggtcgcggcccgacggctcctacctcaataagctgctcatcacccgtgcccgccaggacgatgcgggcatgtacatctgccttggcgccaacaccatgggctacagcttccgcagcgccttcctcaccgtgctgccagacccaaaaccgccagggccacctgtggcctcctcgtcctcggccactagcctgccgtggcccgtggtcatcggcatcccagccggcgctgtcttcatcctgggcaccctgctcctgtggctttgccaggcccagaagaagccgtgcacccccgcgcctgcccctcccctgcctgggcaccgcccgccggggacggcccgcgaccgcagcggagacaaggaccttccctcgttggccgccctcagcgctggccctggtgtggggctgtgtgaggagcatgggtctccggcagccccccagcacttactgggcccaggcccagttgctggccctaagttgtaccccaaactctacacagacatccacacacacacacacacacactctcacacacactcacacgtggagggcaaggtccaccagcacatccactatcagtgctagacggcaccgtatctgcagtgggcacgggggggccggccagacaggcagactgggaggatggaggacggagctgcagacgaaggcaggggacccatggcgaggaggaatggccagcaccccaggcagtctgtgtgtgaggcatagcccctggacacacacacacagacacacacactgcctggatgcatgtatgcacacacatgcgcgcacacgtgctccctgaaggcacacgtacgcacacacgcacatgcacagatatgccgcctgggcacacagataagctgcccaaatgcacgcacacgcacagagacatgccagaacatacaaggacatgctgcctgaacatacacacgcacacccatgcgcagatgtgctgcctggacacacacacacacacggatatgctgtctggacgcacacacgtgcagatatggtatccggacacacacgtgcacagatatgctgcctggacacacagataatgctgccttgacacacacatgcacggatattgcctggacacacacacacacacgtgtgcacagatatgctgtctggacacgcacacacatgcagatatgctgcctggacacacacttccagacacacgtgcacaggcgcagatatgctgcctggacac

SEQ ID NO: 20628 - DNA, 571 bp, Artificial Sequence
  derived and/or modified sequence
cgctaatggcgcaggcgattatctgcggggcgctgagtgttgtgtgtcctgcgggcagggccggagttacaagcgccaggaatccagacggtgtttggagagggggggcggcgggggagcccggtaattagtgtaaaccctttgtctgcctttgatacccacagcttctccccgctgcggcttcctccgcctggagcgcgggcggggagggcctgtggggagggcggccagacccctgatccccgcggcccgggaccggggagggcggtatctcccagttccacgtgttagtgacggcgcccccaatgtccccaggtccggacaggccgagatgacgccgagccccctgttgctgctcctgctgccgccgctgctgctgggggccttcccgccggccgccgccgcccgaggccccccaaagatggcggacaaggtggtcccacggcaggtggcccggctgggccgcactgtgcggctgcagtgcccagtggagggggacccgccgccgctgaccatgtggaccaaggatggccgcaccatccacagcggctggagccgcttccgcgtgctg

SEQ ID NO: 20629 - DNA, 1475 bp, Artificial Sequence
  derived and/or modified sequence
gctcgctccgggagagttgacaaagccccgcagggaaggacgcctcgcggcgcggcgccccgggcccctcgccccgccgccccgggccccccaaagatggcggacaaggtggtcccacggcaggtggcccggctgggccgcactgtgcggctgcagtgcccagtggagggggacccgccgccgctgaccatgtggaccaaggatggccgcaccatccacagcggctggagccgcttccgcgtgctgccgcaggggctgaaggtgaagcaggtggagcgggaggatgccggcgtgtacgtgtgcaaggccaccaacggcttcggcagcctgagcgtcaactacaccctcgtcgtgctggatgacattagcccagggaaggagagcctggggcccgacagctcctctgggggtcaagaggaccccgccagccagcagtgggcacgaccgcgcttcacacagccctccaagatgaggcgccgggtgatcgcacggcccgtgggtagctccgtgcggctcaagtgcgtggccagcgggcaccctcggcccgacatcacgtggatgaaggacgaccaggccttgacgcgcccagaggccgctgagcccaggaagaagaagtggacactgagcctgaagaacctgcggccggaggacagcggcaaatacacctgccgcgtgtcgaaccgcgcgggcgccatcaacgccacctacaaggtggatgtgatccagcggacccgttccaagcccgtgctcacaggcacgcaccccgtgaacacgacggtggacttcggggggaccacgtccttccagtgcaaggtgcgcagcgacgtgaagccggtgatccagtggctgaagcgcgtggagtacggcgccgagggccgccacaactccaccatcgatgtgggcggccagaagtttgtggtgctgcccacgggtgacgtgtggtcgcggcccgacggctcctacctcaataagctgctcatcacccgtgcccgccaggacgatgcgggcatgtacatctgccttggcgccaacaccatgggctacagcttccgcagcgccttcctcaccgtgctgccagacccaaaaccgccagggccacctgtggcctcctcgtcctcggccactagcctgccgtggcccgtggtcatcggcatcccagccggcgctgtcttcatcctgggcaccctgctcctgtggctttgccaggcccagaagaagccgtgcacccccgcgcctgcccctcccctgcctgggcaccgcccgccggggacggcccgcgaccgcagcggagacaaggaccttccctcgttggccgccctcagcgctggccctggtgtggggctgtgtgaggagcatgggtctccggcagccccccagcaccccactgtcgtggtggccccagatctctgtaattttatgtagagtttgagctgaagccccgtatatttaatttattttgttaaacatgaaagtgc

SEQ ID NO: 20630 - DNA, 1515 bp, Artificial Sequence
  derived and/or modified sequence
atgacaccctcaccactcctgctgctgctgctaccaccacttctgctcggtgcctttccacccgctgcggctgccaggggaccccccaagatggccgacaaggtggtccctaggcaggtggcccgtctcgggaggactgtgcggctccagtgtcccgtggaaggggaccctcctccgctcacgatgtggaccaaagatgggaggactatccacagtgggtggtcaaggttccgtgtgctcccccagggtctgaaagtgaaacaggtggagagagaagacgccggtgtgtacgtgtgtaaagccactaatggcttcgggtccctttccgtcaattatactctcgttgttctggacgatatatcacctgggaaggaaagcctggggcccgattctagtagcggggggcaggaggatcctgctagtcaacaatgggctcggccacggttcactcagccatccaaaatgcggcgccgtgtcattgcgcgccctgtcggatcctccgtcaggctgaaatgcgtggcttcaggtcacccacgcccagatatcacttggatgaaagacgaccaagccttgacccgccccgaagcagcagaacctaggaagaagaaatggactctgtctctcaaaaacctacggccggaagattccggtaaatatacttgtagggtatctaatagagccggagccataaatgctacttataaggtcgacgtcatccagcgaacaaggtctaaacctgtgttgaccgggacgcatcccgtcaacaccaccgtcgacttcggtggaacgacctcatttcagtgcaaagtgcggtccgatgtgaaacccgtgatacagtggctcaaacgagtggagtatggtgcagaggggaggcacaatagcaccattgatgtggggggtcagaagttcgtcgttttgccgactggagacgtatggtctaggcctgacggcagttacttgaataaacttttgataaccagggctaggcaagatgatgccgggatgtatatatgtctgggcgcaaataccatggggtacagcttccgcagtgcttttcttactgttttgcctgatccaaagccccctggcccgccagtggctagcagcagttcggctaccagcctgccctggcctgttgtaattggcatcccagcaggagccgtattcattttggggaccttactgctgtggctgtgccaagcccagaagaagccgtgcaccccagcccccgcccctccactccccgggcatcgacctcccggcacggcgcgcgaccggagcggagacaaggatctcccatccttggccgccctgtccgcaggtccgggggtggggttgtgtgaggagcacgggtctcctgcggccccccagcatctgctgggccccggcccagtggcagggccaaagctgtaccccaaattgtatactgatatccacacccatacacatactcactctcatactcattcgcacgttgagggaaaggttcatcagcacatccactatcaatgctag

SEQ ID NO: 20631 - DNA, 1515 bp, Artificial Sequence
  derived and/or modified sequence
atgactccatcacctctgctccttctactgttaccccctctgctgctcggagcgtttccacccgcagccgccgcaaggggcccccccaagatggcagacaaggttgtgcctcgccaggtagcgcgcctgggccggacagtgaggctccagtgccccgtggagggtgaccccccgccactcacgatgtggacaaaggatggacggaccattcacagcggatggtctaggttccgggtgctgcctcagggccttaaagttaagcaggtggagagggaagacgccggcgtgtacgtctgtaaggctacgaatggctttggcagtctgagcgtcaattacactcttgtggttcttgacgatatttctccgggaaaggagagtctgggccctgactcctcgagcggcggccaggaggatccggcgagtcagcagtgggccaggcctaggtttactcagccctccaagatgaggagaagggtcattgcacgccccgtaggatcctctgtgcgcttaaaatgtgtagctagtggacacccgcgacccgacatcacgtggatgaaggatgaccaggctttgacccgcccagaggctgcagaacctagaaagaagaaatggacactctccctgaagaatttacgaccggaggactcaggaaaatacacttgccgagtgtccaatcgtgctggggctataaacgcaacttacaaggtagacgtgatacagagaacacgaagtaaacccgttctgaccggaactcacccggtgaatacaaccgttgattttgggggtacaacctcgttccagtgcaaagtgaggtcagacgtgaagcctgtgatccagtggctcaagagggttgagtacggcgcggagggccggcacaactccactattgatgttggtggtcagaaattcgttgtgttgcctactggggacgtttggtcaaggccagacggttcctatttgaataaactccttattacacgcgcgcggcaagatgacgccgggatgtacatctgcttaggcgctaacacaatgggttactccttccgaagcgcctttcttactgtcctcccggaccctaaacccccaggccccccggtggctagctcctcatcagcgacctccctgccatggcccgtggtgattgggatccccgcaggggcagtgtttatactcggtactctcctgctttggctctgccaggcacaaaagaagccttgcacaccagctcctgcaccacccctgcctggccatcggcctccaggcaccgctagagacagaagtggcgacaaagacctcccgtccttggctgctctttccgcgggccctggcgtgggcctctgcgaggagcatggatcgccggcggccccccagcacctgctgggaccaggaccagttgccggaccaaaactttatccaaagctttatacggacatccacacccatacccacactcattctcacacccacagccatgtggaagggaaagtccaccagcacatccactatcaatgttag

SEQ ID NO: 20632 - DNA, 1515 bp, Artificial Sequence
  derived and/or modified sequence
atgacaccgtcacccctgctgctgctcttgttgcccccattattgctgggtgcttttccccctgccgccgccgccagagggccgccaaagatggctgataaagtcgtgccccgccaggtggctagactgggacgcacggtacggctgcagtgtcccgtggagggcgacccgcctcccctaaccatgtggacgaaggacggacgaacaatccatagcgggtggtcccggtttagagtgctgcctcagggactcaaagtcaagcaagtagagcgagaggatgccggtgtctatgtctgcaaggcaactaacgggtttggaagtctctccgtgaattacacactggtcgtcctggacgacatttctcctggtaaagaatctctcgggcctgactcgtctagcggagggcaggaggacccggcatcgcaacaatgggcccgaccccggttcacacagccttctaagatgcgacgtcgagtgattgctcgccccgtcggctccagtgtgcgcttgaagtgtgtcgccagcggtcacccacgtcccgacatcacctggatgaaggatgaccaggctcttacgaggcccgaggccgcggaacccagaaaaaagaagtggacactctcactgaagaacctgagaccggaagactccggaaagtacacctgtagggtatccaacagggccggagccatcaacgcaacttacaaagttgacgtcattcagagaacacggtccaagcccgtgctcaccgggacccacccagtgaacacaactgtggacttcggcggcacaacttccttccagtgcaaggtgcggagcgatgttaaacctgtcatccagtggctgaaaagagttgaatacggtgccgagggccggcataactcaaccatcgatgtgggcggccagaaattcgtcgttttacccactggagacgtctggtccaggccagacggcagctatttaaataaattgctgatcaccagagctagacaggacgacgcaggcatgtatatatgcctcggtgccaacacaatgggctattcctttcgttcagcctttttgactgtgcttcctgaccctaaaccccccggacctccagtcgcaagttcttcatctgccacatcactaccatggccagtcgtcatcggcatcccggccggtgccgtgttcatcctgggcacattgctactgtggctgtgccaagcacagaaaaagccatgcacccccgcccccgcaccgccattgcctggacatagaccgccagggactgcccgggatcgctctggcgacaaggatctgccctctctggccgcactctctgctgggcccggagtcggcctttgtgaggagcatggcagcccggcagcacctcagcacctcctgggaccgggaccagtcgcgggtccgaaactgtaccctaaactgtacacagacatccacactcatacccacacacattctcacacccactcccatgtcgaaggcaaggtgcaccagcatatccactaccagtgttag

SEQ ID NO: 20633 - DNA, 459 bp, Artificial Sequence
  derived and/or modified sequence
atgactccctcgcctttgctcctgttattactccccccgctcctgctaggagccttccccccagcggcagccgccaggggaccccctaaaatggcagacaaggtcgtgccccgacaggtggcccgccttggacggacagttagacttcagtgtcctgtggaaggagacccacctcctctcacgatgtggacaaaggacgggagaacaatacacagcggttggagcagatttcgggtcctgcctcaaggactgaaagtgaagcaagttgagagagaggacgccggtgtctacgtgtgtaaggccactaacggtttcggtagcctgtcagtcaactacacattggtagtgctggacgacattagtcctgggaaggagtcattggggccagactcctcgtccggaggccaggaagacccggcaagccaacagtgggctaggcctagattcactcagccttag

SEQ ID NO: 20634 - DNA, 1515 bp, Artificial Sequence
  derived and/or modified sequence
atgaccccttccccactgttacttctgctcctaccaccactcctcttgggagccttcccccctgctgctgctgcgaggggccccccgaagatggcagataaagtggtgcctcgccaggtggctaggctggggcgcactgtgagactgcaatgtccagtcgagggcgatccaccacctctgacgatgtggactaaagacgggagaaccattcatagcgggtggtccaggttcagagtgttgccccagggcctgaaagtgaagcaggtggagcgcgaggacgctggtgtctacgtatgcaaagcaacaaacggcttcggaagcctttctgtgaactacacattagtcgtgttggacgatatttccccaggcaaggagtcactgggcccagacagttcaagcggtggccaagaggatcctgctagccagcaatgggctcggccccggtttacccaaccaagcaagatgagacggcgtgttatcgcgcggccagtggggtcgtcggtgcgcttgaagtgcgtcgccagtgggcaccctaggcctgatattacttggatgaaggacgatcaagcgctgaccagaccagaggctgctgagccaaggaaaaagaaatggaccctctcgctgaaaaatcttcgccctgaggattctggcaagtacacctgtcgggtatctaaccgggccggcgcaatcaacgccacttataaagtggatgtcattcagcgcaccagatcaaagcccgtactaactgggacccacccggtgaacacaactgtcgattttggcgggactacctccttccagtgcaaggtacgatcagacgtgaagcccgtgattcagtggctgaagcgagtcgaatacggagccgagggaaggcataattctaccattgatgttggcggacagaaatttgtggtgctgccaactggggacgtgtggtcacgccccgatggttcatatttaaacaaactgctgatcacccgtgcccgccaggatgatgcaggaatgtatatctgtcttggtgccaatacaatgggctactcgttccgctccgccttcctcaccgtcctgcccgatcctaagcctccagggcccccggtcgccagcagcagttcagccacaagtttaccatggcccgtggtgatcggcattccagcaggcgcggtctttatcttggggactctcttgctctggctgtgtcaggcacagaagaagccatgtacccccgcgccagccccaccacttccaggccaccgtcctccagggacggctagagaccggtcgggcgataaagatctgcccagcctggcggcactgtccgctgggccaggcgtcgggctctgcgaggagcacgggtccccagctgcaccacagcacttgctgggccctgggcctgtagccgggcctaaactctatccaaagctgtacaccgatatccacacacacacccatacccactctcatactcactcccacgtggagggaaaagtccatcaacacattcactatcagtgttag

SEQ ID NO: 20635 - DNA, 243 bp, Artificial Sequence
  derived and/or modified sequence
atgacgccatcccctctcctgcttcttctactgccacccctgctcctaggggcattccctccggctgccgctgccaggggcccaccaaagatggccgataaagtggttccacggcaggtcgcccgtttgggaagaacagtgaggcttcaatgccctgtagaaggcgatcctcctcctctgacgatgtggactaaagacgggagaacaatccattcaggctggtccagattccgagtgttatag

SEQ ID NO: 20636 - DNA, 1326 bp, Artificial Sequence
  derived and/or modified sequence
atggccgacaaagtggtcccacgccaggtcgctcggcttggaagaacagttcgcctgcagtgcccagtggagggagaccctcccccacttactatgtggacaaaggatggccgcactatccatagcggctggagtcggttcagggttctgccgcaaggcctgaaagtgaagcaggtggagcgggaggacgcgggggtgtatgtatgcaaagctaccaatggttttggctctttgtccgtcaattatactctggtggtcctggatgacatcagccccggaaaggaatccctggggcctgacagtagcagcggtggacaggaggatcctgcctcccagcaatgggcacggcctagatttacccagcccagcaagatgagaagacgcgtaattgcccgtcctgtgggtagctctgtccggcttaaatgcgtggcctctggacacccaagacccgatattacatggatgaaggatgatcaggccctgacccggcccgaggctgctgagccccgcaaaaaaaagtggacactgtcactgaaaaacctccgccctgaagactcagggaaatatacctgccgagtgtccaacagagcaggcgctattaatgcaacatataaggtggatgttatccagcgaacccggagcaaaccagtcttgaccggcacacaccctgtcaatacaacagtggactttggcggaacgacttccttccagtgtaaagttaggagcgatgtcaaaccagtaatccagtggctaaaacgggtggaatacggggccgagggtaggcataattccacaatcgatgtcggcgggcagaagttcgtcgttttgccgaccggggacgtgtggtcacgaccggacgggtcttacttgaataagctcctgatcactagagcccgacaggatgatgctggcatgtatatatgtctaggcgcaaacaccatgggctattcattccgatcagcgtttctaacagtcctgcctgaccccaagccccctggcccccctgtggcctccagctcatccgcgaccagcctaccttggcctgtggtcatcggcatacccgctggtgcagtatttatattaggcacgctcttgttgtggctgtgtcaggcccaaaaaaagccatgtacccccgccccagccccccccctgccagggcaccggccaccagggacggctcgcgaccggagcggcgacaaggatcttcccagcctggcggcactgtcagctggtcctggcgtgggactatgcgaggagcacggttcgccagctgccccccagcatcctacagtcgttgtggctccagacctgtgcaacttcatgtag

SEQ ID NO: 20637 - DNA, 1515 bp, Artificial Sequence
  derived and/or modified sequence
atgacccccagccccctgctgctgctgctgctgccccccctgctgctgggcgccttccccccagctgctgctgcccggggcccccccaagatggctgacaaggtggtgccccggcaggtggcccggctgggccgcacagtgcggctgcagtgccctgtggagggggaccccccacccctgaccatgtggaccaaggatggccgcaccatccacagcggctggagccgcttccgggtgctgccccagggcctgaaggtgaagcaggtggagcgggaggatgctggggtgtatgtgtgcaaggccaccaatggatttggcagcctgtctgtgaactacaccctggtggtgctggatgacatcagccctgggaaggagagcctgggccctgacagcagcagcggcggccaggaggaccctgccagccagcagtgggcccggccccgcttcacccagcccagcaagatgagaagaagagtcatcgcccggcctgtgggcagctctgtgcggctgaagtgtgtggccagcggccaccccaggccagacatcacctggatgaaggatgaccaggccctgaccaggcctgaggccgctgagcccaggaagaagaagtggaccctgagcctgaagaacctgcggcctgaggacagcggcaagtacacctgccgggtgagcaacagagctggggccatcaatgccacctacaaggtggatgtgatccagaggaccaggagcaagcctgtgctgaccggcacccaccctgtgaacaccaccgtggactttggaggcaccaccagcttccagtgcaaggtgcggagtgatgtgaagcctgtgatccagtggctgaagagggtggagtatggagctgagggccgccacaacagcaccattgatgtgggcggccagaagtttgtggtgctgcccactggagatgtgtggagcaggccagatggcagctacctgaacaagctgctgatcacccgggcccggcaggatgatgctggcatgtacatctgcctgggcgccaacaccatgggctacagcttccgcagcgccttcctgactgtgctgcctgaccccaagcccccaggcccccctgtggccagcagcagcagcgccaccagcctgccctggcctgtggtgattggcatcccagctggagctgtgttcatcctgggcaccctgctgctgtggctgtgccaggcccagaagaagccctgcaccccagccccagccccacccctgcccggccacaggcctcctggaacagcccgggacagaagtggggacaaggacctgcccagcctggccgccctgtctgctggccctggggtgggcctgtgtgaggagcacggcagccctgctgccccccagcacctgctgggccctggccctgtggccggccccaagctgtaccccaagctgtacacagacatccacacccacacccacacccacagccacacccacagccacgtggagggcaaggtgcaccagcacatccactaccagtgctag

SEQ ID NO: 20638 - DNA, 459 bp, Artificial Sequence
  derived and/or modified sequence
atgacccccagccccctgctgctgctgctgctgccccccctgctgctgggcgccttccccccagctgctgctgcccggggcccccccaagatggctgacaaggtggtgccccggcaggtggcccggctgggccgcacagtgcggctgcagtgccctgtggagggggaccccccacccctgaccatgtggaccaaggatggccgcaccatccacagcggctggagccgcttccgggtgctgccccagggcctgaaggtgaagcaggtggagcgggaggatgctggggtgtatgtgtgcaaggccaccaatggatttggcagcctgtctgtgaactacaccctggtggtgctggatgacatcagccctgggaaggagagcctgggccctgacagcagcagcggcggccaggaggaccctgccagccagcagtgggcccggccccgcttcacccagccctag

SEQ ID NO: 20639 - DNA, 243 bp, Artificial Sequence
  derived and/or modified sequence
atgacccccagccccctgctgctgctgctgctgccccccctgctgctgggcgccttccccccagctgctgctgcccggggcccccccaagatggctgacaaggtggtgccccggcaggtggcccggctgggccgcacagtgcggctgcagtgccctgtggagggggaccccccacccctgaccatgtggaccaaggatggccgcaccatccacagcggctggagccgcttccgggtgctgtag

SEQ ID NO: 20640 - DNA, 1326 bp, Artificial Sequence
  derived and/or modified sequence
atggctgacaaggtggtgccccggcaggtggcccggctgggccgcacagtgcggctgcagtgccctgtggagggggaccccccacccctgaccatgtggaccaaggatggccgcaccatccacagcggctggagccgcttccgggtgctgccccagggcctgaaggtgaagcaggtggagcgggaggatgctggggtgtatgtgtgcaaggccaccaatggatttggcagcctgtctgtgaactacaccctggtggtgctggatgacatcagccctgggaaggagagcctgggccctgacagcagcagcggcggccaggaggaccctgccagccagcagtgggcccggccccgcttcacccagcccagcaagatgagaagaagagtcatcgcccggcctgtgggcagctctgtgcggctgaagtgtgtggccagcggccaccccaggccagacatcacctggatgaaggatgaccaggccctgaccaggcctgaggccgctgagcccaggaagaagaagtggaccctgagcctgaagaacctgcggcctgaggacagcggcaagtacacctgccgggtgagcaacagagctggggccatcaatgccacctacaaggtggatgtgatccagaggaccaggagcaagcctgtgctgaccggcacccaccctgtgaacaccaccgtggactttggaggcaccaccagcttccagtgcaaggtgcggagtgatgtgaagcctgtgatccagtggctgaagagggtggagtatggagctgagggccgccacaacagcaccattgatgtgggcggccagaagtttgtggtgctgcccactggagatgtgtggagcaggccagatggcagctacctgaacaagctgctgatcacccgggcccggcaggatgatgctggcatgtacatctgcctgggcgccaacaccatgggctacagcttccgcagcgccttcctgactgtgctgcctgaccccaagcccccaggcccccctgtggccagcagcagcagcgccaccagcctgccctggcctgtggtgattggcatcccagctggagctgtgttcatcctgggcaccctgctgctgtggctgtgccaggcccagaagaagccctgcaccccagccccagccccacccctgcccggccacaggcctcctggaacagcccgggacagaagtggggacaaggacctgcccagcctggccgccctgtctgctggccctggggtgggcctgtgtgaggagcacggcagccctgctgccccccagcaccccaccgtggtggtggccccagacctgtgcaacttcatgtag

SEQ ID NO: 20641 - DNA, 1515 bp, Artificial Sequence
  derived and/or modified sequence
atgacccccagccccctgctgctgctgctgctgccccccctgctgctgggcgctttcccccccgcagctgcagcccgggggcctccaaagatggccgacaaggtcgtgccacggcaggttgctcggcttgggcggaccgtcaggctgcaatgtcctgtggagggggaccccccaccacttacgatgtggacaaaagacggccggaccatccacagtggctggagccgctttagggtgctgccacaggggttgaaagtgaagcaagtggaaagggaggacgctggcgtgtatgtgtgcaaagccaccaatggatttggttctttgtctgtgaactacacgcttgtagttctggacgacatctcccccggtaaggagagccttggccctgacagttcctctggagggcaagaggatcccgccagccagcaatgggctcgccccaggtttactcagcctagcaagatgcgcaggagggtgatcgctcgtcctgtgggttcatctgttcgtttgaagtgcgtggcatccggacatccaagacccgatatcacctggatgaaggacgaccaagccctcaccagacccgaggctgctgagcctaggaaaaagaaatggacactgagtctgaaaaatcttcggcctgaagactctggtaagtacacttgccgggtgtccaatcgtgcaggagccataaatgccacttacaaagtggatgtcatacagaggactagaagcaaaccggtgcttacaggaacacaccctgttaacaccactgtagacttcggcggcacgacctccttccagtgtaaggttcggagtgacgttaagcccgtgatccagtggttgaaaagggtggagtacggggctgaggggcggcataactcgaccatcgacgtggggggacaaaaatttgtcgtactcccaactggcgatgtgtggtcaaggccggacggatcctacctgaacaagcttcttatcacgcgagcgcgccaggacgatgcaggcatgtacatatgtctcggggccaacacaatgggctactctttccggagtgcgtttttgaccgtgttacctgaccccaaaccacccggacctcctgtggccagtagctcttccgcaacttcacttccatggccagtcgttataggtatccccgccggggcggtcttcatcctcgggactctgctactgtggctctgccaggctcaaaaaaagccttgcacccctgcacccgcaccacccttgccaggccaccgcccaccaggcacagcccgggatagatccggtgataaggacttaccatccctagcagcgcttagtgcgggtcctggggttggactatgcgaggaacacggctcacccgcagcccctcagcacttgctagggcctggaccggtagctgggcctaagctctatcccaagctgtatacagatatacacacacacacacatacccacagccacacacactcacacgtggaaggaaaggtacaccaacacattcactatcaatgctag

SEQ ID NO: 20642 - DNA, 1515 bp, Artificial Sequence
  derived and/or modified sequence
atgacccccagccccctgctgctgctgctgctgccccccctgctgctaggggctttcccacctgcggctgcagctagaggtcctcctaagatggctgacaaagttgttcccaggcaggtagccagattgggaagaacagtgcgtctgcagtgtccagtggagggcgaccctcctccacttacaatgtggacaaaggacggaaggacgatccacagtggctggagccgtttcagagtcctaccccagggactaaaggttaaacaggtggaaagggaggacgcgggcgtctatgtttgtaaagctacgaatggcttcgggtccctgtccgttaattacacactcgtggtgttggatgatattagccccggtaaggagagcctgggacctgacagctcgtcggggggacaggaggatcctgccagtcaacagtgggctagacctagatttacacagcccagcaaaatgcggcgcagggtaatcgcgagaccggtggggtcatccgtccgactcaaatgcgtcgccagcgggcatccaagaccagacataacatggatgaaagacgaccaagcgcttaccagacccgaggctgcagagccccgcaaaaagaaatggacgctcagcctgaaaaaccttcggcccgaggactctggtaaatacacatgtcgcgttagcaatcgcgctggcgcaataaatgcaacatacaaggtggacgtgatccagaggacccggagtaaacccgtcctcaccggcactcatccggtcaataccacagtggattttggggggactacctcttttcagtgcaaggtgcgatccgacgttaagccagtaattcagtggctgaaacgtgttgagtacggagctgaaggccgccataactctacgatcgacgttggcggccagaagtttgtggtgttgccgaccggagatgtgtggagtaggcctgacggtagctacctgaacaaacttcttataaccagggcgcgacaggacgacgccggaatgtatatttgcctcggggcgaacaccatgggttactcattcaggtcagcatttcttacggtgctgcccgatcctaaacctcctggtcctcctgtggcttctagctccagcgccaccagtctgccttggcctgttgtgattggaattcccgctggcgccgtattcatcctcgggacgcttctgctgtggctctgccaggcacagaagaaaccatgcacccctgcacccgctccgccgcttcctggacaccgccctcccggaaccgcccgagaccggtcaggtgataaggatctgccatcattggccgccttgtcagcgggccctggcgtaggactgtgtgaggagcatggatcccccgctgccccacagcacctcttggggcctgggcctgtcgctgggccaaaactctaccccaagctgtacacggacattcacacacacacacacactcattcccacacacattcacacgtggagggcaaagtgcaccagcatattcattaccagtgctag

SEQ ID NO: 20643 - DNA, 1515 bp, Artificial Sequence
  derived and/or modified sequence
atgacccccagccccctgctgctgctgctgctgccccccctgctgcttggcgcctttcctccagctgccgctgccagagggccgccgaagatggctgacaaggtggtgccacggcaggtcgcccggctgggacgaactgtacgcttgcagtgtccagtggagggggatccccctcctttaacaatgtggacaaaggatgggcgaactattcactccggctggtcacgctttcgagtgctacctcaagggctgaaggtgaaacaggtggagagggaggatgcaggagtgtatgtatgcaaggcgaccaatggctttgggtccctcagtgtcaattacacactggttgtgctcgacgacatctcgccaggcaaggaaagcctggggcctgacagcagcagcggcggccaagaagacccagcgtcacagcagtgggctaggccacgtttcacccaaccaagcaagatgcgtcgccgggtgattgcacgccctgtgggcagctctgttagattaaagtgcgtggcctctgggcacccccggcccgatatcacatggatgaaggatgaccaggccttaacccggccagaggctgccgagccccgaaaaaaaaaatggactctgtctctaaaaaatctacgacccgaggatagcggcaagtatacgtgcagggtgtccaatagggcgggcgctattaatgctacatataaagtcgatgtcatccagcgtaccagatccaaacccgttctcacaggcacccatcccgttaataccaccgtagactttggcggcactacttcctttcaatgtaaggtgcgttccgatgtgaagcccgttatacagtggctgaagcgcgtggagtatggcgctgaaggccgacacaatagcaccatcgacgtgggagggcagaaattcgtggtgttgccaacaggtgacgtctggtcgcggcctgacggatcatacttaaacaagctcctgattaccagagcaaggcaggatgatgccggcatgtacatttgtctgggggctaatacgatgggctacagcttccggtccgccttcctgaccgttttgcctgatccgaagcctccaggccccccggtcgcctctagcagctcggctacatctttgccctggcccgtcgtcatcggaatcccagccggagcggtcttcattctcggtaccctcctactgtggctatgtcaagcccagaaaaagccttgtacccctgcacccgcaccacccttgcccggacaccgcccaccggggacagcccgagatagatcaggggacaaggacttaccgtccctggccgccttaagcgcgggaccgggggtgggactgtgcgaagaacacggttcgccagctgctccacagcacctactcggaccaggcccagtggcggggccaaaactgtatcctaaactttatactgacattcacactcatactcatactcattcgcacactcattcccacgtggaggggaaagtgcaccagcacattcactatcagtgctag

SEQ ID NO: 20644 - DNA, 459 bp, Artificial Sequence
  derived and/or modified sequence
atgacccccagccccctgctgctgctgctgctgccccccctgctgctgggggcttttccccccgccgcagccgctcggggcccccccaaaatggccgataaagttgtaccccggcaggtcgcccgtcttggcaggaccgtaaggttacaatgcccagtggagggggacccaccgccattgacaatgtggaccaaggatgggcggactatccactccgggtggtctcggttcagggtccttcctcagggcctgaaggttaagcaggtcgaaagggaggatgccggagtgtatgtctgtaaggctactaacgggttcgggtctctttctgtaaattacactttggtggtgctagatgatatctcacccgggaaagagtctttgggcccggactcaagcagcggcggccaggaagaccccgcttctcagcaatgggcccgccctcggttcacccagccttag

SEQ ID NO: 20645 - DNA, 1515 bp, Artificial Sequence
  derived and/or modified sequence
atgacccccagccccctgctgctgctgctgctgccccccctgctgttaggagcgttccctccagctgcagcagctcggggaccgcccaagatggccgacaaggttgtaccacgtcaagtcgctcgacttggtaggactgttcggttacagtgcccagtggaaggggaccctccccctctgactatgtggacaaaggatggccgaactattcatagtggttggtcacgctttagggtcctccctcaaggcttaaaagtaaaacaggtcgagagggaagacgccggcgtgtacgtgtgtaaggccacgaacggcttcgggtctttgtctgtgaattacaccttggtggttcttgatgacattagcccgggcaaggagagtctgggacctgattcatcctccggaggccaggaggatcccgcatcgcaacaatgggcccgaccacggttcactcagccttccaaaatgaggagacgagtgatcgcacggcccgtcgggagctcggtacgtcttaagtgcgtcgcctctggtcatcctcggcctgacataacttggatgaaagacgatcaggcccttaccagaccagaggccgccgaaccacggaagaagaagtggacgctctctcttaagaatctgcggcccgaggatagtggcaagtatacttgtagagtaagtaacagggcaggcgcaattaatgcaacttacaaagtcgatgtcattcagcgcacaagatctaagccagtgctgacaggcacccaccctgttaatactactgtcgatttcggcggcacgacctcttttcaatgcaaagtgaggtctgatgtgaaaccagtgatacaatggcttaagagagtagagtatggtgccgagggcagacacaacagcacaatagatgtcggaggacagaaattcgttgtgctcccaacgggcgacgtctggtctaggcctgatggctcatatctgaacaaactgctaattaccagggccaggcaggatgatgccggtatgtacatttgtttaggcgctaacaccatgggctattcattcagatctgccttcctgaccgtcctgcctgaccctaagccccccggtccacctgttgcttcgagcagcagcgcaacctctctcccctggccagtggtcatagggattccagcaggagccgtgttcatcctaggcaccctgctgctgtggctctgtcaggcccagaaaaaaccatgtacgccagcgcctgcccctcccctccctgggcataggccgccagggacagcccgcgatcgcagtggagacaaggatctaccttctctggcagccttatctgctggccctggagtgggcctgtgtgaggagcatggctcccccgctgccccacaacacctcctgggccccgggccagtggccggtcccaagctgtaccctaagctttatacagatatccatactcacacacacacacactctcacactcacagccacgttgagggcaaagttcatcagcatattcactaccagtgctag

SEQ ID NO: 20646 - DNA, 243 bp, Artificial Sequence
  derived and/or modified sequence
atgacccccagccccctgctgctgctgctgctgccccccctgctgctgggcgcctttccaccagcagcggccgccaggggccccccaaaaatggccgacaaggtagtgcctagacaggtggcgaggctaggcaggacagtgagattgcagtgccccgtggagggagatccgcccccacttaccatgtggactaaagatggtagaaccatccattccggctggtccaggtttcgtgtgctgtag

SEQ ID NO: 20647 - DNA, 1326 bp, Artificial Sequence
  derived and/or modified sequence
atggccgacaaggtggtgccccggcaggtggcccggctgggccggaccgtgagactccaatgcccagtagagggagatcccccaccactgacaatgtggacaaaggacgggagaacgatccattctggttggtctaggttcagggtcctcccccaaggcctaaaggtgaagcaggtggagagagaagatgcaggcgtgtacgtttgcaaagccacaaacggatttggctccttatccgtcaattacactctggttgtgctggatgatatcagcccagggaaggagtctctgggaccggattctagctcagggggccaggaggatccggcctcgcagcagtgggcccgccctcggttcacccagcccagtaagatgcggcgacgagtaattgcaagacccgtgggctcctctgtacgcttgaagtgtgttgcttctggccatccacggcccgacataacctggatgaaggatgaccaggcccttaccagacctgaagccgcagagcccagaaaaaagaagtggaccctctccctcaagaacctacggccagaggacagcgggaagtacacgtgtagagtgagtaacagggcgggggccattaatgccacctacaaagtggatgtgatacagcgcactaggagcaagcctgtcctcaccggcacccacccggtgaataccaccgtcgacttcgggggaacgacatctttccagtgtaaagtacgatccgatgtcaagccagtgatacagtggctgaagcgcgtggagtacggcgcggaaggcagacataactccacaatcgacgttgggggacagaaatttgtcgttttgccaaccggagacgtctggtcccgcccagacggaagttacctcaataagcttctaattactagagccagacaagatgatgcaggtatgtatatttgcctgggggctaatacaatgggctactcatttagatccgcttttttgacagtgttgcctgacccaaagccgcctgggcctccagtcgccagttcttcaagcgccaccagcctgccctggcctgtggttattggcattcccgcaggggctgtgtttatcctcggtacactgcttttgtggctctgtcaggctcagaaaaagccttgcacacctgcgcccgccccaccactcccaggccaccggccccccggcactgcaagggatcgctcaggcgacaaggatttaccgtcacttgcagccctgagtgcaggtcccggagtgggtttgtgcgaagagcacggctcaccggcagctccacagcaccccaccgtagtggtagctccagatttgtgcaatttcatgtag

SEQ ID NO: 20648 - DNA, 1515 bp, Artificial Sequence
  derived and/or modified sequence
atgaccccaagtccactgcttctgctgttgctacctcctttgctgcttggagcctttccacccgcagctgccgcaagggggcctcctaagatggccgataaggtggtgccacggcaggtagcaagactcggcaggactgtgcgactgcagtgccccgtggagggtgatccccctccccttactatgtggacaaaagacgggaggacaatccacagtggttggtccagattccgcgtgcttccgcagggccttaaagtgaaacaggttgagagagaagatgccggagtctatgtctgtaaggccacgaacgggttcggatctctgagcgtgaactacactctggttgttttagacgacatttccccaggcaaggagtcacttggcccagacagcagcagtggcggtcaggaagacccagcttcacaacagtgggcacgcccaaggttcacccagccctctaaaatgagaagacgggtgatagctaggccagtgggttcaagtgttcggttaaagtgtgtggcgagcggccatccacgccctgatattacctggatgaaagacgaccaagccctgacccgacccgaagcggctgagcccagaaagaaaaagtggactttgagtttaaagaacctgcgacccgaggattctggaaaatacacatgcagggtgtctaaccgggcaggggcaattaatgctacgtataaagttgacgtgatacagcggacacggtccaaacctgtgctgactggcacacatccagtaaatactacagtggacttcggtggtacgacaagcttccagtgtaaggtccgaagtgacgttaaacccgtcatccaatggctcaagcgcgtggaatatggggctgagggcaggcataatagcactatcgacgtgggcggacagaaattcgtggtcctccccacaggggacgtctggtctagacctgatgggtcctacttgaacaagttattgatcacccgagctagacaagacgatgcaggtatgtacatctgtctgggagctaacacaatgggctacagctttcggagcgctttcctgaccgtgctgcccgatccaaaacctccgggaccacctgtggccagttcttccagtgcgacctcactaccctggcccgtggtcataggtattcctgccggtgccgtgttcatcctcggtactctcctgctttggttgtgccaggcccagaaaaagccatgcactcccgcaccggctcccccactacccggacatcggccacccggaaccgctcgcgatcggtctggcgacaaagacctgccttccctggcggctctgtctgcaggaccaggtgtgggcctgtgcgaggagcacggctctccggctgccccacagcacctgctgggcccaggtccagtcgccggacccaaattgtatcctaagctctataccgacattcacacgcacacacacactcactcccacactcactcacatgtcgagggaaaggtccaccagcacatccactatcagtgctag

SEQ ID NO: 20649 - DNA, 1515 bp, Artificial Sequence
  derived and/or modified sequence
atgacacccagcccactgttgcttctcctgttgcctcctcttttactcggcgcatttccacccgcagctgcagctagaggccctccaaagatggccgacaaggtcgtgccccgtcaggttgccagacttggacggaccgtgagactccagtgtcctgtggaaggtgatccgccaccgctcactatgtggaccaaagatggtaggaccatccattcaggctggagccggttcagggtgctgccccagggactgaaggtcaagcaggtcgagcgggaagacgcaggtgtttatgtctgtaaagcaacaaatgggttcggatccttatccgtgaactatactctggtagtgctcgatgacatctctcccggtaaggaatccctcggtcccgattcaagtagcggcggtcaggaggaccctgcctcacaacaatgggccagacccagattcacacaaccatctaagatgagaaggagagtgatcgcacgccctgtgggcagctcagtacgtctgaaatgcgtcgcctcaggtcatccccgtccggacataacatggatgaaagatgaccaagcgttgaccaggcccgaagccgcagagccccgaaaaaagaaatggacactctccttgaaaaacttgcgccctgaagatagtggaaaatacacctgtcgcgtttccaatcgcgcaggggcaattaatgcaacgtacaaggtggatgtcatccaacggactaggtcaaagcccgtgcttaccgggacgcacccagtgaacaccaccgtcgactttggcggaacaacctcgttccagtgtaaggtgcgctccgatgtgaaacccgtgatccagtggttgaagcgtgtcgagtacggggctgagggcagacacaacagcaccatcgacgtcggtggacagaagttcgtcgtcctccctacaggggacgtgtggagtcggccagatggctcctacctgaacaagctgctgatcaccagggctaggcaagacgatgccggaatgtacatctgtctgggagcaaacactatgggctacagcttcaggtccgcattccttacagttttgccagatcccaaacctccaggccctccggtggcttctagttcttcggctacatcgctcccatggccggtggtcattgggattcccgcaggagcggtcttcatcctgggaaccttactcctgtggctgtgccaggcacagaagaaaccctgcactcctgcgccagctccgccactcccaggccacaggccaccaggcacagcgcgtgatcgctcaggcgataaggaccttccatcgctggctgcactgtccgcaggaccaggcgtggggctgtgcgaagagcatggaagccccgcagctccacagcatctcctgggcccagggccagtagccggacctaagctatatccaaaactgtacaccgatatccacactcatacacacacccactcacatacacactctcacgtcgagggcaaggtacatcagcatattcactaccagtgttag

SEQ ID NO: 20650 - DNA, 1515 bp, Artificial Sequence
  derived and/or modified sequence
atgactccatcccctctgttgctgctgttgcttcctccgctcctgctgggggcttttccacccgctgctgctgccaggggtcctccgaagatggctgacaaggttgttcccagacaggtcgcgagactcggcaggacagtcagactccagtgccccgtagagggggaccccccacctcttacaatgtggactaaggatggtagaaccatccactccggatggtcacgatttagggtgcttcctcaagggctcaaggtgaagcaagtggagagagaagatgcaggggtgtacgtgtgcaaagcaaccaatggcttcggtagcttgagtgtgaactacacattagttgtgttggatgacatctcgcctggcaaagagtcccttggacccgatagctcctctgggggacaggaggatccagcttcccagcagtgggcgagaccgcgatttacccagccaagcaaaatgcggagacgggtaatagctagacccgtcgggtcttccgtccgactcaagtgcgtcgcgtccggacacccacgacccgacatcacttggatgaaagatgaccaagccttaactaggccagaagcagccgagccacgaaaaaagaagtggactctctccctcaagaatttacggccagaggattctggcaagtatacctgcagggtgtccaacagggctggtgcaataaacgctacttacaaggttgatgttattcaacgcaccaggagcaaacccgttctgacaggaacacatcccgtgaatactactgtcgattttgggggtacgaccagcttccaatgtaaggtgagatcagacgtcaagccggtaatccagtggcttaagcgagtggaatacggcgcagaggggagacacaactccaccattgatgtcgggggacagaagttcgttgtactgcccaccggagacgtgtggtcccggcctgacggttcatatttgaataaactgctgatcacacgtgctcggcaggacgatgccggaatgtatatatgccttggcgcaaacacaatgggatactcttttagatcagccttcttgactgttctgcccgaccctaagccacccggacctccagttgcgtctagtagttctgccacttctctcccatggcccgtggtaattgggattcctgcaggggcagtgttcatcctgggtactctgctgctatggctctgtcaagcacagaagaaaccttgcactcccgctccagccccacccctgccaggccacagacctcccggtacggctcgagacaggagcggcgataaagatctgcccagtctggccgcactgtctgctggccctggtgtggggctgtgcgaggagcacggaagtcccgctgccccacagcaccttcttggcccaggaccagttgctgggccaaaactgtaccctaagctgtatacggacatccacacacatacacatacccacagtcatacgcattcgcatgttgaggggaaagtacaccagcacatacactatcagtgttag

SEQ ID NO: 20651 - DNA, 459 bp, Artificial Sequence
  derived and/or modified sequence
atgaccccctctcctctattgctgctgttgctgcccccactcctgctgggggctttcccacccgctgccgcagcaagagggcctccaaaaatggccgacaaggttgtccctcgacaggtcgcccgactggggcgtaccgtgcggctgcaatgtccggtagaaggggacccccctcccctcacaatgtggacaaaagacggacgtaccatccactccggctggtctagatttcgcgtgcttccgcaggggcttaaggtgaagcaggtcgagcgggaggacgcgggtgtctacgtgtgtaaggccacaaatgggttcggaagtctgtcggtaaattacacactggtggttttagacgatatttcacctggaaaggagagtttagggcctgattcctctagcggagggcaggaagacccagcctcacagcagtgggccagaccaaggttcactcagccgtag

SEQ ID NO: 20652 - DNA, 1515 bp, Artificial Sequence
  derived and/or modified sequence
atgaccccaagcccgttgctgctgctgctcctcccacctctgttgctgggggctttcccgccagccgcagcagccagaggcccaccaaagatggccgataaagttgtccctcgccaggtggcacgcttgggtcggaccgtccggcttcagtgtcccgtggaaggtgatcctccgcctctgactatgtggactaaggatggaagaactatccattcagggtggtctaggttccgagttctgccacagggcctgaaggttaagcaggtggagcgcgaggacgccggtgtgtacgtctgtaaagctaccaacggatttggaagcctgagtgtaaactatactctcgtggtgctagacgacattagccccggaaaagaaagcctcggccctgacagctcatccggcggacaggaggatcctgcctctcagcagtgggccaggcctcgattcacacagccaagcaagatgcgaaggagggtaatagccaggcctgtcggctcttcggtgagattaaaatgtgttgccagcggccatcccagacccgatataacatggatgaaggacgaccaggcactcaccaggcctgaagccgctgaaccaagaaaaaagaagtggacactttccctgaagaacctccgtccagaagacagcgggaaatacacgtgcagagtgtctaacagggctggcgcaattaacgctacctacaaagtcgacgtcattcagagaaccagatccaaacctgtcctgaccggcacacaccccgtgaacacgaccgtcgatttcggcggaaccacctccttccagtgtaaggtacgatcagatgtaaagcccgtgatacaatggcttaaacgagttgagtatggagccgagggtcgccataacagtaccatagatgtgggtgggcaaaaattcgtagtgcttcctacaggggatgtttggtccaggcccgacgggtcctacctgaacaagctccttataacacgtgctcgtcaagacgacgctggcatgtatatctgtctgggtgcgaatacaatgggatattccttcaggtcagcatttctgaccgtgctgccagacccaaagccacctggtccacctgtcgccagcagcagctccgccaccagcctcccttggcccgtggtgatagggattccagctggggctgttttcatccttggcaccctgctgttatggttatgtcaggcccaaaagaaaccatgcactccagcacctgcccctcctctccccggacacagacctccaggtactgcacgcgatcgttctggcgacaaggacctgccttctttggcggcattgagtgctgggccaggggtaggcttgtgcgaagaacatggaagccccgctgctcctcagcatttgctgggtcccggaccggtcgcaggtcctaagctgtacccaaagctgtatactgatatccatactcacacacacacacactcccacacacattctcatgtggagggaaaggtccaccagcatatccactatcagtgctag

SEQ ID NO: 20653 - DNA, 243 bp, Artificial Sequence
  derived and/or modified sequence
atgacaccttccccacttttgctattactacttccccctctcctcttaggagcctttcccccagctgccgctgcaagagggccaccaaagatggccgataaagtggtccctcggcaggtagccagacttggacgcacagtacgcctgcagtgtcctgtggagggggacccccctccactcacaatgtggacgaaagacggtaggacaatacactctggctggagccggttcagggtgctttag

SEQ ID NO: 20654 - DNA, 1326 bp, Artificial Sequence
  derived and/or modified sequence
atggctgataaagtcgtgccccgtcaggtggcaaggctcggcagaactgtaaggctgcagtgtccagtggaaggagaccctcccccattgaccatgtggacaaaagatggacgcaccatacattctggatggagccgcttccgtgtgcttccacagggactcaaggtaaagcaggttgaaagagaggacgccggtgtgtatgtgtgcaaggctaccaacggttttgggtctctcagtgtgaattacactctggtggtgctggacgacatctctcccggaaaggagagcttaggccctgattcctcctccggtggccaggaagatccagcctctcagcaatgggccaggccaagattcacccaaccaagtaaaatgcggcgaagggtgattgctaggccagtgggctcctctgttcgcctgaaatgcgtagccagtggacaccctcgaccagacatcacctggatgaaagacgaccaggcactcacacggccagaggccgcagaaccgagaaaaaaaaaatggactctcagcctgaaaaacttgcggccagaagattcggggaaatatacttgtagagtgtccaatcgcgcaggcgctattaatgctacttacaaagtggatgtcatacaaagaacaaggtccaagcccgtgctgaccggaacacacccagtgaataccaccgtggattttgggggaactacaagttttcagtgcaaggtgcgcagtgacgtgaaacccgtaattcagtggctgaagagagtggagtatggggcagagggcagacacaatagtaccatagacgtgggaggccagaaattcgtggtgctgccaacaggcgatgtgtggtctcggcctgacggcagttacttgaataagctgctgatcacacgagcaagacaggatgacgccggtatgtatatctgtctgggtgctaatacgatgggatattcatttagatcagcctttctcactgtattgcccgaccctaaacctccgggacctcctgtggcctcatccagctcagcgaccagtctgccctggcctgtggttattggcattcccgctggcgcagtgtttattctgggtacactactgctgtggttatgtcaggcgcagaagaagccttgcactcccgctcctgctccgccactcccaggccacagacctcctgggacagcccgtgataggtctggggataaggacttgcctagtctggccgctctaagcgcagggccaggagtcggtctctgtgaggagcacggtagccccgcagcccctcagcaccctacagtggtcgttgccccagatctatgcaactttatgtag

SEQ ID NO: 20655 - DNA, 1515 bp, Artificial Sequence
  derived and/or modified sequence
atgacccccagccccctgctgctgctgctgctgccccccctgctgctgggcgccttcccccccgccgccgccgccagaggcccccccaagatggccgacaaggtggtgcccagacaggtggccagactgggcagaaccgtgagactgcagtgccccgtggagggcgaccccccccccctgaccatgtggaccaaggacggcagaaccatccacagcggctggagcagattcagagtgctgccccagggcctgaaggtgaagcaggtggagagagaggacgccggcgtgtacgtgtgcaaggccaccaacggcttcggcagcctgagcgtgaactacaccctggtggtgctggacgacatcagccccggcaaggagagcctgggccccgacagcagcagcggcggccaggaggaccccgccagccagcagtgggccagacccagattcacccagcccagcaagatgagaagaagagtgatcgccagacccgtgggcagcagcgtgagactgaagtgcgtggccagcggccaccccagacccgacatcacctggatgaaggacgaccaggccctgaccagacccgaggccgccgagcccagaaagaagaagtggaccctgagcctgaagaacctgagacccgaggacagcggcaagtacacctgcagagtgagcaacagagccggcgccatcaacgccacctacaaggtggacgtgatccagagaaccagaagcaagcccgtgctgaccggcacccaccccgtgaacaccaccgtggacttcggcggcaccaccagcttccagtgcaaggtgagaagcgacgtgaagcccgtgatccagtggctgaagagagtggagtacggcgccgagggcagacacaacagcaccatcgacgtgggcggccagaagttcgtggtgctgcccaccggcgacgtgtggagcagacccgacggcagctacctgaacaagctgctgatcaccagagccagacaggacgacgccggcatgtacatctgcctgggcgccaacaccatgggctacagcttcagaagcgccttcctgaccgtgctgcccgaccccaagccccccggcccccccgtggccagcagcagcagcgccaccagcctgccctggcccgtggtgatcggcatccccgccggcgccgtgttcatcctgggcaccctgctgctgtggctgtgccaggcccagaagaagccctgcacccccgcccccgccccccccctgcccggccacagaccccccggcaccgccagagacagaagcggcgacaaggacctgcccagcctggccgccctgagcgccggccccggcgtgggcctgtgcgaggagcacggcagccccgccgccccccagcacctgctgggccccggccccgtggccggccccaagctgtaccccaagctgtacaccgacatccacacccacacccacacccacagccacacccacagccacgtggagggcaaggtgcaccagcacatccactaccagtgctag

SEQ ID NO: 20656 - DNA, 459 bp, Artificial Sequence
  derived and/or modified sequence
atgacccccagccccctgctgctgctgctgctgccccccctgctgctgggcgccttcccccccgccgccgccgccagaggcccccccaagatggccgacaaggtggtgcccagacaggtggccagactgggcagaaccgtgagactgcagtgccccgtggagggcgaccccccccccctgaccatgtggaccaaggacggcagaaccatccacagcggctggagcagattcagagtgctgccccagggcctgaaggtgaagcaggtggagagagaggacgccggcgtgtacgtgtgcaaggccaccaacggcttcggcagcctgagcgtgaactacaccctggtggtgctggacgacatcagccccggcaaggagagcctgggccccgacagcagcagcggcggccaggaggaccccgccagccagcagtgggccagacccagattcacccagccctag

SEQ ID NO: 20657 - DNA, 243 bp, Artificial Sequence
  derived and/or modified sequence
atgacccccagccccctgctgctgctgctgctgccccccctgctgctgggcgccttcccccccgccgccgccgccagaggcccccccaagatggccgacaaggtggtgcccagacaggtggccagactgggcagaaccgtgagactgcagtgccccgtggagggcgaccccccccccctgaccatgtggaccaaggacggcagaaccatccacagcggctggagcagattcagagtgctgtag

SEQ ID NO: 20658 - DNA, 1326 bp, Artificial Sequence
  derived and/or modified sequence
atggccgacaaggtggtgcccagacaggtggccagactgggcagaaccgtgagactgcagtgccccgtggagggcgaccccccccccctgaccatgtggaccaaggacggcagaaccatccacagcggctggagcagattcagagtgctgccccagggcctgaaggtgaagcaggtggagagagaggacgccggcgtgtacgtgtgcaaggccaccaacggcttcggcagcctgagcgtgaactacaccctggtggtgctggacgacatcagccccggcaaggagagcctgggccccgacagcagcagcggcggccaggaggaccccgccagccagcagtgggccagacccagattcacccagcccagcaagatgagaagaagagtgatcgccagacccgtgggcagcagcgtgagactgaagtgcgtggccagcggccaccccagacccgacatcacctggatgaaggacgaccaggccctgaccagacccgaggccgccgagcccagaaagaagaagtggaccctgagcctgaagaacctgagacccgaggacagcggcaagtacacctgcagagtgagcaacagagccggcgccatcaacgccacctacaaggtggacgtgatccagagaaccagaagcaagcccgtgctgaccggcacccaccccgtgaacaccaccgtggacttcggcggcaccaccagcttccagtgcaaggtgagaagcgacgtgaagcccgtgatccagtggctgaagagagtggagtacggcgccgagggcagacacaacagcaccatcgacgtgggcggccagaagttcgtggtgctgcccaccggcgacgtgtggagcagacccgacggcagctacctgaacaagctgctgatcaccagagccagacaggacgacgccggcatgtacatctgcctgggcgccaacaccatgggctacagcttcagaagcgccttcctgaccgtgctgcccgaccccaagccccccggcccccccgtggccagcagcagcagcgccaccagcctgccctggcccgtggtgatcggcatccccgccggcgccgtgttcatcctgggcaccctgctgctgtggctgtgccaggcccagaagaagccctgcacccccgcccccgccccccccctgcccggccacagaccccccggcaccgccagagacagaagcggcgacaaggacctgcccagcctggccgccctgagcgccggccccggcgtgggcctgtgcgaggagcacggcagccccgccgccccccagcaccccaccgtggtggtggcccccgacctgtgcaacttcatgtag

SEQ ID NO: 20659 - protein, 58 aa, Artificial Sequence
  derived and/or modified sequence
KTTKQLRLPKVKPGECPKVKIPPDYPCNQYCVWDFDCEGNKKCCPVGCAKECFPPGPL

SEQ ID NO: 20660 - protein, 1246 aa, Artificial Sequence
  derived and/or modified sequence
MVYRTQYLVVEVPESRNVTDCCEGYEQLGLYCVLPLNQSGQFTSRPGACPAEGPEPSTSPCSLDIDCPGLEKCCPWSGGRYCMAPAPQAPERDPVGSWYNVTILVKMDFKELQQVDPRLLNHMRLLHSLVTSALQPMASTVHHLHSAPGNASTTVSRLLLGLPRPLPVADVSTLLGDIAKRVYEVISVQVQDVNECFYEELNACSGRELCANLEGSYWCVCHQEAPATSPRKLNLEWEDCPPVSDYVVLNVTSDSFQVSWRLNSTQNHTFHVRVYRGMELLRSARTQSQALAVAGLEAGVLYRVKTSYQGCGADVSTTLTIKTNAQVFEVTIKIVNHNLTEKLLNRSSVEYQDFSRQLLHEVESSFPPVVSDLYRSGKLRMQIVSLQAGSVVVRLKLTVQDPGFPMGISTLAPILQPLLASTVFQIDRQGTRVQDWDECVDSAEHDCSPAAWCINLEGSYTCQCRTTRDATPSRAGRACEGDLVSPMGGGLSAATGVTVPGLGTGTAALGLENFTLSPSPGYPQGTPAAGQAWTPEPSPRRGGSNVVGYDRNNTGKGVEQELQGNSIMEPPSWPSPTEDPTGHFLWHATRSTRETLLNPTWLRNEDSGPSGSVDLPLTSTLTALKTPACVPVSIGRIMVSNVTSTGFHLAWEADLAMDSTFQLTLTSMWSPAVVLETWNTSVTLSGLEPGVLHLVEIMAKACGKEGARAHLKVRTAARKLIGKVRIKNVRYSESFRNASSQEYRDFLELFFRMVRGSLPATMCQHMDAGGVRMEVVSVTNGSIVVEFHLLIIADVDVQEVSAAFLTAFQTVPLLEVIRGDTFIQDYDECERKEDDCVPGTSCRNTLGSFTCSCEGGAPDFPVEYSERPCEGDSPGNETWATSPERPLTTAGTKAAFVQGTSPTPQGLPQRLNLTGAVRVLCEIEKVVVAIQKRFLQQESIPESSLYLSHPSCNVSHSNGTHVLLEAGWSECGTLMQSNMTNTVVRTTLRNDLSQEGIIHHLKILSPIYCAFQNDLLTSSGFTLEWGVYTIIEDLHGAGNFVTEMQLFIGDSPIPQNYSVSASDDVRIEVGLYRQKSNLKVVLTECWATPSSNARDPITFSFINNSCPVPNTYTNVIENGNSNKAQFKLRIFSFINDSIVYLHCKLRVCMESPGATCKINCNNFRLLQNSETSATHQMSWGPLIRSEGEPPHAEAGLGAGYVVLIVVAIFVLVAGTATLLIVRYQRMNGRYNFKIQSNNFSYQVFYE

SEQ ID NO: 20661 - protein, 1318 aa, Artificial Sequence
  derived and/or modified sequence
MLRTSGLALLALVSAVGPSQASGFTEKGLSLLGYQLCSHRVTHTVQKVEAVQTSYTSYVSCGGWIPWRRCPKMVYRTQYLVVEVPESRNVTDCCEGYEQLGLYCVLPLNQSGQFTSRPGACPAEGPEPSTSPCSLDIDCPGLEKCCPWSGGRYCMAPAPQAPERDPVGSWYNVTILVKMDFKELQQVDPRLLNHMRLLHSLVTSALQPMASTVHHLHSAPGNASTTVSRLLLGLPRPLPVADVSTLLGDIAKRVYEVISVQVQDVNECFYEELNACSGRELCANLEGSYWCVCHQEAPATSPRKLNLEWEDCPPVSDYVVLNVTSDSFQVSWRLNSTQNHTFHVRVYRGMELLRSARTQSQALAVAGLEAGVLYRVKTSYQGCGADVSTTLTIKTNAQVFEVTIKIVNHNLTEKLLNRSSVEYQDFSRQLLHEVESSFPPVVSDLYRSGKLRMQIVSLQAGSVVVRLKLTVQDPGFPMGISTLAPILQPLLASTVFQIDRQGTRVQDWDECVDSAEHDCSPAAWCINLEGSYTCQCRTTRDATPSRAGRACEGDLVSPMGGGLSAATGVTVPGLGTGTAALGLENFTLSPSPGYPQGTPAAGQAWTPEPSPRRGGSNVVGYDRNNTGKGVEQELQGNSIMEPPSWPSPTEDPTGHFLWHATRSTRETLLNPTWLRNEDSGPSGSVDLPLTSTLTALKTPACVPVSIGRIMVSNVTSTGFHLAWEADLAMDSTFQLTLTSMWSPAVVLETWNTSVTLSGLEPGVLHLVEIMAKACGKEGARAHLKVRTAARKLIGKVRIKNVRYSESFRNASSQEYRDFLELFFRMVRGSLPATMCQHMDAGGVRMEVVSVTNGSIVVEFHLLIIADVDVQEVSAAFLTAFQTVPLLEVIRGDTFIQDYDECERKEDDCVPGTSCRNTLGSFTCSCEGGAPDFPVEYSERPCEGDSPGNETWATSPERPLTTAGTKAAFVQGTSPTPQGLPQRLNLTGAVRVLCEIEKVVVAIQKRFLQQESIPESSLYLSHPSCNVSHSNGTHVLLEAGWSECGTLMQSNMTNTVVRTTLRNDLSQEGIIHHLKILSPIYCAFQNDLLTSSGFTLEWGVYTIIEDLHGAGNFVTEMQLFIGDSPIPQNYSVSASDDVRIEVGLYRQKSNLKVVLTECWATPSSNARDPITFSFINNSCPVPNTYTNVIENGNSNKAQFKLRIFSFINDSIVYLHCKLRVCMESPGATCKINCNNFRLLQNSETSATHQMSWGPLIRSEGEPPHAEAGLGAGYVVLIVVAIFVLVAGTATLLIVRYQRMNGRYNFKIQSNNFSYQVFYE

SEQ ID NO: 20662 - DNA, 3741 bp, Artificial Sequence
  derived and/or modified sequence
atggtgtacagaacccagtacctggtggtggaggtgcccgagagcagaaacgtgaccgactgctgcgagggctacgagcagctgggcctgtactgcgtgctgcccctgaaccagagcggccagttcaccagcagacccggcgcctgccccgccgagggccccgagcccagcaccagcccctgcagcctggacatcgactgccccggcctggagaagtgctgcccctggagcggcggcagatactgcatggcccccgccccccaggcccccgagagagaccccgtgggcagctggtacaacgtgaccatcctggtgaagatggacttcaaggagctgcagcaggtggaccccagactgctgaaccacatgagactgctgcacagcctggtgaccagcgccctgcagcccatggccagcaccgtgcaccacctgcacagcgcccccggcaacgccagcaccaccgtgagcagactgctgctgggcctgcccagacccctgcccgtggccgacgtgagcaccctgctgggcgacatcgccaagagagtgtacgaggtgatcagcgtgcaggtgcaggacgtgaacgagtgcttctacgaggagctgaacgcctgcagcggcagagagctgtgcgccaacctggagggcagctactggtgcgtgtgccaccaggaggcccccgccaccagccccagaaagctgaacctggagtgggaggactgcccccccgtgagcgactacgtggtgctgaacgtgaccagcgacagcttccaggtgagctggagactgaacagcacccagaaccacaccttccacgtgagagtgtacagaggcatggagctgctgagaagcgccagaacccagagccaggccctggccgtggccggcctggaggccggcgtgctgtacagagtgaagaccagctaccagggctgcggcgccgacgtgagcaccaccctgaccatcaagaccaacgcccaggtgttcgaggtgaccatcaagatcgtgaaccacaacctgaccgagaagctgctgaacagaagcagcgtggagtaccaggacttcagcagacagctgctgcacgaggtggagagcagcttcccccccgtggtgagcgacctgtacagaagcggcaagctgagaatgcagatcgtgagcctgcaggccggcagcgtggtggtgagactgaagctgaccgtgcaggaccccggcttccccatgggcatcagcaccctggcccccatcctgcagcccctgctggccagcaccgtgttccagatcgacagacagggcaccagagtgcaggactgggacgagtgcgtggacagcgccgagcacgactgcagccccgccgcctggtgcatcaacctggagggcagctacacctgccagtgcagaaccaccagagacgccacccccagcagagccggcagagcctgcgagggcgacctggtgagccccatgggcggcggcctgagcgccgccaccggcgtgaccgtgcccggcctgggcaccggcaccgccgccctgggcctggagaacttcaccctgagccccagccccggctacccccagggcacccccgccgccggccaggcctggacccccgagcccagccccagaagaggcggcagcaacgtggtgggctacgacagaaacaacaccggcaagggcgtggagcaggagctgcagggcaacagcatcatggagccccccagctggcccagccccaccgaggaccccaccggccacttcctgtggcacgccaccagaagcaccagagagaccctgctgaaccccacctggctgagaaacgaggacagcggccccagcggcagcgtggacctgcccctgaccagcaccctgaccgccctgaagacccccgcctgcgtgcccgtgagcatcggcagaatcatggtgagcaacgtgaccagcaccggcttccacctggcctgggaggccgacctggccatggacagcaccttccagctgaccctgaccagcatgtggagccccgccgtggtgctggagacctggaacaccagcgtgaccctgagcggcctggagcccggcgtgctgcacctggtggagatcatggccaaggcctgcggcaaggagggcgccagagcccacctgaaggtgagaaccgccgccagaaagctgatcggcaaggtgagaatcaagaacgtgagatacagcgagagcttcagaaacgccagcagccaggagtacagagacttcctggagctgttcttcagaatggtgagaggcagcctgcccgccaccatgtgccagcacatggacgccggcggcgtgagaatggaggtggtgagcgtgaccaacggcagcatcgtggtggagttccacctgctgatcatcgccgacgtggacgtgcaggaggtgagcgccgccttcctgaccgccttccagaccgtgcccctgctggaggtgatcagaggcgacaccttcatccaggactacgacgagtgcgagagaaaggaggacgactgcgtgcccggcaccagctgcagaaacaccctgggcagcttcacctgcagctgcgagggcggcgcccccgacttccccgtggagtacagcgagagaccctgcgagggcgacagccccggcaacgagacctgggccaccagccccgagagacccctgaccaccgccggcaccaaggccgccttcgtgcagggcaccagccccaccccccagggcctgccccagagactgaacctgaccggcgccgtgagagtgctgtgcgagatcgagaaggtggtggtggccatccagaagagattcctgcagcaggagagcatccccgagagcagcctgtacctgagccaccccagctgcaacgtgagccacagcaacggcacccacgtgctgctggaggccggctggagcgagtgcggcaccctgatgcagagcaacatgaccaacaccgtggtgagaaccaccctgagaaacgacctgagccaggagggcatcatccaccacctgaagatcctgagccccatctactgcgccttccagaacgacctgctgaccagcagcggcttcaccctggagtggggcgtgtacaccatcatcgaggacctgcacggcgccggcaacttcgtgaccgagatgcagctgttcatcggcgacagccccatcccccagaactacagcgtgagcgccagcgacgacgtgagaatcgaggtgggcctgtacagacagaagagcaacctgaaggtggtgctgaccgagtgctgggccacccccagcagcaacgccagagaccccatcaccttcagcttcatcaacaacagctgccccgtgcccaacacctacaccaacgtgatcgagaacggcaacagcaacaaggcccagttcaagctgagaatcttcagcttcatcaacgacagcatcgtgtacctgcactgcaagctgagagtgtgcatggagagccccggcgccacctgcaagatcaactgcaacaacttcagactgctgcagaacagcgagaccagcgccacccaccagatgagctggggccccctgatcagaagcgagggcgagcccccccacgccgaggccggcctgggcgccggctacgtggtgctgatcgtggtggccatcttcgtgctggtggccggcaccgccaccctgctgatcgtgagataccagagaatgaacggcagatacaacttcaagatccagagcaacaacttcagctaccaggtgttctacgagtag

SEQ ID NO: 20663 - DNA, 3957 bp, Artificial Sequence
  derived and/or modified sequence
atgctgagaaccagcggcctggccctgctggccctggtgagcgccgtgggccccagccaggccagcggcttcaccgagaagggcctgagcctgctgggctaccagctgtgcagccacagagtgacccacaccgtgcagaaggtggaggccgtgcagaccagctacaccagctacgtgagctgcggcggctggatcccctggagaagatgccccaagatggtgtacagaacccagtacctggtggtggaggtgcccgagagcagaaacgtgaccgactgctgcgagggctacgagcagctgggcctgtactgcgtgctgcccctgaaccagagcggccagttcaccagcagacccggcgcctgccccgccgagggccccgagcccagcaccagcccctgcagcctggacatcgactgccccggcctggagaagtgctgcccctggagcggcggcagatactgcatggcccccgccccccaggcccccgagagagaccccgtgggcagctggtacaacgtgaccatcctggtgaagatggacttcaaggagctgcagcaggtggaccccagactgctgaaccacatgagactgctgcacagcctggtgaccagcgccctgcagcccatggccagcaccgtgcaccacctgcacagcgcccccggcaacgccagcaccaccgtgagcagactgctgctgggcctgcccagacccctgcccgtggccgacgtgagcaccctgctgggcgacatcgccaagagagtgtacgaggtgatcagcgtgcaggtgcaggacgtgaacgagtgcttctacgaggagctgaacgcctgcagcggcagagagctgtgcgccaacctggagggcagctactggtgcgtgtgccaccaggaggcccccgccaccagccccagaaagctgaacctggagtgggaggactgcccccccgtgagcgactacgtggtgctgaacgtgaccagcgacagcttccaggtgagctggagactgaacagcacccagaaccacaccttccacgtgagagtgtacagaggcatggagctgctgagaagcgccagaacccagagccaggccctggccgtggccggcctggaggccggcgtgctgtacagagtgaagaccagctaccagggctgcggcgccgacgtgagcaccaccctgaccatcaagaccaacgcccaggtgttcgaggtgaccatcaagatcgtgaaccacaacctgaccgagaagctgctgaacagaagcagcgtggagtaccaggacttcagcagacagctgctgcacgaggtggagagcagcttcccccccgtggtgagcgacctgtacagaagcggcaagctgagaatgcagatcgtgagcctgcaggccggcagcgtggtggtgagactgaagctgaccgtgcaggaccccggcttccccatgggcatcagcaccctggcccccatcctgcagcccctgctggccagcaccgtgttccagatcgacagacagggcaccagagtgcaggactgggacgagtgcgtggacagcgccgagcacgactgcagccccgccgcctggtgcatcaacctggagggcagctacacctgccagtgcagaaccaccagagacgccacccccagcagagccggcagagcctgcgagggcgacctggtgagccccatgggcggcggcctgagcgccgccaccggcgtgaccgtgcccggcctgggcaccggcaccgccgccctgggcctggagaacttcaccctgagccccagccccggctacccccagggcacccccgccgccggccaggcctggacccccgagcccagccccagaagaggcggcagcaacgtggtgggctacgacagaaacaacaccggcaagggcgtggagcaggagctgcagggcaacagcatcatggagccccccagctggcccagccccaccgaggaccccaccggccacttcctgtggcacgccaccagaagcaccagagagaccctgctgaaccccacctggctgagaaacgaggacagcggccccagcggcagcgtggacctgcccctgaccagcaccctgaccgccctgaagacccccgcctgcgtgcccgtgagcatcggcagaatcatggtgagcaacgtgaccagcaccggcttccacctggcctgggaggccgacctggccatggacagcaccttccagctgaccctgaccagcatgtggagccccgccgtggtgctggagacctggaacaccagcgtgaccctgagcggcctggagcccggcgtgctgcacctggtggagatcatggccaaggcctgcggcaaggagggcgccagagcccacctgaaggtgagaaccgccgccagaaagctgatcggcaaggtgagaatcaagaacgtgagatacagcgagagcttcagaaacgccagcagccaggagtacagagacttcctggagctgttcttcagaatggtgagaggcagcctgcccgccaccatgtgccagcacatggacgccggcggcgtgagaatggaggtggtgagcgtgaccaacggcagcatcgtggtggagttccacctgctgatcatcgccgacgtggacgtgcaggaggtgagcgccgccttcctgaccgccttccagaccgtgcccctgctggaggtgatcagaggcgacaccttcatccaggactacgacgagtgcgagagaaaggaggacgactgcgtgcccggcaccagctgcagaaacaccctgggcagcttcacctgcagctgcgagggcggcgcccccgacttccccgtggagtacagcgagagaccctgcgagggcgacagccccggcaacgagacctgggccaccagccccgagagacccctgaccaccgccggcaccaaggccgccttcgtgcagggcaccagccccaccccccagggcctgccccagagactgaacctgaccggcgccgtgagagtgctgtgcgagatcgagaaggtggtggtggccatccagaagagattcctgcagcaggagagcatccccgagagcagcctgtacctgagccaccccagctgcaacgtgagccacagcaacggcacccacgtgctgctggaggccggctggagcgagtgcggcaccctgatgcagagcaacatgaccaacaccgtggtgagaaccaccctgagaaacgacctgagccaggagggcatcatccaccacctgaagatcctgagccccatctactgcgccttccagaacgacctgctgaccagcagcggcttcaccctggagtggggcgtgtacaccatcatcgaggacctgcacggcgccggcaacttcgtgaccgagatgcagctgttcatcggcgacagccccatcccccagaactacagcgtgagcgccagcgacgacgtgagaatcgaggtgggcctgtacagacagaagagcaacctgaaggtggtgctgaccgagtgctgggccacccccagcagcaacgccagagaccccatcaccttcagcttcatcaacaacagctgccccgtgcccaacacctacaccaacgtgatcgagaacggcaacagcaacaaggcccagttcaagctgagaatcttcagcttcatcaacgacagcatcgtgtacctgcactgcaagctgagagtgtgcatggagagccccggcgccacctgcaagatcaactgcaacaacttcagactgctgcagaacagcgagaccagcgccacccaccagatgagctggggccccctgatcagaagcgagggcgagcccccccacgccgaggccggcctgggcgccggctacgtggtgctgatcgtggtggccatcttcgtgctggtggccggcaccgccaccctgctgatcgtgagataccagagaatgaacggcagatacaacttcaagatccagagcaacaacttcagctaccaggtgttctacgagtag

SEQ ID NO: 20664 - DNA, 3741 bp, Artificial Sequence
  derived and/or modified sequence
atggtctaccggacgcaatatctggtggtggaggtgcctgagtctaggaatgttactgactgctgtgaaggctatgagcagctcggtctttactgtgtcttgcccctgaaccagtccggccagtttacgagcaggcccggtgcctgtcctgccgagggacctgagccttcaaccagcccctgctccctggacatcgattgccccggattagaaaagtgctgtccctggagtgggggacggtattgcatggcgcctgccccccaggctccagagagggacccagtgggttcttggtacaacgtcacaattttagtgaaaatggatttcaaggagctccagcaggtagaccctaggttgctgaaccatatgcgtctgttgcattctttggtgacctctgcgctgcagccgatggcgagcactgtacaccaccttcactccgctcctggcaacgccagcactaccgtgtcgaggctgcttctaggtctaccacgccctcttcccgttgccgacgtctccacccttttgggcgatattgccaagagggtatacgaagtgatctccgtgcaggtgcaggatgtgaacgaatgcttttacgaagaacttaacgcatgttctggcagggaactttgcgctaacctagagggctcttactggtgtgtctgccaccaggaggcaccagcaacctcgcctaggaaactcaacctggagtgggaagattgccctccagtgtctgattatgtggtcctgaatgtgacatcagatagctttcaggtatcttggaggctcaattcaactcaaaatcatactttccacgtccgcgtttaccggggaatggaactgctgagatctgctagaacccaatcgcaggcactggctgtcgccggactggaggccggcgtgctgtaccgtgttaaaacttcttatcagggttgtggtgccgacgtttcaaccaccctgactattaaaacaaatgcccaggtcttcgaagtgaccatcaagatcgttaaccataacctcactgaaaaactccttaacaggtcctcggtagaataccaagatttctcccggcagctactgcatgaagtagagtctagtttccccccggttgtgagcgacctttatagaagcggaaaactgagaatgcagatcgtgtccttacaagcaggcagtgtggttgtgaggctgaagctgacggtgcaggacccaggctttcctatggggatcagcaccttggctcctatcctccagcccctgctggcgagcaccgtattccagatcgaccgccagggaactcgcgttcaggactgggatgagtgtgttgacagtgcggaacatgattgctcccccgccgcatggtgcattaatttggagggttcttacacgtgtcaatgtcgcactaccagggatgcgacgcctagccgcgctggccgcgcatgtgaaggagatcttgttagcccaatgggcggcggcttgagcgccgccaccggagttactgtgcccgggctggggacaggcacagccgccctgggactggagaacttcaccttgagcccatctcctggctacccccaaggtacacctgctgcgggacaggcttggaccccggagccgagtccgcggcgaggcggaagcaatgtcgtaggctatgatcgcaataatacaggtaaaggggtggagcaagaactgcagggaaatagtattatggaacctcctagttggcctagtccgaccgaagacccgacaggacattttctttggcatgccacgagaagtacaagagaaaccctgcttaacccaacctggttaagaaatgaagactcaggaccaagcggttcggtggacctgcccctcacatccaccctgacggcgctcaagactcccgcgtgcgtgcctgtcagtatcggcaggatcatggtcagtaatgtgacctctactggatttcatttggcttgggaggccgacctagcgatggattctaccttccagctgaccctcaccagcatgtggtctcccgcggtggtcctagagacttggaacacctcggtgactttgtcggggcttgaacccggagtgctccacctagtggagatcatggcaaaagcatgcggtaaggaaggcgccagggctcatttgaaagtcaggactgcagcccggaaactcatcggcaaggtgagaatcaagaacgtcaggtattcagaatcctttcggaatgctagttcgcaggaatatcgagactttcttgaactcttcttcagaatggttaggggctctctgcccgcaactatgtgccagcacatggatgcagggggcgtgagaatggaggtggtcagtgtaacaaatggctcgatagtggtggaattccatctgctgataattgccgacgtggatgtccaggaagtttcagccgcatttcttactgcctttcagaccgtacctctcctcgaagtgattcgtggcgacacattcatccaggactatgatgagtgcgagcgaaaagaagatgattgcgtgcccggaacgagttgtcgaaatacattagggtctttcacgtgctcttgcgagggtggtgcccctgactttccagtggagtattccgagcgtccatgtgagggggatagcccaggcaacgagacatgggccacctcacctgaacgacccttgactactgctgggacaaaagcagctttcgtgcaggggacctctcctacacctcaaggattgcctcagaggttgaatctgactggtgccgtccgagtactttgtgagattgagaaagttgtggttgcaattcagaaacggttcctgcagcaggagtccatcccggaatcctcgctctatctctcccacccatcctgcaacgtctcccactcgaacgggacacatgtccttctggaagcaggttggagtgagtgtgggactctaatgcagtctaacatgaccaacaccgtggtgcggacgacgcttcggaacgatttgagccaagaaggcattattcaccacctgaagatcctttcacccatttattgcgctttccagaatgacttacttacctcctccggattcacattggaatggggagtgtacactatcatcgaggatctgcacggcgctggaaacttcgttacagagatgcagctattcattggggactcgcctattccacagaactactctgtgtcagcttctgatgacgtccgtatcgaagtgggcctgtaccgacagaagagcaacctaaaggtggtactgacggagtgttgggcaacacctagctctaacgcgcgggatccaatcacattcagctttatcaacaattcgtgtcccgttcccaatacatacaccaatgtcatcgagaatggtaattctaacaaggctcagttcaaactgaggattttttcgtttattaacgacagcatagtgtatctgcattgtaagctgagagtttgtatggagtccccaggagcaacctgcaaaataaactgcaataactttcgcctgcttcagaactcggagacgagtgctacgcaccagatgtcttggggacctctcattcggtctgaaggggagccaccccacgccgaggccggactgggcgcagggtacgttgtcttaatcgtcgtggctatctttgtgctagtggctggcaccgccactctccttatcgtccgctatcagaggatgaatggtagatacaacttcaagattcaatctaataattttagttaccaagtcttttacgagtag

SEQ ID NO: 20665 - DNA, 3957 bp, Artificial Sequence
  derived and/or modified sequence
atgctccgcacctctggcttagcgctcctcgccctcgtcagcgccgtaggcccctcacaagcatctggcttcactgagaagggcctctcactgttggggtaccaactctgttcgcaccgtgtcactcacacagtgcaaaaagtggaggcagtgcagaccagctatacaagctatgtttcctgtggggggtggattccatggaggagatgccctaagatggtgtatcgcactcagtatctcgtggtggaggtacctgagagcaggaacgtgacggactgctgtgaagggtacgaacagctcggattgtattgtgtgttacccttaaatcagagcggacaattcaccagtagaccaggcgcctgtccagccgaaggacctgagcctagtacctccccctgctccctggacatcgactgccctggcctggaaaagtgttgcccgtggagcggcggtcgatattgcatggcccctgcaccacaagctcccgagagagatccagtgggttcatggtacaacgttacgatcctggtgaaaatggacttcaaggagctgcaacaggttgacccaagacttctgaatcacatgagactgctgcacagccttgtgaccagtgcacttcagcccatggcatctaccgtccaccacctccactccgcccctggaaacgcgagcaccaccgtcagcaggctgcttcttggactgcctagaccccttcctgtggccgatgtttcgaccctactgggagacatcgcaaagagggtctacgaagttatctccgttcaggttcaggacgtgaacgaatgtttttacgaggaacttaatgcatgttccggccgagagctgtgcgccaatctcgaggggtcatattggtgcgtctgtcatcaagaggccccagcgacctcacctagaaagttgaatctcgaatgggaggattgcccacccgttagcgattacgtcgtcttgaatgtgacaagtgactcctttcaagtgtcgtggcgcctcaacagcactcagaatcacacattccatgtacgagtttaccgcggaatggaactgctgcgtagtgccagaacccaaagtcaggccctggcagtggccggtctcgaggccggagtcctttatagggtgaaaacatcttatcagggctgcggcgccgatgtatcaaccacacttaccattaagacgaacgcacaggtgttcgaggtgacaattaagattgtgaaccacaacctcacagaaaagctcctgaacaggtccagtgtagaatatcaagactttagccgccaactgttacacgaggtggaatcatcatttccgcccgtagtatccgacttatataggagcggtaaactgagaatgcagattgtgtccttacaggctggttccgttgtagtcagactcaaactaacagtacaggacccagggtttccaatgggcattagcactttggcccctattcttcaaccgctcctggcttccacagttttccaaatcgaccgccaaggtaccagagtgcaagactgggacgagtgcgtggatagtgcagaacacgactgtagccccgctgcatggtgcattaacctggagggttcatatacctgccagtgcaggactactcgggatgccactccatccagagcaggacgagcatgtgagggagatctcgtgtcccccatgggaggcggcttgtcagcagctaccggtgttaccgtgccaggattggggactggaaccgcagcgttgggtctcgagaattttactctaagcccttcacccggatatccccagggtaccccagctgcaggacaagcatggacccccgagccctcacctagacgggggggaagcaatgtcgtgggatacgatagaaacaataccggcaagggcgtggagcaggaactgcaggggaattctataatggagcctccctcctggccatccccgactgaagatccaacaggccattttctctggcacgccactcgctccactcgggagacgttgctgaacccaacctggctccggaacgaagattctgggccttccggctcagtggatctgccactaaccagcactctaaccgctcttaaaactcccgcttgcgtgcctgtgtctatcggtcgaatcatggtgagtaatgtgacaagcacaggattccacttagcttgggaggctgacctggccatggacagcacttttcaacttacactcacttccatgtggagccccgctgttgtgcttgaaacctggaatacatccgtcactctcagtggcctggagccaggtgtgctgcatctggttgagatcatggccaaggcctgtgggaaagagggggcgcgggcccatttgaaagttcgcaccgcagcaagaaagctgattggtaaagtcagaattaagaacgtgcggtatagtgaatcatttagaaacgccagctctcaagagtatagagacttcttagagcttttttttaggatggttcgaggaagcctcccagccaccatgtgtcagcatatggacgcaggcggcgtgcggatggaagtggtgagcgtcaccaatggatccattgttgttgagtttcatttgttgatcatcgcagacgttgatgtccaggaagtgtccgcagctttcctgactgcctttcagacagtgcctctcttagaggtgatccgaggcgacacgttcatccaagactacgatgaatgcgaaagaaaagaagacgactgtgtccccggaacgagctgtcgcaatacgttgggaagtttcacttgtagttgcgagggaggcgcccccgacttccccgtggagtactcagaaagaccttgtgaaggggattcgccaggtaacgagacctgggctacctcccctgagaggcccctcaccaccgccggaacaaaggctgcctttgtgcagggaacttctcctacacctcagggattgccacagaggctgaacctgacaggagccgtgcgtgtgctgtgcgagatcgaaaaggtggttgtggctattcaaaagcggttcttgcaacaagaaagcatacccgagtctagcctgtatttatcacatccctcctgcaatgtatcccactccaacgggactcatgtcctgctggaagccggttggtctgagtgtggcacccttatgcagtcaaacatgacaaacactgtggtgaggactacactgcgaaatgacctgtcacaggaaggtattatccatcacctgaagatcctgtcaccaatttactgtgcttttcaaaatgaccttcttacaagcagcgggtttaccctcgagtggggtgtatacactattattgaagaccttcatggagcaggcaactttgtgaccgaaatgcagctctttatcggggattcccccatcccacagaactacagtgtgtccgcatccgacgacgtaagaattgaagtcggtctgtatagacagaaaagcaaccttaaggtcgtgttgacagagtgttgggccacaccaagcagtaatgcccgagatccaatcacattctcattcattaacaatagctgcccggttcctaatacatacacaaacgtgatcgagaatggaaactcgaacaaggctcagttcaagttgaggatctttagcttcatcaacgacagtattgtctatctgcactgcaagctgcgagtgtgcatggaatcccctggagctacatgcaaaataaattgtaacaatttccgcctgctgcaaaactcagagacttctgccactcaccaaatgtcctggggaccattaatccggtctgagggtgagcctccccacgcagaagccggcctcggagctggttacgtggtcctgatagtcgttgccattttcgtgctggtggctgggactgcaacactcttgatcgtgagatatcaaaggatgaacggcaggtataattttaaaatccagagcaacaacttttcttatcaggtcttctatgaatag

SEQ ID NO: 20666 - DNA, 3741 bp, Artificial Sequence
  derived and/or modified sequence
atggtgtaccgcacccagtacctggtggtggaggtgcctgagagcagaaatgtgacagactgctgtgagggctatgagcagctgggcctgtactgtgtgctgcccctgaaccagagcggccagttcaccagcaggcctggggcctgcccagctgagggccctgagcccagcaccagcccctgcagcctggacatcgactgccccggcctggagaagtgctgcccctggagcggcggccgctactgcatggccccagccccccaggcccctgagcgggaccctgtgggctcctggtacaacgtgaccatcctggtgaagatggacttcaaggagctgcagcaggtggacccccggctgctgaaccacatgaggctgctgcacagcctggtgaccagcgccctgcagcccatggccagcacagtgcaccacctgcacagcgcccctggaaatgccagcaccaccgtgtcccggctgctgctgggcctgccccggcccctgcctgtggctgatgtgtccaccctgctgggggacatcgccaagagggtgtatgaagtcatctctgtgcaggtgcaggatgtgaatgaatgcttctatgaggagctgaatgcctgcagcggccgggagctgtgtgccaacctggagggcagctactggtgtgtgtgccaccaggaggccccagccaccagccccaggaagctgaacctggagtgggaggactgcccccctgtgtctgactatgtggtgctgaatgtgaccagtgacagcttccaggtgtcctggaggctgaacagcacccagaaccacaccttccacgtgcgggtgtaccggggcatggagctgctgcggagcgcccggacccagagccaggccctggccgtggccggcctggaggccggcgtgctgtacagagtgaagaccagctaccagggctgtggggctgatgtgtccaccaccctgaccatcaagaccaatgcccaggtgtttgaggtgaccatcaagatcgtgaaccacaacctgacagagaagctgctgaacagaagctctgtggagtaccaggacttcagccggcagctgctgcacgaggtggagagcagcttcccccctgtggtgtctgacctgtaccgcagcggcaagctgaggatgcagatcgtgtccctgcaggccggctctgtggtggtgcggctgaagctgactgtgcaggaccccggcttccccatgggcatcagcaccctggcccccatcctgcagcccctgctggccagcaccgtcttccagattgaccggcagggcaccagggtgcaggactgggatgaatgtgtggacagcgctgagcatgactgcagccctgctgcctggtgcatcaacctggagggcagctacacctgccagtgcaggaccaccagagatgccacccccagcagagctggccgggcctgtgagggggacctggtgagccccatgggcggcggcctgtctgctgccactggagtgacagtgcccggcctgggcaccggcacagctgccctgggcctggagaacttcaccctgagccccagccctggctacccccagggcaccccagctgctggccaggcctggaccccagagcccagcccccggcggggcggcagcaatgtggtgggctatgacaggaacaacacaggcaagggcgtggagcaggagctgcagggcaacagcatcatggagccccccagctggcccagccccacagaggaccccaccggccacttcctgtggcacgccaccaggagcacccgggagaccctgctgaaccccacctggctgagaaatgaagattctggccccagcggctctgtggacctgcccctgaccagcaccctgacagccctgaagaccccagcctgtgtgcctgtgtccatcggccgcatcatggtgtccaatgtgaccagcacaggcttccacctggcctgggaggccgacctggccatggacagcaccttccagctgaccctgacctccatgtggagccctgctgtggtgctggagacctggaacacctctgtgaccctgagcggcctggagcccggggtgctgcacctggtggagatcatggccaaggcctgtgggaaggagggcgcccgggcccacctgaaggtgaggacagctgccaggaagctgattggcaaggtgcgcatcaagaatgtgcgctacagcgagagcttcagaaatgccagcagccaggagtacagagacttcctggagctgttcttcaggatggtgcggggcagcctgcctgccaccatgtgccagcacatggatgctgggggcgtgaggatggaggtggtgtctgtgaccaacggcagcatcgtggtggagttccacctgctgatcatcgcagatgtggatgtgcaggaggtgtctgctgccttcctgacagccttccagacagtgcccctgctggaggtgatccggggggacaccttcatccaggactatgatgaatgtgagaggaaagaagatgactgtgtgcccggcaccagctgcaggaacaccctgggcagcttcacctgcagctgtgagggcggggccccagacttccctgtggagtacagcgagcggccctgtgagggggacagccctggaaatgagacctgggccaccagccctgagcggcccctgaccacagctggcaccaaggccgcctttgtgcagggcaccagccccaccccccagggcctgccccagaggctgaacctgaccggggctgtgcgggtgctgtgtgaaattgagaaggtggtggtggccatccagaagcgcttcctgcagcaggagagcatccctgagagcagcctgtacctgagccaccccagctgcaatgtgagccacagcaatggcacccacgtgctgctggaggccggctggagcgaatgtggcaccctgatgcagagcaacatgaccaacacagtggtgaggaccaccctgagaaatgacctgagccaggagggcatcatccaccacctgaagatcctgagccccatctactgtgccttccagaatgacctgctgaccagcagcggcttcaccctggagtggggcgtgtacaccatcatcgaggacctgcatggagctggcaactttgtgacagagatgcagctgttcatcggggacagccccatcccccagaactacagcgtgtctgccagtgatgatgtgagaattgaggtgggcctgtaccggcagaagagcaacctgaaggtggtgctgacagagtgctgggccacccccagcagcaatgcccgggaccccatcaccttctccttcatcaacaacagctgccctgtgcccaacacctacaccaacgtgattgaaaatggaaacagcaacaaggcccagttcaagctgcgcatcttctccttcatcaatgacagcatcgtgtacctgcactgcaagctgcgggtgtgcatggagagccctggggccacctgcaagatcaactgcaacaacttccggctgctgcagaacagcgagaccagcgccacccaccagatgtcctggggccccctcatccgctctgagggggagccccctcatgctgaggccggcctgggcgccggctacgtggtgctgattgtggtggccatctttgtgctggtggccggcacagccaccctgctgattgtgcgctaccagaggatgaatggccgctacaacttcaagatccagagcaacaacttctcctaccaggtgttctatgaatag

SEQ ID NO: 20667 - DNA, 3957 bp, Artificial Sequence
  derived and/or modified sequence
atgctgcggaccagcggcctggccctgctggccctggtgtctgctgtgggccccagccaggccagcggcttcacagagaagggcctgagcctgctgggctaccagctgtgcagccaccgggtgacccacacagtgcagaaggtggaggccgtgcagaccagctacaccagctatgtgtcctgtggcggctggatcccctggaggcgctgccccaagatggtgtaccgcacccagtacctggtggtggaggtgcctgagagcagaaatgtgacagactgctgtgagggctatgagcagctgggcctgtactgtgtgctgcccctgaaccagagcggccagttcaccagcaggcctggggcctgcccagctgagggccctgagcccagcaccagcccctgcagcctggacatcgactgccccggcctggagaagtgctgcccctggagcggcggccgctactgcatggccccagccccccaggcccctgagcgggaccctgtgggctcctggtacaacgtgaccatcctggtgaagatggacttcaaggagctgcagcaggtggacccccggctgctgaaccacatgaggctgctgcacagcctggtgaccagcgccctgcagcccatggccagcacagtgcaccacctgcacagcgcccctggaaatgccagcaccaccgtgtcccggctgctgctgggcctgccccggcccctgcctgtggctgatgtgtccaccctgctgggggacatcgccaagagggtgtatgaagtcatctctgtgcaggtgcaggatgtgaatgaatgcttctatgaggagctgaatgcctgcagcggccgggagctgtgtgccaacctggagggcagctactggtgtgtgtgccaccaggaggccccagccaccagccccaggaagctgaacctggagtgggaggactgcccccctgtgtctgactatgtggtgctgaatgtgaccagtgacagcttccaggtgtcctggaggctgaacagcacccagaaccacaccttccacgtgcgggtgtaccggggcatggagctgctgcggagcgcccggacccagagccaggccctggccgtggccggcctggaggccggcgtgctgtacagagtgaagaccagctaccagggctgtggggctgatgtgtccaccaccctgaccatcaagaccaatgcccaggtgtttgaggtgaccatcaagatcgtgaaccacaacctgacagagaagctgctgaacagaagctctgtggagtaccaggacttcagccggcagctgctgcacgaggtggagagcagcttcccccctgtggtgtctgacctgtaccgcagcggcaagctgaggatgcagatcgtgtccctgcaggccggctctgtggtggtgcggctgaagctgactgtgcaggaccccggcttccccatgggcatcagcaccctggcccccatcctgcagcccctgctggccagcaccgtcttccagattgaccggcagggcaccagggtgcaggactgggatgaatgtgtggacagcgctgagcatgactgcagccctgctgcctggtgcatcaacctggagggcagctacacctgccagtgcaggaccaccagagatgccacccccagcagagctggccgggcctgtgagggggacctggtgagccccatgggcggcggcctgtctgctgccactggagtgacagtgcccggcctgggcaccggcacagctgccctgggcctggagaacttcaccctgagccccagccctggctacccccagggcaccccagctgctggccaggcctggaccccagagcccagcccccggcggggcggcagcaatgtggtgggctatgacaggaacaacacaggcaagggcgtggagcaggagctgcagggcaacagcatcatggagccccccagctggcccagccccacagaggaccccaccggccacttcctgtggcacgccaccaggagcacccgggagaccctgctgaaccccacctggctgagaaatgaagattctggccccagcggctctgtggacctgcccctgaccagcaccctgacagccctgaagaccccagcctgtgtgcctgtgtccatcggccgcatcatggtgtccaatgtgaccagcacaggcttccacctggcctgggaggccgacctggccatggacagcaccttccagctgaccctgacctccatgtggagccctgctgtggtgctggagacctggaacacctctgtgaccctgagcggcctggagcccggggtgctgcacctggtggagatcatggccaaggcctgtgggaaggagggcgcccgggcccacctgaaggtgaggacagctgccaggaagctgattggcaaggtgcgcatcaagaatgtgcgctacagcgagagcttcagaaatgccagcagccaggagtacagagacttcctggagctgttcttcaggatggtgcggggcagcctgcctgccaccatgtgccagcacatggatgctgggggcgtgaggatggaggtggtgtctgtgaccaacggcagcatcgtggtggagttccacctgctgatcatcgcagatgtggatgtgcaggaggtgtctgctgccttcctgacagccttccagacagtgcccctgctggaggtgatccggggggacaccttcatccaggactatgatgaatgtgagaggaaagaagatgactgtgtgcccggcaccagctgcaggaacaccctgggcagcttcacctgcagctgtgagggcggggccccagacttccctgtggagtacagcgagcggccctgtgagggggacagccctggaaatgagacctgggccaccagccctgagcggcccctgaccacagctggcaccaaggccgcctttgtgcagggcaccagccccaccccccagggcctgccccagaggctgaacctgaccggggctgtgcgggtgctgtgtgaaattgagaaggtggtggtggccatccagaagcgcttcctgcagcaggagagcatccctgagagcagcctgtacctgagccaccccagctgcaatgtgagccacagcaatggcacccacgtgctgctggaggccggctggagcgaatgtggcaccctgatgcagagcaacatgaccaacacagtggtgaggaccaccctgagaaatgacctgagccaggagggcatcatccaccacctgaagatcctgagccccatctactgtgccttccagaatgacctgctgaccagcagcggcttcaccctggagtggggcgtgtacaccatcatcgaggacctgcatggagctggcaactttgtgacagagatgcagctgttcatcggggacagccccatcccccagaactacagcgtgtctgccagtgatgatgtgagaattgaggtgggcctgtaccggcagaagagcaacctgaaggtggtgctgacagagtgctgggccacccccagcagcaatgcccgggaccccatcaccttctccttcatcaacaacagctgccctgtgcccaacacctacaccaacgtgattgaaaatggaaacagcaacaaggcccagttcaagctgcgcatcttctccttcatcaatgacagcatcgtgtacctgcactgcaagctgcgggtgtgcatggagagccctggggccacctgcaagatcaactgcaacaacttccggctgctgcagaacagcgagaccagcgccacccaccagatgtcctggggccccctcatccgctctgagggggagccccctcatgctgaggccggcctgggcgccggctacgtggtgctgattgtggtggccatctttgtgctggtggccggcacagccaccctgctgattgtgcgctaccagaggatgaatggccgctacaacttcaagatccagagcaacaacttctcctaccaggtgttctatgaatag

SEQ ID NO: 20668 - DNA, 3741 bp, Artificial Sequence
  derived and/or modified sequence
atggtgtaccggacccagtacctggtggtggaggtgcccgagagcaggaacgtgaccgactgctgtgaaggatatgagcagctggggctgtattgcgtattacctttgaaccagagcggccagtttacctctaggcccggcgcttgccctgccgaaggcccagagccgtctacctctccttgttcactggacatcgattgtccgggactcgagaagtgctgtccttggtctggaggacgatactgtatggcccctgccccacaggctcccgaacgggaccctgtggggtcatggtacaatgtcacaatcctggttaaaatggactttaaagaactccagcaggttgaccctagactactcaaccacatgagattactgcacagcctggtgacgtcagccctccagccgatggccagcacagttcatcatctgcattccgcaccaggcaatgcctccaccactgtctctaggctgctgctgggtctgccccggcctctgccagtagctgacgtgtcgactctgttaggagacatcgctaagcgcgtgtacgaggttatttccgtccaggtgcaagacgtaaacgagtgcttctacgaggagcttaatgcttgcagtggtagggagctgtgcgcaaatttggaaggatcatattggtgtgtgtgccaccaagaagcgcctgctaccagccctaggaagctaaacctcgagtgggaagactgtccccctgtttccgactatgtcgtgctcaacgtcacaagtgactcatttcaggtgtcttggaggttgaacagtacacagaatcacactttccatgtgagagtgtaccgggggatggagcttctccggagtgcccggacacagtcacaggccctggctgtcgcagggctagaagccggtgtgttgtatagggtgaagactagctaccagggctgcggcgctgacgtcagtaccacattaactatcaagaccaatgcccaggtattcgaagtgacaattaaaatcgtcaaccacaacttgactgaaaaattactcaacagatcctctgttgagtaccaggatttctcccgacaacttcttcacgaggttgagagttcctttccaccagtcgtgtccgacctatatcgctcaggcaagcttcgaatgcagattgtcagtctccaagccggctctgtcgttgtgcggctcaagttaacagtacaggaccccggttttcccatgggtattagcactctcgctccgatcctccaacctctgcttgcttcaaccgtgttccaaatagataggcagggcacacgcgtgcaggattgggacgagtgtgtggatagtgctgaacacgattgtagtccggcggcgtggtgcattaacctggaaggtagctacacatgccagtgtagaaccacacgcgacgctacaccatcacgggccggtagggcatgtgaaggtgatcttgtttcaccgatgggaggaggcctgagcgcagcgaccggggttacagtgcccggcctgggcactggcacagcggcactcggtcttgagaatttcaccctttccccatcgccagggtacccgcagggaacacccgctgctggtcaggcctggacacctgagccatcacctcggcgtggaggaagtaacgtggtcggatatgaccgaaacaacactgggaaaggggttgagcaagaacttcagggcaactccattatggagcccccgagctggcccagccctaccgaggaccctacaggccacttcttatggcacgcaacccggtcaaccagagagactttgctgaaccctacttggttgcggaacgaggatagtggaccaagtggtagcgtggacctcccattgacaagcacactcaccgcgctcaagacccccgcgtgcgtgccagttagtattggccggattatggtgagtaatgtgacttcgaccggcttccacctggcctgggaggccgatctcgccatggacagtacattccagctaacactgacgtcaatgtggtcccccgctgtagttttagagacgtggaacacatcggtgacactgtcagggcttgagccaggagttctgcacctcgttgagatcatggccaaggcttgtgggaaagagggcgctagagcgcaccttaaggtgcgcacagctgcaagaaagctcattggaaaagttcgaataaaaaacgtccgttattctgaaagctttagaaacgcctcaagccaagagtatcgcgacttcctggagctcttttttcgtatggtacgcggaagtctacctgccacaatgtgccaacacatggatgcaggcggagtgagaatggaggtggtctccgtgacaaacggctcaatcgttgttgagtttcacctgcttattatcgcggatgtggacgtccaggaggtgtccgcagccttcctgaccgccttccaaacggtccctttactggaagtaatccgcggggacacattcatccaggactatgacgaatgtgagcgcaaggaagacgattgcgtgcccggcacatcctgtaggaatactttgggcagctttacgtgcagttgcgaaggaggcgctccagatttcccagttgaatacagcgaacgtccatgtgaaggagactcccccgggaatgagacttgggccacatctcctgaaaggccactcacgacagcaggcaccaaggctgcctttgttcaaggaacatctccaaccccccaggggctcccacagagactaaatcttaccggagccgtgagagtgctatgcgagatagagaaagttgttgtggctatacagaagcggtttctgcagcaggagtctattcctgaatcctcactttatttgtctcatcccagctgtaatgtgtcccactcgaatgggacacacgtacttttggaggcggggtggtcagaatgcggcaccttgatgcagagcaacatgacgaataccgtcgtgaggacaactctgagaaatgacctgtcgcaagaaggtatcattcaccatctgaagatcctgtcgccgatctactgcgctttccagaatgatcttctgacaagctccggcttcaccctagaatggggtgtctacacgataatcgaagacttgcacggcgccggaaattttgtgacggagatgcagctgttcatcggagactccccaatcccacaaaactacagcgttagcgcttccgacgacgtccgcattgaggtgggtttgtatagacagaagtcgaatctcaaagttgtcctaaccgaatgctgggcaactccctcaagcaacgctagggaccctattactttctcttttatcaacaattcttgtcccgtgcctaatacatacactaacgtgatcgagaatggcaacagtaacaaggcacagttcaagctccgcatatttagcttcattaatgattctatcgtgtacttgcattgtaagctacgtgtttgcatggaaagcccaggggcaacatgcaagattaactgtaacaacttccgcttgcttcagaatagcgagaccagcgctacacatcaaatgtcctggggacctctcatccgcagtgagggtgaaccaccacacgcagaggccggtttaggtgctggatacgttgtgctcatcgtggtagctattttcgtgctggtagcaggcaccgctaccctgttgattgtccgctatcagcgaatgaacggtagatacaattttaaaatccagtctaataatttcagttatcaggtattctatgaatag

SEQ ID NO: 20669 - DNA, 3957 bp, Artificial Sequence
  derived and/or modified sequence
atgctgcggaccagcggcctggccctgctggccctggtgagcgccgtgggcccttcacaggccagcggctttacagaaaagggtttaagcctcctcggttaccagctgtgttcacatcgagtaacacacacggttcagaaggttgaggccgtgcaaaccagctacacttcttatgtaagttgcgggggctggatcccctggcgtagatgtcctaagatggtttaccggactcagtacctggttgtcgaggtccctgagtcgcgcaacgtcacggactgctgcgaagggtatgagcagctcggactgtattgcgtactgcctctgaatcagtctggccagttcacgtctaggcctggcgcttgtcctgccgaggggcccgaaccttccactagtccctgtagcttggacatagactgcccaggcctggagaaatgctgtccctggtcaggaggccgatattgcatggccccagccccacaggctccggaacgcgaccctgtaggcagttggtacaatgttacgattctggtgaaaatggatttcaaagaactgcaacaagttgacccgagattgttaaaccatatgcgactccttcatagcctcgtgacaagcgcccttcaaccgatggcttccacagttcatcacctgcactctgcccccggcaacgcatcaactacagtgtcccgacttttgcttggtcttccccggcctcttcctgtggccgatgtttccacactgctcggagatatagcaaagcgcgtctatgaggtgattagtgttcaagtgcaggacgtgaatgagtgcttctatgaagagttaaatgcttgcagtggacgtgagctctgcgcaaacttagagggctcatattggtgtgtttgtcatcaggaagccccagccacttcccctcgcaaactaaaccttgaatgggaggactgccccccagtctccgactatgtggttcttaatgtgacttcagactcctttcaggtgagctggagacttaactcaactcagaaccatacctttcacgtgcgagtgtatcgggggatggaactgctgagaagcgccagaacccagtcccaggccttagcagtggctggtctcgaggccggcgtgctgtatagagtgaagactagctatcaggggtgcggtgcagatgtgtccactacactcacgatcaagactaatgctcaagtctttgaagtcacaatcaaaatcgtcaatcacaatctgacagagaagttgctgaacaggagttccgtggaataccaggatttcagccgccagttgctccacgaagttgaatcttcttttccccccgtggtttcggacttgtaccgctccggtaaactgcgaatgcagatagtttctctccaagcaggctccgtggtcgtgcgcctgaaattaactgtgcaggacccaggctttccgatggggatcagcaccctggctccgattctgcagcccttgctggcatccactgtgttccagatcgatcgccagggcacccgagtgcaggactgggacgagtgcgtggattcggccgagcacgactgttctccagccgcatggtgtattaacctggaggggtcgtacacctgccaatgccgtacaaccagggacgccacaccaagtcgcgcaggacgcgcctgcgaaggggacctcgtctctcccatgggcgggggactgtccgcagcaacaggcgtgacagttcctggactgggaactggaacggccgccctgggattagaaaattttacactctctccctccccaggatacccgcagggaactcccgccgccggtcaggcttggactccagaaccatcaccacgtagaggaggctccaatgtggtcggctacgatcggaataataccggaaaaggagtagaacaggagctgcagggcaacagcatcatggaacccccatcctggcccagccctaccgaggatcccacaggccattttctgtggcatgctacgcgatccacacgtgagaccctcctgaaccctacctggctccgaaatgaggactccggaccatctgggtccgtcgacctgcccctgacatcaaccctaaccgcactgaagacacctgcctgcgtgcctgtgtcaattgggcgaatcatggtgagtaacgtcacctcgacggggttccatctcgcatgggaggcagaccttgccatggattccacgttccagctcaccctgacttccatgtggagcccggcagtggttttggagacctggaatacttctgtgacattgtccggtctggagcccggggttcttcatctggtcgaaatcatggctaaggcctgtggcaaggaaggagctcgggcccacctcaaagtcagaactgctgcccggaagctcattggaaaagtgaggattaagaacgtgaggtacagtgagtcatttcgaaacgctagctcacaggaatatcgcgatttcctggaactgtttttccgtatggttagagggagtcttcccgcaaccatgtgccagcatatggacgcaggcggggtgcgcatggaggtggtgtccgtgactaatgggtccatagtcgtggagttccatctcctgataattgctgacgtggatgttcaagaggtgtctgccgcatttttgacagcctttcaaactgtccccctgcttgaggttatccgcggcgacactttcatccaggactatgacgagtgcgagcggaaggaggacgattgcgttcccgggacgagctgtcgcaatactttggggtcgttcacctgcagctgtgagggaggagcccccgattttccagtcgagtactcagagcgcccatgtgaaggagactctcctggtaatgagacatgggcaacttcccccgaaaggcctctcaccactgcgggcaccaaggctgccttcgtccagggcacaagccctacacctcaagggctaccccagcgtttgaatttgacaggcgcagtccgagtactctgtgaaattgaaaaggtcgtcgtcgctatccagaaaaggttcttgcagcaggaaagcatacccgaatcatctctgtatctgtcacaccccagctgcaacgtgtcgcactcgaacgggactcacgtgcttctggaagccggttggtctgaatgtgggacgcttatgcagtccaacatgaccaatacggtagtgcggacgacacttagaaacgacctctcccaggagggtataattcatcatctgaagattctgagtcctatctattgcgcattccagaatgatctgcttacttcctccggattcactctggaatggggcgtctacacgatcatcgaagacttacatggagcaggaaacttcgtgacagaaatgcagctgtttataggggacagccccatccctcagaattacagcgtcagcgcctcagatgacgtgcgaatcgaggtaggattgtacagacagaaatccaacctcaaggtagtgctgacagaatgttgggccaccccgagtagcaatgcgagagacccaatcacattctcctttatcaacaatagctgccccgttcccaacacttacaccaatgtgatcgagaatggaaatagcaacaaggcccagtttaagctgcgcattttttccttcattaatgattccattgtgtatttacactgcaaactgcgggtgtgcatggagagcccgggggccacctgcaagataaattgtaacaattttcggctcctccaaaactcagaaacgagcgcaacacaccagatgtcctggggcccacttatcaggtccgaaggtgaacctccacatgccgaggccggattaggcgcaggctacgtggtcctgattgtggtcgccatctttgtgctggtcgccggcactgccactctgctgatcgtacgatatcagaggatgaacgggcggtacaatttcaaaatccagagcaacaactttagttatcaagtgttttacgaatag

SEQ ID NO: 20670 - DNA, 3741 bp, Artificial Sequence
  derived and/or modified sequence
atggtatatcgaacccagtatcttgtcgtggaagtcccagaatcacgcaatgttaccgattgttgcgagggctacgaacagctaggcctgtattgtgtgctaccactgaatcagagcggccagtttacaagccgccctggggcatgtcccgctgaggggccagaacctagtacttctccctgtagcctggatattgactgtccaggattggagaaatgttgcccatggtctggtggtcgatactgcatggcacccgcaccgcaggccccagaaagggacccggtaggtagttggtacaacgttactatcctggtaaagatggattttaaggagcttcagcaggtcgacccacgactgctgaaccatatgagactcctgcactccctcgtgacgtctgctctccagcccatggcttctaccgttcaccacctgcacagcgcacccggtaacgctagcactacagttagtcgactgcttctcggcctcccacgccctctgccggtggccgacgtatcaactctcctgggagacatagcaaagagggtctatgaagtcatcagcgtgcaggttcaggatgttaacgagtgtttctacgaagagctgaatgcctgctctgggagggaactttgcgccaaccttgagggctcatactggtgtgtctgtcaccaggaggcccctgcaacatctcccaggaagctgaatttggaatgggaggactgcccgcctgtgagtgactacgtagtgcttaacgtgacatctgacagtttccaggtcagttggcgcttaaactccactcagaatcacacctttcatgtcagggtatatagaggaatggagctactgagatccgctaggacccagtcccaagcattggctgtggcaggcctagaagcaggcgtgctgtaccgcgtgaaaacgagctaccagggttgcggagccgatgtgtccactacactgaccattaagacaaacgctcaggtctttgaggtgactattaagatcgttaaccataaccttaccgaaaagctgctcaatcggagctctgtcgagtatcaggacttttcacggcaattgctgcacgaggtagaaagctctttccctcctgtagtatctgacttgtaccggtccggtaagctgcgcatgcagatcgtgtccctgcaggctggctctgttgtggttcggctgaaacttacagtccaggatcctgggtttccgatgggtatcagcacccttgctccgattctacagccacttttggcctcaaccgtgttccaaatcgatcgtcaggggacgcgcgttcaagattgggatgagtgcgtggactcagccgaacatgactgttctcctgcagcctggtgtattaacctggaaggaagttacacttgtcagtgtcgtacaaccagagacgctacacccagtcgtgcagggagggcctgcgaaggtgatctggtctctccgatgggcggagggctctctgctgcaacaggcgtgaccgtgcccggtctcggcaccggaacggccgcactgggcttggagaatttcaccctctctccttcccctggatacccccaaggcacacctgccgcaggtcaggcctggaccccagagcccagtcctagacgcggtgggtccaatgtcgtgggatatgaccgtaataacactgggaaaggagtggagcaggaattacaggggaactctatcatggagcccccttcttggcctagccctacagaagatccaacgggccatttcctgtggcacgcaacacggagcaccagagagacactcttgaaccctacctggctgcggaatgaggacagcggaccgtctggcagcgtggaccttccacttacaagcactctgactgccttaaagacaccggcatgtgtccctgtttccattggcaggattatggtcagcaatgtgacatctaccggtttccaccttgcatgggaagcagatctagccatggattccacattccaactgactttgactagtatgtggagccccgctgtggttctggaaacttggaacacaagcgtgaccctgagcggcctggaacccggagtgttacaccttgtcgagatcatggccaaggcctgcggcaaagagggggctagagctcatctcaaagtgcgtacagccgctcggaaactgattggaaaagttagaatcaagaatgtgcggtattctgagagcttccgtaacgcctctagccaggagtatcgagactttctggagctcttcttcaggatggtaaggggttctctgcccgctacaatgtgccagcacatggatgctgggggagttcgtatggaggtggtgtccgtaactaatggatctattgtggtcgagtttcatttgctgatcatcgcagatgtggatgttcaggaggtgagtgcagcgttcctcacagcctttcagaccgtgccacttttagaggtaatcaggggagacacctttatccaggactatgacgagtgcgagaggaaggaggacgattgtgtaccaggtacgtcttgcaggaataccttggggtcctttacatgcagctgcgaaggcggagcccctgactttcctgtcgagtactcagaacggccatgtgagggtgattctccaggtaacgaaacctgggctactagcccagaaagaccacttacaaccgccggaactaaggcagcatttgtccagggcacatctcccaccccccagggactgccccagagactgaacctgactggggctgtccgagtgctatgtgaaattgaaaaggtggttgtcgctattcagaaaagattcctccagcaagagtccatccctgagagctctctgtacctttctcaccctagttgtaacgtatcccatagtaatggcacacatgtgttgttagaagccggatggtccgagtgtgggacactgatgcagtctaatatgaccaatacagtggtgcggacgactctgcggaacgatctcagccaggaaggcatcatacaccacctgaaaatattgtctccaatctactgtgcttttcagaacgacctcttaacatctagcggatttaccctggagtggggcgtatatacaatcatcgaagaccttcacggcgcaggtaacttcgtaaccgagatgcagttattcatcggtgattcccctatcccacagaattattccgtcagtgcctccgacgacgtccgcattgaggttggcctgtaccggcagaagagtaatcttaaggtagtgctcacagagtgctgggccacaccttcctccaatgcacgggaccccataaccttttcatttatcaacaactcctgcccggttcctaacacatacacaaacgtgattgaaaatggcaattccaacaaggcacagtttaaactcagaatcttcagtttcatcaacgacagcattgtctacctgcactgtaagctgcgggtatgtatggagtcacctggcgcaacctgtaaaataaattgtaataatttcagattgttgcaaaattctgagacatccgcaacccatcaaatgagttggggcccactgatccggtctgagggggaaccccctcatgctgaggcaggcctcggcgctgggtacgtggtgctgattgtcgtagccatattcgttctggtcgcagggacggctaccctgttgatcgttagataccagaggatgaacggtcgctacaacttcaaaatccaatccaataacttctcttaccaggtattctatgaatag

SEQ ID NO: 20671 - DNA, 3957 bp, Artificial Sequence
  derived and/or modified sequence
atgcttcggacctcaggactcgccctgcttgccctcgtatctgccgtgggacctagccaggcaagcggattcactgagaaaggcctttccctgctggggtatcagctgtgctcccatagagtcacccacaccgtgcagaaagtagaagcagtgcagacgtcctacacatcttatgtgtcttgtggagggtggatcccgtggagacgatgtcccaagatggtatatagaactcaatatttggtggttgaggtccccgaatcccggaatgtcaccgattgctgcgaaggttacgagcagctaggcctctattgtgtgctccctctgaaccagtctggccaattcacctccaggcctggcgcttgtcctgctgagggccctgaacctagcacatcaccatgctccctagacatagattgtccaggactggagaagtgttgcccttggtccggtggacgctactgtatggccccagcgcctcaagccccagagagagaccctgtcggaagctggtataacgttaccattttagtaaagatggactttaaggagttacagcaggtggaccctaggcttttgaatcacatgaggctgctgcatagcttggtgacctccgctttgcagccaatggcctccacagtgcaccatctccatagcgccccaggcaacgcaagcacaacggtttctagactcctgttgggactacctagaccattgccagtagcggacgttagcactttactgggcgacattgcaaagagggtttatgaagtcatttccgttcaggtccaggacgtcaatgaatgcttttacgaggagttgaacgcttgttctggtagggagctgtgcgccaatctggagggaagttattggtgcgtttgtcaccaggaggctcccgctacaagtcctcgcaaactcaaccttgagtgggaagactgtccaccagtcagcgactacgtcgtgttaaacgtgacatccgatagttttcaggtcagctggcgcttgaacagtacccagaatcatacattccacgtgagggtatatagaggcatggagctcctcagaagtgctaggactcaaagccaggctctggccgtagcgggtttggaagcgggagtgctttaccgcgtgaagacttcttatcagggctgcggagcagacgttagcaccacactgacaattaagaccaatgcccaggtgttcgaggtaactataaagatcgttaatcacaatctaacagagaagcttctgaatcgcagtagcgtagaataccaagacttttcccgtcaactcctgcatgaggtggagtcatcctttccaccagtcgtttccgatctctataggagtgggaaactccggatgcagatcgtgagcctgcaagccggttcagttgttgtccgcctaaaactcacggtgcaggaccccggttttccaatgggcatatctacacttgcaccaatcctgcagccactactggccagtactgtgtttcagatagaccggcaaggaaccagagtccaggattgggacgagtgcgttgattccgccgagcacgattgtagtcctgccgcatggtgcatcaatctagagggtagttatacatgccagtgccgcactacccgagacgccacaccctcacgcgctggcagagcttgcgagggcgacctggtgagccctatgggagggggattaagcgccgcaactggcgtcaccgtgccgggactaggcacaggaaccgcagccttggggctggaaaacttcacgctgagcccatctcccggatatccccaggggacccctgcagcgggtcaagcctggactccggaaccctccccacggcgaggcggatctaacgtggtgggttacgataggaacaacaccggaaaaggcgttgaacaagagctgcagggcaattcgataatggagcccccttcatggccgagccccaccgaagacccgactggtcactttctgtggcatgccacaaggtctacgagagaaaccctgctgaaccccacatggctcagaaacgaggactctggtccttcaggctcagtcgatttgccactgactagcactttgaccgcactgaagactcctgcgtgtgtgcccgtgtccataggccgaataatggtctcaaatgtgacctcaaccggctttcatctggcctgggaggctgacctagctatggattcaacttttcagctcactttaacttcaatgtggtcacccgctgttgtcctagagacgtggaacacttcagtcaccttgtccggacttgagccaggcgttttgcaccttgtggaaatcatggccaaagcttgtggcaaggaaggggcaagagcgcatctaaaagtaagaaccgcggctaggaagctcattggtaaagtgcgcatcaagaacgtgcggtactcagagtctttccggaatgcttcctctcaagaatatagagacttcctcgagttgttctttcggatggtgcgtggctctctacccgcaactatgtgccaacacatggatgctggcggtgtgaggatggaagtagtttcggttaccaatggttctatcgtggtggagtttcatctgctgattattgccgatgtggatgtccaggaggtgtctgctgctttcctcaccgcatttcagacggtccctctgctggaagttatacggggagacaccttcattcaagactacgacgagtgcgaacggaaagaggatgactgcgtgcccggaaccagttgcagaaatacattgggctcattcacctgttcctgcgaggggggagccccagattttcctgtggaatattccgagcgcccttgtgaaggggatagcccgggtaatgaaacttgggctacctcccctgagcgaccactcaccactgccggaactaaggccgctttcgtgcaggggacatcccccaccccccagggtcttccccagcggttgaacttgactggtgccgtgcgtgtgctgtgcgagatcgaaaaggtggtggtggctatccagaagaggtttctgcagcaggagtcgataccagagtcatccttgtacctcagccatccgtcatgcaatgtgtcacacagcaatggaacacatgttcttctggaagcagggtggagtgaatgcgggacccttatgcagagcaatatgactaacactgtggtgcgtactactcttcggaacgatctgagccaggagggcataatacatcatctgaaaattctgagtccaatctattgcgcgtttcagaatgacttacttacatctagtggcttcaccctggaatggggcgtgtacacaatcattgaggatctccacggcgcagggaattttgttacagagatgcaactattcataggtgattcacccatacctcagaattatagcgtttcagcttcagacgatgtgcgcatcgaggtaggattatatagacagaaatccaacctgaaggtggtgctaaccgagtgctgggcaacaccctcttcgaacgccagggatccaattaccttcagctttataaacaacagctgtcccgtcccaaacacctacacgaacgttatagagaacggcaactccaacaaggcacagtttaagctcaggatctttagcttcataaatgattcgattgtctatctgcactgcaaactgcgagtgtgcatggagagcccaggtgcgacgtgtaaaattaactgtaacaacttccgcttgctacagaacagcgagacctctgctactcaccaaatgagttggggacccctgattcgctcagaaggtgagccccctcatgcagaagccggactcggagccggatacgtcgtgcttatagttgttgctattttcgtcctggttgctggtacagctacattgctgattgtccggtatcagcggatgaatggtcggtataatttcaagattcagagcaacaacttttcttaccaggtattttacgagtag

SEQ ID NO: 20672 - DNA, 1221 bp, Artificial Sequence
  derived and/or modified sequence
atgctcaggacctcggggctggcactgctggctctggtcagtgctgtgggcccaagccaggccagcggcttcacagaaaaaggcctctccctgttgggctaccagctatgcagccaccgtgtgacccacactgtacagaaggtggaggccgtgcagacgtcctacacgtcctatgtgtcctgcggcggctggatcccctggaggcggtgccctaagatggtttaccggacacagtacctggtagtggaggtccccgagtccaggaacgtgactgactgctgtgagggctatgaacagctcggcctctactgtgtcttgcccctgaatcagtccgggcagttcacgtcaagacctggggcctgccccgcagaggggcctgaaccatccacctccccctgcagcttggacatcgactgtcctggacttgagaagtgctgcccctggtcaggggggcgctactgcatggcccctgcaccccaagctccagagagggaccctgtgggctcctggtacaacgtcaccatactggtgaaaatggacttcaaggaactccagcaagtggaccccaggctcctgaaccacatgcgccttctgcattccttggtcaccagcgccctgcaaccaatggcctccaccgtccaccacctgcactcagcccctgggaacgcctccaccacagtgtcgcggctgctactgggcctgccacggccactgcctgtggctgacgtctccaccctgctgggtgacattgcgaagcgtgtctatgaagtgatcagcgtccaggtgcaagatgtcaatgagtgtttctatgaggagctcaatgcctgctctggaagggaactgtgcgcaaacctggagggctcgtactggtgcgtctgtcaccaggaagctccagccacgtctccacggaagctgaacctggagtgggaagattgtcctccagtcagtgactacgtggtcctcaacgtcaccagtgacagttttcaagtatcctggcgtttaaattctacacagaaccacactttccatgtccgggtttaccggggtatggagttgctcaggagcgccaggacacagagccaggcactggcagtggctgggctggaggctggagtgctgtacagggtgaagaccagctaccaggggtgcggggccgacgtctccaccacgctgaccatcaaaaccaagtacgttcttgagaagttggactttcagagctaa

SEQ ID NO: 20673 - DNA, 1017 bp, Artificial Sequence
  derived and/or modified sequence
atgctcaggacctcggggctggcactgctggctctggtcagtgctgtgggcccaagccaggccagcggcttcacagaaaaaggcctctccctgttgggctaccagctatgcagccaccgtgtgacccacactgtacagaaggtggaggccgtgcagacgtcctacacgtcctatgtgtcctgcggcggctggatcccctggaggcggtgccctaagatggtttaccggacacagtacctggtagtggaggtccccgagtccaggaacgtgactgactgctgtgagggctatgaacagctcggcctctactgtgtcttgcccctgaatcagtccgggcagttcacgtcaagacctggggcctgccccgcagaggggcctgaaccatccacctccccctgcagcttggacatcgactgtcctggacttgagaagtgctgcccctggtcaggggggcgctactgcatggcccctgcaccccaagctccagagagggaccctgtgggctcctggtacaacgtcaccatactggtgaaaatggacttcaaggaactccagcaagtggaccccaggctcctgaaccacatgcgccttctgcattccttggtcaccagcgccctgcaaccaatggcctccaccgtccaccacctgcactcagcccctgggaacgcctccaccacagtgtcgcggctgctactgggcctgccacggccactgcctgtggctgacgtctccaccctgctgggtgacattgcgaagcgtgtctatgaagtgatcagcgtccaggtgcaagatgtcaatgagtgtttctatgaggagctcaatgcctgctctggaagggaactgtgcgcaaacctggagggctcgtactggtgcgtctgtcaccaggaagctccagccacgtctccacggaagctgaacctggagtgggaagcacgtggccttgagatccacttagaacttcgcgccacgtccacatcccacggcaccccactaagctctgcagagaactgtctatag

SEQ ID NO: 20674 - DNA, 5058 bp, Artificial Sequence
  derived and/or modified sequence
cgctggtttcctctggaggctgcgagggagaaaccgtcccctgcctctcccaggctctggggtgagcccttcctggcatcccgggctcattgtagatggatcactccaatctccatggcttctcagggcttccctccatgcacctcaaatctctctctccttccttttgtaaggatgccagtcattggatttaggttcaccttaaatccaggatgatctcatctaaattacatctgcaaaaagaccctttttccaaaaaaaggcctctccctgttgggctaccagctatgcagccaccgtgtgacccacactgtacagaaggtggaggccgtgcagacgtcctacacgtcctatgtgtcctgcggcggctggatcccctggaggcggtgccctaagatggtttaccggacacagtacctggtagtggaggtccccgagtccaggaacgtgactgactgctgtgagggctatgaacagctcggcctctactgtgtcttgcccctgaatcagtccgggcagttcacgtcaagacctggggcctgccccgcagaggggcctgaaccatccacctccccctgcagcttggacatcgactgtcctggacttgagaagtgctgcccctggtcaggggggcgctactgcatggcccctgcaccccaagctccagagagggaccctgtgggctcctggtacaacgtcaccatactggtgaaaatggacttcaaggaactccagcaagtggaccccaggctcctgaaccacatgcgccttctgcattccttggtcaccagcgccctgcaaccaatggcctccaccgtccaccacctgcactcagcccctgggaacgcctccaccacagtgtcgcggctgctactgggcctgccacggccactgcctgtggctgacgtctccaccctgctgggtgacattgcgaagcgtgtctatgaagtgatcagcgtccaggtgcaagatgtcaatgagtgtttctatgaggagctcaatgcctgctctggaagggaactgtgcgcaaacctggagggctcgtactggtgcgtctgtcaccaggaagctccagccacgtctccacggaagctgaacctggagtgggaagattgtcctccagtcagtgactacgtggtcctcaacgtcaccagtgacagttttcaagtatcctggcgtttaaattctacacagaaccacactttccatgtccgggtttaccggggtatggagttgctcaggagcgccaggacacagagccaggcactggcagtggctgggctggaggctggagtgctgtacagggtgaagaccagctaccaggggtgcggggccgacgtctccaccacgctgaccatcaaaaccaatgcccaggtatttgaagtcacaataaagattgtaaaccacaacctgacggagaagttactcaaccgcagcagtgtggagtaccaggacttttctagacaactgcttcacgaggtcgagagctccttcccaccagtggtgtctgacttgtaccgaagtgggaagctgagaatgcagatcgtgtctctccaggcgggaagtgtggtcgtgaggctcaagctcaccgtgcaggaccccgggtttcccatgggcatctccacgctggcccccatactccagcccctgttggcaagcacagtgttccagattgaccggcaggggacacgcgtgcaagactgggacgagtgtgtggacagcgcggaacacgactgctcaccggctgcctggtgcatcaacctggagggctcctacacctgccagtgccgtaccaccagggacgccaccccctcccgcgcaggccgggcctgtgagggtgacctggtgagccccatgggcggtggactgtctgcggcaacaggggtaacggtcccaggtcttggcacgggaacagcagccctcggcctagagaacttcaccttgtcacccagtcctgggtaccctcagggcaccccggcagcaggccaggcctggaccccagagccctcacccagaagagggggcagcaatgtggtcgggtatgacaggaacaacacaggaaaaggcgtggagcaggagctacagggaaactccatcatggagccaccctcctggccttcccctactgaggaccccaccggccacttcctgtggcatgccacccgttccacccgggaaacacttctgaatcccacgtggctgcgaaatgaggacagtggaccctccggttctgtagacctgccattgacctccaccctcacagctctgaagacccccgcctgtgttcctgtctccattgggaggatcatggtctccaatgtgaccagcaccggcttccacctggcatgggaggcggatcttgctatggactccaccttccagctcactctgacttccatgtggagccctgctgtggtcctagagacctggaacacgagtgtgacactgtcggggctggagcctggggtcttgcacctggttgagatcatggccaaagcatgtgggaaagaaggtgccagagctcatctgaaagtgaggacagcagcccggaagctcattggaaaggtcagaatcaaaaatgtcaggtactcagaatcctttcgcaacgcaagcagccaggagtatcgagatttcctagaactattcttcaggatggtgcggggctccctgccagccaccatgtgtcagcacatggacgctggtggggtcaggatggaagtcgtcagcgtcaccaacggcagcatcgtggtggagtttcacttgctgataatcgcagatgtggatgtccaggaggtgtcagctgcatttctcaccgccttccagaccgtgcctctgctggaggtgatcagaggcgacaccttcatacaggattacgatgagtgtgaaaggaaggaggacgactgtgtgccggggacatcctgtcgaaacaccctcgggtctttcacttgtagctgcgagggaggagcccccgacttccctgtggaatattctgagagaccctgtgaaggtgactctcctggcaatgaaacctgggccaccagcccagagaggcctctcaccacagcagggaccaaggctgcctttgtgcaaggcaccagccccaccccccaaggcctgccccagcggctgaacctgaccggagcagtcagggtgctctgtgagatcgagaaggtggttgtcgccatccagaagcgcttcctgcagcaggaatccatccccgagtcctcgttgtacctcagccacccctcctgcaacgtgagccacagcaatggcacacacgtgctcctggaggccggctggagcgagtgtgggaccctcatgcagagcaacatgacgaacaccgtggtgaggaccacgctgaggaacgacctgtcccaggagggcatcatccaccacctgaagatcctgagccccatctactgcgccttccagaatgacctgctgacatcctccggcttcaccctggagtggggggtttacaccatcatcgaggacctccacggcgctgggaattttgttaccgaaatgcagttgtttatcggagactctcccatacctcagaattatagcgtgtctgccagtgacgatgtcaggatcgaagtggggctctacaggcagaaaagcaacctcaaggtggtcctgacggagtgctgggcaaccccgtctagcaacgcccgggaccccatcaccttcagcttcattaacaacagctgccctgtgcccaacacatacaccaacgtgattgagaacggcaactccaataaggcccagttcaagctgaggatcttttcctttatcaacgactccatcgtctacctgcactgcaaactccgcgtctgcatggaatcccccggagccacgtgcaaaatcaattgcaataactttcggttgctgcaaaatagtgaaacctctgccacacaccagatgtcctggggacccctcatccggtctgaaggtgagcctcctcatgcagaagcaggcctgggtgccggttatgtggtccttattgtggtggccatcttcgtgctggtggcgggaacagccacccttctgatcgtgcgctaccagagaatgaatgggagatacaactttaaaatccagtccaacaacttcagctaccaggtgttctacgaataggaggcgcaggctgacaggaaggtcgccgtgagtcaagctgcctccagaacctcagagcttccctggtgggctcccccgggatccccagtgtctctctgcacctccacccatccctcggttcttaactcttcaagccttaacggaggtctgctctgacgggtgggctctgccagagcccgggtgagcccagaaaggaagacagcagccaccgtctgtcccgaagaggcaggccgtcctgtaggtcctagaggagccacagcccaggggcagatgaaggggctgcggaagacgggggcagtcctgggggtgctgcggctacaccaccacccgcgcggcccccgcagcctagacctcccaggcctgtgaccctccacaccagccctcagaaccctcctgggcttgccctcccttggcgtccgtcaccctttggcaaatatagaatatttcacattctcagagagacccgaccgcgctcttgatgctctttcgaaaataggtcagtcttagaaatacactgctaatgttatttttagtggatgtttatgctgtttgacttttctcctgtgtaccaaggtattgcttttatttacacgacagcgactcaaaaggcactcgattaatgtgacaaccttttcaataagcagaaataacgtaggtacacatcactctttacatttttctaagcattttcacagccgtttcttcatataatccgaccacagtgggaggtgtgatttacccattacacaatgagaaaccagaggagccgatgagttacttaattgaggtcacagaatgaattagcaagaaaatggttctaaaatctaagtattttagtctagaattttctccattacatcatcctaagagataatgctctgtacttcatttgaaataaactggaattgtattagatagctc

SEQ ID NO: 20675 - DNA, 4878 bp, Artificial Sequence
  derived and/or modified sequence
atgctcaggacctcggggctggcactgctggctctggtcagtgctgtgggcccaagccaggccagcggcttcacagaaaaaggcctctccctgttgggctaccagctatgcagccaccgtgtgacccacactgtacagaaggtggaggccgtgcagacgtcctacacgtcctatgtgtcctgcggcggctggatcccctggaggcggtgccctaagatggtttaccggacacagtacctggtagtggaggtccccgagtccaggaacgtgactgactgctgtgagggctatgaacagctcggcctctactgtgtcttgcccctgaatcagtccgggcagttcacgtcaagacctggggcctgccccgcagaggggcctgaaccatccacctccccctgcagcttggacatcgactgtcctggacttgagaagtgctgcccctggtcaggggggcgctactgcatggcccctgcaccccaagctccagagagggaccctgtgggctcctggtacaacgtcaccatactggtgaaaatggacttcaaggaactccagcaagtggaccccaggctcctgaaccacatgcgccttctgcattccttggtcaccagcgccctgcaaccaatggcctccaccgtccaccacctgcactcagcccctgggaacgcctccaccacagtgtcgcggctgctactgggcctgccacggccactgcctgtggctgacgtctccaccctgctgggtgacattgcgaagcgtgtctatgaagtgatcagcgtccaggtgcaagatgtcaatgagtgtttctatgaggagctcaatgcctgctctggaagggaactgtgcgcaaacctggagggctcgtactggtgcgtctgtcaccaggaagctccagccacgtctccacggaagctgaacctggagtgggaagattgtcctccagtcagtgactacgtggtcctcaacgtcaccagtgacagttttcaagtatcctggcgtttaaattctacacagaaccacactttccatgtccgggtttaccggggtatggagttgctcaggagcgccaggacacagagccaggcactggcagtggctgggctggaggctggagtgctgtacagggtgaagaccagctaccaggggtgcggggccgacgtctccaccacgctgaccatcaaaaccaatgcccaggtatttgaagtcacaataaagattgtaaaccacaacctgacggagaagttactcaaccgcagcagtgtggagtaccaggacttttctagacaactgcttcacgaggtcgagagctccttcccaccagtggtgtctgacttgtaccgaagtgggaagctgagaatgcagatcgtgtctctccaggcgggaagtgtggtcgtgaggctcaagctcaccgtgcaggaccccgggtttcccatgggcatctccacgctggcccccatactccagcccctgttggcaagcacagtgttccagattgaccggcaggggacacgcgtgcaagactgggacgagtgtgtggacagcgcggaacacgactgctcaccggctgcctggtgcatcaacctggagggctcctacacctgccagtgccgtaccaccagggacgccaccccctcccgcgcaggccgggcctgtgagggtgacctggtgagccccatgggcggtggactgtctgcggcaacaggggtaacggtcccaggtcttggcacgggaacagcagccctcggcctagagaacttcaccttgtcacccagtcctgggtaccctcagggcaccccggcagcaggccaggcctggaccccagagccctcacccagaagagggggcagcaatgtggtcgggtatgacaggaacaacacaggaaaaggcgtggagcaggagctacagggaaactccatcatggagccaccctcctggccttcccctactgaggaccccaccggccacttcctgtggcatgccacccgttccacccgggaaacacttctgaatcccacgtggctgcgaaatgaggacagtggaccctccggttctgtagacctgccattgacctccaccctcacagctctgaagacccccgcctgtgttcctgtctccattgggaggatcatggtctccaatgtgaccagcaccggcttccacctggcatgggaggcggatcttgctatggactccaccttccagctcactctgacttccatgtggagccctgctgtggtcctagagacctggaacacgagtgtgacactgtcggggctggagcctggggtcttgcacctggttgagatcatggccaaagcatgtgggaaagaaggtgccagagctcatctgaaagtgaggacagcagcccggaagctcattggaaaggtcagaatcaaaaatgtcaggtactcagaatcctttcgcaacgcaagcagccaggagtatcgagatttcctagaactattcttcaggatggtgcggggctccctgccagccaccatgtgtcagcacatggacgctggtggggtcaggatggaagtcgtcagcgtcaccaacggcagcatcgtggtggagtttcacttgctgataatcgcagatgtggatgtccaggaggtgtcagctgcatttctcaccgccttccagaccgtgcctctgctggaggtgatcagaggcgacaccttcatacaggattacgatgagtgtgaaaggaaggaggacgactgtgtgccggggacatcctgtcgaaacaccctcgggtctttcacttgtagctgcgagggaggagcccccgacttccctgtggaatattctgagagaccctgtgaaggtgactctcctggcaatgaaacctgggccaccagcccagagaggcctctcaccacagcagggaccaaggctgcctttgtgcaaggcaccagccccaccccccaaggcctgccccagcggctgaacctgaccggagcagtcagggtgctctgtgagatcgagaaggtggttgtcgccatccagaagcgcttcctgcagcaggaatccatccccgagtcctcgttgtacctcagccacccctcctgcaacgtgagccacagcaatggcacacacgtgctcctggaggccggctggagcgagtgtgggaccctcatgcagagcaacatgacgaacaccgtggtgaggaccacgctgaggaacgacctgtcccaggagggcatcatccaccacctgaagatcctgagccccatctactgcgccttccagaatgacctgctgacatcctccggcttcaccctggagtggggggtttacaccatcatcgaggacctccacggcgctgggaattttgttaccgaaatgcagttgtttatcggagactctcccatacctcagaattatagcgtgtctgccagtgacgatgtcaggatcgaagtggggctctacaggcagaaaagcaacctcaaggtggtcctgacggagtgctgggcaaccccgtctagcaacgcccgggaccccatcaccttcagcttcattaacaacagctgccctgtgcccaacacatacaccaacgtgattgagaacggcaactccaataaggcccagttcaagctgaggatcttttcctttatcaacgactccatcgtctacctgcactgcaaactccgcgtctgcatggaatcccccggagccacgtgcaaaatcaattgcaataactttcggttgctgcaaaatagtgaaacctctgccacacaccagatgtcctggggacccctcatccggtctgaaggtgagcctcctcatgcagaagcaggcctgggtgccggttatgtggtccttattgtggtggccatcttcgtgctggtggcgggaacagccacccttctgatcgtgcgctaccagagaatgaatgggagatacaactttaaaatccagtccaacaacttcagctaccaggtgttctacgaataggaggcgcaggctgacaggaaggtcgccgtgagtcaagctgcctccagaacctcagagcttccctggtgggctcccccgggatccccagtgtctctctgcacctccacccatccctcggttcttaactcttcaagccttaacggaggtctgctctgacgggtgggctctgccagagcccgggtgagcccagaaaggaagacagcagccaccgtctgtcccgaagaggcaggccgtcctgtaggtcctagaggagccacagcccaggggcagatgaaggggctgcggaagacgggggcagtcctgggggtgctgcggctacaccaccacccgcgcggcccccgcagcctagacctcccaggcctgtgaccctccacaccagccctcagaaccctcctgggcttgccctcccttggcgtccgtcaccctttggcaaatatagaatatttcacattctcagagagacccgaccgcgctcttgatgctctttcgaaaataggtcagtcttagaaatacactgctaatgttatttttagtggatgtttatgctgtttgacttttctcctgtgtaccaaggtattgcttttatttacacgacagcgactcaaaaggcactcgattaatgtgacaaccttttcaataagcagaaataacgtaggtacacatcactctttacatttttctaagcattttcacagccgtttcttcatataatccgaccacagtgggaggtgtgatttacccattacacaatgagaaaccagaggagccgatgagttacttaattgaggtcacagaatgaattagcaagaaaatggttctaaaatctaagtattttagtctagaattttctccattacatcatcctaagagataatgctctgtacttcatttgaaataaactggaattgtattagatagctc

SEQ ID NO: 20676 - protein, 194 aa, Artificial Sequence
  derived and/or modified sequence
MHDSNNVEKDITPSELPANPGCLHSKEHSIKATLIWRLFFLIMFLTIIVCGMVAALSAIRANCHQEPSVCLQAACPESWIGFQRKCFYFSDDTKNWTSSQRFCDSQDADLAQVESFQELNFLLRYKGPSDHWIGLSREQGQPWKWINGTEWTRQLVMKEDGANLYVAKVSQVPRMNPRPVMVSYPGSRRVCLFE

SEQ ID NO: 20677 - DNA, 585 bp, Artificial Sequence
  derived and/or modified sequence
atgcacgactctaacaatgtcgaaaaagacataaccccctctgaattacccgctaatccaggctgccttcacagcaaagaacacagcattaaggcaactctgatctggcggctgttctttttgatcatgtttttgactatcatcgtttgcgggatggtcgctgccctgagcgccatccgggctaattgccaccaggagccatctgtgtgtctccaagctgcctgtcccgaatcttggattggctttcagagaaaatgcttttacttttctgatgatactaagaattggaccagttcacagcgcttctgcgattcacaggacgctgatctggcccaagtcgaaagcttccaggagttaaactttctcctccgatacaaaggaccctctgaccattggattggcctgtctcgcgaacagggtcaaccctggaagtggatcaacggtaccgagtggacgagacaacttgttatgaaagaagatggcgctaatctctacgttgccaaagttagtcaagttccgcggatgaatcctcgacccgtcatggtgtcctaccctggctcgcgcagagtgtgtttgtttgagtag

SEQ ID NO: 20678 - DNA, 585 bp, Artificial Sequence
  derived and/or modified sequence
atgcatgacagcaacaacgtggagaaggacatcacccccagcgagctgcctgccaaccctggctgcctgcacagcaaggagcacagcatcaaggccaccctcatctggaggctcttcttcctgatcatgttcctgaccatcatcgtgtgtggcatggtggccgccctgagcgccatccgggccaactgccaccaggagcccagcgtgtgcctgcaggccgcctgcccagagagctggattggcttccagaggaagtgcttctacttcagtgatgacaccaagaactggaccagcagccagcgcttctgtgacagccaggatgctgacctggcccaggtggagagcttccaggagctgaacttcctgctgcgctacaagggccccagcgaccactggattggcctgagccgggagcagggccagccctggaagtggatcaatggaacagagtggacccggcagctggtgatgaaggaggatggagccaacctgtatgtggccaaggtgtcccaggtgcccaggatgaaccccaggcctgtgatggtgtcctacccaggcagccggcgggtgtgcctgtttgaatag

SEQ ID NO: 20679 - DNA, 585 bp, Artificial Sequence
  derived and/or modified sequence
atgcacgacagcaacaacgtggagaaggacatcacccccagcgagctaccggctaatccaggctgccttcatagcaaggagcattctatcaaggccacccttatctggaggttgttctttttaattatgtttctgaccataatcgtgtgcggtatggtggccgctctgtctgctattagggcgaactgccatcaggaacctagcgtctgcctgcaggctgcttgtccggagtcctggatcggctttcaaaggaagtgtttttacttcagtgacgacaccaaaaactggacgtcaagccagcggttttgtgacagccaagatgctgacttggcacaggtggaatccttccaggagctgaactttctcctccgctataaaggtccctctgaccactggattggcttgtcacgggagcagggacagccatggaagtggattaacggcacagaatggacacgccaactagtcatgaaagaggatggcgcaaacttatatgtcgctaaagtctcccaagttcccagaatgaatcctagaccagtcatggtgagttatccaggcagcagacgcgtgtgtttgttcgagtag

SEQ ID NO: 20680 - DNA, 585 bp, Artificial Sequence
  derived and/or modified sequence
atgcacgattccaacaatgtcgagaaggatatcactccgagtgagctccctgcaaatccaggttgcctgcactcaaaggaacattccatcaaggccaccctcatatggcgtctcttctttctgatcatgtttcttactatcatagtctgcggaatggtggccgctctgagtgccatcagggcaaactgtcaccaggaaccaagcgtgtgtctgcaggccgcttgccctgaatcatggatcggctttcaaaggaagtgcttctacttctccgacgacaccaagaactggaccagttcacagcgcttttgtgattctcaggacgcagatttggctcaggtggagtcttttcaggaactgaacttcctacttaggtataagggaccctccgatcattggatcgggctgtctagggaacaaggacaaccatggaaatggatcaacggcacagagtggactcggcagcttgtgatgaaagaggacggagctaatttgtatgttgctaaagtgtcccaagtacccaggatgaacccgcgtcccgttatggtgtcctaccccggatcacgcagagtctgcctttttgaatag

SEQ ID NO: 20681 - DNA, 935 bp, Artificial Sequence
  derived and/or modified sequence
actcatagaaactggaggcaaaatgcatgacagtaacaatgtggagaaagacattacaccatctgaattgcctgcaaacccaggttgtctgcattcaaaagagcattctattaaagctaccttaatttggcgcttatttttcttaatcatgtttctgacaatcatagtgtgtggaatggttgctgctttaagcgcaataagagctaactgccatcaagagccatcagtatgtcttcaagctgcatgcccagaaagctggattggttttcaaagaaagtgtttctatttttctgatgacaccaagaactggacatcaagtcagaggttttgtgactcacaagatgctgatcttgctcaggttgaaagcttccaggaactgaatttcctgttgagatataaaggcccatctgatcactggattgggctgagcagagaacaaggccaaccatggaaatggataaatggtactgaatggacaagacagttagtcatgaaagaagatggtgccaacttgtatgttgcaaaggtttcacaagttcctcgaatgaatccaagacctgtcatggtttcctatcctgggagcaggagagtgtgcctatttgaatgacaaaggtgccagtagtgccaggcactacacagagaggaagtggatttgttccaaatcagatatacatgtctagatgttacagcaaagccccaactaatctttagaagcatattggaactgataactccattttaaaatgagcaaagaatttatttcttataccaacaggtatatgaaaatatgctcaatatcactaataactgggaaaatacaaatcaaaatcatagtaaaatattacctgttttcatggtgctaatattacctgttctcccactgctaatgacatacccgagactgagtaatttataaataaaagagatttaattga

SEQ ID NO: 20682 - DNA, 585 bp, Artificial Sequence
  derived and/or modified sequence
atgcacgacagcaacaacgtggagaaggacatcacccccagcgagctgcccgccaaccccggctgcctgcacagcaaggagcacagcatcaaggccaccctgatctggagactgttcttcctgatcatgttcctgaccatcatcgtgtgcggcatggtggccgccctgagcgccatcagagccaactgccaccaggagcccagcgtgtgcctgcaggccgcctgccccgagagctggatcggcttccagagaaagtgcttctacttcagcgacgacaccaagaactggaccagcagccagagattctgcgacagccaggacgccgacctggcccaggtggagagcttccaggagctgaacttcctgctgagatacaagggccccagcgaccactggatcggcctgagcagagagcagggccagccctggaagtggatcaacggcaccgagtggaccagacagctggtgatgaaggaggacggcgccaacctgtacgtggccaaggtgagccaggtgcccagaatgaaccccagacccgtgatggtgagctaccccggcagcagaagagtgtgcctgttcgagtag

SEQ ID NO: 20683 - protein, 593 aa, Artificial Sequence
  derived and/or modified sequence
MDAATAPKQAWPPWPPLLFLLLLPGGSGGSCPAVCDCTSQPQAVLCGHRQLEAVPGGLPLDTELLDLSGNRLWGLQQGMLSRLSLLQELDLSYNQLSTLEPGAFHGLQSLLTLRLQGNRLRIMGPGVFSGLSALTLLDLRLNQIVLFLDGAFGELGSLQKLEVGDNHLVFVAPGAFAGLAKLSTLTLERCNLSTVPGLALARLPALVALRLRELDIGRLPAGALRGLGQLKELEIHLWPSLEALDPGSLVGLNLSSLAITRCNLSSVPFQALYHLSFLRVLDLSQNPISAIPARRLSPLVRLQELRLSGACLTSIAAHAFHGLTAFHLLDVADNALQTLEETAFPSPDKLVTLRLSGNPLTCDCRLLWLLRLRRHLDFGMSPPACAGPHHVQGKSLKEFSDILPPGHFTCKPALIRKSGPRWVIAEEGGHAVFSCSGDGDPAPTVSWMRPHGAWLGRAGRVRVLEDGTLEIRSVQLRDRGAYVCVVSNVAGNDSLRTWLEVIQVEPPNGTLSDPNITVPGIPGPFFLDSRGVAMVLAVGFLPFLTSVTLCFGLIALWSKGKGRVKHHMTFDFVAPRPSGDKNSGGNRVTAKLF

SEQ ID NO: 20684 - DNA, 1782 bp, Artificial Sequence
  derived and/or modified sequence
atggacgccgccaccgcccccaagcaggcctggcccccctggccccccctgctgttcctgctgctgctgcccggcggcagcggcggcagctgccccgccgtgtgcgactgcaccagccagccccaggccgtgctgtgcggccacagacagctggaggccgtgcccggcggcctgcccctggacaccgagctgctggacctgagcggcaacagactgtggggcctgcagcagggcatgctgagcagactgagcctgctgcaggagctggacctgagctacaaccagctgagcaccctggagcccggcgccttccacggcctgcagagcctgctgaccctgagactgcagggcaacagactgagaatcatgggccccggcgtgttcagcggcctgagcgccctgaccctgctggacctgagactgaaccagatcgtgctgttcctggacggcgccttcggcgagctgggcagcctgcagaagctggaggtgggcgacaaccacctggtgttcgtggcccccggcgccttcgccggcctggccaagctgagcaccctgaccctggagagatgcaacctgagcaccgtgcccggcctggccctggccagactgcccgccctggtggccctgagactgagagagctggacatcggcagactgcccgccggcgccctgagaggcctgggccagctgaaggagctggagatccacctgtggcccagcctggaggccctggaccccggcagcctggtgggcctgaacctgagcagcctggccatcaccagatgcaacctgagcagcgtgcccttccaggccctgtaccacctgagcttcctgagagtgctggacctgagccagaaccccatcagcgccatccccgccagaagactgagccccctggtgagactgcaggagctgagactgagcggcgcctgcctgaccagcatcgccgcccacgccttccacggcctgaccgccttccacctgctggacgtggccgacaacgccctgcagaccctggaggagaccgccttccccagccccgacaagctggtgaccctgagactgagcggcaaccccctgacctgcgactgcagactgctgtggctgctgagactgagaagacacctggacttcggcatgagcccccccgcctgcgccggcccccaccacgtgcagggcaagagcctgaaggagttcagcgacatcctgccccccggccacttcacctgcaagcccgccctgatcagaaagagcggccccagatgggtgatcgccgaggagggcggccacgccgtgttcagctgcagcggcgacggcgaccccgcccccaccgtgagctggatgagaccccacggcgcctggctgggcagagccggcagagtgagagtgctggaggacggcaccctggagatcagaagcgtgcagctgagagacagaggcgcctacgtgtgcgtggtgagcaacgtggccggcaacgacagcctgagaacctggctggaggtgatccaggtggagccccccaacggcaccctgagcgaccccaacatcaccgtgcccggcatccccggccccttcttcctggacagcagaggcgtggccatggtgctggccgtgggcttcctgcccttcctgaccagcgtgaccctgtgcttcggcctgatcgccctgtggagcaagggcaagggcagagtgaagcaccacatgaccttcgacttcgtggcccccagacccagcggcgacaagaacagcggcggcaacagagtgaccgccaagctgttctag

SEQ ID NO: 20685 - DNA, 1782 bp, Artificial Sequence
  derived and/or modified sequence
atggatgccgcaactgcaccaaaacaggcgtggccaccttggcctcccctgcttttcctgcttctgctgcccggagggagcggaggctcttgcccggctgtctgcgattgcacgagtcaaccccaggcagtgctgtgtggccacaggcagctggaggcagttcccgggggtttacctcttgacactgagttgctggacctgtcaggaaacagactttggggcctccaacaagggatgctttctcggttgtccctgctccaagagttggatctttcttataaccagctgagcaccctggagcctggggcctttcatggattgcagtcattactcacccttaggctgcagggcaatcgtctgaggatcatgggacccggcgttttctcggggttatcagcactcacgctgctggatctaaggttgaatcagatagttctgttcctagacggagcattcggggagcttggatctttacaaaaactagaggtgggagataatcaccttgtcttcgttgcacccggggccttcgcgggactggccaaactttcgacactcaccctggagcggtgtaatttgtctactgtcccaggcctggctctcgctcgactgcccgcccttgttgcattgaggctgcgagagctcgacattggtcgcctgccggctggcgccctgagggggcttggccagctcaaagaactcgagattcatctgtggcccagtctggaggccctggatcctgggtcgcttgtgggactgaatctcagctctctcgcaattactaggtgtaacctctcatctgtgcccttccaggcactgtaccacctgagcttccttagggtcttggacctttcccagaacccgatctccgccattccggcccgtagactgtctcctcttgtccggctccaggaactgaggctgtctggagcctgccttaccagtatcgcagcccacgctttccacggattgacagctttccacctactggatgtggccgacaacgcactccagaccctggaggaaacagcctttccttcccctgacaagcttgtgacactcagactttcagggaatccactgacatgtgattgtcggcttctgtggcttctgcgtttaagaagacatctagattttgggatgagccctcccgcttgtgctggaccacatcatgtgcagggcaagagcttgaaggaattttccgacatactgcctccaggacacttcacatgcaaaccagccttgatcagaaagagcggtccacgatgggtgatcgccgaagaggggggacacgccgtatttagctgctctggggacggagatcctgccccgacggtgagctggatgcggccccatggagcatggcttggccgggccggcagggttcgcgtcttggaggacggcacactcgagatacgtagcgtgcagctgagagaccggggagcctatgtttgcgtggtctctaacgtggccggaaacgacagtcttaggacctggctcgaagtaatccaggttgaaccacccaatgggaccctgtccgatccaaatattaccgttccaggcataccagggcccttttttctggatagtcgcggagtggcaatggtgctcgctgtaggtttcctcccatttctgacttctgtcaccctttgctttggcctgatcgccctgtggtcaaaaggtaaggggcgggttaaacaccatatgacctttgattttgtggccccccgcccaagcggcgacaaaaactcaggcgggaatcgcgtgaccgccaagctattctag

SEQ ID NO: 20686 - DNA, 3379 bp, Artificial Sequence
  derived and/or modified sequence
ttgtgtcctctaaggggacgggttcatctgagtaaacataaaccccaacttgtgccattctttataaaatgattttaaaggcaagaagtgtgtgtgtcagagggtgggggagattcttaaattagattacctgcatgcctgctctccagtctcattcctgggtcaagactcaggtttccagctcagcaatccatcagcattatacagatccaacccaccctcacccgacccctgcagtttctccccaggtggagcagtccctcagtgaggactgtgaacgaatcttcaggaacccccactgtaggagcctcaaactgagccccacgggagatgctctagactgagaacttcccataaatgatacccacggggaacgtttagatttagaggttgcacagaattgctccacatctgggagaccaaaagacagtcctctggaaggtggctggcccaagctccccagtgggggaatcaggatgtcagagagatcctctagaacctgctgttcttgctattgcatgacccctccctggcaccagagcctccctcctggctccctcccctgtcacttgccagcctgtagtggtgcttgctgcagccctccctggttgctttatttatttattttgcaccaacagggttgctgcagactcattcttgcctggtttaaaaagagagagagagagagaggaaaaaaaaaaaggagaaatgctttctggctcttttctccacctcagtcttggcagcagcggccgcagcagcaacagcagcagcagcagcggcaggcagcagccgggcagccaggcagcgggggttgaggcacacagggaaggtgcaggggcctgaggtgcagctcgaatgggacagggcccccagcgctggacagatgcagtgccaaacttgatgccaccttccagcttctccggactgaagagggaatggatgcagccacagctccaaagcaagcctggcccccatggcccccgctccttttcctcctcctcctacctggagggagcggtggcagctgccctgctgtgtgtgactgcacctcccagccccaggctgtgctctgtggccacaggcaactggaggctgtacctggaggactcccactggacactgagctcctggacctgagtgggaaccgcctgtgggggctccagcagggaatgctctcccgcctgagcctgctccaggaattggacctcagctacaaccagctctcaacccttgagcctggggccttccatggcctacaaagcctactcaccctgaggctgcagggcaatcggctcagaatcatggggcctggggtcttctcaggcctctctgctctgaccctgctggacctccgcctcaaccagattgttctcttcctagatggagcttttggggagctaggcagcctccagaagctggaggttggggacaaccacctggtatttgtggctccgggggcctttgcagggctagccaagttgagcaccctcaccctggagcgctgcaacctcagcacagtgcctggcctagcccttgcccgtctcccggcactagtggccctaaggcttagagaactggatattgggaggctgccagctggggccctgcgggggctggggcagctcaaggagctggagatccacctctggccatctctggaggctctggaccctgggagcctggttgggctcaatctcagcagcctggccatcactcgctgcaatctgagctcggtgcccttccaagcactgtaccacctcagcttcctcagggtcctggatctgtcccagaatcccatctcagccatcccagcccgaaggctcagccccctggtgcggctccaggagctacgcctgtcaggggcatgcctcacctccattgctgcccatgccttccatggcttgactgccttccacctcctggatgtggcagataacgcccttcagacactagaggaaacagctttcccttctccagacaaactggtcaccttgaggctgtctggcaaccccctaacctgtgactgccgcctcctctggctgctccggctccgccgccacctggactttggcatgtccccccctgcctgtgctggcccccatcatgtccaggggaagagcctgaaggagttttcagacatcctgcctccagggcacttcacctgcaaaccagccctgatccgaaagtcggggcctcgatgggtcattgcagaggagggcgggcatgcggttttctcctgctctggagatggagacccagcccccactgtctcctggatgaggcctcatggggcttggctgggcagggctgggagagtaagggtcctagaggatgggacactggagatccgctcagtgcagctacgggacagaggggcctatgtctgtgtggttagcaatgtcgctgggaatgactccctgaggacctggctggaagtcatccaggtggaaccaccaaacggcacactttctgaccccaacatcaccgtgccagggatcccagggcctttttttctggatagcagaggtgtggccatggtgctggcagtcggcttcctccccttcctcacctcagtgaccctctgctttggcctgattgccctttggagcaagggcaaaggtcgggtcaaacatcacatgacctttgactttgtggcacctcggccctctggggataaaaactctgggggtaaccgggtcactgccaagctcttctgacctttccttccccagtggggaacccaccaagtccgcttcagataccaaaggggaagacagaaccaaggctgcttgaaccagaacctagtcccgagcagcaccgctctcctgcacctcccgcctgcgttgtgcctcctgccggagagtctgcttcctgagcttttccggtctgaggatagcattgtcatttcttctctgagggtcccagggagctgcagatgcagaccccgtcgttagtccagcccctgcttcaccccctccacacacaaaacaggaaacataatcaaagcgctagtcagctagtctaaccactaggctttcttcacacatgcttatatcctttaataaccaattgccaaccacggctataagattatttcagaggtggggctgggaagtgccacttgctccttagagtctgtttgtcaaccaggcagagtccctttcttttctgctccccaccccaaccctgcccctatgtacaggaataagagcaaaggacccacaggctacagagaagaggatggggacagagtgtgggatggagaggacagaccatatactgcactgtgtttgcatgagcctctaccaccttcctctatctaccagatcattaaacctgctgtcaaagggccacaacagtagcagccaaaactaaa

SEQ ID NO: 20687 - DNA, 1782 bp, Artificial Sequence
  derived and/or modified sequence
atggatgctgccacagcccccaagcaggcctggccaccctggccacccctgctcttcctgctgctgctgcccggcggcagcggcggcagctgcccagctgtgtgtgactgcaccagccagccccaggccgtgctgtgtggccaccggcagctggaggccgtgcctgggggcctgcccctggacacagagctgctggacctgagcggcaaccggctgtggggcctgcagcagggcatgctgagccggctgagcctgctgcaggagctggacctgagctacaaccagctgagcaccctggagcccggggccttccacggcctgcagagcctgctgaccctgcggctgcagggcaaccggctgcgcatcatgggccctggggtcttcagcggcctgagcgccctgaccctgctggacctgcggctgaaccagatcgtgctcttcctggatggagccttcggggagctgggcagcctgcagaagctggaggtgggggacaaccacctggtgtttgtggcccctggggcctttgctggcctggccaagctgagcaccctgaccctggagcgctgcaacctgagcacagtgcccggcctggccctggcccggctgcctgccctggtggccctgcggctgcgggagctggacatcggccgcctgcctgctggggccctgcggggcctgggccagctgaaggagctggagatccacctgtggcccagcctggaggccctggaccccggcagcctggtgggcctgaacctgagcagcctggccatcacccgctgcaacctgagctctgtgcccttccaggccctgtaccacctgtccttcctgcgggtgctggacctgagccagaaccccatcagcgccatcccagcccggcggctgagccccctggtgcggctgcaggagctgcggctgagcggggcctgcctgaccagcattgctgcccacgccttccacggcctgacagccttccacctgctggatgtggccgacaatgccctgcagaccctggaggagacagccttccccagcccagacaagctggtgaccctgcggctgagcggcaaccccctgacctgtgactgccgcctgctgtggctgctgcggctgcggcggcacctggactttggcatgagccccccagcctgtgccggcccccaccacgtgcagggcaagagcctgaaggagttcagtgacatcctgcccccaggccacttcacctgcaagccagccctgatcaggaagagcggcccccgctgggtgattgctgaggagggcggccatgctgtgttcagctgcagcggagatggagaccctgcccccaccgtgtcctggatgaggcctcatggagcctggctgggccgggccggccgggtgcgggtgctggaggatggcaccctggagatccgctctgtgcagctgcgggacagaggagcctacgtgtgtgtggtgtccaatgtggccggaaatgacagcctgcggacctggctggaggtgatccaggtggagccccccaacggcaccctgagtgaccccaacatcaccgtgcccggcatccctggccccttcttcctggacagcagaggagtggccatggtgctggccgtgggcttcctgcccttcctgacctctgtgaccctgtgcttcggcctcatcgccctgtggagcaagggcaagggccgggtgaagcaccacatgacctttgattttgtggccccccggcccagcggggacaagaacagcggcggcaacagagtgacagccaagctgttctag

SEQ ID NO: 20688 - DNA, 1782 bp, Artificial Sequence
  derived and/or modified sequence
atggacgccgccaccgcccccaagcaggcctggcccccctggccccccctgctcttcctgctactgctgccaggcggatctgggggctcctgccctgctgtgtgtgactgcactagccagcctcaggccgtgctatgcgggcaccgtcagctcgaggcagtgcctggtggactaccgctagatactgaactcctggatctgtcaggcaatcgactgtggggcctccaacaagggatgctctccagactgtccctgctccaggagctagatctaagctataatcagctgagcactctggaaccaggcgccttccatggattacagtcgttgcttacgcttcgactccagggcaatagactacgtattatgggccctggagtctttagcgggctctctgcattgaccttacttgatctgaggctgaaccagatagtgctgtttctagacggcgcctttggagaactcggatccctccagaaactcgaagtgggggacaatcacctggtgttcgtcgcccctggagcctttgccggtctcgccaaactttccacgctcaccctcgagcgttgcaacttgtccacggtgcctggcctggcactcgcccggctccctgcactagttgctttgagactgcgggagctggacatcggacggctccctgctggcgcgcttcgaggcctaggccagctgaaggagctggaaatccatctgtggccatcactcgaggctctggaccccgggtccctggtgggcctgaacctgagctccttagcgatcaccaggtgcaacctctcctccgtgccatttcaagccttgtaccatctaagctttctgagagtattggacctatcccagaaccccatttcagccatccccgcaaggcggttaagccccctggttcgactgcaggaactccgcctgtccggggcctgcctgacatcaattgccgcccatgccttccatggcctcacggctttccatctgctagacgtggcagacaatgccctccagactctagaagaaactgccttcccgtcaccggacaaacttgtgacccttagactgagtgggaacccactgacttgtgattgcagattattgtggctcctgcggttgagaagacacctggatttcggaatgagcccacccgcgtgtgccggaccacatcacgtccagggtaagtccctgaaggaattcagtgatatcctgcctccagggcatttcacatgcaagccagccctgatcaggaagtcaggaccccgctgggtgattgccgaagaaggggggcatgctgtcttttcctgctccggggatggagaccccgctccaactgtgtcgtggatgcgaccccatggggcctggttgggccgagccggcagagtgagggttctggaagatggtacattagaaattcgctccgttcagctaagagacagaggcgcctatgtctgtgtagtgagtaacgttgccggcaacgattccctgcggacatggctcgaggtcattcaggttgagcctcccaatgggaccctctctgaccctaacattaccgtccccggcataccgggtcctttctttctggattcccgcggcgtcgcaatggttttagctgtgggcttcctaccgttcctcacaagtgttactctgtgcttcggactcattgcgctatggtccaagggcaagggcagggttaagcaccacatgactttcgatttcgtggcacccagaccatctggcgacaaaaatagcggaggtaaccgcgtcaccgcaaaactgttttag

SEQ ID NO: 20689 - DNA, 1782 bp, Artificial Sequence
  derived and/or modified sequence
atggacgcagcaacggctccaaaacaagcctggcccccatggccacccctcctttttctgctcctcctcccgggtggatccgggggtagctgcccggctgtatgtgattgcacctcccaaccccaggcagtgctctgtggccacagacagttggaggctgtgcccggaggactcccgctggacacagaattgctcgacctgagtggcaatagactgtggggccttcaacaaggaatgctctcccgcctgtctctgctccaggaactagatctgtcttataaccagctaagtactttagagccgggagcattccacggcctgcagagtctgctgactctgagactccagggcaacagattgaggataatgggccctggcgtgttttccgggctctcggctctcactcttctggacttgcggttgaaccaaatcgtgctgtttctcgacggggctttcggggagctcggttctctgcagaagctggaagtcggcgataaccacctggtcttcgtggcgccaggggcattcgcagggctggctaaactctcgacgctgacgttggagcgatgtaatttgagcactgtcccaggccttgctttggcaagactgcctgctctcgtggcgctgcgcctgcgggagctggacattgggcgattacccgctggcgctttaaggggcttggggcagctgaaggaattagagatccatttgtggcccagcctggaagcattggatccaggtagccttgtcggtctgaacctgtcgtcattagccatcacccgatgcaatttaagcagtgttcctttccaggctctctaccatcttagctttctgagggtcctggatctcagccagaatcccatctcagctattccggctcgccgactctcacctctggttcgcctccaggagctcagactttctggcgcttgcttgacgagcattgctgctcacgctttccacggactcactgccttccacctgctagacgttgctgataacgcactccagaccctcgaagagacagcgttcccttcacctgataagctcgtgaccctgcggctttcaggtaacccactgacgtgtgattgtcggctgctgtggctgctgcggctaaggcggcacctagacttcgggatgtctccacctgcatgcgcagggcctcaccacgtgcagggcaagtccctgaaagagtttagtgacatcctccctcccggacacttcacctgcaagcccgcactgattagaaaatccggacccaggtgggtgatagctgaagagggtggccacgccgtgttctcctgttccggggacggagaccctgccccaacagtctcatggatgcgcccacacggcgcatggctcggtcgggctggacgtgttagagtccttgaagatggcactctagaaataaggtccgtgcagctcagggataggggcgcttatgtatgcgttgtttcaaacgtcgctgggaacgacagtctgcgcacttggctggaagtgatccaggtagaacctcctaatggcacattatccgacccgaacataacagtccctggcatccccggacccttctttctggattcacggggagtggctatggtgttggcagttggttttttgccatttttaacctccgtaactctgtgtttcgggctgattgcattatggagcaaaggcaagggcagggtcaagcaccatatgacattcgattttgtggctcctcgacccagcggagataaaaacagcgggggaaacagagtgacagcaaaactgttctag

SEQ ID NO: 20690 - protein, 1188 aa, Artificial Sequence
  derived and/or modified sequence
MDLPRGLVVAWALSLWPGFTDTFNMDTRKPRVIPGSRTAFFGYTVQQHDISGNKWLVVGAPLETNGYQKTGDVYKCPVIHGNCTKLNLGRVTLSNVSERKDNMRLGLSLATNPKDNSFLACSPLWSHECGSSYYTTGMCSRVNSNFRFSKTVAPALQRCQTYMDIVIVLDGSNSIYPWVEVQHFLINILKKFYIGPGQIQVGVVQYGEDVVHEFHLNDYRSVKDVVEAASHIEQRGGTETRTAFGIEFARSEAFQKGGRKGAKKVMIVITDGESHDSPDLEKVIQQSERDNVTRYAVAVLGYYNRRGINPETFLNEIKYIASDPDDKHFFNVTDEAALKDIVDALGDRIFSLEGTNKNETSFGLEMSQTGFSSHVVEDGVLLGAVGAYDWNGAVLKETSAGKVIPLRESYLKEFPEELKNHGAYLGYTVTSVVSSRQGRVYVAGAPRFNHTGKVILFTMHNNRSLTIHQAMRGQQIGSYFGSEITSVDIDGDGVTDVLLVGAPMYFNEGRERGKVYVYELRQNLFVYNGTLKDSHSYQNARFGSSIASVRDLNQDSYNDVVVGAPLEDNHAGAIYIFHGFRGSILKTPKQRITASELATGLQYFGCSIHGQLDLNEDGLIDLAVGALGNAVILWSRPVVQINASLHFEPSKINIFHRDCKRSGRDATCLAAFLCFTPIFLAPHFQTTTVGIRYNATMDERRYTPRAHLDEGGDRFTNRAVLLSSGQELCERINFHVLDTADYVKPVTFSVEYSLEDPDHGPMLDDGWPTTLRVSVPFWNGCNEDEHCVPDLVLDARSDLPTAMEYCQRVLRKPAQDCSAYTLSFDTTVFIIESTRQRVAVEATLENRGENAYSTVLNISQSANLQFASLIQKEDSDGSIECVNEERRLQKQVCNVSYPFFRAKAKVAFRLDFEFSKSIFLHHLEIELAAGSDSNERDSTKEDNVAPLRFHLKYEADVLFTRSSSLSHYEVKPNSSLERYDGIGPPFSCIFRIQNLGLFPIHGMMMKITIPIATRSGNRLLKLRDFLTDEANTSCNIWGNSTEYRPTPVEEDLRRAPQLNHSNSDVVSINCNIRLVPNQEINFHLLGNLWLRSLKALKYKSMKIMVNAALQRQFHSPFIFREEDPSRQIVFEISKQEDWQVPIWIIVGSTLGGLLLLALLVLALWKLGFFRSARRRREPGLDPTPKVLE

SEQ ID NO: 20691 - protein, 1189 aa, Artificial Sequence
  derived and/or modified sequence
MDLPRGLVVAWALSLWPGFTDTFNMDTRKPRVIPGSRTAFFGYTVQQHDISGNKWLVVGAPLETNGYQKTGDVYKCPVIHGNCTKLNLGRVTLSNVSERKDNMRLGLSLATNPKDNSFLACSPLWSHECGSSYYTTGMCSRVNSNFRFSKTVAPALQRCQTYMDIVIVLDGSNSIYPWVEVQHFLINILKKFYIGPGQIQVGVVQYGEDVVHEFHLNDYRSVKDVVEAASHIEQRGGTETRTAFGIEFARSEAFQKGGRKGAKKVMIVITDGESHDSPDLEKVIQQSERDNVTRYAVAVLGYYNRRGINPETFLNEIKYIASDPDDKHFFNVTDEAALKDIVDALGDRIFSLEGTNKNETSFGLEMSQTGFSSHVVEDGVLLGAVGAYDWNGAVLKETSAGKVIPLRESYLKEFPEELKNHGAYLGYTVTSVVSSRQGRVYVAGAPRFNHTGKVILFTMHNNRSLTIHQAMRGQQIGSYFGSEITSVDIDGDGVTDVLLVGAPMYFNEGRERGKVYVYELRQNLFVYNGTLKDSHSYQNARFGSSIASVRDLNQDSYNDVVVGAPLEDNHAGAIYIFHGFRGSILKTPKQRITASELATGLQYFGCSIHGQLDLNEDGLIDLAVGALGNAVILWSRPVVQINASLHFEPSKINIFHRDCKRSGRDATCLAAFLCFTPIFLAPHFQTTTVGIRYNATMDERRYTPRAHLDEGGDRFTNRAVLLSSGQELCERINFHVLDTADYVKPVTFSVEYSLEDPDHGPMLDDGWPTTLRVSVPFWNGCNEDEHCVPDLVLDARSDLPTAMEYCQRVLRKPAQDCSAYTLSFDTTVFIIESTRQRVAVEATLENRGENAYSTVLNISQSANLQFASLIQKEDSDGSIECVNEERRLQKQVCNVSYPFFRAKAKVAFRLDFEFSKSIFLHHLEIELAAGSDSNERDSTKEDNVAPLRFHLKYEADVLFTRSSSLSHYEVKPNSSLERYDGIGPPFSCIFRIQNLGLFPIHGMMMKITIPIATRSGNRLLKLRDFLTDEVANTSCNIWGNSTEYRPTPVEEDLRRAPQLNHSNSDVVSINCNIRLVPNQEINFHLLGNLWLRSLKALKYKSMKIMVNAALQRQFHSPFIFREEDPSRQIVFEISKQEDWQVPIWIIVGSTLGGLLLLALLVLALWKLGFFRSARRRREPGLDPTPKVLE

SEQ ID NO: 20692 - protein, 650 aa, Artificial Sequence
  derived and/or modified sequence
MDLPRGLVVAWALSLWPGFTDTFNMDTRKPRVIPGSRTAFFGYTVQQHDISGNKWLVVGAPLETNGYQKTGDVYKCPVIHGNCTKLNLGRVTLSNVSERKDNMRLGLSLATNPKDNSFLACSPLWSHECGSSYYTTGMCSRVNSNFRFSKTVAPALQRCQTYMDIVIVLDGSNSIYPWVEVQHFLINILKKFYIGPGQIQVGVVQYGEDVVHEFHLNDYRSVKDVVEAASHIEQRGGTETRTAFGIEFARSEAFQKGGRKGAKKVMIVITDGESHDSPDLEKVIQQSERDNVTRYAVAVLGYYNRRGINPETFLNEIKYIASDPDDKHFFNVTDEAALKDIVDALGDRIFSLEGTNKNETSFGLEMSQTGFSSHVVEDGVLLGAVGAYDWNGAVLKETSAGKVIPLRESYLKEFPEELKNHGAYLGYTVTSVVSSRQGRVYVAGAPRFNHTGKVILFTMHNNRSLTIHQAMRGQQIGSYFGSEITSVDIDGDGVTDVLLVGAPMYFNEGRERGKVYVYELRQNLFVYNGTLKDSHSYQNARFGSSIASVRDLNQDSYNDVVVGAPLEDNHAGAIYIFHGFRGSILKTPKQRITASELATGLQYFGCSIHGQLDLNEDGLIDLAVGALGNAVILWTPPPKCWSEAPEETLS

SEQ ID NO: 20693 - DNA, 3567 bp, Artificial Sequence
  derived and/or modified sequence
atggacctgcctaggggcctagtggtagcgtgggcactatcactgtggccaggctttacggatactttcaacatggatacaagaaaaccccgcgtgatccccggtagcaggaccgctttcttcgggtataccgtgcaacagcacgacatctcaggaaataagtggcttgttgtcggcgcccccctggaaacaaatgggtaccagaaaacaggcgacgtgtacaagtgtcctgtgattcacggaaattgtaccaagctcaatctggggcgcgtgactctttctaatgtgagcgaaaggaaggataacatgcggctcggactcagtctggcgaccaatcccaaagacaacagttttctagcctgctcccctctatggtcccatgagtgcggaagctcttactacacaacgggtatgtgctctcgagtcaacagcaatttccgatttagcaaaaccgtggcacctgcgctgcaaaggtgccaaacttatatggatattgttatcgtgttggacgggtccaattctatatatccgtgggtcgaagtacagcattttttgatcaacattctaaaaaagttttatataggtcccggccagattcaggtaggagtggtgcaatatggcgaggatgtagttcatgaattccaccttaacgattacaggagcgtgaaggacgtggtggaggcagcatctcacatcgagcaacgcggggggaccgagacgcggaccgcgttcggcatcgagtttgcccgatcagaggcctttcagaaaggcggccgcaagggagctaagaaggtgatgatcgtaataacagatggagagtctcacgactcgccggatctggagaaagtgatccagcagagtgaaagagataacgttacccgctatgctgttgccgtcctcgggtattacaaccgccggggtattaatcccgagacctttcttaatgaaatcaagtatattgccagtgacccagatgataaacattttttcaatgtaacggatgaggctgccttgaaggacattgtggatgcactgggtgatcgcattttttctctggagggcactaataaaaatgagacatccttcggactcgagatgtctcagacggggttttcttcacacgtggtcgaggacggagtgcttcttggggcagtgggcgcctacgattggaacggggctgtgttaaaggagaccagcgctggcaaggtgattcccctcagagaatcatatctgaaggagttcccagaggaactgaagaatcacggagcctatcttggttatacagtaacttcagtagtctcttctaggcaaggccgagtttacgtcgccggcgcccctcgttttaaccacacaggcaaggtcattttatttactatgcacaacaatagatctctaaccattcatcaggcaatgcggggccagcaaatcggatcctattttggttcagagattacttctgtggatattgacggagatggagttaccgacgtcctcttggtcggcgcacctatgtacttcaacgaggggcgagagcgaggtaaggtgtacgtatacgagttgcgacagaacctttttgtgtataatggcacacttaaggactctcactcataccagaacgcccggttcggtagtagcatagccagcgtcagagatctcaaccaggactcctataacgatgtagtcgtgggagccccgctggaggacaatcacgccggcgcaatctacatctttcacgggtttcgcgggtctatcctgaagacaccaaaacaacgcattactgcaagcgaactcgctaccggcctccagtatttcggctgcagcatccacggacaactcgatttgaacgaggatggactgattgaccttgccgtgggcgcattaggcaacgctgttatcttatggtcccgcccggtagttcagatcaacgcatctctgcactttgagccttctaaaatcaacatatttcatagagactgcaagagatccggaagggacgccacctgcctcgccgccttcctttgttttacccccatctttctggcgccacactttcagacaacgacagttggtatccgctataatgccacgatggacgaacggcgttataccccacgggcccacctggatgaaggaggcgacagattcaccaatcgcgcagtcctgctgagctctggacaagaactttgtgagagaatcaacttccatgttttggacactgccgactatgttaagcctgttacgttttcagtggagtatagcttagaggatccagaccacggacctatgctggacgatgggtggccaaccacgctgcgggtgtcggttcccttctggaatggctgcaacgaggatgagcattgcgttccagatcttgtcctggatgctaggtcagacctgcccacagcgatggaatattgccagagggtgctacgcaaacctgcccaggattgctcggcctatacgcttagctttgatacgaccgtctttattatcgaaagtacacgacaaagggtcgcagtggaagccacactcgaaaaccggggtgagaatgcttatagcacagttctgaacatttcccaatctgccaacctacagtttgcctccctcattcagaaagaggacagtgatggttccatcgaatgcgtgaacgaagagagaagacttcaaaaacaggtttgtaatgtctcttaccctttctttagagccaaggcgaaagttgcctttcgccttgatttcgaattctccaagtccatattcctccaccacctggaaatagaactggccgcggggagcgatagtaacgagcgggacagtacgaaagaagataacgttgctccgcttcgatttcaccttaagtatgaggcggatgtgctgttcacacggagctccagcctgtcacattatgaagtaaagcccaatagttccctggaacgttatgatggtattggcccgccttttagttgtatatttaggatacagaaccttggcctctttcctatccatggaatgatgatgaagatcactatccctattgctaccagatctggtaatcgtctactgaagctaagagactttcttaccgacgaggcgaataccagctgcaatatctggggcaactccaccgagtatcggccaacgccagtggaggaggacttaagaagggccccccagctcaatcatagcaactctgatgttgttagcatcaactgcaatatacgtctcgtgcccaatcaggagatcaatttccacctgttggggaacctctggctgcgaagtttgaaggcactgaagtataaatcgatgaagatcatggtcaacgcagctttgcaaagacagtttcactcccccttcatctttcgggaagaagacccttcgcgacagatcgtgttcgaaatcagcaagcaagaggattggcaggttccaatctggatcatagttggatcaaccttgggtggtctgctcctgttagctctgcttgtgctggcgctgtggaagctcggcttcttccggagcgccaggagacgaagagaacctggactggacccaacgccaaaggtcttggaatag

SEQ ID NO: 20694 - DNA, 3570 bp, Artificial Sequence
  derived and/or modified sequence
atggatttacccaggggcctggtggtagcctgggcactgtcgctgtggcccggatttacagatacctttaatatggatacccggaaaccacgcgtgattcccgggtctcggactgctttttttggatacacggtccagcaacacgacatctcagggaataaatggcttgttgttggtgcgcccctggaaacgaacggttaccagaagaccggcgacgtctacaaatgcccagtcattcacgggaattgtacgaagctgaatcttggccgggttacgctaagcaacgtcagtgagcggaaggacaatatgcgcctggggttgagtcttgctacaaaccctaaggataattcctttctggcctgtagccccctctggagccatgaatgcggcagttcctactacactaccgggatgtgtagtcgcgtgaactctaactttagatttagtaagaccgtagcacctgctctgcagcggtgtcagacttacatggacattgtaatcgtgctcgacggcagtaactccatttatccctgggtggaggtacagcacttcttgattaacatcttgaagaaattttacataggtccaggccagatccaggtgggtgtagtgcagtacggagaggatgtagtgcatgagttccacctaaacgactatcggtctgttaaagatgtcgtcgaggccgcttctcacatcgaacagaggggaggcaccgaaacccgcaccgcctttggcattgaatttgccaggagtgaagccttccagaaaggcggaaggaagggagcaaaaaaagtcatgatagtgatcactgatggcgagtcacatgactccccagaccttgaaaaggtcatacaacagtccgagcgggacaatgttacacggtatgcggtggcagtcctcggctactataatcgtagaggcatcaatcccgaaacattcctgaacgaaatcaagtacatagcatcagatcccgacgacaaacatttttttaacgtgacagatgaggccgctctgaaagacattgttgacgcgctaggtgataggattttttctttagagggcacaaataagaacgaaacctccttcggactggagatgagtcagaccggcttctcctctcacgtggtggaggatggcgtcttgttaggggccgtcggggcctatgattggaacggagctgtgctgaaggaaacatctgccggcaaagtgatcccccttagggagagctatctgaaagaatttcctgaggagctgaaaaaccatggggcttacctgggatacacagtgacctccgtcgtttcaagtagacagggtcgagtctatgttgctggagctccccgctttaaccacacaggcaaggtgattttgttcacaatgcacaacaaccgatcactgacgatacaccaggcgatgcggggccagcagatcgggagctatttcggctctgaaatcacctccgtagacatcgatggtgacggagttactgacgtgctgctggtgggggcacccatgtacttcaatgaggggagagagcgaggaaaggtttacgtgtacgagcttcgacagaatctgttcgtttataatgggaccctgaaagattctcactcctaccaaaacgccagattcggttcttccatagccagcgtcagggacctcaaccaggattcttacaatgacgtcgtggtgggagcccccctcgaggacaaccatgccggcgctatctacatcttccacggattcagggggagtatcttaaagaccccaaagcagcggataaccgcaagcgagttggctactggactgcagtattttggctgtagcatccacggacagctagacctcaacgaggatggccttatagacctggccgtgggtgcactgggcaacgctgtcatcctttggtcacgcccagtagtccagattaatgcaagtctgcacttcgagccgagcaagatcaatatctttcatcgcgactgtaaaaggtcgggccgggatgcaacatgtcttgcagctttcctatgctttactcccattttcctcgccccccacttccagactacgacagtgggcatccgatacaatgcgacaatggacgagcgcagatacacgccccgcgctcaccttgacgagggcggggatcgattcacaaacagagcagtcctgctttcctccgggcaggaactatgcgaacgcattaattttcatgtacttgataccgctgattatgtgaaaccagtgacattctctgttgaatactctctagaggatcctgaccacggtccaatgctcgacgatgggtggcctacgacactgagagtgtctgtccctttctggaacggatgcaatgaagatgagcactgcgtgcctgacctcgtgctcgacgctcggagtgacctgcccactgctatggagtactgccagcgtgtgttgcgtaaacccgctcaagactgctctgcctatacactttcatttgacacaaccgtgtttatcatcgagagcacccgacagcgtgttgccgtcgaagccacactggaaaataggggagaaaatgcttattccaccgttctcaacattagccagagtgccaacttacagtttgccagcttgatccagaaggaagacagtgatggctcaatcgagtgtgtcaacgaggagcgacggctccagaaacaagtctgcaatgtaagctaccctttttttagggcaaaggcaaaggtggcattccggcttgacttcgagtttagcaaaagtatatttttacaccatttggaaatagagctggccgccgggtctgattccaatgagagagatagtactaaagaagataatgtcgctccgctgcggttccatctgaaatacgaggccgacgtgttgtttacccgctcaagctcattgtcccactatgaagttaagcccaacagcagtctggaaagatacgatggtatcgggcccccctttagctgcatcttccggattcagaacctaggactgtttcccatccatggcatgatgatgaagattaccattccaattgcaactcgaagcgggaacaggctgctcaagctccgtgatttcctgacggatgaagtggccaatacatcgtgcaatatttggggaaatagtactgaatatcggcccacgcctgtggaggaagatctgagaagagcgcctcagttaaaccatagcaactcagatgtggtgtccatcaattgtaacatccgcctcgtccctaatcaggaaattaatttccacctgctggggaacttatggttaagatcgttgaaagcccttaaatataaatctatgaaaatcatggtgaacgctgccctgcagcggcagtttcatagtcctttcatctttcgtgaggaggaccccagccggcagatcgtctttgaaatctccaagcaggaggactggcaagtaccaatttggatcatcgtggggagtaccctaggcggtctgctgttgttggccttgctggtgctcgccctttggaaactgggcttctttcggagcgctcggagaagacgagaacctggcctggatccaacgcctaaggtcctggagtag

SEQ ID NO: 20695 - DNA, 2472 bp, Artificial Sequence
  derived and/or modified sequence
atgtcccagacaggattctccagccatgtggtggaggacggagtcttactgggtgcggtgggggcatatgactggaacggcgccgtgttaaaagagacgtctgccggcaaggtcatcccgctgcgcgagtcctatctgaaggaattccctgaggaactcaaaaaccacggtgcctatctgggatacacggttaccagcgtcgtttcgagccggcagggccgcgtgtacgtggcgggcgcaccgcgctttaaccacactggcaaagtgatcctttttactatgcacaacaacagatccctgacaattcaccaggcaatgagaggtcagcagataggcagctacttcgggtctgagatcacttctgtggatatcgatggagatggtgtgaccgacgtcctactcgtcggagccccaatgtactttaatgagggccgagagcgtggtaaggtttatgtctacgagctccgacagaatctttttgtgtataacggaacactgaaagatagccatagttatcagaatgcacgatttggctcaagtatcgccagcgtccgcgacctgaaccaggacagctacaatgatgtcgtggttggcgcgccactggaggacaaccacgctggcgccatttacatcttccatggatttagaggatccatcctcaaaacccctaagcaaaggatcactgcttctgagttagccaccggcttgcagtacttcggatgctctatccatgggcaattggatctgaacgaggatggcctgatcgacctcgcagttggggcactaggtaacgccgtcattttgtggagtcgtcccgtggtgcagattaatgcttcattgcactttgagccatcgaaaatcaacatcttccacagagattgcaaacggagcgggcgagatgctacgtgtctggctgcctttctctgcttcactcctatcttcctggccccccactttcagactacgacagtgggcattagatacaatgctactatggatgaacgacgatacactccgagggcacacctagatgaaggcggcgatagatttaccaatcgagctgtcttgctttctagcggtcaggagctctgcgaacggatcaacttccacgtccttgacactgcagattacgtgaagcccgtgacattttctgtggagtactcactcgaggaccctgaccacggacccatgcttgacgacggatggcctaccaccctgcgggtcagcgtccctttctggaacggatgtaacgaagatgagcactgtgttcccgatctggttttggacgctcgtagcgatctacctaccgccatggagtactgtcagagagtgttacggaagccagcccaggactgtagtgcatataccctgagctttgataccacagtgtttattattgaaagtacaagacaacgagtcgcagtggaggccactctggaaaatagaggagagaatgcatactctaccgtactcaatatcagccaatccgccaacttgcagttcgcctctctgatccaaaaggaagatagtgacggctctatcgagtgcgtcaacgaagaaagacgtctccaaaaacaagtgtgcaatgtatcctatccctttttcagggcaaaagccaaagtggcgtttaggttagacttcgaattctccaagtcaatctttctgcatcatctagaaatcgaattggccgccggatccgatagcaacgagagggactctacaaaggaagataatgtggccccactgcgatttcatctgaagtacgaggccgatgttctgttcaccaggagcagctctctatcccactatgaagtgaaacctaattccagcttggagaggtatgatggtatcggccccccattctcttgcatctttcgcatccaaaatctgggcctgttccccatccacggaatgatgatgaagataaccatcccgatcgcaacaaggtcgggaaatcggctgctgaaactccgtgactttctcaccgatgaggcaaatacatcttgcaacatctggggcaattccactgaatacaggcccacaccagttgaagaggatctacggcgggcccctcagctgaatcacagtaattcagatgtcgttagcataaattgcaatattcgccttgtgcctaaccaggagatcaacttccatctgctgggaaatctgtggctacggtctcttaaggcactgaagtacaagtctatgaaaatcatggtgaatgcggccctccaacgtcagttccattctcccttcatatttcgagaggaagacccctctcggcagattgtctttgagatttctaaacaggaagattggcaggtccctatatggatcatagtaggatcaacgctgggtggactgcttctgctggccctgctggttctggccctgtggaagctgggctttttcaggtccgctaggaggcgtcgcgagcccggcctggaccctacccctaaagtactggaatag

SEQ ID NO: 20696 - DNA, 1953 bp, Artificial Sequence
  derived and/or modified sequence
atggatctccctagaggtctggtggttgcctgggctctgagtctctggccaggattcacagatacattcaatatggataccaggaagccgagggtgatcccagggtcccggaccgcctttttcggttatacggtgcagcagcacgatatctctggcaataaatggttggtggtgggcgctccgctggaaactaatggttaccagaaaactggtgatgtctacaaatgcccagtcatccacggaaattgcaccaagctcaatctgggaagggtcaccttgtccaacgtctccgagagaaaggacaatatgaggctggggctgagcctcgccacaaaccctaaggataactcttttctagcctgcagcccactgtggagccatgagtgcggctcatcttactataccacagggatgtgcagtcgtgtcaattcaaatttccggttctctaagaccgttgccccggcactccagaggtgccaaacctacatggatatcgtcatcgtcctagacgggtctaatagtatttatccatgggttgaagtgcagcactttttgatcaatatcttaaaaaagttctacattggtcctgggcagatacaggtaggagtagtgcagtatggagaggatgtggtgcacgagtttcatctaaatgattaccggagcgtgaaggacgtggtggaggcagcctcccacatcgagcagcgtggtgggacagagacccgcacggccttcggtatcgagtttgctcgctccgaggctttccagaagggtggacggaaaggcgcaaagaaggtcatgatagtgataaccgatggcgaaagtcacgattcaccagatcttgagaaggtcattcagcagtccgaaagggacaatgtgacccgctacgcggttgccgttttgggttattacaatcgacgaggtattaatcctgaaaccttcctcaacgagatcaaatacatagcatctgatcctgacgataaacatttcttcaatgtgaccgacgaggcagcactaaaagacatcgtggacgccctgggcgatcgtattttcagcctggagggaacaaacaagaatgagaccagctttggcctcgagatgtcccagacgggcttcagtagccatgtagtcgaagatggagtgctgctcggggccgtcggagcttatgattggaacggagcagtgcttaaggagacaagcgcgggtaaagtcataccattgcgcgagagctacctgaaggaattcccggaagaactaaagaaccacggtgcatacctggggtacactgtcacaagcgtggttagcagtaggcaaggccgagtgtacgtggccggggcaccacgctttaatcacacaggcaaggtcattctcttcacaatgcataacaataggagcctgactatacaccaggcaatgcgcgggcaacagatcggttcctattttggctctgagataacgtctgtagatatcgacggcgatggtgtaacagatgttctcttggtgggcgctcccatgtactttaatgaaggaagggaacgaggcaaggtctacgtgtacgagttacgacagaatctctttgtgtacaacgggactcttaaagactcacactcctatcagaacgctaggttcgggtcctcaatcgcatcagtgagagatctgaatcaagactcttacaacgacgtagtagtgggcgcaccgctggaggacaatcacgccggcgctatctatatcttccacggttttcgcggtagcattctgaaaacaccaaagcagcggatcacagcgtccgagctggccacagggttgcaatattttggctgttccattcacggccaactggatctgaatgaggacggcttaatcgacctggcagtgggtgcccttggcaatgcagttattctctggaccccccccccaaaatgttggtccgaggcccccgaggagacattgagttag

SEQ ID NO: 20697 - DNA, 5001 bp, Artificial Sequence
  derived and/or modified sequence
gcaggcgccgcgccgaggaggctgccgctctggcttgccgccccccgccgccgctgcacaccggacccagccgccgtgccgcgggccatggacctgcccaggggcctggtggtggcctgggcgctcagcctgtggccagggttcacggacaccttcaacatggacaccaggaagccccgggtcatccctggctccaggaccgccttctttggctacacagtgcagcagcacgacatcagtggcaataagtggctggtcgtgggcgccccactggaaaccaatggctaccagaagacgggagacgtgtacaagtgtccagtgatccacgggaactgcaccaaactcaacctgggaagggtcaccctgtccaacgtgtccgagcggaaagacaacatgcgcctcggccttagtctcgccaccaaccccaaggacaacagcttcctggcctgcagccccctctggtctcatgagtgtgggagctcctactacaccacagggatgtgttcaagagtcaactccaacttcaggttctccaagaccgtggccccagctctccaaaggtgccagacctacatggacatcgtcattgtcctggatggctccaacagcatctacccctgggtggaggttcagcacttcctcatcaacatcctgaaaaagttttacattggcccagggcagatccaggttggagttgtgcagtatggcgaagatgtggtgcatgagtttcacctcaacgactacaggtctgtaaaagatgtggtggaagctgccagccacattgagcagagaggaggaacagagacccggacggcatttggcattgaatttgcacgctcagaggctttccagaagggtggaaggaaaggagccaagaaggtgatgattgtcatcacagatggggagtcccacgacagcccagacctggagaaggtgatccagcaaagcgaaagagacaacgtaacaagatatgcggtggccgtcctgggctactacaaccgcagggggatcaatccagaaacttttctaaatgaaatcaaatacatcgccagtgaccctgatgacaagcacttcttcaatgtcactgatgaggctgccttgaaggacattgtcgatgccctgggggacagaatcttcagcctggaaggcaccaacaagaacgagacctcctttgggctggagatgtcacagacgggcttttcctcgcacgtggtggaggatggggttctgctgggagccgtcggtgcctatgactggaatggagctgtgctaaaggagacgagtgccgggaaggtcattcctctccgcgagtcctacctgaaagagttccccgaggagctcaagaaccatggtgcatacctggggtacacagtcacatcggtcgtgtcctccaggcaggggcgggtgtacgtggccggagccccccggttcaaccacacgggcaaggtcatcctgttcaccatgcacaacaaccggagcctcaccatccaccaggctatgcggggccagcagataggctcttactttgggagtgaaatcacctcggtggacatcgacggcgacggcgtgactgatgtcctgctggtgggcgcacccatgtacttcaacgagggccgtgagcgaggcaaggtgtacgtctatgagctgagacagaacctgtttgtttataacggaacgctaaaggattcacacagttaccagaatgcccgatttgggtcctccattgcctcagttcgagacctcaaccaggattcctacaatgacgtggtggtgggagcccccctggaggacaaccacgcaggagccatctacatcttccacggcttccgaggcagcatcctgaagacacctaagcagagaatcacagcctcagagctggctaccggcctccagtattttggctgcagcatccacgggcaattggacctcaatgaggatgggctcatcgacctggcagtgggagcccttggcaacgctgtgattctgtggtcccgcccagtggttcagatcaatgccagcctccactttgagccatccaagatcaacatcttccacagagactgcaagcgcagtggcagggatgccacctgcctggccgccttcctctgcttcacgcccatcttcctggcaccccatttccaaacaacaactgttggcatcagatacaacgccaccatggatgagaggcggtatacaccgagggcccacctggacgagggcggggaccgattcaccaacagagccgtactgctctcctccggccaggagctctgtgagcggatcaacttccatgtcctggacactgctgactacgtgaagccagtgaccttctcagtcgagtattccctggaggaccctgaccatggccccatgctggacgacggctggcccaccactctcagagtctcggtgcccttctggaacggctgcaatgaggatgagcactgtgtccctgaccttgtgttggatgcccggagtgacctgcccacggccatggagtactgccagagggtgctgaggaagcctgcgcaggactgctccgcatacacgctgtccttcgacaccacagtcttcatcatagagagcacacgccagcgagtggcggtggaggccacactggagaacaggggcgagaacgcctacagcacggtcctaaatatctcgcagtcagcaaacctgcagtttgccagcttgatccagaaggaggactcagacggtagcattgagtgtgtgaacgaggagaggaggctccagaagcaagtctgcaacgtcagctatcccttcttccgggccaaggccaaggtggctttccgtcttgattttgagttcagcaaatccatcttcctacaccacctggagatcgagctcgctgcaggcagtgacagtaatgagcgggacagcaccaaggaagacaacgtggcccccttacgcttccacctcaaatacgaggctgacgtcctcttcaccaggagcagcagcctgagccactacgaggtcaagcccaacagctcgctggagagatacgatggtatcgggcctcccttcagctgcatcttcaggatccagaacttgggcttgttccccatccacgggatgatgatgaagatcaccattcccatcgccaccaggagcggcaaccgcctactgaagctgagggacttcctcacggacgaggcgaacacgtcctgtaacatctggggcaatagcactgagtaccggcccaccccagtggaggaagacttgcgtcgtgctccacagctgaatcacagcaactctgatgtcgtctccatcaactgcaatatacggctggtccccaaccaggaaatcaatttccatctactggggaacctgtggttgaggtccctaaaagcactcaagtacaaatccatgaaaatcatggtcaacgcagccttgcagaggcagttccacagccccttcatcttccgtgaggaggatcccagccgccagatcgtgtttgagatctccaagcaagaggactggcaggtccccatctggatcattgtaggcagcaccctggggggcctcctactgctggccctgctggtcctggcactgtggaagctcggcttctttagaagtgccaggcgcaggagggagcctggtctggaccccacccccaaagtgctggagtgaggctccagaggagactttgagttgatgggggccaggacaccagtccaggtagtgttgagacccaggcctgtggccccaccgagctggagcggagaggaagccagctggctttgcacttgacctcatctcccgagcaatggcgcctgctccctccagaatggaactcaagctggttttaagtggaactgccctactgggagactgggacacctttaacacagacccctagggatttaaagggacacccctacacacacccaggcccatgccaaggcctccctcaggctctgtggagggcatttgctgccccagctactaaggtgctaggaattcgtaatcatccccatcctccagagaaacccagggaggaagactgtaaatacgaacccaatctgcacactccaggcctctagttccagaaggatccaagacaaaacagatctgaattctgcccttttctctcacccatcccacccctccattggctcccaagtcacacccactcccttccccatagataggcccctggggctcccgaagaatgaacccaagagcaagggcttgatggtgacagctgcaagccagggatgaagaaagactctgagatgtggagactgatggccaggcaagtgggaccaggatactggacgctgtcctgagatgagaggtagccgggctctgcacccacgtgcattcacattgaccgcaactcacacattcccccaccagctgcagccccttgctctcagctgccaaccctcccgggtcacttttgttcccaggtacctcatgggaagcatgtggatgacacaatccctggggctgtgcattcccacgtcttcttgctgcagcctgcccctagacatggacgcaccggcctggctgcagctgggcagcaggggtaggggtagggagcctcccctccctgtatcaccccctccctacacacacacacacacacacacacacacacacacacacacacacacacacacacacacactgcctcccatccttccctcatgcccgccagtgcacagggaagggcttggccagcgctgttgaggggtcccctctggaatgcactgaataaagcacgtgcaaggactcccggagcctgtgcagccttggtggcaaatatctcatctgccggcccccaggacaagtggtatgaccagtgataatgccccaaggacaaggggcgtgcctggcgcccagtggagtaatttatgccttagtcttgttttgaggtagaaatgcaagggggacacatgaaaggcatcagtccccctgtgcatagtacgacctttactgtcgtatttttgaaaaattaaaaatacagtgttt

SEQ ID NO: 20698 - DNA, 5004 bp, Artificial Sequence
  derived and/or modified sequence
gcaggcgccgcgccgaggaggctgccgctctggcttgccgccccccgccgccgctgcacaccggacccagccgccgtgccgcgggccatggacctgcccaggggcctggtggtggcctgggcgctcagcctgtggccagggttcacggacaccttcaacatggacaccaggaagccccgggtcatccctggctccaggaccgccttctttggctacacagtgcagcagcacgacatcagtggcaataagtggctggtcgtgggcgccccactggaaaccaatggctaccagaagacgggagacgtgtacaagtgtccagtgatccacgggaactgcaccaaactcaacctgggaagggtcaccctgtccaacgtgtccgagcggaaagacaacatgcgcctcggccttagtctcgccaccaaccccaaggacaacagcttcctggcctgcagccccctctggtctcatgagtgtgggagctcctactacaccacagggatgtgttcaagagtcaactccaacttcaggttctccaagaccgtggccccagctctccaaaggtgccagacctacatggacatcgtcattgtcctggatggctccaacagcatctacccctgggtggaggttcagcacttcctcatcaacatcctgaaaaagttttacattggcccagggcagatccaggttggagttgtgcagtatggcgaagatgtggtgcatgagtttcacctcaacgactacaggtctgtaaaagatgtggtggaagctgccagccacattgagcagagaggaggaacagagacccggacggcatttggcattgaatttgcacgctcagaggctttccagaagggtggaaggaaaggagccaagaaggtgatgattgtcatcacagatggggagtcccacgacagcccagacctggagaaggtgatccagcaaagcgaaagagacaacgtaacaagatatgcggtggccgtcctgggctactacaaccgcagggggatcaatccagaaacttttctaaatgaaatcaaatacatcgccagtgaccctgatgacaagcacttcttcaatgtcactgatgaggctgccttgaaggacattgtcgatgccctgggggacagaatcttcagcctggaaggcaccaacaagaacgagacctcctttgggctggagatgtcacagacgggcttttcctcgcacgtggtggaggatggggttctgctgggagccgtcggtgcctatgactggaatggagctgtgctaaaggagacgagtgccgggaaggtcattcctctccgcgagtcctacctgaaagagttccccgaggagctcaagaaccatggtgcatacctggggtacacagtcacatcggtcgtgtcctccaggcaggggcgggtgtacgtggccggagccccccggttcaaccacacgggcaaggtcatcctgttcaccatgcacaacaaccggagcctcaccatccaccaggctatgcggggccagcagataggctcttactttgggagtgaaatcacctcggtggacatcgacggcgacggcgtgactgatgtcctgctggtgggcgcacccatgtacttcaacgagggccgtgagcgaggcaaggtgtacgtctatgagctgagacagaacctgtttgtttataacggaacgctaaaggattcacacagttaccagaatgcccgatttgggtcctccattgcctcagttcgagacctcaaccaggattcctacaatgacgtggtggtgggagcccccctggaggacaaccacgcaggagccatctacatcttccacggcttccgaggcagcatcctgaagacacctaagcagagaatcacagcctcagagctggctaccggcctccagtattttggctgcagcatccacgggcaattggacctcaatgaggatgggctcatcgacctggcagtgggagcccttggcaacgctgtgattctgtggtcccgcccagtggttcagatcaatgccagcctccactttgagccatccaagatcaacatcttccacagagactgcaagcgcagtggcagggatgccacctgcctggccgccttcctctgcttcacgcccatcttcctggcaccccatttccaaacaacaactgttggcatcagatacaacgccaccatggatgagaggcggtatacaccgagggcccacctggacgagggcggggaccgattcaccaacagagccgtactgctctcctccggccaggagctctgtgagcggatcaacttccatgtcctggacactgctgactacgtgaagccagtgaccttctcagtcgagtattccctggaggaccctgaccatggccccatgctggacgacggctggcccaccactctcagagtctcggtgcccttctggaacggctgcaatgaggatgagcactgtgtccctgaccttgtgttggatgcccggagtgacctgcccacggccatggagtactgccagagggtgctgaggaagcctgcgcaggactgctccgcatacacgctgtccttcgacaccacagtcttcatcatagagagcacacgccagcgagtggcggtggaggccacactggagaacaggggcgagaacgcctacagcacggtcctaaatatctcgcagtcagcaaacctgcagtttgccagcttgatccagaaggaggactcagacggtagcattgagtgtgtgaacgaggagaggaggctccagaagcaagtctgcaacgtcagctatcccttcttccgggccaaggccaaggtggctttccgtcttgattttgagttcagcaaatccatcttcctacaccacctggagatcgagctcgctgcaggcagtgacagtaatgagcgggacagcaccaaggaagacaacgtggcccccttacgcttccacctcaaatacgaggctgacgtcctcttcaccaggagcagcagcctgagccactacgaggtcaagcccaacagctcgctggagagatacgatggtatcgggcctcccttcagctgcatcttcaggatccagaacttgggcttgttccccatccacgggatgatgatgaagatcaccattcccatcgccaccaggagcggcaaccgcctactgaagctgagggacttcctcacggacgaggtggcgaacacgtcctgtaacatctggggcaatagcactgagtaccggcccaccccagtggaggaagacttgcgtcgtgctccacagctgaatcacagcaactctgatgtcgtctccatcaactgcaatatacggctggtccccaaccaggaaatcaatttccatctactggggaacctgtggttgaggtccctaaaagcactcaagtacaaatccatgaaaatcatggtcaacgcagccttgcagaggcagttccacagccccttcatcttccgtgaggaggatcccagccgccagatcgtgtttgagatctccaagcaagaggactggcaggtccccatctggatcattgtaggcagcaccctggggggcctcctactgctggccctgctggtcctggcactgtggaagctcggcttctttagaagtgccaggcgcaggagggagcctggtctggaccccacccccaaagtgctggagtgaggctccagaggagactttgagttgatgggggccaggacaccagtccaggtagtgttgagacccaggcctgtggccccaccgagctggagcggagaggaagccagctggctttgcacttgacctcatctcccgagcaatggcgcctgctccctccagaatggaactcaagctggttttaagtggaactgccctactgggagactgggacacctttaacacagacccctagggatttaaagggacacccctacacacacccaggcccatgccaaggcctccctcaggctctgtggagggcatttgctgccccagctactaaggtgctaggaattcgtaatcatccccatcctccagagaaacccagggaggaagactgtaaatacgaacccaatctgcacactccaggcctctagttccagaaggatccaagacaaaacagatctgaattctgcccttttctctcacccatcccacccctccattggctcccaagtcacacccactcccttccccatagataggcccctggggctcccgaagaatgaacccaagagcaagggcttgatggtgacagctgcaagccagggatgaagaaagactctgagatgtggagactgatggccaggcaagtgggaccaggatactggacgctgtcctgagatgagaggtagccgggctctgcacccacgtgcattcacattgaccgcaactcacacattcccccaccagctgcagccccttgctctcagctgccaaccctcccgggtcacttttgttcccaggtacctcatgggaagcatgtggatgacacaatccctggggctgtgcattcccacgtcttcttgctgcagcctgcccctagacatggacgcaccggcctggctgcagctgggcagcaggggtaggggtagggagcctcccctccctgtatcaccccctccctacacacacacacacacacacacacacacacacacacacacacacacacacacacacacactgcctcccatccttccctcatgcccgccagtgcacagggaagggcttggccagcgctgttgaggggtcccctctggaatgcactgaataaagcacgtgcaaggactcccggagcctgtgcagccttggtggcaaatatctcatctgccggcccccaggacaagtggtatgaccagtgataatgccccaaggacaaggggcgtgcctggcgcccagtggagtaatttatgccttagtcttgttttgaggtagaaatgcaagggggacacatgaaaggcatcagtccccctgtgcatagtacgacctttactgtcgtatttttgaaaaattaaaaatacagtgttt

SEQ ID NO: 20699 - DNA, 3009 bp, Artificial Sequence
  derived and/or modified sequence
atcaaatacatcgccagtgaccctgatgacaagcacttcttcaatgtcactgatgaggctgccttgaaggacattgtcgatgccctgggggacagaatcttcagcctggaaggcaccaacaagaacgagacctcctttgggctggagatgtcacagacgggcttttcctcgcacgtggtggaggatggggttctgctgggagccgtcggtgcctatgactggaatggagctgtgctaaaggagacgagtgccgggaaggtcattcctctccgcgagtcctacctgaaagagttccccgaggagctcaagaaccatggtgcatacctggggtacacagtcacatcggtcgtgtcctccaggcaggggcgggtgtacgtggccggagccccccggttcaaccacacgggcaaggtcatcctgttcaccatgcacaacaaccggagcctcaccatccaccaggctatgcggggccagcagataggctcttactttgggagtgaaatcacctcggtggacatcgacggcgacggcgtgactgatgtcctgctggtgggcgcacccatgtacttcaacgagggccgtgagcgaggcaaggtgtacgtctatgagctgagacagaacctgtttgtttataacggaacgctaaaggattcacacagttaccagaatgcccgatttgggtcctccattgcctcagttcgagacctcaaccaggattcctacaatgacgtggtggtgggagcccccctggaggacaaccacgcaggagccatctacatcttccacggcttccgaggcagcatcctgaagacacctaagcagagaatcacagcctcagagctggctaccggcctccagtattttggctgcagcatccacgggcaattggacctcaatgaggatgggctcatcgacctggcagtgggagcccttggcaacgctgtgattctgtggtcccgcccagtggttcagatcaatgccagcctccactttgagccatccaagatcaacatcttccacagagactgcaagcgcagtggcagggatgccacctgcctggccgccttcctctgcttcacgcccatcttcctggcaccccatttccaaacaacaactgttggcatcagatacaacgccaccatggatgagaggcggtatacaccgagggcccacctggacgagggcggggaccgattcaccaacagagccgtactgctctcctccggccaggagctctgtgagcggatcaacttccatgtcctggacactgctgactacgtgaagccagtgaccttctcagtcgagtattccctggaggaccctgaccatggccccatgctggacgacggctggcccaccactctcagagtctcggtgcccttctggaacggctgcaatgaggatgagcactgtgtccctgaccttgtgttggatgcccggagtgacctgcccacggccatggagtactgccagagggtgctgaggaagcctgcgcaggactgctccgcatacacgctgtccttcgacaccacagtcttcatcatagagagcacacgccagcgagtggcggtggaggccacactggagaacaggggcgagaacgcctacagcacggtcctaaatatctcgcagtcagcaaacctgcagtttgccagcttgatccagaaggaggactcagacggtagcattgagtgtgtgaacgaggagaggaggctccagaagcaagtctgcaacgtcagctatcccttcttccgggccaaggccaaggtggctttccgtcttgattttgagttcagcaaatccatcttcctacaccacctggagatcgagctcgctgcaggcagtgacagtaatgagcgggacagcaccaaggaagacaacgtggcccccttacgcttccacctcaaatacgaggctgacgtcctcttcaccaggagcagcagcctgagccactacgaggtcaagcccaacagctcgctggagagatacgatggtatcgggcctcccttcagctgcatcttcaggatccagaacttgggcttgttccccatccacgggatgatgatgaagatcaccattcccatcgccaccaggagcggcaaccgcctactgaagctgagggacttcctcacggacgaggcgaacacgtcctgtaacatctggggcaatagcactgagtaccggcccaccccagtggaggaagacttgcgtcgtgctccacagctgaatcacagcaactctgatgtcgtctccatcaactgcaatatacggctggtccccaaccaggaaatcaatttccatctactggggaacctgtggttgaggtccctaaaagcactcaagtacaaatccatgaaaatcatggtcaacgcagccttgcagaggcagttccacagccccttcatcttccgtgaggaggatcccagccgccagatcgtgtttgagatctccaagcaagaggactggcaggtccccatctggatcattgtaggcagcaccctggggggcctcctactgctggccctgctggtcctggcactgtggaagctcggcttctttagaagtgccaggcgcaggagggagcctggtctggaccccacccccaaagtgctggagtgaggctccagaggagactttgagttgatgggggccaggacaccagtccaggtagtgttgagacccaggcctgtggccccaccgagctggagcggagaggaagccagctggctttgcacttgacctcatctcccgagcaatggcgcctgctccctccagaatggaactcaagctggttttaagtggaactgccctactgggagactgggacacctttaacacagacccctagggatttaaagggacacccctacacacacacacacacacacacacacacacacacacactgcctcccatccttccctcatgcccgccagtgcacagggaagggcttggccagcgctgttgaggggtcccctctggaatgcactgaataaagcacgtgcaagg

SEQ ID NO: 20700 - DNA, 2612 bp, Artificial Sequence
  derived and/or modified sequence
agtgcaggctgcaggcgccgcgccgaggaggctgccgctctggcttgccgccccccgccgccgctgcacaccggacccagccgccgtgccgcgggccatggacctgcccaggggcctggtggtggcctgggcgctcagcctgtggccagggttcacggacaccttcaacatggacaccaggaagccccgggtcatccctggctccaggaccgccttctttggctacacagtgcagcagcacgacatcagtggcaataagtggctggtcgtgggcgccccactggaaaccaatggctaccagaagacgggagacgtgtacaagtgtccagtgatccacgggaactgcaccaaactcaacctgggaagggtcaccctgtccaacgtgtccgagcggaaagacaacatgcgcctcggccttagtctcgccaccaaccccaaggacaacagcttcctggcctgcagccccctctggtctcatgagtgtgggagctcctactacaccacagggatgtgttcaagagtcaactccaacttcaggttctccaagaccgtggccccagctctccaaaggtgccagacctacatggacatcgtcattgtcctggatggctccaacagcatctacccctgggtggaggttcagcacttcctcatcaacatcctgaaaaagttttacattggcccagggcagatccaggttggagttgtgcagtatggcgaagatgtggtgcatgagtttcacctcaacgactacaggtctgtaaaagatgtggtggaagctgccagccacattgagcagagaggaggaacagagacccggacggcatttggcattgaatttgcacgctcagaggctttccagaagggtggaaggaaaggagccaagaaggtgatgattgtcatcacagatggggagtcccacgacagcccagacctggagaaggtgatccagcaaagcgaaagagacaacgtaacaagatatgcggtggccgtcctgggctactacaaccgcagggggatcaatccagaaacttttctaaatgaaatcaaatacatcgccagtgaccctgatgacaagcacttcttcaatgtcactgatgaggctgccttgaaggacattgtcgatgccctgggggacagaatcttcagcctggaaggcaccaacaagaacgagacctcctttgggctggagatgtcacagacgggcttttcctcgcacgtggtggaggatggggttctgctgggagccgtcggtgcctatgactggaatggagctgtgctaaaggagacgagtgccgggaaggtcattcctctccgcgagtcctacctgaaagagttccccgaggagctcaagaaccatggtgcatacctggggtacacagtcacatcggtcgtgtcctccaggcaggggcgggtgtacgtggccggagccccccggttcaaccacacgggcaaggtcatcctgttcaccatgcacaacaaccggagcctcaccatccaccaggctatgcggggccagcagataggctcttactttgggagtgaaatcacctcggtggacatcgacggcgacggcgtgactgatgtcctgctggtgggcgcacccatgtacttcaacgagggccgtgagcgaggcaaggtgtacgtctatgagctgagacagaacctgtttgtttataacggaacgctaaaggattcacacagttaccagaatgcccgatttgggtcctccattgcctcagttcgagacctcaaccaggattcctacaatgacgtggtggtgggagcccccctggaggacaaccacgcaggagccatctacatcttccacggcttccgaggcagcatcctgaagacacctaagcagagaatcacagcctcagagctggctaccggcctccagtattttggctgcagcatccacgggcaattggacctcaatgaggatgggctcatcgacctggcagtgggagcccttggcaacgctgtgattctgtggaccccacccccaaagtgctggagtgaggctccagaggagactttgagttgatgggggccaggacaccagtccaggtagtgttgagacccaggcctgtggccccaccgagctggagcggagaggaagccagctggctttgcacttgacctcatctcccgagcaatggcgcctgctccctccagaatggaactcaagctggttttaagtggaactgccctactgggagactgggacacctttaacacagacccctagggatttaaagggacacccctacacacacccaggcccatgccaaggcctccctcaggctctgtggagggcatttgctgccccagctactaaggtgctaggaattcgtaatcatccccatcctccagagaaacccagggaggaagactgtaaatacgaacccaatctgcacactccaggcctctagttccagaaggatccaagacaaaacagatctgaattctgcccttttctctcacccatcccacccctccattggctcccaagtcacacccactcccttccccatagataggcccctggggctcccgaagaatgaacccaagagcaagggcttgatggtgacagctgcaagccaggg

SEQ ID NO: 20701 - DNA, 3567 bp, Artificial Sequence
  derived and/or modified sequence
atggacctgccccggggcctggtggtggcctgggccctgagcctgtggccaggcttcacagacaccttcaacatggacaccaggaagcccagggtcatccctggcagcaggacagccttcttcggctacacagtgcagcagcacgacatcagcggcaacaagtggctggtggtgggcgcccccctggagaccaacggctaccagaagacaggagatgtgtacaagtgccctgtgatccacggcaactgcaccaagctgaacctgggccgggtgaccctgagcaatgtgtctgagaggaaggacaacatgaggctgggcctgagcctggccaccaaccccaaggacaacagcttcctggcctgcagccccctgtggagccatgaatgtggcagcagctactacaccaccggcatgtgcagccgggtgaacagcaacttccgcttcagcaagacagtggccccagccctgcagcgctgccagacctacatggacatcgtgattgtgctggatggcagcaacagcatctacccctgggtggaggtgcagcacttcctgatcaacatcctgaagaagttctacatcggccctggccagatccaggtgggcgtggtgcagtacggggaggatgtggtgcatgagttccacctgaatgactacagatctgtgaaggatgtggtggaggccgccagccacatcgagcagaggggcggcacagagaccaggacagccttcggcatcgagtttgcccggtctgaggccttccagaagggcggcaggaagggggccaagaaggtgatgatcgtcatcacagatggagagagccatgacagcccagacctggagaaggtgatccagcagagcgagcgggacaacgtgaccaggtatgctgtggccgtgctgggctactacaacagaagaggcatcaaccctgagaccttcctgaatgagatcaagtacatcgccagtgaccctgatgacaagcacttcttcaacgtgacagatgaggccgccctgaaggacatcgtggatgccctgggggaccgcatcttcagcctggagggcaccaacaagaatgagaccagctttggcctggagatgagccagacaggcttcagcagccacgtggtggaggatggagtgctgctgggcgctgtgggcgcctatgactggaatggagctgtgctgaaggagaccagcgctgggaaggtgatccccctgcgggagagctacctgaaggagttccctgaggagctgaagaaccacggggcctacctgggctacacagtgacctctgtggtgagcagccggcagggccgggtgtatgtggccggggccccccgcttcaaccacacaggcaaggtgatcctcttcaccatgcacaacaacagaagcctgaccatccaccaggccatgaggggccagcagatcggcagctacttcggcagcgagatcacctctgtggacattgatggagatggagtgacagatgtgctgctggtgggcgcccccatgtacttcaatgaaggccgggagcggggcaaggtgtatgtgtatgagctgcggcagaacctgtttgtgtacaacggcaccctgaaggacagccacagctaccagaatgcccgcttcggcagcagcatcgcctctgtgcgggacctgaaccaggacagctacaatgatgtggtggtgggcgcccccctggaggacaaccacgccggggccatctacatcttccacggcttccggggcagcatcctgaagacccccaagcagaggatcacagccagcgagctggccaccggcctgcagtacttcggctgcagcatccacggccagctggacctgaatgaagatggcctgattgacctggccgtgggcgccctgggcaatgctgtgatcctgtggagcaggcctgtggtgcagatcaatgccagcctgcactttgagcccagcaagatcaacatcttccaccgggactgcaagaggagcggcagagatgccacctgcctggccgccttcctgtgcttcacccccatcttcctggccccccacttccagaccaccaccgtgggcatccgctacaatgccaccatggatgagcggcgctacaccccccgggcccacctggatgaaggaggagaccgcttcaccaacagagctgtgctgctgagcagcggccaggagctgtgtgagcgcatcaacttccacgtgctggacacagctgactatgtgaagcctgtgaccttctctgtggagtacagcctggaggaccctgaccacggccccatgctggatgatggctggcccaccaccctgcgggtgtctgtgcccttctggaatggctgcaatgaagatgagcactgtgtgcctgacctggtgctggatgcccggagtgacctgcccacagccatggagtactgccagagggtgctgaggaagccagcccaggactgcagcgcctacaccctgagctttgacaccaccgtcttcatcatcgagagcacccggcagagggtggccgtggaggccaccctggagaacagaggagaaaatgcctacagcacagtgctgaacatcagccagagcgccaacctgcagtttgccagcctcatccagaaggaggacagtgatggcagcattgaatgtgtgaatgaggagcggcggctgcagaagcaggtgtgcaatgtgtcctaccccttcttccgggccaaggccaaggtggccttccggctggactttgagttcagcaagagcatcttcctgcaccacctggagattgagctggccgccggcagtgacagcaatgaaagagacagcaccaaggaggacaacgtggcccccctgcgcttccacctgaagtatgaagcagatgtgctcttcaccaggagcagcagcctgagccactatgaggtgaagcccaacagcagcctggagagatatgatggcatcggcccccccttcagctgcatcttccgcatccagaacctgggcctcttccccatccacggcatgatgatgaagatcaccatccccatcgccaccaggagcggcaaccggctgctgaagctgcgggacttcctgacagatgaggccaacaccagctgcaacatctggggcaacagcacagagtaccggcccacccctgtggaggaggacctgcggcgggccccccagctgaaccacagcaacagtgatgtggtgtccatcaactgcaacatccggctggtgcccaaccaggagatcaacttccacctgctgggcaacctgtggctgcggagcctgaaggccctgaagtacaagtccatgaagatcatggtgaatgctgccctgcagaggcagttccacagccccttcatcttccgggaggaggaccccagccggcagatcgtgtttgagatcagcaagcaggaggactggcaggtgcccatctggatcatcgtgggcagcaccctgggcggcctgctgctgctggccctgctggtgctggccctgtggaagctgggcttcttccgcagcgccaggagaagaagagagcccggcctggaccccacccccaaggtgctggagtag

SEQ ID NO: 20702 - DNA, 3570 bp, Artificial Sequence
  derived and/or modified sequence
atggacctgccccggggcctggtggtggcctgggccctgagcctgtggccaggcttcacagacaccttcaacatggacaccaggaagcccagggtcatccctggcagcaggacagccttcttcggctacacagtgcagcagcacgacatcagcggcaacaagtggctggtggtgggcgcccccctggagaccaacggctaccagaagacaggagatgtgtacaagtgccctgtgatccacggcaactgcaccaagctgaacctgggccgggtgaccctgagcaatgtgtctgagaggaaggacaacatgaggctgggcctgagcctggccaccaaccccaaggacaacagcttcctggcctgcagccccctgtggagccatgaatgtggcagcagctactacaccaccggcatgtgcagccgggtgaacagcaacttccgcttcagcaagacagtggccccagccctgcagcgctgccagacctacatggacatcgtgattgtgctggatggcagcaacagcatctacccctgggtggaggtgcagcacttcctgatcaacatcctgaagaagttctacatcggccctggccagatccaggtgggcgtggtgcagtacggggaggatgtggtgcatgagttccacctgaatgactacagatctgtgaaggatgtggtggaggccgccagccacatcgagcagaggggcggcacagagaccaggacagccttcggcatcgagtttgcccggtctgaggccttccagaagggcggcaggaagggggccaagaaggtgatgatcgtcatcacagatggagagagccatgacagcccagacctggagaaggtgatccagcagagcgagcgggacaacgtgaccaggtatgctgtggccgtgctgggctactacaacagaagaggcatcaaccctgagaccttcctgaatgagatcaagtacatcgccagtgaccctgatgacaagcacttcttcaacgtgacagatgaggccgccctgaaggacatcgtggatgccctgggggaccgcatcttcagcctggagggcaccaacaagaatgagaccagctttggcctggagatgagccagacaggcttcagcagccacgtggtggaggatggagtgctgctgggcgctgtgggcgcctatgactggaatggagctgtgctgaaggagaccagcgctgggaaggtgatccccctgcgggagagctacctgaaggagttccctgaggagctgaagaaccacggggcctacctgggctacacagtgacctctgtggtgagcagccggcagggccgggtgtatgtggccggggccccccgcttcaaccacacaggcaaggtgatcctcttcaccatgcacaacaacagaagcctgaccatccaccaggccatgaggggccagcagatcggcagctacttcggcagcgagatcacctctgtggacattgatggagatggagtgacagatgtgctgctggtgggcgcccccatgtacttcaatgaaggccgggagcggggcaaggtgtatgtgtatgagctgcggcagaacctgtttgtgtacaacggcaccctgaaggacagccacagctaccagaatgcccgcttcggcagcagcatcgcctctgtgcgggacctgaaccaggacagctacaatgatgtggtggtgggcgcccccctggaggacaaccacgccggggccatctacatcttccacggcttccggggcagcatcctgaagacccccaagcagaggatcacagccagcgagctggccaccggcctgcagtacttcggctgcagcatccacggccagctggacctgaatgaagatggcctgattgacctggccgtgggcgccctgggcaatgctgtgatcctgtggagcaggcctgtggtgcagatcaatgccagcctgcactttgagcccagcaagatcaacatcttccaccgggactgcaagaggagcggcagagatgccacctgcctggccgccttcctgtgcttcacccccatcttcctggccccccacttccagaccaccaccgtgggcatccgctacaatgccaccatggatgagcggcgctacaccccccgggcccacctggatgaaggaggagaccgcttcaccaacagagctgtgctgctgagcagcggccaggagctgtgtgagcgcatcaacttccacgtgctggacacagctgactatgtgaagcctgtgaccttctctgtggagtacagcctggaggaccctgaccacggccccatgctggatgatggctggcccaccaccctgcgggtgtctgtgcccttctggaatggctgcaatgaagatgagcactgtgtgcctgacctggtgctggatgcccggagtgacctgcccacagccatggagtactgccagagggtgctgaggaagccagcccaggactgcagcgcctacaccctgagctttgacaccaccgtcttcatcatcgagagcacccggcagagggtggccgtggaggccaccctggagaacagaggagaaaatgcctacagcacagtgctgaacatcagccagagcgccaacctgcagtttgccagcctcatccagaaggaggacagtgatggcagcattgaatgtgtgaatgaggagcggcggctgcagaagcaggtgtgcaatgtgtcctaccccttcttccgggccaaggccaaggtggccttccggctggactttgagttcagcaagagcatcttcctgcaccacctggagattgagctggccgccggcagtgacagcaatgaaagagacagcaccaaggaggacaacgtggcccccctgcgcttccacctgaagtatgaagcagatgtgctcttcaccaggagcagcagcctgagccactatgaggtgaagcccaacagcagcctggagagatatgatggcatcggcccccccttcagctgcatcttccgcatccagaacctgggcctcttccccatccacggcatgatgatgaagatcaccatccccatcgccaccaggagcggcaaccggctgctgaagctgcgggacttcctgacagatgaggtggccaacaccagctgcaacatctggggcaacagcacagagtaccggcccacccctgtggaggaggacctgcggcgggccccccagctgaaccacagcaacagtgatgtggtgtccatcaactgcaacatccggctggtgcccaaccaggagatcaacttccacctgctgggcaacctgtggctgcggagcctgaaggccctgaagtacaagtccatgaagatcatggtgaatgctgccctgcagaggcagttccacagccccttcatcttccgggaggaggaccccagccggcagatcgtgtttgagatcagcaagcaggaggactggcaggtgcccatctggatcatcgtgggcagcaccctgggcggcctgctgctgctggccctgctggtgctggccctgtggaagctgggcttcttccgcagcgccaggagaagaagagagcccggcctggaccccacccccaaggtgctggagtag

SEQ ID NO: 20703 - DNA, 2472 bp, Artificial Sequence
  derived and/or modified sequence
atgagccagacaggcttcagcagccacgtggtggaggatggagtgctgctgggcgctgtgggcgcctatgactggaatggagctgtgctgaaggagaccagcgctgggaaggtgatccccctgcgggagagctacctgaaggagttccctgaggagctgaagaaccacggggcctacctgggctacacagtgacctctgtggtgagcagccggcagggccgggtgtatgtggccggggccccccgcttcaaccacacaggcaaggtgatcctcttcaccatgcacaacaacagaagcctgaccatccaccaggccatgaggggccagcagatcggcagctactttggaagtgagatcacctctgtggacattgatggagatggagtgacagatgtgctgctggtgggcgcccccatgtacttcaatgaaggccgggagcggggcaaggtgtatgtgtatgagctgcggcagaacctgtttgtgtacaacggcaccctgaaggacagccacagctaccagaatgccaggtttggcagcagcatcgcctctgtgcgggacctgaaccaggacagctacaatgatgtggtggtgggcgcccccctggaggacaaccacgccggggccatctacatcttccacggcttccggggcagcatcctgaagacccccaagcagaggatcacagccagcgagctggccaccggcctgcagtacttcggctgcagcatccacggccagctggacctgaatgaagatggcctgattgacctggccgtgggcgccctgggcaatgctgtgatcctgtggagcaggcctgtggtgcagatcaatgccagcctgcactttgagcccagcaagatcaacatcttccaccgggactgcaagaggagcggcagagatgccacctgcctggccgccttcctgtgcttcacccccatcttcctggccccccacttccagaccaccaccgtgggcatccgctacaatgccaccatggatgaaagacgctacaccccccgggcccacctggatgagggcggggaccgcttcaccaacagagctgtgctgctgagcagcggccaggagctgtgtgagcgcatcaacttccacgtgctggacacagctgactatgtgaagcctgtgaccttctctgtggagtacagcctggaggaccctgaccacggccccatgctggatgatggctggcccaccaccctgcgggtgtctgtgcccttctggaatggctgcaatgaagatgagcactgtgtgcctgacctggtgctggatgcccggagtgacctgcccacagccatggagtactgccagagggtgctgaggaagccagcccaggactgcagcgcctacaccctgagctttgacaccaccgtcttcatcatcgagagcacccggcagagggtggccgtggaggccaccctggagaacagaggagaaaatgcctacagcacagtgctgaacatcagccagagcgccaacctgcagtttgccagcctcatccagaaggaggacagtgatggcagcattgaatgtgtgaatgaggagcggcggctgcagaagcaggtgtgcaatgtgtcctaccccttcttccgggccaaggccaaggtggccttccggctggactttgagttcagcaagagcatcttcctgcaccacctggagattgagctggccgccggcagtgacagcaatgaaagagacagcaccaaggaggacaacgtggcccccctgcgcttccacctgaagtatgaagcagatgtgctcttcaccaggagcagcagcctgagccactatgaggtgaagcccaacagcagcctggagagatatgatggcatcggcccccccttcagctgcatcttccgcatccagaacctgggcctcttccccatccacggcatgatgatgaagatcaccatccccatcgccaccaggagcggcaaccggctgctgaagctgcgggacttcctgacagatgaggccaacaccagctgcaacatctggggcaacagcacagagtaccggcccacccctgtggaggaggacctgcggcgggccccccagctgaaccacagcaacagtgatgtggtgtccatcaactgcaacatccggctggtgcccaaccaggagatcaacttccacctgctgggcaacctgtggctgcggagcctgaaggccctgaagtacaagtccatgaagatcatggtgaatgctgccctgcagaggcagttccacagccccttcatcttccgggaggaggaccccagccggcagatcgtgtttgagatcagcaagcaggaggactggcaggtgcccatctggatcatcgtgggcagcaccctgggcggcctgctgctgctggccctgctggtgctggccctgtggaagctgggcttcttccgcagcgccaggagaagaagagagcccggcctggaccccacccccaaggtgctggagtag

SEQ ID NO: 20704 - DNA, 1953 bp, Artificial Sequence
  derived and/or modified sequence
atggacctgccccggggcctggtggtggcctgggccctgagcctgtggccaggcttcacagacaccttcaacatggacaccaggaagcccagggtcatccctggcagcaggacagccttcttcggctacacagtgcagcagcacgacatcagcggcaacaagtggctggtggtgggcgcccccctggagaccaacggctaccagaagacaggagatgtgtacaagtgccctgtgatccacggcaactgcaccaagctgaacctgggccgggtgaccctgagcaatgtgtctgagaggaaggacaacatgaggctgggcctgagcctggccaccaaccccaaggacaacagcttcctggcctgcagccccctgtggagccatgaatgtggcagcagctactacaccaccggcatgtgcagccgggtgaacagcaacttccgcttcagcaagacagtggccccagccctgcagcgctgccagacctacatggacatcgtgattgtgctggatggcagcaacagcatctacccctgggtggaggtgcagcacttcctgatcaacatcctgaagaagttctacatcggccctggccagatccaggtgggcgtggtgcagtacggggaggatgtggtgcatgagttccacctgaatgactacagatctgtgaaggatgtggtggaggccgccagccacatcgagcagaggggcggcacagagaccaggacagccttcggcatcgagtttgcccggtctgaggccttccagaagggcggcaggaagggggccaagaaggtgatgatcgtcatcacagatggagagagccatgacagcccagacctggagaaggtgatccagcagagcgagcgggacaacgtgaccaggtatgctgtggccgtgctgggctactacaacagaagaggcatcaaccctgagaccttcctgaatgagatcaagtacatcgccagtgaccctgatgacaagcacttcttcaacgtgacagatgaggccgccctgaaggacatcgtggatgccctgggggaccgcatcttcagcctggagggcaccaacaagaatgagaccagctttggcctggagatgagccagacaggcttcagcagccacgtggtggaggatggagtgctgctgggcgctgtgggcgcctatgactggaatggagctgtgctgaaggagaccagcgctgggaaggtgatccccctgcgggagagctacctgaaggagttccctgaggagctgaagaaccacggggcctacctgggctacacagtgacctctgtggtgagcagccggcagggccgggtgtatgtggccggggccccccgcttcaaccacacaggcaaggtgatcctcttcaccatgcacaacaacagaagcctgaccatccaccaggccatgaggggccagcagatcggcagctacttcggcagcgagatcacctctgtggacattgatggagatggagtgacagatgtgctgctggtgggcgcccccatgtacttcaatgaaggccgggagcggggcaaggtgtatgtgtatgagctgcggcagaacctgtttgtgtacaacggcaccctgaaggacagccacagctaccagaatgcccgcttcggcagcagcatcgcctctgtgcgggacctgaaccaggacagctacaatgatgtggtggtgggcgcccccctggaggacaaccacgccggggccatctacatcttccacggcttccggggcagcatcctgaagacccccaagcagaggatcacagccagcgagctggccaccggcctgcagtacttcggctgcagcatccacggccagctggacctgaatgaagatggcctgattgacctggccgtgggcgccctgggcaatgctgtgatcctgtggaccccaccacccaagtgctggagcgaggcccctgaggagaccctgtcctag

SEQ ID NO: 20705 - DNA, 3567 bp, Artificial Sequence
  derived and/or modified sequence
atggacctgccccggggcctggtggtggcctgggccctgagcctgtggcctggatttaccgacacgttcaatatggataccagaaagcccagggtcattcccggctcccgcacagctttttttggttacaccgtacagcaacacgacatcagtggcaataaatggctcgtggtgggggcgcccttagagacgaatggttatcagaaaacaggggacgtctacaaatgtccggttattcatggaaactgtaccaaactcaacctgggtcgagtgacgctgagtaacgtgtctgagcgtaaggataacatgagactgggtttgtccctggctactaatccaaaggataattcatttcttgcttgctcacctctatggtcccacgagtgcggctcctcatattataccactgggatgtgctcgcgcgtcaatagcaattttcgcttttccaaaaccgtcgccccagccttacaacggtgtcagacttacatggatattgtcatagtactggacgggtccaactcaatctacccctgggtggaggtgcaacatttcctgatcaacatcttgaaaaaattttatattggtcccggtcaaattcaagtgggcgtggtccagtatggcgaggatgtcgtgcacgagtttcacttgaacgactaccgctctgtgaaggacgtggtcgaagcagcaagccatattgaacagagggggggcaccgagaccaggaccgccttcgggattgaattcgctagaagtgaggcatttcagaaagggggcagaaagggggcaaaaaaggtaatgatcgtcatcactgacggggagtcccatgattcgcccgatctggagaaggtgatacaacaaagcgagcgcgataatgtaacaagatatgccgtcgcggtcctgggatactataaccgcagaggtatcaaccctgaaacctttctgaacgaaattaagtacatcgcttccgatcctgatgataagcattttttcaatgtgacggatgaggctgccttaaaagatatagtggacgcgctcggggacaggatcttttcactcgaagggacaaacaaaaatgagacttcatttgggctggagatgtctcagaccggattctcatctcacgttgtggaggacggcgttctgctcggtgcagtcggagcctacgattggaacggagcagtgctgaaggaaaccagtgctggtaaagtcatccccctgcgtgagagttacctgaaggaattcccagaggagctcaaaaatcacggggcctacctcggctacaccgtgaccagtgtcgtttcctcccgacaggggcgcgtgtacgtggctggagctccccggttcaatcatacaggaaaagtcatcctgttcacaatgcacaataacaggtccctgactatccaccaagcaatgcgcgggcagcaaataggctcatatttcgggagcgagatcactagtgttgatatcgacggagatggagtcactgatgtgctcctcgttggagctcctatgtatttcaacgaaggtcgagaacgcggaaaggtgtatgtgtatgagctacgtcagaatctgtttgtttacaatgggacactaaaagattcacacagttaccagaatgcccgatttggcagctctatagctagcgtgagggacctgaatcaggacagttataacgatgtagtcgtgggcgctccactcgaagacaatcacgctggggctatttatatttttcacggctttcgagggtctatattgaaaactcctaaacaacgtataaccgcatccgagcttgcaactggactacaatattttggatgtagcatccacggacagctggatctcaacgaggatggcctgatcgatctcgcggttggggcactgggcaacgccgtaattttgtggagcagaccagtggttcaaattaacgcgtcactccatttcgagccgagtaagataaatatcttccacagggactgtaaaagaagtggtagggacgcaacgtgcctcgctgcttttttgtgttttactccgattttcctggccccacactttcagactaccaccgtaggcatccggtacaatgcaaccatggacgagcggaggtatacaccccgtgcacacctggatgagggcggggacagatttacgaaccgagcggtgctattgtcttctggacaggaattgtgcgagaggattaattttcatgtgctggataccgctgactacgtgaaacccgttacattctctgtcgaatatagcctcgaagaccctgatcacgggcctatgctggatgacggttggcccactaccttaagagtctcggttccattttggaacggttgcaacgaggatgaacactgtgtccctgacctggtgcttgacgcccgcagcgacctcccaaccgcgatggagtattgccagcgggttttacggaagcccgcccaagactgctcggcctataccctgtcctttgataccacagtgttcattatcgaaagcacgcggcagagagtcgctgtggaggctactctggagaaccggggagagaacgcctactctactgtcctaaatatttcccagtccgccaacctacagtttgcttcattgatccaaaaggaagacagtgacgggtcgatcgaatgcgtgaacgaggaacggcgcctgcagaagcaagtttgcaacgttagttacccattcttccgggccaaggccaaggttgcctttcgcctagatttcgaattttcaaagagcatctttttgcatcatcttgagattgaacttgctgcaggatcagattctaatgagcgcgacagtacgaaagaggacaacgttgcccctctgcggtttcacttaaagtacgaggcagacgtactgttcacacgatcaagtagtttgagccattacgaggtgaagccgaacagctcactcgaaaggtacgatggaatcggaccgccgttctcgtgcattttccgaatccagaatctgggactcttcccgatccatgggatgatgatgaagattaccatcccaatcgcgacacggagtggaaataggctgctaaagctccgagactttctgacggatgaagcaaatacgtcatgcaacatttgggggaattccacagagtacagaccaacgcccgtcgaggaggatctgaggcgtgcgccgcagctgaaccactccaattcggacgttgtaagcattaattgcaatatcaggctagtgcccaatcaggaaattaattttcacctacttggtaacctgtggctccggagcctcaaggccctgaagtacaagtccatgaaaatcatggtgaacgctgctctccaacggcagtttcactcaccctttatcttccgcgaggaggatccctcccgccagatagtgttcgagatcagtaaacaggaggattggcaggttcctatctggatcatcgtgggatctactctaggaggcctcctgttactggccctgcttgtgttggccttgtggaagctaggttttttccgctccgcacgtaggagaagggaacctggcttagaccctaccccaaaggtgcttgagtag

SEQ ID NO: 20706 - DNA, 3570 bp, Artificial Sequence
  derived and/or modified sequence
atggacctgccccggggcctggtggtggcctgggccctgagcctgtggccaggttttacggacactttcaatatggacacccgtaagcccagggtgatcccaggctctaggacagctttcttcgggtatactgtccagcagcacgatatctcaggaaataagtggctcgtggtcggagcgcccctagagaccaatggataccaaaagaccggcgacgtttacaagtgtcccgtaatacacggaaactgtaccaagttgaacctagggcgagtcacgctgtctaacgtatcagagcggaaggataatatgcgactcgggttgagcctggcgacgaaccctaaggacaactcatttttggcgtgctccccactttggtcacacgagtgtggcagttcctattataccaccggcatgtgctctagggtgaattccaattttcggttttctaagaccgtggcgcctgcactgcaacgctgtcagacctacatggatattgtcattgtgttggacggctccaattccatatatccatgggtagaggtgcagcacttcctcattaacattctcaaaaaattttatataggtccaggtcagattcaggtgggcgtcgtgcagtatggcgaggatgtcgtgcatgaattccacttgaatgattaccgcagcgtcaaggacgtggtggaggctgcctcacatattgagcaaaggggagggactgagacaagaactgcatttgggatagagtttgcccggtctgaggcttttcagaaaggagggaggaagggagctaagaaagttatgatagtcattactgacggggagtcacacgactcccccgatctggagaaggtaattcaacagtctgaacgggataacgtgacgcgatatgctgtggctgtgctggggtattacaatcgcaggggaattaaccctgaaacattcctgaatgaaatcaagtacatcgcttcagaccctgatgataaacattttttcaacgtgaccgacgaggctgcactaaaagacatagttgatgccctcggagaccgaatctttagcttggagggaacaaacaagaatgagacttctttcggactggagatgtcccagactgggttctcctctcacgtggttgaggatggggtgttacttggtgcagtgggcgcctatgattggaacggtgcagtcctaaaggagacgtccgccgggaaggtgattccacttagggaatcatatctgaaggagtttcccgaagaactgaagaaccacggagcctatctgggctacacagtgacgtccgtggtgagttcaaggcagggaagggtgtatgtggctggcgctccaaggttcaaccacaccggaaaggtcatcctgtttactatgcataataataggtccttgaccattcaccaggcaatgcgcggccagcagatcggatcttacttcggtagtgagataactagcgtggacattgatggtgatggggtgactgacgtgttgcttgtaggtgctcctatgtatttcaacgaggggagggagcgtgggaaagtctacgtttatgagttacgccagaacctctttgtatacaacgggacgcttaaggactctcatagctaccagaacgctcggttcgggtcgtcaattgcaagtgtgagagatcttaaccaagattcctataatgatgttgttgtgggcgctccgttggaggacaaccacgccggcgctatatacattttccacgggtttcgtgggtctatcctgaaaacaccaaaacagagaatcactgcgtcagaactggccaccggtctgcaatactttggatgctctatacacggccaattggacctaaatgaagacggcctcatcgacctggctgtcggggcgctgggcaatgctgtgattctctggtctcgccccgtggtgcagattaacgccagcctgcactttgagcctagcaagattaatatcttccatcgtgattgcaagaggagcggccgcgatgccacttgtctcgctgccttcctttgcttcacccctatattcttggcccctcactttcagactaccacggtggggattcgttacaatgccacgatggatgagaggagatacacgcctagagctcacttggacgagggcggcgatcggttcaccaaccgtgcagtgctgctgagttcaggccaggagctttgtgagagaatcaatttccatgtgttggatacagccgactatgtgaaaccggtgacattttccgtggaatatagcttggaagatcccgatcacggtcctatgcttgatgacggctggccgacaaccctgcgcgtctctgtcccgttttggaatggctgtaacgaagacgagcattgtgtgccagatcttgtccttgatgcacgcagcgacctaccaacggccatggagtattgtcagagagttctgcgtaagcccgcacaggactgcagcgcatacaccctgtcttttgatactactgtcttcataatagaatctacccgacaacgtgtagccgtcgaggccaccctcgagaaccgaggcgagaacgcatatagcacagtgcttaatatctcccagtccgccaatctacagttcgcctcactgatccagaaggaggactctgacggaagcattgagtgtgtaaacgaagagagacgcctacagaaacaggtgtgtaacgtcagttaccctttttttagagcaaaggccaaggtagccttccgacttgacttcgagttcagcaagagtatctttctccatcatctggagattgaactggctgccgggagcgacagcaacgagcgagactccacaaaggaggataacgtggctcccctgcgtttccatcttaagtacgaagcagacgtcctgtttacccgaagttcaagcctgagtcactacgaagtaaagcccaactcttctctggaacgatacgacggaatcggaccaccattttcctgcatcttcagaatccagaatctcgggctgtttcccatccacggaatgatgatgaaaataaccattcctatcgcaactagaagcggtaatagactcctcaagctgagggactttctcactgacgaagttgcaaacacctcctgtaacatttgggggaatagcaccgagtacaggccaaccccagtggaagaagatctgagacgcgcaccccagctcaatcactctaactctgacgtggttagtatcaattgtaatattcggctcgtgcctaaccaagaaatcaacttccaccttttgggaaatctgtggcttcggagcctcaaggccctgaagtataagagcatgaagataatggttaatgcagcccttcagcggcaatttcacagcccctttatattcagagaagaggatcccagtaggcagatcgtctttgaaatctcaaagcaggaggactggcaggtcccaatctggattatagtagggtccaccctcggggggctgctcttacttgccctgctggtgttggcactgtggaagctcggattttttagaagcgcacgaagacgccgggagcccgggttagatccaacccccaaggtcctcgaatag

SEQ ID NO: 20707 - DNA, 2472 bp, Artificial Sequence
  derived and/or modified sequence
atgagccagaccggcttcagcagccacgtggtggaggacggcgtgctcctgggcgcagtgggtgcatacgactggaatggcgcagtactgaaggaaaccagtgcaggcaaagtgatcccactgcgcgagagctacctgaaggagttccctgaggagctaaaaaaccatggcgcatacttaggctacacagtcacttctgtggtgagcagccgacagggaagggtgtacgtggcaggagctcccaggttcaatcacacgggtaaagtaatcttgtttacaatgcacaataatcgcagcctgacaattcaccaagcaatgcggggacagcagatcggctcttacttcggttctgaaatcaccagcgtggacattgatggcgatggagtgaccgacgttctgctcgttggtgctcctatgtattttaacgaaggaagggagcggggcaaagtttatgtttatgagcttcgacagaacttgttcgtgtataatgggaccctgaaagacagccactcttatcagaacgcaaggtttggaagctcaattgcttcagtccgggacctcaaccaagacagctacaatgatgtggtcgttggcgcccccctggaggacaatcatgccggtgccatctatatttttcatgggttccgggggagcattctgaagacccccaaacagaggatcaccgcatccgagctggccacaggactgcagtatttcggctgttcaatccacggacagctggacctaaatgaggatggcctcattgatctggccgtgggagcactcggaaatgcggtcattctttggagtcgccccgttgtgcaaatcaatgcatcactccactttgaacccagtaaaatcaatatcttccaccgggactgtaagagatccgggcgggacgcaacctgcttagcggcgttcttgtgcttcacccctatattcctggcccctcattttcagactaccaccgttggcattcgatacaacgccactatggacgagcgtaggtatacacccagagctcacctggacgagggaggggacagatttaccaatagggctgttctgctgtctagcggacaagagctgtgcgaaaggatcaatttccacgtcctcgacaccgcagactatgtaaaaccagtgacattcagtgtggagtattcactggaggaccctgatcatggacccatgttggacgatggctggcccacaacgctaagggtgtcagtgcctttttggaatggctgtaacgaagatgaacactgcgtgcccgacctggtgctggacgcccgcagtgacctgccaactgccatggaatactgtcagcgcgtgctgcgtaagccagcacaagactgttccgcctataccctctcttttgacacgacagtgtttattatcgagagcacaagacaacgagtcgccgtagaggcaaccctggagaatcggggcgaaaatgcctattccaccgtgctcaatattagccaatcagctaaccttcagttcgccagcttaattcagaaggaggattctgacggctctatagagtgcgttaacgaagaacgccgcctgcagaagcaggtctgcaacgtttcctatcctttctttagggcgaaagcaaaagtcgcattccgacttgactttgaattttctaaatcaattttcctgcaccacctggaaatcgaattagccgctgggagcgacagtaatgaacgggactctacgaaggaagacaacgttgcgccccttagatttcacttgaagtacgaagcagacgttctattcacgagatcgtcttcactgtcgcactacgaagtgaagccaaattcctcgctggagaggtacgacgggattgggccaccgtttagctgcattttccggatacaaaaccttggacttttccccatccacgggatgatgatgaaaatcacaatccctatcgctacgaggagtgggaatagactcctcaagttaagggacttcctgaccgatgaagctaatacaagttgtaacatctgggggaactcaaccgagtatcggcccacccctgtcgaggaagatctgcgccgggccccgcagttgaatcatagcaactcagatgtggtgagcatcaactgcaatattagactcgtccccaatcaagagattaacttccatctgctgggtaacctgtggttacgatctctcaaggcgctcaagtacaaaagcatgaagataatggtcaatgccgcattgcagcgtcagtttcacagcccttttattttcagggaagaggacccttcaagacagatagttttcgaaatcagcaagcaggaggattggcaagtgcctatctggatcattgttgggtcaaccctgggcggcctactgcttctggccctgctggtgctcgccctgtggaaactcggcttttttcgcagcgcacgccggcgcagggagccaggcctcgaccccacccccaaagtactggagtag

SEQ ID NO: 20708 - DNA, 1953 bp, Artificial Sequence
  derived and/or modified sequence
atggacctgccccggggcctggtggtggcctgggccctgagcctgtggcctggttttactgataccttcaacatggacactcggaagccacgcgtgattcctggctcacggaccgcattcttcggctatactgtgcaacaacacgatatcagtggaaataaatggttagtcgttggcgccccgctcgagacaaacgggtatcaaaagaccggcgacgtatacaagtgccctgtcatccacggcaactgcaccaaactcaacctgggaagagttacactctcgaatgtgagcgaacgtaaagataatatgcggctgggcctatctctggcgacaaaccccaaggacaattcttttctcgcatgctctccgctgtggtcgcatgagtgcgggtcatcctattacaccaccggcatgtgctcccgggtgaactcaaacttccggtttagcaagactgtagcccccgcactccaaagatgtcagacgtatatggacatcgttattgttctggacgggagcaattccatctatccctgggtcgaagtgcagcacttccttattaatatccttaaaaagttttatattggacccgggcagattcaggtcggcgtcgtacagtacggtgaggatgtggtgcatgaattccaccttaacgactatcgcagcgtgaaagacgtagtggaggcggcctcgcatattgaacaacgcggcgggaccgagacccgaaccgccttcggcatcgaattcgcacgctcagaagctttccaaaagggcggacgtaagggggccaagaaggtaatgatcgtgatcactgatggagagtctcacgactcaccagatcttgagaaggtcattcagcaatcagaacgcgacaatgtcactcgttacgcagtcgctgtgcttggatattataataggaggggcatcaacccggaaacatttctgaatgaaatcaaatacatagcttctgatcctgacgataagcacttcttcaatgtcacagatgaggctgccctgaaggatatagtagatgctcttggagatcgtattttttcactggagggcaccaataagaacgagacctcttttggtttagaaatgagccagacgggtttctcgtctcacgtggtcgaagacggggtcctgctgggagctgtgggtgcctacgactggaacggagccgttctgaaggaaacctccgctggcaaagttatccctctccgagagtcctaccttaaggaattccctgaggagctcaagaaccatggggcctacttgggctacacggttacgtccgtggtgagcagtagacaagggcgagtgtatgttgcgggagccccccgatttaaccatacaggaaaggttattctgtttaccatgcacaacaatcggagtctgaccattcaccaggcgatgcgtggccagcagatcggaagttactttggcagcgaaattacaagcgtggatatcgacggcgatggcgtgacggatgttctgttggtgggagctcccatgtattttaacgagggtagagaacgggggaaggtgtacgtctatgagttaagacaaaatctgttcgtgtataacggcacccttaaagactcccattcctaccagaacgcccgctttgggtctagcatcgctagcgtgcgcgatttaaaccaagatagttacaacgatgtggttgtcggtgcccctctggaggataatcatgccggtgccatttatatatttcatggcttccgaggctctatcttgaagaccccaaaacaacgaatcactgctagcgagctggcgacaggactgcagtatttcgggtgctctatacatggccagttggatctgaatgaggacggactgatagacttggccgtgggagcactcggtaacgcagtgattctctggactcccccccccaaatgctggagcgaggctcctgaggaaacattaagttag

SEQ ID NO: 20709 - DNA, 3567 bp, Artificial Sequence
  derived and/or modified sequence
atggacctgccccgaggcctagtggttgcatgggcactttccctttggcccggattcacggataccttcaacatggacacgcgcaagccgagggtgataccaggctcaagaaccgcctttttcggatatacagtacagcaacacgacataagcggtaacaagtggctggtggtcggcgctcccctcgagactaatggatatcagaaaaccggggacgtatataagtgccccgtgattcacggcaactgtaccaaactgaatctgggacgagtaactttgtccaatgtgtcagagcgcaaagacaatatgcggttgggtttatctcttgccaccaaccctaaggataactccttcctagcatgctcgcccctgtggtcgcacgaatgtggatcatcttattacactacaggcatgtgttcccgggtcaactcgaatttcagatttagtaagacagtggcgcctgcgctgcagaggtgccagacctatatggatatagtcattgtgcttgatggtagtaatagcatttacccgtgggtggaagtacagcacttccttatcaatatcctcaagaagttctatatcgggccaggccaaatccaagtgggcgttgtgcaatatggggaggacgttgtccacgaatttcatcttaatgactatagaagcgttaaggatgtcgttgaagccgcatctcatattgaacagagagggggaaccgagacgcgcactgccttcggcatcgagttcgcaaggtcagaagccttccaaaaaggaggacgaaagggagccaaaaaggtcatgatagtgatcacagatggggaatcacacgattctcccgatcttgagaaagtcattcagcagtctgaacgtgacaacgtcacccgctacgcggtggcggtgctggggtattataatcgcaggggaatcaatccagagacttttttgaatgaaatcaaatacatcgcctctgatccggatgacaaacactttttcaacgttactgatgaggccgctctgaaggatatcgtcgatgccttgggcgacaggattttcagcctggaggggaccaacaaaaatgagaccagcttcgggctggagatgagccaaaccggattttctagtcacgtggttgaggacggcgtgttgttaggagcggtcggtgcttacgattggaacggtgctgtgctcaaggagacctcagctggaaaagtgatccctctgcgtgaatcctacctgaaggagtttcccgaggagctaaaaaatcacggcgcataccttggatacacagttacttcagttgtctcaagtagacaaggtagggtttatgttgcaggggctcctagatttaaccacactggcaaggtcatcttgtttactatgcataataacagatctctgacaatacaccaggccatgagaggacagcaaattgggtcctattttggaagcgagatcacgagtgtagatatcgatggtgatggggtgaccgatgtcctcctcgtgggggctcccatgtactttaacgaaggaagagagcgaggtaaggtgtatgtgtatgaactcagacagaatctgtttgtgtacaacgggactttgaaagacagccactcctaccaaaacgcacgctttggcagtagtatagcctccgtcagggatctaaatcaggacagctacaacgatgtcgtggtgggggctcccctggaggataatcatgctggagcaatctacatatttcatgggttccgcggttccatcctgaaaacacctaagcagagaataaccgccagcgaactggctacaggcctacagtatttcggatgctctatccatggacagctcgatctcaatgaagacggactcatagaccttgcagtgggagcattgggcaacgcagtcattctctggtccaggcccgtggtgcagataaacgcttccctgcactttgagccctccaagattaacatcttccatagagattgtaagagatccgggcgtgacgccacctgcttagcagcatttttgtgttttacccccatcttccttgctccccacttccagacaaccacagtcggcataaggtacaacgctactatggatgaacggaggtatactcccagggcccacctggatgagggcggagacaggttcactaaccgtgccgtgttgctctcctccggtcaggagttatgcgagcgtattaacttccacgtccttgacactgccgactatgtgaaaccagtgactttcagtgtcgagtacagcctggaggacccagatcatgggccaatgctggatgacggttggcctaccaccctacgggttagcgttcccttctggaatggatgcaacgaggacgagcattgtgtgccagacctcgtgctcgacgccagaagtgacctgcctacagctatggaatactgccagcgcgtactgcggaaaccggctcaggactgcagcgcttatacgttgtccttcgacacaacggtatttattattgaatccaccaggcagagagttgccgtggaggccactcttgagaaccgaggcgaaaacgcctactccaccgtgctgaacatttcccaatctgctaatttgcagtttgcttctttaatccagaaggaggacagtgatggttctattgaatgcgtcaatgaagaacggagactccaaaagcaagtctgtaacgtctcctaccctttttttagggctaaagccaaagtggcattccgtctggattttgagttttcaaagtcaatctttctgcaccatctggagattgaactagcagccggatccgattccaatgaacgggattctaccaaggaagataacgtggctccactccgtttccacttgaagtacgaagctgacgtgctttttacccggagttcttcactgagtcattacgaagtgaaacccaattctagtctagaacgctatgatggcatcggccctcccttcagttgcatattccggatacagaatctcggcctattcccaatccatggcatgatgatgaagatcaccatccccattgccactaggagcggaaacagactgctgaagctccgcgatttcctaaccgacgaggcgaataccagctgcaacatttggggtaactcaactgagtaccgacccactcccgttgaagaggacctgaggcgcgcaccccagctgaaccattctaattcagacgtggtgagcattaattgtaatattagactggttccaaaccaggagattaacttccacttgctaggaaacctgtggctccggtcactgaaagcactcaagtataagtccatgaagattatggtgaatgccgctctgcaacgtcagtttcattctccttttatctttcgcgaagaagatcctagtagacagatcgtctttgaaatttcaaagcaagaagattggcaagtaccaatttggataattgtcggctccacacttggcggacttctcttgctggctctattggttcttgctctgtggaaactgggtttttttcggagcgctaggcgcagacgagagcccggactggaccccacacccaaagtattagaatag

SEQ ID NO: 20710 - DNA, 3570 bp, Artificial Sequence
  derived and/or modified sequence
atggacctccctagagggctggtcgtggcatgggccctgtcactgtggccgggtttcacggatacctttaatatggacacccgcaagccacgggttattcctggctcccggacggcgttttttggttatacagtgcagcagcacgacatatccggtaacaagtggttagttgtaggggctccactggaaaccaatggctaccagaaaacaggggacgtttataagtgtccggtcatccacgggaattgcaccaagctgaaccttggaagagtgacacttagtaatgtgagcgaacgcaaggataacatgcgcttagggctcagtctcgcaacaaaccctaaagacaactcctttctggcctgttccccactgtggtctcatgagtgcggatcctcctactacacaaccgggatgtgttctagagtcaatagcaattttcgcttttctaagaccgtggcccctgcactccagcgctgccagacgtacatggacatcgttatagtattagatggatctaattcaatctacccgtgggtggaagtccagcattttctgattaacattctgaagaagttttacatcggcccaggacagattcaggtaggagtcgtccaatatggagaggacgtggtccatgagtttcacttaaacgactatagatctgtgaaggatgtggtggaggccgctagccatatcgagcagcgaggaggcacagaaacccgcactgccttcggcattgagttcgctagatcagaagccttccagaaaggtggcaggaagggcgcaaaaaaggtgatgatcgtgatcacagatggcgagagccacgatagccctgatctcgagaaggttatccaacagtccgagcgtgataacgtgacacgatatgccgtcgcagtgcttggatattacaatagacgaggaattaatccagaaaccttcctcaacgagataaagtacatcgcttctgatccagatgataagcacttttttaatgtgaccgacgaagctgcgctgaaggacattgttgatgcccttggcgaccgtatcttcagtctcgaggggacaaacaagaacgagacctcttttggtctggagatgagccaaaccggcttttctagtcacgtggtggaagacggagtcttgctcggagctgttggtgcttatgactggaacggcgctgtgttgaaagagacctctgctggtaaagtcattccactgcgcgagagctatctcaaagaatttcctgaagaacttaaaaaccatggtgcgtacctcgggtacacggtgacaagcgtggtgagctctagacagggacgagtatacgtcgctggagccccacgctttaatcacactggcaaagtgatcctgttcacaatgcacaataacaggtccttaactattcatcaggcaatgaggggccagcagattggatcttactttggttcggaaataaccagcgttgacatcgatggcgatggggtgaccgatgtcctcctggtgggtgcaccaatgtatttcaacgagggtagggaacggggaaaggtgtatgtgtacgagctgaggcagaatctgtttgtgtacaacgggaccctcaaggattctcattcctaccaaaacgcacgcttcggtagcagcatcgcctccgtccgcgatttaaatcaggacagttataatgacgtggttgttggagcaccacttgaagacaatcacgctggcgctatctacatctttcacggctttcgcggttctatcctgaaaacccctaagcagagaatcacagcttctgaactggccacaggactacagtactttgggtgcagcatacatgggcagctggatctgaacgaagacggactgatcgacctggctgtgggggctctgggcaacgccgtgattctatggagccgacccgtcgtccagataaatgcatctctgcacttcgagccttccaagattaacatcttccatcgggactgtaaaaggtcaggtcgagacgctacctgcctggctgccttcctctgcttcaccccaatttttctggctccccactttcagaccactacagtaggcatccgctataatgccactatggatgaacggagatatactccaagagcccaccttgatgaaggcggagatcgttttacgaacagagcagtattgttatcctcgggccaggagctttgcgaaaggataaattttcacgtgctggataccgcagattacgtaaagcccgtgacctttagtgtggaatacagcctggaggatccagaccacggtcccatgttagatgatggctggccgaccaccctgcgggttagtgtccctttctggaacgggtgcaatgaagatgagcactgtgtgccggacttagttctcgatgcgagaagtgatttaccaacggctatggagtattgccagcgcgtgctccgaaaaccagctcaggactgcagtgcatacaccctttcatttgatacaactgtgtttattatagagagtaccaggcagagagttgctgttgaggctactctcgagaatcgaggtgagaatgcgtacagcaccgttctcaatatttcgcagagcgccaatttgcaatttgcttcgctcatccagaaagaagactcagatggaagcatcgaatgcgtgaatgaggaacgtcggttgcaaaagcaggtgtgcaacgtaagctatcctttctttcgggcaaaggccaaagttgcatttcgtctggatttcgagttctcgaagagtatatttctgcaccatctggagatcgagctggcagcgggaagtgactctaacgaacgtgattccaccaaagaagacaacgtggcacctctgcggttccatcttaagtatgaggctgacgttctgttcacgcggtcatctagcctgtcacattatgaggtgaagccaaacagttccttagaaaggtatgatggaatcggcccacctttttcctgcatatttagaattcagaatctgggccttttccctatccacggcatgatgatgaaaataactattccaatcgctacaagatccggcaatcggttgctgaagctgcgggatttccttacagacgaagtggccaacacttcctgcaacatttgggggaactcaaccgaatacagaccgacccctgttgaggaggatctgcgacgcgcaccgcagctgaaccattccaattcagacgttgtgtcaatcaattgcaacattagactggtccctaaccaggaaattaacttccatttgctcggcaatctgtggttgcgaagtctgaaagccctcaagtataagtccatgaaaataatggttaacgctgccctgcaaaggcagttccattcaccgttcatctttcgggaggaagacccatctaggcagattgtatttgagatctctaagcaagaagactggcaggtgccgatttggatcatcgtgggttccacactcggaggtctgttgctgctggcgctgctcgtgcttgccctatggaagctcggcttctttcggtccgcaagacggcgacgggaacccggtctggatcctaccccgaaggttttggagtag

SEQ ID NO: 20711 - DNA, 2472 bp, Artificial Sequence
  derived and/or modified sequence
atgtcacagactggattctcatctcacgtagtagaagatggggtgcttctgggcgctgtgggagcctatgactggaacggcgctgtgcttaaagagacctccgctgggaaagtgatcccattgcgggaatcttacctaaaagaatttcctgaggagctaaagaaccacggtgcctaccttggctacactgttacctcagtcgtatcgagccgtcagggcagggtgtacgttgctggagcccctcggtttaaccacacgggcaaagtaatcctcttcacgatgcacaacaaccggagtcttacaattcaccaggcaatgaggggtcagcaaattggcagttactttggcagtgaaattacttctgtggatatcgacggcgatggagtcacagacgtgttgctggtaggggctcccatgtactttaatgagggcagggagcgtggaaaagtgtacgtttacgaattgcggcagaacttatttgtctacaatggaaccctgaaagacagtcacagttaccagaatgctagattcgggagttccatagcatctgttcgggaccttaaccaggattcttacaacgatgtggtcgtgggcgcaccactagaagataatcacgccggagcaatttacatctttcacggttttaggggaagtatactgaagacccctaaacagcgcataaccgcttccgaactggcgaccggccttcagtattttgggtgcagtatccatgggcaattagatctgaacgaggatggcctgatcgacctggccgtgggggcattgggaaatgccgtaattctctggtctcggccagtggtacaaatcaacgcgtctctccacttcgaaccttcaaagatcaacatattccaccgtgactgtaagcgcagtggaagggatgctacctgtttggccgcttttctctgttttactccaatctttctggcacctcacttccagacgacaaccgtgggcattaggtacaatgcaactatggatgagcggcgttacaccccacgagcccacctggacgagggcggagacaggtttacaaatcgcgctgtcctgctgtccagcggacaggaactgtgtgagcgcattaacttccacgtccttgatacagcagattacgtgaaaccagtgacattctcagttgaatattccctcgaagatccagaccacggtccaatgctcgacgacggatggccaaccactctgagagtgagcgtgccattctggaacgggtgcaacgaggacgaacactgtgtgccggacttggtgcttgacgccaggtccgatttgcctaccgctatggagtattgtcagcgcgtgttgcgaaaacctgcacaggattgttccgcatacacactcagcttcgataccacagtcttcatcatcgagtctactcggcagagggtggccgtcgaggccactttggagaacaggggcgaaaacgcttattctaccgtcttgaacatctctcagagcgccaacctgcaatttgcctctctgatacaaaaagaagactccgacggctctatagaatgtgtgaacgaggagagaaggctgcaaaagcaggtgtgcaacgtgtcctaccctttcttccgggcaaaagcaaaggtcgctttcagactagactttgagttctctaaaagcatattcctgcaccacctcgagattgagctggcggctggcagtgattctaatgaacgcgactccactaaggaagacaacgtggcccctttgcggttccatcttaagtacgaggctgacgtactgtttacccgctcttctagtctgagccattacgaggtgaaacctaatagcagcctcgaacgctacgatggtataggtcctccattttcctgcattttcaggatccagaacttgggtctgttcccgatccacggcatgatgatgaaaattaccatccctatcgccaccagatcagggaacagactgcttaagctgagagacttcttgacagacgaggctaacacatcttgcaatatatggggaaactcgactgaataccgcccaactcccgtagaagaggacctgcgtcgggcacctcagctgaaccacagtaactcagatgttgtgtccatcaactgcaacatcagacttgtacccaatcaagagattaactttcacctgctgggaaacctgtggctgagaagtctcaaggccctgaagtataagagtatgaaaattatggtgaatgctgcgctccagcggcagttccattcacctttcatcttcagagaggaagacccatcccgtcaaatcgtcttcgagatatccaagcaagaggactggcaggtccctatatggatcattgttggaagcacactcggaggcctcctactgctcgcgctcttagtgctggcactgtggaagcttggctttttccgtagcgcaaggcggagacgggagcctggcctggatcccactccaaaggttctcgagtag

SEQ ID NO: 20712 - DNA, 1953 bp, Artificial Sequence
  derived and/or modified sequence
atggatctaccaagaggattggtggtggcatgggcattgagcctctggcccggtttcaccgacacatttaacatggacacacggaaaccacgcgtcatcccgggatcacgtacagcgtttttcgggtatacggtgcagcagcacgacatatccggcaataagtggcttgtggtcggtgctcccttggagaccaatgggtatcagaaaactggggatgtttataagtgccccgtgattcatgggaactgtaccaagttgaacctgggccgtgtcacgctcagcaatgtgtctgagcggaaggacaacatgagactgggcttatcgctggccacaaatccaaaggataacagctttctcgcctgttctcccttgtggtcacacgagtgtggctcttcatactacacaaccggcatgtgcagccgggtgaactccaacttcaggttttccaaaacggttgccccagctctccagcggtgccaaacctacatggacattgtcatagttttagatggcagcaacagcatatatccctgggtggaagtccaacacttcctcatcaatatcctaaaaaaattctacattggacctggccagatacaggtcggagtggtccagtacggtgaagacgtggttcacgagttccacttaaacgactaccgctctgtgaaagacgtggtggaggccgcaagccacattgagcaaaggggcggaacagaaacgaggaccgccttcggcatagagttcgcacgttctgaggcctttcagaagggtggcagaaagggcgcaaagaaggtgatgatcgtcattactgatggtgagtcccatgatagtcctgacctggagaaagttatccagcagagcgaacgggacaatgtcaccagatacgcagtagccgtgctcggctattacaaccgacgaggcatcaaccctgaaacattcctgaatgaaatcaagtacattgccagtgaccctgatgataaacatttttttaatgtgacggacgaggctgctttgaaggacattgtcgatgcccttggagaccgcattttctcactagagggcaccaacaagaacgaaacctcctttggcttagagatgagccagaccgggttttccagccatgttgttgaggacggtgtcttactcggggctgtgggcgcttatgactggaacggagccgtgctgaaggaaacaagcgctgggaaggtcattcccttacgggaatcctatctcaaagagtttccagaagagctaaagaaccacggagcatacctgggatataccgtgaccagcgtggtgtctagccggcaaggtcgcgtgtatgttgcaggggctcccaggtttaatcacacgggcaaggttatcctgttcactatgcacaacaatcgtagcctcaccattcaccaggccatgcgaggccagcaaataggatcctacttcggttccgagattacatcagtggatatagacggtgacggagtgaccgacgttcttttagtcggggctcccatgtacttcaacgagggaagggagcgcggaaaggtgtatgtgtacgaactgcgtcagaacctcttcgtgtacaatggaacactcaaggattcccacagctaccagaacgctagatttgggtcttcaattgcctcggtgcgcgaccttaaccaagactcctataatgacgtggttgtcggcgctcctctggaggataaccacgccggagcgatctatatcttccacggatttagaggcagcattcttaagactcctaaacaacgaatcacagcaagcgaacttgcaactggactccagtattttgggtgttccatccatggtcaactggacctaaacgaggacggcctcatcgacttagccgtgggcgcactcggcaatgcagtgattttatggaccccaccccctaaatgctggtcagaggctcccgaggaaaccctgtcatag

SEQ ID NO: 20713 - DNA, 3567 bp, Artificial Sequence
  derived and/or modified sequence
atggacctgcccagaggcctggtggtggcctgggccctgagcctgtggcccggcttcaccgacaccttcaacatggacaccagaaagcccagagtgatccccggcagcagaaccgccttcttcggctacaccgtgcagcagcacgacatcagcggcaacaagtggctggtggtgggcgcccccctggagaccaacggctaccagaagaccggcgacgtgtacaagtgccccgtgatccacggcaactgcaccaagctgaacctgggcagagtgaccctgagcaacgtgagcgagagaaaggacaacatgagactgggcctgagcctggccaccaaccccaaggacaacagcttcctggcctgcagccccctgtggagccacgagtgcggcagcagctactacaccaccggcatgtgcagcagagtgaacagcaacttcagattcagcaagaccgtggcccccgccctgcagagatgccagacctacatggacatcgtgatcgtgctggacggcagcaacagcatctacccctgggtggaggtgcagcacttcctgatcaacatcctgaagaagttctacatcggccccggccagatccaggtgggcgtggtgcagtacggcgaggacgtggtgcacgagttccacctgaacgactacagaagcgtgaaggacgtggtggaggccgccagccacatcgagcagagaggcggcaccgagaccagaaccgccttcggcatcgagttcgccagaagcgaggccttccagaagggcggcagaaagggcgccaagaaggtgatgatcgtgatcaccgacggcgagagccacgacagccccgacctggagaaggtgatccagcagagcgagagagacaacgtgaccagatacgccgtggccgtgctgggctactacaacagaagaggcatcaaccccgagaccttcctgaacgagatcaagtacatcgccagcgaccccgacgacaagcacttcttcaacgtgaccgacgaggccgccctgaaggacatcgtggacgccctgggcgacagaatcttcagcctggagggcaccaacaagaacgagaccagcttcggcctggagatgagccagaccggcttcagcagccacgtggtggaggacggcgtgctgctgggcgccgtgggcgcctacgactggaacggcgccgtgctgaaggagaccagcgccggcaaggtgatccccctgagagagagctacctgaaggagttccccgaggagctgaagaaccacggcgcctacctgggctacaccgtgaccagcgtggtgagcagcagacagggcagagtgtacgtggccggcgcccccagattcaaccacaccggcaaggtgatcctgttcaccatgcacaacaacagaagcctgaccatccaccaggccatgagaggccagcagatcggcagctacttcggcagcgagatcaccagcgtggacatcgacggcgacggcgtgaccgacgtgctgctggtgggcgcccccatgtacttcaacgagggcagagagagaggcaaggtgtacgtgtacgagctgagacagaacctgttcgtgtacaacggcaccctgaaggacagccacagctaccagaacgccagattcggcagcagcatcgccagcgtgagagacctgaaccaggacagctacaacgacgtggtggtgggcgcccccctggaggacaaccacgccggcgccatctacatcttccacggcttcagaggcagcatcctgaagacccccaagcagagaatcaccgccagcgagctggccaccggcctgcagtacttcggctgcagcatccacggccagctggacctgaacgaggacggcctgatcgacctggccgtgggcgccctgggcaacgccgtgatcctgtggagcagacccgtggtgcagatcaacgccagcctgcacttcgagcccagcaagatcaacatcttccacagagactgcaagagaagcggcagagacgccacctgcctggccgccttcctgtgcttcacccccatcttcctggccccccacttccagaccaccaccgtgggcatcagatacaacgccaccatggacgagagaagatacacccccagagcccacctggacgagggcggcgacagattcaccaacagagccgtgctgctgagcagcggccaggagctgtgcgagagaatcaacttccacgtgctggacaccgccgactacgtgaagcccgtgaccttcagcgtggagtacagcctggaggaccccgaccacggccccatgctggacgacggctggcccaccaccctgagagtgagcgtgcccttctggaacggctgcaacgaggacgagcactgcgtgcccgacctggtgctggacgccagaagcgacctgcccaccgccatggagtactgccagagagtgctgagaaagcccgcccaggactgcagcgcctacaccctgagcttcgacaccaccgtgttcatcatcgagagcaccagacagagagtggccgtggaggccaccctggagaacagaggcgagaacgcctacagcaccgtgctgaacatcagccagagcgccaacctgcagttcgccagcctgatccagaaggaggacagcgacggcagcatcgagtgcgtgaacgaggagagaagactgcagaagcaggtgtgcaacgtgagctaccccttcttcagagccaaggccaaggtggccttcagactggacttcgagttcagcaagagcatcttcctgcaccacctggagatcgagctggccgccggcagcgacagcaacgagagagacagcaccaaggaggacaacgtggcccccctgagattccacctgaagtacgaggccgacgtgctgttcaccagaagcagcagcctgagccactacgaggtgaagcccaacagcagcctggagagatacgacggcatcggcccccccttcagctgcatcttcagaatccagaacctgggcctgttccccatccacggcatgatgatgaagatcaccatccccatcgccaccagaagcggcaacagactgctgaagctgagagacttcctgaccgacgaggccaacaccagctgcaacatctggggcaacagcaccgagtacagacccacccccgtggaggaggacctgagaagagccccccagctgaaccacagcaacagcgacgtggtgagcatcaactgcaacatcagactggtgcccaaccaggagatcaacttccacctgctgggcaacctgtggctgagaagcctgaaggccctgaagtacaagagcatgaagatcatggtgaacgccgccctgcagagacagttccacagccccttcatcttcagagaggaggaccccagcagacagatcgtgttcgagatcagcaagcaggaggactggcaggtgcccatctggatcatcgtgggcagcaccctgggcggcctgctgctgctggccctgctggtgctggccctgtggaagctgggcttcttcagaagcgccagaagaagaagagagcccggcctggaccccacccccaaggtgctggagtag

SEQ ID NO: 20714 - DNA, 3570 bp, Artificial Sequence
  derived and/or modified sequence
atggacctgcccagaggcctggtggtggcctgggccctgagcctgtggcccggcttcaccgacaccttcaacatggacaccagaaagcccagagtgatccccggcagcagaaccgccttcttcggctacaccgtgcagcagcacgacatcagcggcaacaagtggctggtggtgggcgcccccctggagaccaacggctaccagaagaccggcgacgtgtacaagtgccccgtgatccacggcaactgcaccaagctgaacctgggcagagtgaccctgagcaacgtgagcgagagaaaggacaacatgagactgggcctgagcctggccaccaaccccaaggacaacagcttcctggcctgcagccccctgtggagccacgagtgcggcagcagctactacaccaccggcatgtgcagcagagtgaacagcaacttcagattcagcaagaccgtggcccccgccctgcagagatgccagacctacatggacatcgtgatcgtgctggacggcagcaacagcatctacccctgggtggaggtgcagcacttcctgatcaacatcctgaagaagttctacatcggccccggccagatccaggtgggcgtggtgcagtacggcgaggacgtggtgcacgagttccacctgaacgactacagaagcgtgaaggacgtggtggaggccgccagccacatcgagcagagaggcggcaccgagaccagaaccgccttcggcatcgagttcgccagaagcgaggccttccagaagggcggcagaaagggcgccaagaaggtgatgatcgtgatcaccgacggcgagagccacgacagccccgacctggagaaggtgatccagcagagcgagagagacaacgtgaccagatacgccgtggccgtgctgggctactacaacagaagaggcatcaaccccgagaccttcctgaacgagatcaagtacatcgccagcgaccccgacgacaagcacttcttcaacgtgaccgacgaggccgccctgaaggacatcgtggacgccctgggcgacagaatcttcagcctggagggcaccaacaagaacgagaccagcttcggcctggagatgagccagaccggcttcagcagccacgtggtggaggacggcgtgctgctgggcgccgtgggcgcctacgactggaacggcgccgtgctgaaggagaccagcgccggcaaggtgatccccctgagagagagctacctgaaggagttccccgaggagctgaagaaccacggcgcctacctgggctacaccgtgaccagcgtggtgagcagcagacagggcagagtgtacgtggccggcgcccccagattcaaccacaccggcaaggtgatcctgttcaccatgcacaacaacagaagcctgaccatccaccaggccatgagaggccagcagatcggcagctacttcggcagcgagatcaccagcgtggacatcgacggcgacggcgtgaccgacgtgctgctggtgggcgcccccatgtacttcaacgagggcagagagagaggcaaggtgtacgtgtacgagctgagacagaacctgttcgtgtacaacggcaccctgaaggacagccacagctaccagaacgccagattcggcagcagcatcgccagcgtgagagacctgaaccaggacagctacaacgacgtggtggtgggcgcccccctggaggacaaccacgccggcgccatctacatcttccacggcttcagaggcagcatcctgaagacccccaagcagagaatcaccgccagcgagctggccaccggcctgcagtacttcggctgcagcatccacggccagctggacctgaacgaggacggcctgatcgacctggccgtgggcgccctgggcaacgccgtgatcctgtggagcagacccgtggtgcagatcaacgccagcctgcacttcgagcccagcaagatcaacatcttccacagagactgcaagagaagcggcagagacgccacctgcctggccgccttcctgtgcttcacccccatcttcctggccccccacttccagaccaccaccgtgggcatcagatacaacgccaccatggacgagagaagatacacccccagagcccacctggacgagggcggcgacagattcaccaacagagccgtgctgctgagcagcggccaggagctgtgcgagagaatcaacttccacgtgctggacaccgccgactacgtgaagcccgtgaccttcagcgtggagtacagcctggaggaccccgaccacggccccatgctggacgacggctggcccaccaccctgagagtgagcgtgcccttctggaacggctgcaacgaggacgagcactgcgtgcccgacctggtgctggacgccagaagcgacctgcccaccgccatggagtactgccagagagtgctgagaaagcccgcccaggactgcagcgcctacaccctgagcttcgacaccaccgtgttcatcatcgagagcaccagacagagagtggccgtggaggccaccctggagaacagaggcgagaacgcctacagcaccgtgctgaacatcagccagagcgccaacctgcagttcgccagcctgatccagaaggaggacagcgacggcagcatcgagtgcgtgaacgaggagagaagactgcagaagcaggtgtgcaacgtgagctaccccttcttcagagccaaggccaaggtggccttcagactggacttcgagttcagcaagagcatcttcctgcaccacctggagatcgagctggccgccggcagcgacagcaacgagagagacagcaccaaggaggacaacgtggcccccctgagattccacctgaagtacgaggccgacgtgctgttcaccagaagcagcagcctgagccactacgaggtgaagcccaacagcagcctggagagatacgacggcatcggcccccccttcagctgcatcttcagaatccagaacctgggcctgttccccatccacggcatgatgatgaagatcaccatccccatcgccaccagaagcggcaacagactgctgaagctgagagacttcctgaccgacgaggtggccaacaccagctgcaacatctggggcaacagcaccgagtacagacccacccccgtggaggaggacctgagaagagccccccagctgaaccacagcaacagcgacgtggtgagcatcaactgcaacatcagactggtgcccaaccaggagatcaacttccacctgctgggcaacctgtggctgagaagcctgaaggccctgaagtacaagagcatgaagatcatggtgaacgccgccctgcagagacagttccacagccccttcatcttcagagaggaggaccccagcagacagatcgtgttcgagatcagcaagcaggaggactggcaggtgcccatctggatcatcgtgggcagcaccctgggcggcctgctgctgctggccctgctggtgctggccctgtggaagctgggcttcttcagaagcgccagaagaagaagagagcccggcctggaccccacccccaaggtgctggagtag

SEQ ID NO: 20715 - DNA, 2472 bp, Artificial Sequence
  derived and/or modified sequence
atgagccagaccggcttcagcagccacgtggtggaggacggcgtgctgctgggcgccgtgggcgcctacgactggaacggcgccgtgctgaaggagaccagcgccggcaaggtgatccccctgagagagagctacctgaaggagttccccgaggagctgaagaaccacggcgcctacctgggctacaccgtgaccagcgtggtgagcagcagacagggcagagtgtacgtggccggcgcccccagattcaaccacaccggcaaggtgatcctgttcaccatgcacaacaacagaagcctgaccatccaccaggccatgagaggccagcagatcggcagctacttcggcagcgagatcaccagcgtggacatcgacggcgacggcgtgaccgacgtgctgctggtgggcgcccccatgtacttcaacgagggcagagagagaggcaaggtgtacgtgtacgagctgagacagaacctgttcgtgtacaacggcaccctgaaggacagccacagctaccagaacgccagattcggcagcagcatcgccagcgtgagagacctgaaccaggacagctacaacgacgtggtggtgggcgcccccctggaggacaaccacgccggcgccatctacatcttccacggcttcagaggcagcatcctgaagacccccaagcagagaatcaccgccagcgagctggccaccggcctgcagtacttcggctgcagcatccacggccagctggacctgaacgaggacggcctgatcgacctggccgtgggcgccctgggcaacgccgtgatcctgtggagcagacccgtggtgcagatcaacgccagcctgcacttcgagcccagcaagatcaacatcttccacagagactgcaagagaagcggcagagacgccacctgcctggccgccttcctgtgcttcacccccatcttcctggccccccacttccagaccaccaccgtgggcatcagatacaacgccaccatggacgagagaagatacacccccagagcccacctggacgagggcggcgacagattcaccaacagagccgtgctgctgagcagcggccaggagctgtgcgagagaatcaacttccacgtgctggacaccgccgactacgtgaagcccgtgaccttcagcgtggagtacagcctggaggaccccgaccacggccccatgctggacgacggctggcccaccaccctgagagtgagcgtgcccttctggaacggctgcaacgaggacgagcactgcgtgcccgacctggtgctggacgccagaagcgacctgcccaccgccatggagtactgccagagagtgctgagaaagcccgcccaggactgcagcgcctacaccctgagcttcgacaccaccgtgttcatcatcgagagcaccagacagagagtggccgtggaggccaccctggagaacagaggcgagaacgcctacagcaccgtgctgaacatcagccagagcgccaacctgcagttcgccagcctgatccagaaggaggacagcgacggcagcatcgagtgcgtgaacgaggagagaagactgcagaagcaggtgtgcaacgtgagctaccccttcttcagagccaaggccaaggtggccttcagactggacttcgagttcagcaagagcatcttcctgcaccacctggagatcgagctggccgccggcagcgacagcaacgagagagacagcaccaaggaggacaacgtggcccccctgagattccacctgaagtacgaggccgacgtgctgttcaccagaagcagcagcctgagccactacgaggtgaagcccaacagcagcctggagagatacgacggcatcggcccccccttcagctgcatcttcagaatccagaacctgggcctgttccccatccacggcatgatgatgaagatcaccatccccatcgccaccagaagcggcaacagactgctgaagctgagagacttcctgaccgacgaggccaacaccagctgcaacatctggggcaacagcaccgagtacagacccacccccgtggaggaggacctgagaagagccccccagctgaaccacagcaacagcgacgtggtgagcatcaactgcaacatcagactggtgcccaaccaggagatcaacttccacctgctgggcaacctgtggctgagaagcctgaaggccctgaagtacaagagcatgaagatcatggtgaacgccgccctgcagagacagttccacagccccttcatcttcagagaggaggaccccagcagacagatcgtgttcgagatcagcaagcaggaggactggcaggtgcccatctggatcatcgtgggcagcaccctgggcggcctgctgctgctggccctgctggtgctggccctgtggaagctgggcttcttcagaagcgccagaagaagaagagagcccggcctggaccccacccccaaggtgctggagtag

SEQ ID NO: 20716 - DNA, 1953 bp, Artificial Sequence
  derived and/or modified sequence
atggacctgcccagaggcctggtggtggcctgggccctgagcctgtggcccggcttcaccgacaccttcaacatggacaccagaaagcccagagtgatccccggcagcagaaccgccttcttcggctacaccgtgcagcagcacgacatcagcggcaacaagtggctggtggtgggcgcccccctggagaccaacggctaccagaagaccggcgacgtgtacaagtgccccgtgatccacggcaactgcaccaagctgaacctgggcagagtgaccctgagcaacgtgagcgagagaaaggacaacatgagactgggcctgagcctggccaccaaccccaaggacaacagcttcctggcctgcagccccctgtggagccacgagtgcggcagcagctactacaccaccggcatgtgcagcagagtgaacagcaacttcagattcagcaagaccgtggcccccgccctgcagagatgccagacctacatggacatcgtgatcgtgctggacggcagcaacagcatctacccctgggtggaggtgcagcacttcctgatcaacatcctgaagaagttctacatcggccccggccagatccaggtgggcgtggtgcagtacggcgaggacgtggtgcacgagttccacctgaacgactacagaagcgtgaaggacgtggtggaggccgccagccacatcgagcagagaggcggcaccgagaccagaaccgccttcggcatcgagttcgccagaagcgaggccttccagaagggcggcagaaagggcgccaagaaggtgatgatcgtgatcaccgacggcgagagccacgacagccccgacctggagaaggtgatccagcagagcgagagagacaacgtgaccagatacgccgtggccgtgctgggctactacaacagaagaggcatcaaccccgagaccttcctgaacgagatcaagtacatcgccagcgaccccgacgacaagcacttcttcaacgtgaccgacgaggccgccctgaaggacatcgtggacgccctgggcgacagaatcttcagcctggagggcaccaacaagaacgagaccagcttcggcctggagatgagccagaccggcttcagcagccacgtggtggaggacggcgtgctgctgggcgccgtgggcgcctacgactggaacggcgccgtgctgaaggagaccagcgccggcaaggtgatccccctgagagagagctacctgaaggagttccccgaggagctgaagaaccacggcgcctacctgggctacaccgtgaccagcgtggtgagcagcagacagggcagagtgtacgtggccggcgcccccagattcaaccacaccggcaaggtgatcctgttcaccatgcacaacaacagaagcctgaccatccaccaggccatgagaggccagcagatcggcagctacttcggcagcgagatcaccagcgtggacatcgacggcgacggcgtgaccgacgtgctgctggtgggcgcccccatgtacttcaacgagggcagagagagaggcaaggtgtacgtgtacgagctgagacagaacctgttcgtgtacaacggcaccctgaaggacagccacagctaccagaacgccagattcggcagcagcatcgccagcgtgagagacctgaaccaggacagctacaacgacgtggtggtgggcgcccccctggaggacaaccacgccggcgccatctacatcttccacggcttcagaggcagcatcctgaagacccccaagcagagaatcaccgccagcgagctggccaccggcctgcagtacttcggctgcagcatccacggccagctggacctgaacgaggacggcctgatcgacctggccgtgggcgccctgggcaacgccgtgatcctgtggacccccccccccaagtgctggagcgaggcccccgaggagaccctgagctag

SEQ ID NO: 20717 - protein, 309 aa, Artificial Sequence
  derived and/or modified sequence
MERINHTSSVSEFILLGLSSRPEDQKTLFVLFLIVYLVTITGNLLIILAIRFNPHLQTPMYFFLSFLSLTDICFTTSVVPKMLMNFLSEKKTISYAGCLTQMYFLYALGNSDSCLLAVMAFDRYVAVCDPFHYVTTMSHHHCVLLVAFSCSFPHLHSLLHTLLLNRLTFCDSNVIHHFLCDLSPVLKLSCSSIFVNEIVQMTEAPIVLVTRFLCIAFSYIRILTTVLKIPSTSGKRKAFSTCGFYLTVVTLFYGSIFCVYLQPPSTYAVKDHVATIVYTVLSSMLNPFIYSLRNKDLKQGLRKLMSKRS

SEQ ID NO: 20718 - DNA, 930 bp, Artificial Sequence
  derived and/or modified sequence
atggagagaatcaaccacaccagcagcgtgagcgagttcatcctgctgggcctgagcagcagacccgaggaccagaagaccctgttcgtgctgttcctgatcgtgtacctggtgaccatcaccggcaacctgctgatcatcctggccatcagattcaacccccacctgcagacccccatgtacttcttcctgagcttcctgagcctgaccgacatctgcttcaccaccagcgtggtgcccaagatgctgatgaacttcctgagcgagaagaagaccatcagctacgccggctgcctgacccagatgtacttcctgtacgccctgggcaacagcgacagctgcctgctggccgtgatggccttcgacagatacgtggccgtgtgcgaccccttccactacgtgaccaccatgagccaccaccactgcgtgctgctggtggccttcagctgcagcttcccccacctgcacagcctgctgcacaccctgctgctgaacagactgaccttctgcgacagcaacgtgatccaccacttcctgtgcgacctgagccccgtgctgaagctgagctgcagcagcatcttcgtgaacgagatcgtgcagatgaccgaggcccccatcgtgctggtgaccagattcctgtgcatcgccttcagctacatcagaatcctgaccaccgtgctgaagatccccagcaccagcggcaagagaaaggccttcagcacctgcggcttctacctgaccgtggtgaccctgttctacggcagcatcttctgcgtgtacctgcagccccccagcacctacgccgtgaaggaccacgtggccaccatcgtgtacaccgtgctgagcagcatgctgaaccccttcatctacagcctgagaaacaaggacctgaagcagggcctgagaaagctgatgagcaagagaagctag

SEQ ID NO: 20719 - DNA, 930 bp, Artificial Sequence
  derived and/or modified sequence
atggagcgaattaatcatacaagctccgtatctgaattcatattgttaggattaagctctcgcccagaagatcagaagactctttttgtcctttttctcattgtgtacctagtgacaatcacaggaaacttactgattatcctggcgatacggttcaatcctcacctacagactcccatgtacttcttcttgagcttcctgagtcttaccgacatatgttttacgacttcagtcgtcccaaagatgttgatgaatttcctaagcgagaagaagaccatctcctatgcaggctgtctgacacagatgtatttcttgtatgccctcgggaactctgactcgtgtcttctcgcagtgatggccttcgaccgttacgtggcagtttgtgacccctttcactatgtgaccacaatgagccaccaccactgcgttctgctggtcgcattcagctgctctttcccccacttgcactccctactgcacactttgttgttaaaccgattaactttctgcgactccaatgttatccatcacttcctctgtgatctgtcacctgttctgaagctgagctgctcctccatctttgttaatgagatagttcagatgactgaggcacctattgtccttgtcactcgttttctctgtattgccttctcctatattaggattctcaccaccgtgctgaagattcctagtacatcaggaaaaagaaaagcatttagcacctgtggattctacctgacagttgttacacttttttacgggagcatcttctgcgtgtacctgcagccaccttctacatacgcagtaaaagatcatgtcgctacaatcgtgtatacagtgctcagttcaatgctgaatccctttatctattcactaaggaacaaagatctgaagcagggactccgaaaacttatgagcaaaaggagctag

SEQ ID NO: 20720 - DNA, 930 bp, Artificial Sequence
  derived and/or modified sequence
atggagcgcatcaaccacaccagctctgtgtctgagttcatcctgctgggcctgagcagcaggcctgaggaccagaagaccctgtttgtgctcttcctgattgtgtacctggtgaccatcactggaaacctgctgatcatcctggccatccgcttcaacccccacctgcagacccccatgtacttcttcctgtccttcctgagcctgacagacatctgcttcaccacctctgtggtgcccaagatgctgatgaacttcctgtctgagaagaagaccatctcctatgccggctgcctgacccagatgtacttcctgtatgccctgggcaacagcgacagctgcctgctggccgtgatggcctttgaccgctacgtggccgtgtgtgaccccttccactacgtgaccaccatgagccaccaccactgtgtgctgctggtggccttcagctgcagcttcccccacctgcacagcctgctgcacaccctgctgctgaaccggctgaccttctgtgacagcaatgtcatccaccacttcctgtgtgacctgagccctgtgctgaagctgagctgcagcagcatctttgtgaatgagatcgtgcagatgacagaggcccccatcgtgctggtgacccgcttcctgtgcatcgccttctcctacatccgcatcctgaccaccgtgctgaagatccccagcaccagcggcaagaggaaggccttcagcacctgtggcttctacctgactgtggtgaccctcttctacggcagcatcttctgtgtgtacctgcagccccccagcacctatgctgtgaaggaccacgtggccaccatcgtgtacacagtgctgagctccatgctgaaccccttcatctacagcctgaggaacaaggacctgaagcagggcctgaggaagctgatgagcaagaggagctag

SEQ ID NO: 20721 - DNA, 1061 bp, Artificial Sequence
  derived and/or modified sequence
ttgctaggttctcatgattggtgttatgaaatcagagcatgttaaatgacaaaacttcttgtttataactgagcccaagtcaatggaaagaatcaaccacaccagcagtgtctccgagtttatcctcctgggactctcctcccggcctgaggaccaaaagacactctttgttctcttcctcatcgtgtacctggtcaccataacagggaacctgctcatcatcctggccattcgcttcaacccccatcttcagacccctatgtatttcttcttgagttttctgtctctcactgatatttgctttacaacaagcgttgtccccaagatgctgatgaacttcctgtcagaaaagaagaccatctcctatgctgggtgtctgacacagatgtattttctctatgccttgggcaacagtgacagctgccttctggcagtcatggcctttgaccgctatgtggccgtctgtgaccctttccactatgtcaccaccatgagccaccaccactgtgtcctgctggtggccttctcctgctcatttcctcacctccactcactcctgcacacacttctgctgaatcgtctcaccttctgtgactccaatgttatccaccactttctctgtgacctcagccctgtgctgaaattgtcctgctcttccatatttgtcaatgaaattgtgcagatgacagaagcacctattgttttggtgactcgttttctctgcattgctttctcttatatacgaatcctcactacagttctcaagattccctctacttctgggaaacgcaaagccttctccacctgtggtttttacctcaccgtggtgacgctcttttatggaagcatcttctgtgtctatttacagcccccatccacctacgctgtcaaggaccacgtggcaacaattgtttacacagttttgtcatccatgctcaatccttttatctacagcctgagaaacaaagacctgaaacagggcctgaggaagcttatgagcaagagatcctaggaagcaccctcttgaaaaactcgtaagtggaatctgctcaacttggacg

SEQ ID NO: 20722 - DNA, 930 bp, Artificial Sequence
  derived and/or modified sequence
atggagcggatcaaccacaccagcagcgtgagcgagttcatcctgctcgggctgtccagtcgtccggaggaccaaaaaactctgttcgtgctgtttctgattgtgtacctggttaccattactggcaatttgctgatcatcttagcgattcggttcaatccgcatttgcaaacacccatgtatttctttctgtcatttctgagcctgacggacatatgtttcacaacctcagtggtcccaaaaatgctcatgaactttctgagcgagaaaaaaacaatctcttatgccggttgtctgactcagatgtactttctttacgcactagggaactccgattcttgccttctcgccgtcatggccttcgaccgatacgtggcagtgtgcgatccattccactacgtgacgactatgagccatcatcattgcgttctgctggtggccttttcttgtagcttcccgcacctgcactctctgctacatacccttcttctcaatcgcctgacattttgcgatagtaacgtgatccaccattttctgtgcgatctgagccctgtccttaagctttcttgctcctccattttcgttaatgaaatcgtgcagatgacagaggctcctatcgtactggtcacacggtttctctgtatcgcgttcagttacattaggattctgactacggtgctaaagattccttctaccagtggcaagaggaaggcattttccacttgtggcttttatttgaccgtcgtcactcttttttatggctcaatcttttgcgtgtatctccagcctccttcgacatatgccgtgaaggatcatgtcgctactatagtttacacggtgctcagtagtatgctaaaccccttcatatattcactacgaaacaaagatttgaagcagggcttaagaaaattgatgtcaaagcgcagttag

SEQ ID NO: 20723 - DNA, 930 bp, Artificial Sequence
  derived and/or modified sequence
atggagcgcatcaaccatacatcctcggtgtctgagttcattttactggggctatcctcaagacctgaagatcagaagacattgtttgtgctgtttctgattgtctacctggttacgattactggaaatttactcataattttggccatcagattcaacccacacttgcaaacccctatgtacttttttctctcctttctgtctctgactgatatttgttttacgacgtctgtagtacctaagatgctgatgaatttcctctccgagaagaagaccatcagctacgccggatgtttgacacaaatgtatttcttgtatgcactcggcaatagcgactcttgcctgctggctgttatggcattcgatcgctacgtggccgtttgcgacccatttcactacgtgaccactatgtcccatcaccattgcgtgttacttgtcgcattctcatgttcgtttcctcaccttcacagcctcctccacacattgctgttgaacagactcaccttttgcgattccaatgtaattcatcacttcctgtgtgatctttcccctgttctcaaacttagctgctcaagtatcttcgtgaatgagatcgtgcaaatgacagaagctccgattgtgctggttacaaggtttctatgtattgcattctcatatatccgcatcctgactactgttctcaagatcccttccacttccggcaagcgtaaagctttttctacctgtggcttctacctgactgtagtgacactcttctatggttcaatattctgcgtttaccttcagccgccttctacctacgccgtgaaggaccacgtggctacaatagtttatacggtactatcctccatgcttaacccctttatttactcacttcggaacaaggacttgaagcaaggtctgagaaaactcatgtccaagagatcatag

SEQ ID NO: 20724 - protein, 316 aa, Artificial Sequence
  derived and/or modified sequence
ITPMEPRNQTSASQFILLGLSEKPEQETLLFSLFFCMYLVMVVGNLLIILAISIDSHLHTPMYFFLANLSLVDFCLATNTIPKMLVSLQTGSKAISYPCCLIQMYFFHFFGIVDSVIIAMMAYDRFVAICHPLHYAKIMSLRLCRLLVGALWAFSCFISLTHILLMARLVFCGSHEVPHYFCDLTPILRLSCTDTSVNRIFILIVAGMVIATPFVCILASYARILVAIMKVPSAGGRKKAFSTCSSHLSVVALFYGTTIGVYLCPSSVLTTVKEKASAVMYTAVTPMLNPFIYSLRNRDLKGALRKLVNRKITSSS

SEQ ID NO: 20725 - protein, 313 aa, Artificial Sequence
  derived and/or modified sequence
MEPRNQTSASQFILLGLSEKPEQETLLFSLFFCMYLVMVVGNLLIILAISIDSHLHTPMYFFLANLSLVDFCLATNTIPKMLVSLQTGSKAISYPCCLIQMYFFHFFGIVDSVIIAMMAYDRFVAICHPLHYAKIMSLRLCRLLVGALWAFSCFISLTHILLMARLVFCGSHEVPHYFCDLTPILRLSCTDTSVNRIFILIVAGMVIATPFVCILASYARILVAIMKVPSAGGRKKAFSTCSSHLSVVALFYGTTIGVYLCPSSVLTTVKEKASAVMYTAVTPMLNPFIYSLRNRDLKGALRKLVNRKITSSS

SEQ ID NO: 20726 - DNA, 951 bp, Artificial Sequence
  derived and/or modified sequence
atcacccccatggagcccagaaaccagaccagcgccagccagttcatcctgctgggcctgagcgagaagcccgagcaggagaccctgctgttcagcctgttcttctgcatgtacctggtgatggtggtgggcaacctgctgatcatcctggccatcagcatcgacagccacctgcacacccccatgtacttcttcctggccaacctgagcctggtggacttctgcctggccaccaacaccatccccaagatgctggtgagcctgcagaccggcagcaaggccatcagctacccctgctgcctgatccagatgtacttcttccacttcttcggcatcgtggacagcgtgatcatcgccatgatggcctacgacagattcgtggccatctgccaccccctgcactacgccaagatcatgagcctgagactgtgcagactgctggtgggcgccctgtgggccttcagctgcttcatcagcctgacccacatcctgctgatggccagactggtgttctgcggcagccacgaggtgccccactacttctgcgacctgacccccatcctgagactgagctgcaccgacaccagcgtgaacagaatcttcatcctgatcgtggccggcatggtgatcgccacccccttcgtgtgcatcctggccagctacgccagaatcctggtggccatcatgaaggtgcccagcgccggcggcagaaagaaggccttcagcacctgcagcagccacctgagcgtggtggccctgttctacggcaccaccatcggcgtgtacctgtgccccagcagcgtgctgaccaccgtgaaggagaaggccagcgccgtgatgtacaccgccgtgacccccatgctgaaccccttcatctacagcctgagaaacagagacctgaagggcgccctgagaaagctggtgaacagaaagatcaccagcagcagctag

SEQ ID NO: 20727 - DNA, 942 bp, Artificial Sequence
  derived and/or modified sequence
atggagcccagaaaccagaccagcgccagccagttcatcctgctgggcctgagcgagaagcccgagcaggagaccctgctgttcagcctgttcttctgcatgtacctggtgatggtggtgggcaacctgctgatcatcctggccatcagcatcgacagccacctgcacacccccatgtacttcttcctggccaacctgagcctggtggacttctgcctggccaccaacaccatccccaagatgctggtgagcctgcagaccggcagcaaggccatcagctacccctgctgcctgatccagatgtacttcttccacttcttcggcatcgtggacagcgtgatcatcgccatgatggcctacgacagattcgtggccatctgccaccccctgcactacgccaagatcatgagcctgagactgtgcagactgctggtgggcgccctgtgggccttcagctgcttcatcagcctgacccacatcctgctgatggccagactggtgttctgcggcagccacgaggtgccccactacttctgcgacctgacccccatcctgagactgagctgcaccgacaccagcgtgaacagaatcttcatcctgatcgtggccggcatggtgatcgccacccccttcgtgtgcatcctggccagctacgccagaatcctggtggccatcatgaaggtgcccagcgccggcggcagaaagaaggccttcagcacctgcagcagccacctgagcgtggtggccctgttctacggcaccaccatcggcgtgtacctgtgccccagcagcgtgctgaccaccgtgaaggagaaggccagcgccgtgatgtacaccgccgtgacccccatgctgaaccccttcatctacagcctgagaaacagagacctgaagggcgccctgagaaagctggtgaacagaaagatcaccagcagcagctag

SEQ ID NO: 20728 - DNA, 951 bp, Artificial Sequence
  derived and/or modified sequence
ataacacccatggagcctcggaaccaaacatctgcttctcaattcattctccttggactgagcgagaagcccgaacaggagacactgctgttctcactgttcttttgcatgtatttggtaatggtagtgggtaacctcctcatcattctagccatctcaatcgattcacacctgcatacacccatgtatttcttcctcgcaaacctgtcactggtggatttctgcctggctaccaacacaatcccgaaaatgctggtatcactccaaactgggagtaaggccatttcttacccatgttgtctcattcagatgtattttttccatttctttggaatagtcgattctgtaatcatcgcaatgatggcatacgatcgattcgttgccatatgtcacccactgcattatgcaaagataatgagcctgaggctttgtaggttgctggtcggagccctctgggcatttagctgctttatcagtcttacgcatattctgctcatggccaggctagtcttttgtgggagccacgaggttccgcattacttttgtgatcttacccccatccttcgcctcagctgtaccgacacttctgttaaccgaatattcatactgatcgtggctggaatggtgatcgctaccccttttgtgtgcattctcgcttcatatgccaggattctggttgcgatcatgaaagtgccaagtgccggagggagaaagaaggctttctctacctgctccagtcatttgtctgtcgtcgcccttttttacggcacaaccattggtgtgtacctgtgtccctcctccgttctcaccacggtaaaagagaaggcatccgccgttatgtatacagctgtgactcccatgctgaatccgttcatttactcgttgaggaaccgggacctcaagggtgctttgcgaaagctcgtcaataggaagatcacttccagtagctag

SEQ ID NO: 20729 - DNA, 942 bp, Artificial Sequence
  derived and/or modified sequence
atggaaccgcgaaatcagacaagcgcttcacaattcattctgctggggttaagtgaaaaacctgagcaggagaccctgctgttctccctattcttctgtatgtacctggtgatggttgtcgggaatttgctgatcattttggctatcagcatcgattcccatttgcacaccccaatgtacttcttcttggcaaatctcagccttgttgacttctgcttggctacaaacaccattcccaagatgctagtgtccttacaaacaggatcaaaggccatctcatacccctgctgtcttatacagatgtacttcttccatttctttggaattgtagacagcgtaatcattgctatgatggcctatgataggttcgtcgccatttgccatccactacattacgctaagataatgagcttacgattgtgtcggctcctggtgggagccctgtgggctttttcatgttttataagcctgacacacatcttgttgatggcccgcctggtcttctgcggatctcacgaagtcccacactacttctgtgatctaacccccattctccgcctcagctgcaccgacacgagcgttaatcggatcttcattctcatcgttgcaggaatggtaatcgccacgcccttcgtgtgtatcctagcatcatatgcccgaatcctagtggccataatgaaagtgcctagtgccggcggaagaaagaaggcattctcaacatgcagctcacatctgagcgtggtcgccctcttctacggaaccacgataggcgtctatttgtgtcccagctctgtccttacaaccgtgaaagaaaaagcttcagccgtcatgtacaccgccgtcacccccatgctaaatccttttatttactctctccgcaacagggatctgaaaggagcccttcgtaagctcgtgaaccgtaagatcacttccagctcttag

SEQ ID NO: 20730 - DNA, 951 bp, Artificial Sequence
  derived and/or modified sequence
atcacccccatggagcccaggaaccagaccagcgccagccagttcatcctgctgggcctgtctgagaagccagagcaggagaccctgctcttcagcctcttcttctgcatgtacctggtgatggtggtgggcaacctgctgatcatcctggccatcagcattgacagccacctgcacacccccatgtacttcttcctggccaacctgagcctggtggacttctgcctggccaccaacaccatccccaagatgctggtgtccctgcagacaggcagcaaggccatctcctacccctgctgcctgatccagatgtacttcttccacttcttcggcatcgtggacagcgtcatcatcgccatgatggcctatgacagatttgtggccatctgccaccccctgcactacgccaagatcatgagcctgcggctgtgccgcctgctggtgggcgccctgtgggccttcagctgcttcatcagcctgacccacatcctgctgatggcccggctggtgttctgtggcagccatgaggtgccccactacttctgtgacctgacccccatcctgcggctgagctgcacagacacctctgtgaaccgcatcttcatcctgattgtggccggcatggtgattgccaccccatttgtgtgcatcctggccagctatgcccgcatcctggtggccatcatgaaggtgcccagcgctgggggcaggaagaaggccttcagcacctgcagcagccacctgtctgtggtggccctcttctacggcaccaccatcggcgtgtacctgtgccccagctctgtgctgaccaccgtgaaggagaaggccagcgctgtgatgtacacagctgtgacccccatgctgaaccccttcatctacagcctgaggaacagagacctgaagggggccctgaggaagctggtgaacaggaagatcaccagcagcagctag

SEQ ID NO: 20731 - DNA, 942 bp, Artificial Sequence
  derived and/or modified sequence
atggagcccaggaaccagaccagcgccagccagttcatcctgctgggcctgtctgagaagccagagcaggagaccctgctcttcagcctcttcttctgcatgtacctggtgatggtggtgggcaacctgctgatcatcctggccatcagcattgacagccacctgcacacccccatgtacttcttcctggccaacctgagcctggtggacttctgcctggccaccaacaccatccccaagatgctggtgtccctgcagacaggcagcaaggccatctcctacccctgctgcctgatccagatgtacttcttccacttctttggaattgtggacagcgtcatcatcgccatgatggcctatgacagatttgtggccatctgccaccccctgcactacgccaagatcatgagcctgcggctgtgccgcctgctggtgggcgccctgtgggccttcagctgcttcatcagcctgacccacatcctgctgatggcccggctggtgttctgtggcagccatgaggtgccccactacttctgtgacctgacccccatcctgcggctgagctgcacagacacctctgtgaaccgcatcttcatcctgattgtggccggcatggtgattgccaccccatttgtgtgcatcctggccagctatgcccgcatcctggtggccatcatgaaggtgcccagcgctgggggcaggaagaaggccttcagcacctgcagcagccacctgtctgtggtggccctcttctacggcaccaccatcggcgtgtacctgtgccccagctctgtgctgaccaccgtgaaggagaaggccagcgctgtgatgtacacagctgtgacccccatgctgaaccccttcatctacagcctgaggaacagagacctgaagggggccctgaggaagctggtgaacaggaagatcaccagcagcagctag

SEQ ID NO: 20732 - DNA, 1035 bp, Artificial Sequence
  derived and/or modified sequence
ttccaaaaccatctccctgtcattcctataacctcccctttccatacttccagaggaatcacacccatggaaccaagaaaccaaaccagtgcatctcaattcatcctcctgggactctcagaaaagccagagcaggagacgcttctcttttccctgttcttctgcatgtacctggtcatggtcgtggggaacctgctcatcatcctggccatcagcatagactcccacctccacacccccatgtacttcttcctggccaacctgtccctggttgatttctgtctggccaccaacaccatccctaagatgctggtgagccttcaaaccgggagcaaggccatctcttatccctgctgcctgatccagatgtacttcttccatttctttggcatcgtggacagcgtcataatcgccatgatggcttatgaccggttcgtggccatctgccacccattgcactacgccaagatcatgagcctacgcctctgtcgcctgctggtcggcgccctctgggcgttttcctgcttcatctcactcactcacatcctcctgatggcccgtctcgttttctgcggcagccatgaggtgcctcactacttctgcgacctcactcccatcctccgactttcgtgcacggacacctctgtgaataggatcttcatcctcattgtggcagggatggtgatagccacgccctttgtctgcatcctggcctcctatgctcgcatccttgtggccatcatgaaggtcccctctgcaggcggcaggaagaaagccttctccacctgcagctcccacctgtctgtggttgctctcttctatgggaccaccattggcgtctatctgtgtccctcctcggtcctcaccactgtgaaggagaaagcttctgcggtgatgtacacagcagtcacccccatgctgaatcccttcatctacagcttgaggaacagagacctgaaaggggctctcaggaagctggtcaacagaaagatcacctcatcttcctgaccaccaggactcaggaacttctggggg

SEQ ID NO: 20733 - DNA, 942 bp, Artificial Sequence
  derived and/or modified sequence
atggaaccaagaaaccaaaccagtgcatctcaattcatcctcctgggactctcagaaaagccagagcaggagacgcttctcttttccctgttcttctgcatgtacctggtcatggtcgtggggaacctgctcatcatcctggccatcagcatagactcccacctccacacccccatgtacttcttcctggccaacctgtccctggttgatttctgtctggccaccaacaccatccctaagatgctggtgagccttcaaaccgggagcaaggccatctcttatccctgctgcctgatccagatgtacttcttccatttctttggcatcgtggacagcgtcataatcgccatgatggcttatgaccggttcgtggccatctgccacccattgcactacgccaagatcatgagcctacgcctctgtcgcctgctggtcggcgccctctgggcgttttcctgcttcatctcactcactcacatcctcctgatggcccgtctcgttttctgcggcagccatgaggtgcctcactacttctgcgacctcactcccatcctccgactttcgtgcacggacacctctgtgaataggatcttcatcctcattgtggcagggatggtgatagccacgccctttgtctgcatcctggcctcctatgctcgcatccttgtggccatcatgaaggtcccctctgcaggcggcaggaagaaagccttctccacctgcagctcccacctgtctgtggttgctctcttctatgggaccaccattggcgtctatctgtgtccctcctcggtcctcaccactgtgaaggagaaagcttctgcggtgatgtacacagcagtcacccccatgctgaatcccttcatctacagcttgaggaacagagacctgaaaggggctctcaggaagctggtcaacagaaagatcacctcatcttcctga

SEQ ID NO: 20734 - DNA, 951 bp, Artificial Sequence
  derived and/or modified sequence
atcacccccatggagccccggaaccagaccagcgccagccagttcattctgctggggctgagcgaaaaaccagaacaggaaactttgctgttctccttgttcttttgcatgtacctggtcatggtggtcggaaacttgctgattatcctcgcaatctccattgactcacatctgcacacccctatgtattttttcctcgcaaacttgagcctggttgacttttgccttgctaccaacactatacccaaaatgctggtcagcctccaaaccggttctaaggcgatctcttatccatgttgtctgattcaaatgtactttttccacttttttggcattgttgatagtgtgattattgccatgatggcgtatgaccggtttgtggctatttgccatcctctgcactatgccaagattatgagcctgcgactgtgcagactgctggtgggagccctgtgggcattttcttgtttcatcagtttgactcatattctcctcatggctcgcctcgtgttctgtggttcccacgaagttccacactatttctgtgatctgacccctattctccgcctgtcatgcactgacacctcagttaataggatattcattctgatagtggcggggatggtgatcgctaccccattcgtctgcatcctggcctcatacgcccgtatactcgtggctatcatgaaggttccgtccgctggcggtagaaaaaaggccttttccacatgctctagtcatctttcagtagtcgcactgttctacggcactactattggcgtatatctgtgcccttcttctgtcctcacaacagtaaaggagaaggcgtcggctgtgatgtatactgctgtaacccctatgctcaatcctttcatctacagcttgcgcaaccgcgatctgaagggagcactgcggaagctggtgaacaggaagatcacaagtagtagctag

SEQ ID NO: 20735 - DNA, 942 bp, Artificial Sequence
  derived and/or modified sequence
atggagccccggaaccagaccagcgccagccagttcatcctgctgggcttatctgagaagcccgagcaggaaaccctccttttcagcctattcttctgcatgtacctcgtcatggtggttgggaacctgctgatcatccttgccattagtatagatagccacctacatacacccatgtacttctttctggccaacctctctcttgtggacttctgtctcgctaccaacaccatccctaaaatgctggtcagcctccagaccggcagcaaggctataagctacccttgttgcctaatccaaatgtatttcttccattttttcggtatcgtcgatagtgtcatcatcgccatgatggcgtacgaccgcttcgtcgctatttgtcacccgttgcactatgccaaaatcatgagcctcagactttgcagactgcttgtaggtgctttgtgggcctttagctgcttcatttctttaacacacatcctactgatggcccggctggtcttttgcggcagccacgaggtcccacattacttttgtgacctgactcctattctcaggctcagctgcacggacacctccgtgaaccggatcttcatacttattgttgccggaatggtgatcgcgacccccttcgtttgcatactggcaagttacgctaggatactggtcgctattatgaaagtccctagtgctgggggtaggaaaaaggctttctccacttgttcaagccatctgtccgtcgtagcgctgttctatggcaccacaataggagtgtatctgtgcccttcatcagtgctaacgaccgtaaaagagaaagctagcgcagtcatgtataccgcggtgacacctatgctaaacccatttatctacagcttgcgcaacagggacctgaagggtgccctgaggaaactggtgaacaggaagataacctcgtcctcctag

SEQ ID NO: 20736 - DNA, 951 bp, Artificial Sequence
  derived and/or modified sequence
attacacccatggaaccgagaaatcagacgagcgcatctcagttcattctcctcgggctgtctgaaaagcccgagcaggaaacactcctgtttagtttgtttttttgtatgtacctagttatggtggtggggaatctgctgatcatacttgcgatctctatcgactcacatttgcatacacccatgtacttttttttggcaaacctttctcttgtggatttctgtctggctaccaatactattcccaaaatgttggtttctctgcagaccggcagtaaggccatctcttacccgtgttgcttaattcagatgtattttttccatttctttggcatcgtagactcagtgatcatcgccatgatggcctatgatagatttgtcgccatttgccaccctctgcattatgcaaagatcatgtcacttagactgtgtcgactgctggttggcgctctgtgggcgttttcttgcttcatctctctgacgcatatattactgatggcccgattagtattctgcgggagccacgaggtaccccactatttttgcgacctgacgcccatcttaaggctgagttgcacagacacatccgttaatcgaattttcatcttaatcgtggccggaatggtaatcgcaacccccttcgtttgcattctggcttcttacgcccgaatacttgtggctatcatgaaagtcccatcagcaggagggaggaaaaaggcattctccacctgtagctcacatctgagtgtggtggctcttttttacggaacaacgataggcgtgtacctgtgtcctagttccgtgttaacaactgtcaaggagaaggccagcgccgtcatgtacaccgcagtcacaccaatgttaaatccattcatatattcactgcgcaaccgcgatctcaaaggtgcactgagaaagctcgtaaataggaagatcacaagctcctcctag

SEQ ID NO: 20737 - DNA, 942 bp, Artificial Sequence
  derived and/or modified sequence
atggaaccaagaaatcagaccagtgccagccagtttattctcctgggcctaagtgagaagccagaacaggagacactgctattcagcctgtttttttgcatgtatctcgtgatggtagtagggaacttgctcatcatcctcgctatttcaatcgattcccacctgcacacccccatgtacttcttcctggcgaacctgtctctcgtggatttttgcttggctacaaatacgatcccgaagatgctcgtgtcgcttcagaccggctccaaggcgatcagttatccctgttgtcttattcagatgtattttttccatttttttggcatcgtagactcagtcataatagcaatgatggcttacgacagatttgtggcaatatgtcatcccctccattacgctaaaattatgagcctgcggctgtgtagactactggtgggcgcactgtgggctttcagttgttttatctccctcacccacatactgctaatggccagactggttttctgtggcagccacgaagtgccgcactatttttgtgaccttactcccattctcaggctgagctgcacagatacatcagtcaatcgaatttttattcttatcgtggccggtatggttatcgctacccccttcgtgtgtatactggccagctacgctcggatccttgtagcaattatgaaggttccctctgcgggtgggaggaagaaggctttctcgacatgttcgtcccatctcagcgtagtagcactgttttacggcacaactatcggcgtttatctttgtccctcgtcagttctcactaccgtgaaggaaaaggcttcagcagttatgtataccgcggtgacacctatgttgaatccctttatctattcactgcggaatcgcgatctgaaaggggctcttcgtaagctcgttaacagaaaaatcacttcatcatcgtag

SEQ ID NO: 20738 - protein, 330 aa, Artificial Sequence
  derived and/or modified sequence
MEGFYLRRSHELQGMGKPGRVNQTTVSDFLLLGLSEWPEEQPLLFGIFLGMYLVTMVGNLLIILAISSDPHLHTPMYFFLANLSLTDACFTSASIPKMLANIHTQSQIISYSGCLAQLYFLLMFGGLDNCLLAVMAYDRYVAICQPLHYSTSMSPQLCALMLGVCWVLTNCPALMHTLLLTRVAFCAQKAIPHFYCDPSALLKLACSDTHVNELMIITMGLLFLTVPLLLIVFSYVRIFWAVFVISSPGGRWKAFSTCGSHLTVVLLFYGSLMGVYLLPPSTYSTERESRAAVLYMVIIPTLNPFIYSLRNRDMKEALGKLFVSGKTFFL

SEQ ID NO: 20739 - DNA, 993 bp, Artificial Sequence
  derived and/or modified sequence
atggagggcttctacctgagaagaagccacgagctgcagggcatgggcaagcccggcagagtgaaccagaccaccgtgagcgacttcctgctgctgggcctgagcgagtggcccgaggagcagcccctgctgttcggcatcttcctgggcatgtacctggtgaccatggtgggcaacctgctgatcatcctggccatcagcagcgacccccacctgcacacccccatgtacttcttcctggccaacctgagcctgaccgacgcctgcttcaccagcgccagcatccccaagatgctggccaacatccacacccagagccagatcatcagctacagcggctgcctggcccagctgtacttcctgctgatgttcggcggcctggacaactgcctgctggccgtgatggcctacgacagatacgtggccatctgccagcccctgcactacagcaccagcatgagcccccagctgtgcgccctgatgctgggcgtgtgctgggtgctgaccaactgccccgccctgatgcacaccctgctgctgaccagagtggccttctgcgcccagaaggccatcccccacttctactgcgaccccagcgccctgctgaagctggcctgcagcgacacccacgtgaacgagctgatgatcatcaccatgggcctgctgttcctgaccgtgcccctgctgctgatcgtgttcagctacgtgagaatcttctgggccgtgttcgtgatcagcagccccggcggcagatggaaggccttcagcacctgcggcagccacctgaccgtggtgctgctgttctacggcagcctgatgggcgtgtacctgctgccccccagcacctacagcaccgagagagagagcagagccgccgtgctgtacatggtgatcatccccaccctgaaccccttcatctacagcctgagaaacagagacatgaaggaggccctgggcaagctgttcgtgagcggcaagaccttcttcctgtag

SEQ ID NO: 20740 - DNA, 993 bp, Artificial Sequence
  derived and/or modified sequence
atggagggcttctatctgaggcgctctcacgagctccaaggaatgggaaaacctggccgtgtgaatcagacgactgtcagtgacttcctgctgctcgggctcagtgagtggcctgaagagcagcccctgctattcggcatctttttaggaatgtatttagtgaccatggtggggaacctgctgatcattttggctatttccagtgatccacatttgcacactcccatgtactttttcctggccaatttatcgctcaccgacgcctgcttcacttctgcctcaatccctaagatgttggctaatatccacacccaatcccagattatatcatacagcggctgcctggcacaactgtactttttactgatgttcggaggcctcgacaactgcttactcgctgtgatggcctacgaccgctacgtggctatatgccagccattgcactattctacaagtatgtccccccaactgtgtgccctcatgttgggtgtgtgttgggtgctcactaactgcccagcactgatgcacactctcctgctaaccagagttgccttttgtgcccaaaaagcgataccccacttttattgtgacccctcggcgctgctcaaactggcctgttcagacacacacgtgaacgaactcatgatcatcacgatgggccttctgtttttgaccgtaccactgttactcatagtgttttcctatgtccgcattttttgggctgtgtttgtcatctcttcccctggaggcagatggaaggctttcagcacttgcggatcacacttaactgtggtgctcctcttctacggttctctaatgggcgtatacttgttacccccaagtacctacagtactgagagggaaagccgcgctgccgtcttatacatggtgatcataccaactctcaaccccttcatatactccctccggaacagggacatgaaggaggcgttaggcaagctgttcgtgagcggcaagacatttttcctatag

SEQ ID NO: 20741 - DNA, 993 bp, Artificial Sequence
  derived and/or modified sequence
atggagggcttctacctgcggcgcagccatgagctgcagggcatgggcaagccaggccgggtgaaccagaccaccgtgtctgacttcctgctgctgggcctgtctgagtggccagaggagcagcccctgctgtttggcatcttcctgggcatgtacctggtgaccatggtgggcaacctgctgatcatcctggccatcagcagtgacccccacctgcacacccccatgtacttcttcctggccaacctgagcctgacagatgcctgcttcaccagcgccagcatccccaagatgctggccaacatccacacccagagccagatcatctcctacagcggctgcctggcccagctgtacttcctgctgatgtttggaggcctggacaactgcctgctggccgtgatggcctatgaccgctacgtggccatctgccagcccctgcactacagcacctccatgagcccccagctgtgtgccctgatgctgggcgtgtgctgggtgctgaccaactgcccagccctgatgcacaccctgctgctgaccagggtggccttctgtgcccagaaggccatcccccacttctactgtgaccccagcgccctgctgaagctggcctgcagcgacacccacgtgaatgagctgatgatcatcaccatgggcctgctcttcctgactgtgcccctgctgctgattgtgttctcctatgtgcgcatcttctgggccgtgtttgtgatcagcagccctgggggccgctggaaggccttcagcacctgtggcagccacctgactgtggtgctgctcttctacggcagcctgatgggcgtgtacctgctgccccccagcacctacagcacagagcgggagagcagagctgctgtgctgtacatggtgatcatccccaccctgaaccccttcatctacagcctgaggaacagagacatgaaggaggccctgggcaagctgtttgtgtctgggaagaccttcttcctgtag

SEQ ID NO: 20742 - DNA, 1103 bp, Artificial Sequence
  derived and/or modified sequence
cagttctggccacacagatgcatatctgtaaattgatctaataaataaatactgacacatggaaggtttttatctgcgcagatcacacgaactacaagggatgggaaaaccaggcagagtgaaccaaaccactgtttcagacttcctccttctaggactctctgagtggccagaggagcagcctcttctgtttggcatcttccttggcatgtacctggtcaccatggtggggaacctgctcattatcctggccatcagctctgacccacacctccatactcccatgtacttctttctggccaacctgtcattaactgatgcctgtttcacttctgcctccatccccaaaatgctggccaacattcatacccagagtcagatcatctcgtattctgggtgtcttgcacagctatatttcctccttatgtttggtggccttgacaactgcctgctggctgtgatggcatatgaccgctatgtggccatctgccaaccactccattacagcacatctatgagtccccagctctgtgcactaatgctgggtgtgtgctgggtgctaaccaactgtcctgccctgatgcacacactgttgctgacccgcgtggctttctgtgcccagaaagccatccctcatttctattgtgatcctagtgctctcctgaagcttgcctgctcagatacccatgtaaacgagctgatgatcatcaccatgggcttgctgttcctcactgttcccctcctgctgatcgtcttctcctatgtccgcattttctgggctgtgtttgtcatctcatctcctggagggagatggaaggccttctctacctgtggttctcatctcacggtggttctgctcttctatgggtctcttatgggtgtgtatttacttcctccatcaacttactctacagagagggaaagtagggctgctgttctctatatggtgattattcccacgctaaacccattcatttatagcttgaggaacagagacatgaaggaggctttgggtaaactttttgtcagtggaaaaacattctttttatgattagacatctagacggtgatgtctaatcttgatcaacccctccctgtcttcc

SEQ ID NO: 20743 - DNA, 993 bp, Artificial Sequence
  derived and/or modified sequence
atggagggcttctacctgcggcggagccacgagctgcagggcatgggcaaacccgggcgggtgaatcagaccaccgtgtcggactttttactacttggcctgtccgagtggccagaagaacagccactcctatttggcatattcctgggaatgtacctggtaaccatggtcggaaatttgctcattatccttgctatcagttccgaccctcatcttcacacaccgatgtatttctttctggctaatttgtctctgaccgacgcttgctttactagtgctagcattcccaagatgcttgccaacatacacacccaaagccaaatcatctcttattccgggtgcctggcccaactgtattttctcctcatgttcggtgggctagacaactgcctcctggccgtgatggcatacgatcgttatgtggcgatttgccagccactccactactctacctcgatgagcccacagctctgtgcactaatgttaggcgtgtgctgggtgctcactaactgccccgctctgatgcatacattattactgacacgcgtggccttttgcgcccaaaaagctataccgcacttttattgcgatccatctgcgctgctcaaactcgcgtgctctgacacccatgttaatgagctgatgatcattaccatgggacttctgtttctgactgtacccttgttgctcatcgtattctcatacgtgaggatcttctgggctgtattcgtcatctcttcccccgggggccgatggaaagcattttcaacctgtgggtctcacctgacggtcgtcctgcttttctatgggagcctcatgggggtctatctccttccgcctagcacctactcaactgagcgcgaatccagagctgcggttttatacatggtaattatccccacactgaaccctttcatctactcactcagaaacagagacatgaaggaagctctcgggaagctgttcgtgtccggaaaaacctttttcctgtag

SEQ ID NO: 20744 - DNA, 993 bp, Artificial Sequence
  derived and/or modified sequence
atggaagggttctacctaaggcgttcccacgaattgcaggggatgggaaagcctggccgagttaaccaaacaacggtaagcgatttcctgctgctgggcttaagtgaatggcccgaggaacagcctctgctttttggaatttttctgggcatgtatctggtcacaatggtcgggaatctgctcatcatcctggctatttcctcagacccacatttgcatacacccatgtacttcttcctggcaaatctgtctctcacagacgcatgcttcacgtccgcctcgataccaaagatgctcgccaatattcatacccaaagccaaattattagttacagcggatgtctcgcacagttgtactttctgctaatgttcggcggactcgacaattgtttgctcgcggtcatggcgtacgatagatacgtggctatctgccaacccttgcactactccacctcaatgtcacctcagctgtgcgccttaatgctgggagtgtgttgggtcctgacaaattgtcccgctctaatgcacacacttctgctcactcgcgttgctttctgcgcgcaaaaagctatcccacacttttactgcgatccgtctgccctgctgaagcttgcctgcagcgatacccacgtcaacgagctaatgataataaccatggggctcttgttcctcacagtccctctgctcctgatagttttttcctacgtgcgcattttctgggcagtgttcgtgatcagtagccctggcggacggtggaaagcattctctacctgtgggagccacctgactgtcgtgttactcttttatgggtcccttatgggggtctacctgctccccccatctacttacagcacagaacgcgagtccagggctgccgtgctgtacatggtcatcatcccgactctgaacccattcatctacagcctgcgtaatagagacatgaaggaggcactcggaaagctttttgtcagcgggaagacatttttcctgtag

SEQ ID NO: 20745 - protein, 303 aa, Artificial Sequence
  derived and/or modified sequence
MSFSSLPTEIQSLLFLTFLTIYLVTLMGNCLIILVTLADPMLHSPMYFFLRNLSFLEIGFNLVIVPKMLGTLLAQDTTISFLGCATQMYFFFFFGVAECFLLATMAYDRYVAICSPLHYPVIMNQRTRAKLAAASWFPGFPVATVQTTWLFSFPFCGTNKVNHFFCDSPPVLRLVCADTALFEIYAIVGTILVVMIPCLLILCSYTHIAAAILKIPSAKGKNKAFSTCSSHLLVVSLFYISLSLTYFRPKSNNSPEGKKLLSLSYTVMTPMLNPIIYSLRNNEVKNALSRTVSKALALRNCIP

SEQ ID NO: 20746 - DNA, 912 bp, Artificial Sequence
  derived and/or modified sequence
atgagcttcagcagcctgcccaccgagatccagagcctgctgttcctgaccttcctgaccatctacctggtgaccctgatgggcaactgcctgatcatcctggtgaccctggccgaccccatgctgcacagccccatgtacttcttcctgagaaacctgagcttcctggagatcggcttcaacctggtgatcgtgcccaagatgctgggcaccctgctggcccaggacaccaccatcagcttcctgggctgcgccacccagatgtacttcttcttcttcttcggcgtggccgagtgcttcctgctggccaccatggcctacgacagatacgtggccatctgcagccccctgcactaccccgtgatcatgaaccagagaaccagagccaagctggccgccgccagctggttccccggcttccccgtggccaccgtgcagaccacctggctgttcagcttccccttctgcggcaccaacaaggtgaaccacttcttctgcgacagcccccccgtgctgagactggtgtgcgccgacaccgccctgttcgagatctacgccatcgtgggcaccatcctggtggtgatgatcccctgcctgctgatcctgtgcagctacacccacatcgccgccgccatcctgaagatccccagcgccaagggcaagaacaaggccttcagcacctgcagcagccacctgctggtggtgagcctgttctacatcagcctgagcctgacctacttcagacccaagagcaacaacagccccgagggcaagaagctgctgagcctgagctacaccgtgatgacccccatgctgaaccccatcatctacagcctgagaaacaacgaggtgaagaacgccctgagcagaaccgtgagcaaggccctggccctgagaaactgcatcccctag

SEQ ID NO: 20747 - DNA, 912 bp, Artificial Sequence
  derived and/or modified sequence
atgtcgttttcaagcttgcctactgagatccagtctttgcttttcctcacattcctgacaatatacctggtgactctgatgggtaattgtctgattatcctggtgaccctggctgaccctatgctacatagccccatgtactttttccttagaaacctgtctttcctcgaaataggcttcaacctggtcatcgtacccaaaatgctcgggactctgctggcccaagacacgaccatttcattcctgggctgcgctacacagatgtatttcttttttttttttggagttgcggagtgcttcctgctcgctactatggcctacgatcgttatgtcgccatttgcagtcctctccattaccctgtcatcatgaatcagcgaacccgcgctaagctggccgccgcatcctggttcccaggatttcccgtcgccaccgttcaaactacctggctgtttagctttcctttttgcggcacaaataaggttaaccattttttttgcgactccccccctgtacttcggcttgtctgtgccgacacagcactgttcgagatctacgccatagtgggaacaatccttgtggtcatgattccctgtttactcattctgtgtagctatacccacatagcagctgccatacttaaaataccatcagcgaagggaaagaacaaggcatttagcacgtgtagctctcatctgctggtcgttagcctgttctacatctcactttctctgacctattttcggcctaaaagtaacaactcgcccgaaggtaaaaagctgctctccctttcatacacagtgatgactcccatgcttaatccgattatctattccctgcgcaataatgaggtgaagaatgccctatccaggaccgtatcaaaagccttagccctgaggaattgcattccttag

SEQ ID NO: 20748 - DNA, 912 bp, Artificial Sequence
  derived and/or modified sequence
atgtccttcagcagcctgcccacagagatccagagcctgctcttcctgaccttcctgaccatctacctggtgaccctgatgggcaactgcctgatcatcctggtgaccctggccgaccccatgctgcacagccccatgtacttcttcctgaggaacctgtccttcctggagatcggcttcaacctggtgattgtgcccaagatgctgggcaccctgctggcccaggacaccaccatctccttcctgggctgtgccacccagatgtacttcttcttcttcttcggcgtggccgagtgcttcctgctggccaccatggcctatgaccgctacgtggccatctgcagccccctgcactaccctgtgatcatgaaccagaggacccgggccaagctggccgccgcctcctggttccctggcttccctgtggccaccgtgcagaccacctggctgttctccttccccttctgtggcaccaacaaggtgaaccacttcttctgtgacagcccccctgtgctgcggctggtgtgtgccgacacagccctgtttgagatctatgccatcgtgggcaccatcctggtggtgatgatcccctgcctgctgatcctgtgcagctacacccacatcgccgccgccatcctgaagatccccagcgccaagggcaagaacaaggccttcagcacctgcagcagccacctgctggtggtgtccctcttctacatcagcctgagcctgacctacttccggcccaagagcaacaacagccctgagggcaagaagctgctgagcctgagctacacagtgatgacccccatgctgaaccccatcatctacagcctgaggaacaatgaggtgaagaatgccctgagcaggacagtgtccaaggccctggccctgaggaactgcatcccctag

SEQ ID NO: 20749 - DNA, 1053 bp, Artificial Sequence
  derived and/or modified sequence
ggggacttctgcccacacttatagctacaggaaactggacaagaataagtgagtttatcctcatgagcttctcttccctgcctactgaaatacagtcattactctttctgacatttctaaccatctacctggtcaccctgatgggaaactgcctcatcattctggttaccctagctgaccccatgctacacagccccatgtacttcttcctcagaaacttatctttcctggagattggcttcaacctagtcattgtgcccaaaatgctggggaccctgcttgcccaggacacaaccatctccttccttggctgtgccactcagatgtatttcttcttcttctttggagtggctgaatgcttcctcctggctaccatggcatatgaccgctatgtggccatctgcagtcccttgcactacccagtcatcatgaaccaaaggactcgtgccaaactggctgctgcctcctggttcccaggctttcctgtagctactgtgcagaccacatggctcttcagttttccattctgtggcaccaacaaggtgaaccacttcttctgtgacagcccacctgtgctgaggctggtctgtgcagacacagcactctttgagatctacgccatcgtcggaaccattctggtggtcatgatcccctgcttgctgatcttgtgttcctatactcacattgctgctgccatcctcaagatcccatcagctaaagggaagaataaagccttttctacatgttcctcacacctccttgttgtctctcttttctatatatcattaagcctcacctacttccggcctaaatcaaataattcacctgagggcaagaagctgctatcattgtcctacactgttatgactcccatgttgaaccccattatctacagcctgagaaataacgaggtgaagaatgccctcagcaggacggtctctaaggccctagccctcagaaactgtatcccatagaccttaggaagtaaggctacattttactggatgagaaacaatcagtcccagatttgagattcctctctgcatctttcca

SEQ ID NO: 20750 - DNA, 912 bp, Artificial Sequence
  derived and/or modified sequence
atgagcttcagcagcctgcccaccgagatccagagcctgctgttcctcacttttcttaccatttacctcgtgacattgatgggcaactgcctaattatattggtgacgctggcagaccccatgctccatagcccgatgtactttttcctgcgcaatctctcctttttggaaattggctttaatctggtgatcgtgcctaagatgctgggcacattgctggcccaggataccactatctccttcctgggatgcgccacccaaatgtacttctttttcttttttggtgtagccgagtgctttctgttggctacaatggcctatgaccgatatgtagcgatttgcagtcctctgcattatcccgttattatgaaccagaggacccgagctaaattggccgcagcctcttggttccctggttttccagtcgcaaccgtgcagaccacctggctcttcagctttcccttctgtggcactaacaaggtaaatcactttttttgtgacagtccccccgtgctcaggctggtgtgcgctgacacagccttgtttgaaatctacgctatcgtgggcacgatccttgtcgtaatgattccttgtctcttgatcctctgttcctatactcacattgctgctgccattctcaagattccctctgccaaaggcaagaacaaagccttttcaacctgttccagtcatttgctagtcgtgtcccttttttatatttcactgagcctcacgtattttcgacccaagagtaataattctccggaaggcaaaaagctgttgtccctgagctatacagtgatgacgcctatgctaaatccaataatctattccctgcgcaataatgaggtaaagaatgccctcagccgaaccgttagtaaggcactcgccttacgcaactgcatcccttag

SEQ ID NO: 20751 - DNA, 912 bp, Artificial Sequence
  derived and/or modified sequence
atgtctttcagctcacttcccactgaaatccaaagtctcctcttcctgacatttctgactatctatctcgtaacactgatgggcaattgtctgattatcctggttaccctcgccgacccaatgcttcactctcctatgtacttcttcctgagaaatcttagtttcctcgagattggttttaaccttgttattgtccccaagatgctcgggaccttactggctcaggacactaccattagttttctcgggtgtgccacccagatgtatttctttttcttttttggcgtggccgagtgctttctgctggccaccatggcttatgatagatatgtcgcgatctgtagtcctctgcactaccctgttataatgaaccaacggacacgggctaaactcgctgctgcatcgtggttccccggtttccctgttgcaaccgtgcagactacttggctttttagttttcctttctgcgggactaataaggtaaaccacttcttctgcgacagcccaccagtcctgcgtctagtgtgtgccgacactgccctattcgaaatttatgcaattgttggcaccatcctcgtggttatgatcccttgtctgcttattctctgtagttacacccacattgccgcagctatcctgaaaataccctccgcaaaggggaagaacaaggctttctcaacctgcagcagtcatctgctcgtggtgagcctcttttatatatctctgagccttacttactttagacccaagtctaacaacagcccggaagggaagaaactgttgtccctgagttacactgttatgacacctatgttaaacccaatcatctactccctgcgtaacaatgaggtgaagaatgctttgtctcggaccgtgagcaaggccctcgcactccgcaactgtatcccatag

SEQ ID NO: 20752 - protein, 329 aa, Artificial Sequence
  derived and/or modified sequence
MPKLNSTFVTEFLFEGFSSFRRQHKLVFFVVFLTLYLLTLSGNVIIMTIIRLDHHLHTPMYFFLCMLSISETCYTVAIIPHMLSGLLNPHQPIATQSCATQLFFYLTFGINNCFLLTVMGYDRYVAICNPLRYSVIMGKRACIQLASGSLGIGLGMAIVQVTSVFGLPFCDAFVISHFFCDVRHLLKLACTDTTVNEIINFVVSVCVLVLPMGLVFISYVLIISTILKIASAEGQKKAFATCASHLTVVIIHYGCASIIYLKPKSQSSLGQDRLISVTYTHHSPTEPCCVQPEEQGGQRCSAQSRGAKNSVSLMKRGCEGFSFAFINMY

SEQ ID NO: 20753 - DNA, 990 bp, Artificial Sequence
  derived and/or modified sequence
atgcccaagctgaacagcaccttcgtgaccgagttcctgttcgagggcttcagcagcttcagaagacagcacaagctggtgttcttcgtggtgttcctgaccctgtacctgctgaccctgagcggcaacgtgatcatcatgaccatcatcagactggaccaccacctgcacacccccatgtacttcttcctgtgcatgctgagcatcagcgagacctgctacaccgtggccatcatcccccacatgctgagcggcctgctgaacccccaccagcccatcgccacccagagctgcgccacccagctgttcttctacctgaccttcggcatcaacaactgcttcctgctgaccgtgatgggctacgacagatacgtggccatctgcaaccccctgagatacagcgtgatcatgggcaagagagcctgcatccagctggccagcggcagcctgggcatcggcctgggcatggccatcgtgcaggtgaccagcgtgttcggcctgcccttctgcgacgccttcgtgatcagccacttcttctgcgacgtgagacacctgctgaagctggcctgcaccgacaccaccgtgaacgagatcatcaacttcgtggtgagcgtgtgcgtgctggtgctgcccatgggcctggtgttcatcagctacgtgctgatcatcagcaccatcctgaagatcgccagcgccgagggccagaagaaggccttcgccacctgcgccagccacctgaccgtggtgatcatccactacggctgcgccagcatcatctacctgaagcccaagagccagagcagcctgggccaggacagactgatcagcgtgacctacacccaccacagccccaccgagccctgctgcgtgcagcccgaggagcagggcggccagagatgcagcgcccagagcagaggcgccaagaacagcgtgagcctgatgaagagaggctgcgagggcttcagcttcgccttcatcaacatgtactag

SEQ ID NO: 20754 - DNA, 990 bp, Artificial Sequence
  derived and/or modified sequence
atgcctaagcttaactccactttcgtaacggagttcctgtttgaaggtttctccagttttcgacggcaacacaagcttgtgttctttgtcgtgtttctgacactttatctcctcacgctatccggtaatgtgattattatgacaattattcgcctcgatcaccacctgcacacgcccatgtattttttcctgtgcatgctgtcgatatcagagacctgttacacagtggcgatcatccctcatatgctctcaggccttctgaacccacaccagcctatagcaactcagagctgtgccacccagttgtttttttacctcacctttggcattaacaattgcttcctcctaacggtgatgggctacgatagatatgtagctatctgtaacccgctgcgctacagtgttattatgggcaagagagcatgtatccaactcgccagtggttccctcgggataggcctcggaatggcgattgtacaggttacatcagtgttcggcctgcctttctgtgacgcttttgtgatctctcatttcttttgcgacgtgaggcaccttctcaaactggcctgtacagacacaactgtgaacgagataataaacttcgttgtctccgtctgcgtcttggtattgccaatgggcctggtattcatttcatatgtgcttataatctctacaatcttgaagattgcctccgccgaaggccagaagaaggccttcgcaacctgtgcctcgcacttaacagtcgtgatcatccactacggctgtgcgtcaatcatatacttgaaaccaaaatctcaatcaagcctgggacaagatcgcttaattagtgtgacatacacgcatcactccccaactgagccctgttgcgtccagcccgaagaacagggcggccaaaggtgttccgcacaaagcaggggagccaaaaattctgtttcccttatgaaacggggatgcgaaggcttctcgtttgcctttataaacatgtattag

SEQ ID NO: 20755 - DNA, 990 bp, Artificial Sequence
  derived and/or modified sequence
atgcccaagctgaacagcacctttgtgacagagttcctgtttgagggcttcagcagcttccggcggcagcacaagctggtgttctttgtggtgttcctgaccctgtacctgctgaccctgtctggaaatgtcatcatcatgaccatcatccggctggaccaccacctgcacacccccatgtacttcttcctgtgcatgctgagcatcagcgagacctgctacacagtggccatcatcccccacatgctgagcggcctgctgaacccccaccagcccatcgccacccagagctgtgccacccagctgttcttctacctgaccttcggcatcaacaactgcttcctgctgactgtgatgggctatgaccgctacgtggccatctgcaaccccctgcgctacagcgtcatcatgggcaagagggcctgcatccagctggccagcggcagcctgggcatcggcctgggcatggccatcgtgcaggtgacctctgtgtttggcctgcccttctgtgatgcctttgtgatcagccacttcttctgtgatgtgcgccacctgctgaagctggcctgcacagacaccaccgtgaatgagatcatcaactttgtggtgtctgtgtgtgtgctggtgctgcccatgggcctggtgttcatctcctatgtgctgatcatcagcaccatcctgaagatcgccagcgctgagggccagaagaaggcctttgccacctgtgccagccacctgactgtggtgatcatccactacggctgtgccagcatcatctacctgaagcccaagagccagagcagcctgggccaggacaggctcatctctgtgacctacacccaccacagccccacagagccctgctgcgtgcagcctgaggagcagggcggccagcgctgcagcgcccagagcagaggagccaagaacagcgtgtccctgatgaagaggggctgtgagggcttctcctttgccttcatcaacatgtactag

SEQ ID NO: 20756 - DNA, 990 bp, Artificial Sequence
  derived and/or modified sequence
atgccaaagctaaattccacttttgtgactgagttcctctttgaaggtttctccagcttcaggcggcagcacaaacttgtcttctttgttgtcttcctaactttgtacctgctgactctctctggcaatgtgattatcatgaccattattcgcctggaccatcatcttcacacccccatgtacttcttcctgtgcatgctatccatctctgagacctgctacactgtggccatcattccccatatgctttctggtctcttgaatcctcatcagcccattgccacccaaagctgtgccactcagctcttcttctatctcacctttggcatcaacaactgcttcctgctcacagtcatgggatatgaccgctatgtggccatctgcaaccccctaaggtattcagtcatcatgggtaagagggcctgtatccaactggcctctggatcactggggattggccttggcatggccattgtccaagtaacatctgtgtttggcctgccattctgtgatgcctttgtcatctcccacttcttctgtgatgtgagacacctgctgaagctggcctgcacagacaccactgtcaatgagataatcaactttgttgtcagcgtctgtgtccttgttctacctatgggcctggtctttatctcctatgtcctcatcatctccaccattcttaagattgcctcagctgaaggtcagaagaaggcctttgccacctgcgcctcccacctcacagtggtcatcatccactatggctgtgcctccatcatctacctgaagcctaagtcccagagttccctgggacaggacagactcatctcagtgacctacactcatcactcccctactgaaccctgttgtgtacagcctgaagaacaaggaggtcaaagatgctctgcacagagccgtggggcaaaaaactctgtctccttaatgaagagaggttgtgaaggcttttcctttgcgtttataaatatgtactaa

SEQ ID NO: 20757 - DNA, 990 bp, Artificial Sequence
  derived and/or modified sequence
atgcccaagctgaacagcaccttcgtgaccgagttcctgttcgagggattctcttcttttcgcagacagcataagctggtcttcttcgtggtgttcctgaccctgtacttacttaccttgtctgggaatgtaatcatcatgacaatcatacggctggaccatcacctgcacactcccatgtacttcttcctctgcatgctgtccatctccgaaacctgctataccgtggcaattattcctcacatgctctccggcctgttaaacccacatcaaccaattgctacacagtcttgtgcaacacaactcttcttctacctgacgtttggcattaacaactgcttcttgttgaccgtgatggggtacgatagatatgtcgcaatctgtaaccctttacgatacagcgtcattatggggaagcgggcttgtatacagcttgcatccgggagcctgggcatcggcctcgggatggcgatcgtgcaagtaacttctgtatttggccttccgttttgcgacgcttttgtgatcagtcatttcttctgcgacgtccggcatctgttaaagctcgcctgcaccgacacaactgtgaatgagatcatcaattttgtggtgtctgtttgtgtcctcgtccttccgatgggcctggtgttcatttcgtacgttctcatcattagtaccatcctgaagatcgccagtgctgaaggacagaagaaggcttttgcgacttgtgcatcccacctgacagtcgtgattatccactacgggtgtgccagtataatctacttaaaacctaagagtcagtcatcactcggacaggaccgactcatatccgtcacctatacccaccacagccccacagagccatgttgtgtccagcctgaggaacagggaggccagcggtgctccgcacaatctaggggggccaaaaactctgtttcgttaatgaagcgcggctgtgagggcttcagcttcgctttcatcaacatgtattag

SEQ ID NO: 20758 - DNA, 990 bp, Artificial Sequence
  derived and/or modified sequence
atgccgaaactaaattctacctttgtgaccgagttcctattcgagggattcagctcattcagacggcagcacaaactcgtctttttcgttgtgtttttaaccctttaccttctgaccctctccggaaacgtgattatcatgactatcatcaggttagatcaccaccttcatactcccatgtatttttttttatgtatgctctccatcagtgagacttgctatacggtggcgatcattccgcatatgctgagcggactgctcaacccccatcagccaatcgctacgcaaagctgcgctacacagctctttttctacctgaccttcggcatcaacaattgctttctgttaacagtcatgggctatgacaggtacgtcgccatctgtaatcctctccgctattccgtcatcatggggaaacgagcctgtattcaattggcttctggaagcctgggtattgggctaggaatggccatcgtgcaggttacaagcgtcttcggtctcccattttgcgatgccttcgtgatttctcattttttctgcgatgtgaggcacttactgaaactggcctgtaccgacaccaccgtaaacgaaatcataaattttgtggtgtcagtttgcgtgctcgtgcttcctatgggactggtgttcatcagttacgtgctcatcattagcacaattttaaagatcgcttcagccgaggggcagaagaaggcctttgccacttgtgcatcccatctgacagttgttattatacattacgggtgtgcttccatcatctatcttaagcctaagtcacagtcgtccctcggacaggatcgcctgatctcagtaacatatacgcatcactcccccaccgagccttgctgtgtccagcccgaagagcagggcggacagagatgttccgcacaatcaagaggggctaaaaacagtgtgtctttgatgaagaggggatgcgagggtttttcgtttgcattcataaatatgtactag

SEQ ID NO: 20759 - protein, 309 aa, Artificial Sequence
  derived and/or modified sequence
MKRKNFTEVSEFIFLGFSSFGKHQITLFVVFLTVYILTLVANIIIVTIICIDHHLHTPMYFFLSMLASSETVYTLVIVPRMLLSLIFHNQPISLAGCATQMFFFVILATNNCFLLTAMGYDRYVAICRPLRYTVIMSKGLCAQLVCGSFGIGLTMAVLHVTAMFNLPFCGTVVDHFFCDIYPVMKLSCIDTTINEIINYGVSSFVIFVPIGLIFISYVLVISSILQIASAEGRKKTFATCVSHLTVVIVHCGCASIAYLKPKSESSIEKDLVLSVTYTIITPLLNPVVYSLRNKEVKDALCRVVGRNIS

SEQ ID NO: 20760 - DNA, 930 bp, Artificial Sequence
  derived and/or modified sequence
atgaagagaaagaacttcaccgaggtgagcgagttcatcttcctgggcttcagcagcttcggcaagcaccagatcaccctgttcgtggtgttcctgaccgtgtacatcctgaccctggtggccaacatcatcatcgtgaccatcatctgcatcgaccaccacctgcacacccccatgtacttcttcctgagcatgctggccagcagcgagaccgtgtacaccctggtgatcgtgcccagaatgctgctgagcctgatcttccacaaccagcccatcagcctggccggctgcgccacccagatgttcttcttcgtgatcctggccaccaacaactgcttcctgctgaccgccatgggctacgacagatacgtggccatctgcagacccctgagatacaccgtgatcatgagcaagggcctgtgcgcccagctggtgtgcggcagcttcggcatcggcctgaccatggccgtgctgcacgtgaccgccatgttcaacctgcccttctgcggcaccgtggtggaccacttcttctgcgacatctaccccgtgatgaagctgagctgcatcgacaccaccatcaacgagatcatcaactacggcgtgagcagcttcgtgatcttcgtgcccatcggcctgatcttcatcagctacgtgctggtgatcagcagcatcctgcagatcgccagcgccgagggcagaaagaagaccttcgccacctgcgtgagccacctgaccgtggtgatcgtgcactgcggctgcgccagcatcgcctacctgaagcccaagagcgagagcagcatcgagaaggacctggtgctgagcgtgacctacaccatcatcacccccctgctgaaccccgtggtgtacagcctgagaaacaaggaggtgaaggacgccctgtgcagagtggtgggcagaaacatcagctag

SEQ ID NO: 20761 - DNA, 930 bp, Artificial Sequence
  derived and/or modified sequence
atgaaacggaagaatttcacggaagtttctgaatttatttttttgggattcagctcctttgggaaacatcagatcacacttttcgtggtatttcttaccgtttatattctcacattggtcgccaacattattatcgtgaccatcatctgcatcgaccaccacctccataccccaatgtactttttcctaagtatgctggcatcgagcgagaccgtgtatacactcgtgatcgttcccagaatgctcctgtccttaatcttccacaatcagcccatctcactggcaggatgcgccacccagatgtttttctttgtgattctcgccactaataactgttttcttctgactgctatgggatatgacaggtacgtcgcaatttgtcgcccactgcgctacaccgttataatgtccaagggtttgtgcgcccaactggtgtgcgggtccttcgggattgggttgacaatggccgtccttcatgtgacagctatgttcaacctccccttctgcgggactgtagtggatcactttttttgtgatatataccctgtcatgaaattgagttgcatcgacactactatcaacgagatcatcaactatggcgtgtcatcatttgtgatctttgtccctattggacttatcttcatctcctacgtgttggtcatttcctctatcttgcagatcgccagtgctgagggccgcaagaagacatttgccacttgtgtgagccatttaacggttgtgattgtgcactgcggatgtgcatctattgcgtatttgaagcccaagagcgaaagtagcatcgagaaggacctggtgctgtctgtgacgtataccatcattacaccccttctgaatcctgtcgtttatagcctaaggaataaagaggtcaaagatgcgctgtgcagggtagtgggtcggaacatctcatag

SEQ ID NO: 20762 - DNA, 930 bp, Artificial Sequence
  derived and/or modified sequence
atgaagaggaagaacttcacagaggtgtctgagttcatcttcctgggcttcagcagctttgggaagcaccagatcaccctgtttgtggtgttcctgactgtgtacatcctgaccctggtggccaacatcatcatcgtgaccatcatctgcatcgaccaccacctgcacacccccatgtacttcttcctgtccatgctggccagcagcgagaccgtgtacaccctggtgattgtgcccaggatgctgctgagcctcatcttccacaaccagcccatcagcctggccggctgtgccacccagatgttcttcttcgtcatcctggccaccaacaactgcttcctgctgacagccatgggctatgacagatatgtggccatctgccggcccctgcgctacaccgtcatcatgagcaagggcctgtgtgcccagctggtgtgtggcagctttggaattggcctgaccatggctgtgctgcacgtgacagccatgttcaacctgcccttctgtggcaccgtggtggaccacttcttctgtgacatctaccctgtgatgaagctgagctgcatcgacaccaccatcaatgagatcatcaactatggagtgtcctcctttgtgatctttgtgcccatcggcctcatcttcatctcctatgtgctggtgatcagcagcatcctgcagatcgccagcgctgagggcaggaagaagacctttgccacctgtgtgagccacctgactgtggtgattgtgcactgcggctgtgccagcatcgcctacctgaagcccaagtctgagagcagcattgagaaggacctggtgctgtctgtgacctacaccatcatcacccccctgctgaaccctgtggtgtacagcctgaggaacaaggaggtgaaggatgccctgtgccgggtggtgggcaggaacatctcctag

SEQ ID NO: 20763 - DNA, 1050 bp, Artificial Sequence
  derived and/or modified sequence
tccttgttgactccatttgttgctttcagacactgatatagcagaatgaagagaaagaacttcacagaagtgtcagaattcattttcttgggattttctagctttggaaagcatcagataaccctctttgtggttttcctaactgtctacattttaactctggttgctaacatcatcattgtgactatcatctgcattgaccatcatctccacactcccatgtatttcttcctaagcatgctggctagttcagagacggtgtacacactggtcattgtgccacgaatgcttttgagcctcatttttcataaccaacctatctccttggcaggctgtgctacacaaatgttcttttttgttatcttggccactaataattgcttcctgcttactgcaatggggtatgaccgctatgtggccatctgcagacccctgagatacactgtcatcatgagcaagggactatgtgcccagctggtgtgtgggtcctttggcattggtctgactatggcagttctccatgtgacagccatgttcaatttgccgttctgtggcacagtggtagaccacttcttttgtgacatttacccagtcatgaaactttcttgcattgataccactatcaatgagataataaattatggtgtaagttcatttgtgatttttgtgcccataggcctgatatttatctcctatgtccttgtcatctcttccatccttcaaattgcctcagctgagggccggaagaagacctttgccacctgtgtctcccacctcactgtggttattgtccactgtggctgtgcctccattgcctacctcaagccgaagtcagaaagttcaatagaaaaagaccttgttctctcagtgacgtacaccatcatcactcccttgctgaaccctgttgtttacagtctgagaaacaaggaggtaaaggatgccctatgcagagttgtgggcagaaatatttcttaatggattggattatttcattaagagaccattagcccagtgtagtgtgtctactcacaaacatgccacaatacacaa

SEQ ID NO: 20764 - DNA, 930 bp, Artificial Sequence
  derived and/or modified sequence
atgaagcggaagaacttcaccgaggtgagcgagttcatcttcctgggattctcgagcttcggcaagcaccagatcaccctgtttgtggtgttccttaccgtgtacatcttgacactggtcgccaatattatcatagtaaccatcatttgtattgaccatcatttgcacactcctatgtacttttttctgagcatgttggcctccagcgagacagtgtacaccctggtgatcgtacccaggatgctcttgagtctgattttccacaaccagccaatctctctggccggttgtgcgactcagatgttctttttcgtcatactggctaccaataactgctttcttctgactgccatgggatatgacaggtacgtggcaatttgtcgccctctccggtatacagttatcatgtctaaaggtctctgtgcacagttagtgtgtgggtcctttgggattggtttgacaatggctgtgctccacgttacagctatgttcaacctgcctttttgtggtaccgttgtggaccactttttctgtgacatttaccccgtcatgaagctgtcttgcatagatactactattaatgaaatcattaattacggggtgtcttcatttgtaatctttgtgccgatcgggctaatattcatatcctatgtgcttgtcatcagcagtatcctgcagatcgcctcagccgaaggcagaaaaaagaccttcgctacttgtgtgtctcacctgacagttgtaattgttcactgcggctgcgcctcaatagcctatctgaaacctaagtcggagtctagcattgagaaagacctcgtgctatctgtaacttacaccatcattacaccactcctgaaccccgtggtttactccctccgtaataaggaagtaaaggatgctctgtgcagggtcgtcgggcgtaacatctcctag

SEQ ID NO: 20765 - DNA, 930 bp, Artificial Sequence
  derived and/or modified sequence
atgaagagaaaaaattttaccgaagtgtccgaattcatcttcctggggttttcaagtttcggcaaacaccagatcacattgttcgtggtgtttctgacggtgtacattctaacgttggttgcaaacattattatagtcacaatcatatgtattgatcaccacctccacacaccgatgtacttctttctgtctatgctggccagcagcgagaccgtctacactctggttatcgtgcctcgaatgcttctgtcgttgatcttccataaccagccaatctcactcgctggttgcgccacgcagatgttcttctttgtcatcctggcaactaacaattgcttcctgctgaccgccatggggtacgatcggtacgtggctatttgtcggcctctgcgatatactgtcattatgagtaaagggctctgcgcacagctggtttgcggctcgttcgggatcgggttgactatggccgtcttacatgtcaccgccatgttcaatctccccttctgtggcaccgtggtggatcattttttttgcgatatatatcccgtgatgaagttatcatgcatcgacaccactatcaatgaaatcatcaactatggtgttagcagctttgttatattcgtgcccataggccttatcttcatcagctatgtactggtgatttctagtattctgcagatcgctagcgctgagggccgtaagaaaacttttgccacctgtgtgtcacatctcaccgttgtgatcgtgcattgtggctgtgcatccatagcctatcttaagcccaaatctgaatcatccattgaaaaagacctggtcctatctgtgacctacaccatcattactcctctgctgaatccagtggtatactctctcagaaataaggaagttaaggatgcactctgccgggtcgttgggagaaatatcagttag

SEQ ID NO: 20766 - protein, 398 aa, Artificial Sequence
  derived and/or modified sequence
MRPGGALLALLASLLLLLLLRLLWCPADAPGRARILVEESREATHGTPAALRTLRSPATAVPRATNSTYLNEKSLQLTEKCKNLQYGIESFSNKTKGYSENDYLQIITDIQSCPWKRQAEEYANFRAKLASCCDAVQNFVVSQNNTPVGTNMSYEVESKKEIPIKKNIFHMFPVSQPFVDYPYNQCAVVGNGGILNKSLCGTEIDKSDFVFRCNLPPTTGDVSKDVGSKTNLVTINPSIITLKYGNLKEKKALFLEDIATYGDAFFLLPAFSFRANTGTSFKVYYTLEESKARQKVLFFHPKYLKDLALFWRTKGVTAYRLSTGLMITSVAVELCKNVKLYGFWPFSKTVEDIPVSHHYYDNKLPKHGFHQMPKEYSQILQLHMKGILKLQFSKCEVA

SEQ ID NO: 20767 - protein, 137 aa, Artificial Sequence
  derived and/or modified sequence
MFPVSQPFVDYPYNQCAVVGNGGILNKSLCGTEIDKSDFVFRCNLPPTTGDVSKDVGSKTNLVTINPSIITLKYGNLKEKKALFLEDIATYGDAFFLLPAFSFRANTGTSFKVYYTLEESKARQKCKTKRKTINSIL

SEQ ID NO: 20768 - protein, 128 aa, Artificial Sequence
  derived and/or modified sequence
  misc_feature (1)..(1): Xaa can be any naturally occurring amino acid
XYPYNQCAVVGNGGILNKSLCGTEIDKSDFVFRCNLPPTTGDVSKDVGSKTNLVTINPSIITLKYGNLKEKKALFLEDIATYGDAFFLLPAFSFRANTGTSFKVYYTLEESKARQKCKTKRKTINSIL

SEQ ID NO: 20769 - DNA, 1197 bp, Artificial Sequence
  derived and/or modified sequence
atgagacccggcggcgccctgctggccctgctggccagcctgctgctgctgctgctgctgagactgctgtggtgccccgccgacgcccccggcagagccagaatcctggtggaggagagcagagaggccacccacggcacccccgccgccctgagaaccctgagaagccccgccaccgccgtgcccagagccaccaacagcacctacctgaacgagaagagcctgcagctgaccgagaagtgcaagaacctgcagtacggcatcgagagcttcagcaacaagaccaagggctacagcgagaacgactacctgcagatcatcaccgacatccagagctgcccctggaagagacaggccgaggagtacgccaacttcagagccaagctggccagctgctgcgacgccgtgcagaacttcgtggtgagccagaacaacacccccgtgggcaccaacatgagctacgaggtggagagcaagaaggagatccccatcaagaagaacatcttccacatgttccccgtgagccagcccttcgtggactacccctacaaccagtgcgccgtggtgggcaacggcggcatcctgaacaagagcctgtgcggcaccgagatcgacaagagcgacttcgtgttcagatgcaacctgccccccaccaccggcgacgtgagcaaggacgtgggcagcaagaccaacctggtgaccatcaaccccagcatcatcaccctgaagtacggcaacctgaaggagaagaaggccctgttcctggaggacatcgccacctacggcgacgccttcttcctgctgcccgccttcagcttcagagccaacaccggcaccagcttcaaggtgtactacaccctggaggagagcaaggccagacagaaggtgctgttcttccaccccaagtacctgaaggacctggccctgttctggagaaccaagggcgtgaccgcctacagactgagcaccggcctgatgatcaccagcgtggccgtggagctgtgcaagaacgtgaagctgtacggcttctggcccttcagcaagaccgtggaggacatccccgtgagccaccactactacgacaacaagctgcccaagcacggcttccaccagatgcccaaggagtacagccagatcctgcagctgcacatgaagggcatcctgaagctgcagttcagcaagtgcgaggtggcctag

SEQ ID NO: 20770 - DNA, 1197 bp, Artificial Sequence
  derived and/or modified sequence
atgcgtcccggtggtgctctcttagctttgctggctagtctattgcttttactgctgctgagactgctgtggtgtcctgccgacgcacctggcagagcgcgaattttggttgaggagtctcgcgaagcaacacacgggacacctgcggcccttcgcaccctgaggagccctgctacagccgtgcccagggccaccaatagtacctacctcaacgagaaatctctccagctgacagaaaaatgtaagaacctccaatatggaattgaatccttttccaacaagaccaagggatattctgagaatgactacctccagatcatcacggatatccaatcctgcccctggaagaggcaggcggaggagtatgccaacttcagagccaaactggctagctgttgtgacgccgtgcagaactttgtggtgtctcaaaacaacacgcccgtggggacgaacatgtcctatgaagtagaatccaagaaggagatcccaataaaaaaaaacatattccatatgttcccagtttcccagcccttcgtagattatccttacaatcagtgtgccgtcgtggggaatggaggtatactgaataaatcactttgtgggaccgaaatcgacaaatcagatttcgtttttcggtgcaatctgccccccaccacaggcgacgtatctaaggatgtaggtagtaagactaatttggtgaccataaaccctagcatcattacattaaaatacgggaatctaaaggaaaaaaaagctttattcctggaagacatagctacatatggcgatgccttcttcctgctaccagctttctcattccgagccaacactggtacctcttttaaggtgtattacactctggaggaatccaaagctagacagaaggttctgtttttccacccaaagtatctaaaggaccttgcgctcttttggcgcactaagggcgtcacagcgtatagactgagcactggactcatgatcaccagcgtggcggttgaactttgtaagaatgtcaagctgtatgggttctggccgttttccaagacggtggaggacattcctgtgagtcaccattattacgataataagctgccgaaacacggctttcaccagatgcccaaagagtattcacaaatccttcagcttcacatgaaaggcattctcaaactgcagttcagtaagtgcgaagttgcctag

SEQ ID NO: 20771 - DNA, 1197 bp, Artificial Sequence
  derived and/or modified sequence
atgaggcctggaggagccctgctggccctgctggccagcctgctgctgctgctgctgctgcggctgctgtggtgcccagcagatgcccctggccgggcccgcatcctggtggaggagagccgggaggccacccacggcaccccagctgccctgcggaccctgcggagccctgccacagctgtgccccgggccaccaacagcacctacctgaatgagaagagcctgcagctgacagagaagtgcaagaacctgcagtatggcatcgagagcttcagcaacaagaccaagggctacagtgaaaatgactacctgcagatcatcacagacatccagagctgcccctggaagaggcaggccgaggagtatgccaacttccgggccaagctggccagctgctgtgatgctgtgcagaactttgtggtgtcccagaacaacacccctgtgggcaccaacatgtcctatgaggtggagagcaagaaggagatccccatcaagaagaacatcttccacatgtttcctgtgtcccagccctttgtggactacccctacaaccagtgtgctgtggtgggcaatggaggcatcctgaacaagagcctgtgtggcacagaaattgacaagagtgactttgtgttccgctgcaacctgccccccaccactggagatgtgtccaaggatgtgggcagcaagaccaacctggtgaccatcaaccccagcatcatcaccctgaagtatggcaacctgaaggagaagaaggccctcttcctggaggacatcgccacctatggagatgccttcttcctgctgcctgccttctccttccgggccaacacaggcaccagcttcaaggtgtactacaccctggaggagagcaaggcccggcagaaggtgctcttcttccaccccaagtacctgaaggacctggccctcttctggaggaccaagggcgtgacagcctaccgcctgagcacaggcctgatgatcacctctgtggccgtggagctgtgcaagaatgtgaagctgtatggcttctggcccttcagcaagacagtggaggacatccctgtgagccaccactactatgacaacaagctgcccaagcacggcttccaccagatgcccaaggagtacagccagatcctgcagctgcacatgaagggcatcctgaagctgcagttcagcaaatgtgaggtggcctag

SEQ ID NO: 20772 - DNA, 1197 bp, Artificial Sequence
  derived and/or modified sequence
atgcggcccggcggcgccctgctggccctgctggccagcctgctgctgttgctactcctgcgactgctctggtgtcctgctgatgcccccggtcgagcgcggattctcgttgaggaatcccgtgaggccacgcacggcacccccgccgccctgcgcactttacgctcccctgcaaccgctgttccaagagcaaccaatagcacttacctgaacgagaagtctcttcaacttactgagaagtgtaaaaacttgcagtatggcattgaatcctttagcaataagacaaagggctactcagagaatgattatctccaaataatcactgatatccaaagttgtccgtggaagcggcaggccgaagaatatgccaatttcagggctaaacttgcctcgtgctgcgatgcagtgcagaacttcgtcgtctcccagaacaatacccctgtgggtacgaatatgtcatatgaagtggagtccaagaaagagattcctatcaagaagaatatttttcatatgttccccgtgtcccagccattcgtggattatccctataatcagtgtgcagtcgtggggaacggggggattctcaacaagtctctttgcggcacagagatcgataaatctgattttgtgttccggtgcaatctgcccccaacaaccggagacgtgtccaaagacgttggaagcaaaaccaacctcgtgacaatcaatccctccatcatcactttaaagtacggcaacttgaaggaaaaaaaagctctctttctggaggacatcgcaacatacggcgacgcatttttcctgttgcccgctttctcgttcagagccaataccggaacctcatttaaggtgtattacaccttggaggaatctaaagccaggcagaaggtgctgtttttccatcccaaatacctcaaggatttggccctgttctggcgaactaaaggagttaccgcatataggctgtcgacaggtctgatgatcacgtccgtcgctgtcgagttatgtaaaaatgtgaaactgtatggattctggcctttctctaaaaccgtggaagatatcccggtgtcacaccactactatgataataagctccccaaacatggcttccaccagatgcccaaggagtatagccagattctgcagctgcatatgaagggaattctgaagcttcagttcagcaagtgcgaggtggcttag

SEQ ID NO: 20773 - DNA, 1197 bp, Artificial Sequence
  derived and/or modified sequence
atgaggccgggaggggctctgttggccctgttggcctccctcctgctgctactactcctaagattgttgtggtgtcctgctgatgctcccggacgggctcgcatcctggtagaggaaagtagggaggctacccacggcacaccggcagccctgcgcacgcttagatcacccgcaacagctgtgccgcgtgcaaccaattctacatacctcaacgagaagtcccttcagctgactgagaaatgtaagaacttgcagtacggaattgaatctttctctaataagaccaaaggctattccgagaatgattacctgcagataatcaccgatatccaatcctgtccatggaagcggcaggcagaagagtatgccaacttccgcgctaagttggcttcttgctgcgatgccgttcagaactttgtggtgagtcagaataatacccctgtgggtacgaacatgtcttatgaggtagaaagtaaaaaagaaattcctatcaaaaaaaacatcttccacatgtttcccgtctcacagccgttcgttgactacccctacaatcaatgcgctgttgtcggcaatggaggaattctcaataaatctctatgtggtaccgagatcgacaaaagcgactttgtgttccggtgcaatttgcctcctaccacaggtgatgtgagtaaggacgttggttccaagacgaacttggtcacaatcaatcccagtatcattactctgaaatatggcaacctgaaagagaagaaagccctgtttctggaggacattgcaacctacggagacgccttctttttacttcccgcattttcatttagagccaacaccggcacttctttcaaagtgtactacacccttgaagagtccaaggcaagacagaaagtgttattctttcatcccaagtatctgaaggacttggcgctgttctggagaacgaaaggtgtcacagcatatcgcctgtcaacaggactgatgataactagtgtggctgtcgagctctgcaaaaacgttaagctctacggtttttggccattctcaaagactgttgaggatatccccgtaagccaccactactatgataataaactgccaaaacacgggtttcaccagatgccaaaagagtattctcaaattctccagcttcacatgaagggcattctcaagctgcagttctctaagtgtgaggtcgcatag

SEQ ID NO: 20774 - DNA, 2276 bp, Artificial Sequence
  derived and/or modified sequence
ggagccgcgagtcggggccgcccgggctgtgcttcgccccggcagcagcggtggcggcggcgcctgtggctcaggatgcggccggggggcgcactgctcgccctgctcgccagcctgctgctgctgctgctgctgcgcctgctctggtgcccggcagacgcgcccggccgcgccaggattctggtggaggaaagcagggaggccacccacggcacccccgcagcgctgaggacgctccggagcccggcgaccgcggtaccgcgcgccactaacagcacatatctgaatgagaagtcgctccaactgacggagaaatgcaaaaatctgcaatatggcattgagtctttctctaacaaaacgaaagggtattcagagaacgactaccttcagattatcacagatatacagagttgtccatggaaacggcaagcagaagaatatgcaaattttagagccaaacttgcttcctgctgtgatgctgttcaaaactttgttgtttctcagaataacactccagttgggactaatatgagttacgaggtggaaagcaaaaaagaaatcccaattaagaagaacatttttcatatgtttccagtgtcccagccttttgtggactacccttataatcagtgtgcagtggtcggaaatgggggaattctgaataagtctctctgtggaactgaaatagataaatccgacttcgtttttaggtgtaacctacccccaaccacaggagatgttagtaaagatgttggcagtaaaacaaatcttgtgactataaatccaagcatcataactctgaaatatgggaacttaaaggaaaaaaaagccctatttctggaggacattgcaacctatggagatgcattttttcttctgccagcattttccttcagggccaacacgggtacctctttcaaagtatactacacgctcgaagagtctaaagcaagacaaaaggttctatttttccatcccaagtacctgaaagatctggcccttttctggagaactaaaggtgtgactgcataccgcttgtccaccggcttgatgatcacaagtgttgcagtggaactgtgtaaaaatgtgaagctgtatggattctggcccttctctaaaactgtagaagacatacctgtcagccatcactattatgacaacaagctacctaaacatggtttccatcagatgcccaaagaatacagccagatcctccaacttcacatgaaaggaatcctcaaactgcaatttagcaaatgtgaagtcgcctaaacaaagtatcttaaaatgggaataattttaatataatgcagtaggtgattaacaatgtctccaaacaccaaaggaggtggctaaagagtattttgagatgagccccaaaatttggtttgaccaaagcttccccactcattttgcaatgatggcaagtcattcaatccttctcatcttcattttttctccttataacatggacaccatatctgactcatacaaatttttataatttatgaaaattattggcatggcctttggtgtgaggtagggactcaaagaatatttctttcttactatttataccagccatctccaccttcaccagaccgataataaaagcatgctttcttggagatctcttctaaagagaatagctgcattaccagtatccattggatttctttctgtggcaggtctctatcaataatatccttcccatttttctgtctcaaagactgcatgcaagaaaattatatacttaagcaaaaagttcttgatcattcgggaatgaaattcttctctgagtatggcagtatgcctgcttctgattaaattcacttttaatagtagctgtgatgatattttggttgaatttaagccatttattttcctcttatgtctacatttcttcatcacttaataattttattttaacttcctgcctcattcttacacttttttctctctcacttatacgatatacttcaaggacgtgaacagttacaatacccagtctttcttacctgttgtcttgcctgtggggtcactcactcaattttattttaaaattactgaataactacttcatgccaggccctgcaccaggctctgtgagaggacaagaaggattattgcctcttgtaggagaaaacagatgtgcatatcattaattatgatggggtatgataagtattacaatgacaaaagctatgaataaagtgctacaaggaacagaagcagggataattaaatccatttcagtggaatctatttcaatgtac

SEQ ID NO: 20775 - DNA, 1056 bp, Artificial Sequence
  derived and/or modified sequence
ctgtgaacgctgtgggtgcgcggggctgcggccacggcggcggtggcggcggcggcgggagccgcgagtcggggccgcccgggctgtgcttcgccccggcagcagcggtggcggcggcgcctgtggctcaggatgcggccggggggcgcactgctcgccctgctcgccagcctgctgctgctgctgctgctgcgcctgctctggtgcccggcagacgcgcccggccgcgccaggattctggtggaggaaagcagggaggccacccacggcacccccgcagcgctgaggacgctccggagcccggcgaccgcggtaccgcgcgccactaacagcacatatctgaatgagaagtcgctccaactgacggagaaatgcaaaaatctgcaatatggcattgagtctttctctaacaaaacgaaagggtattcagagaacgactaccttcagattatcacagatatacagagttgtccatggaaacggcaagcagaagaatatgcaaattttagagccaaacttgcttcctgctgtgatgctgttcaaaactttgttgtttctcagaataacactccagttgggactaatatgagttacgaggtggaaagcaaaaaagaaatcccaattaagaagaacatttttcatatgtttccagtgtcccagccttttgtggactacccttataatcagtgtgcagtggtcggaaatgggggaattctgaataagtctctctgtggaactgaaatagataaatccgacttcgtttttaggtgtaacctacccccaaccacaggagatgttagtaaagatgttggcagtaaaacaaatcttgtgactataaatccaagcatcataactctgaaatatgggaacttaaaggaaaaaaaagccctatttctggaggacattgcaacctatggagatgcattttttcttctgccagcattttccttcagggccaacacgggtacctctttcaaagtatactacacgctcgaagagtctaaagcaagacaaaagtgcaaaacaaaaagaaaaactataaactccatcttgtag

SEQ ID NO: 20776 - protein, 335 aa, Artificial Sequence
  derived and/or modified sequence
MPQILIFTYLNMFYFFPPLQILAENLTMVTEFLLLGFSSLGEIQLALFVVFLFLYLVILSGNVTIISVIHLDKSLHTPMYFFLGILSTSETFYTFVILPKMLINLLSVARTISFNCCALQMFFFLGFAITNCLLLGVMGYDRYAAICHPLHYPTLMSWQVCGKLAAACAIGGFLASLTVVNLVFSLPFCSANKVNHYFCDISAVILLACTNTDVNEFVIFICGVLVLVVPFLFICVSYLCILRTILKIPSAEGRRKAFSTCASHLSVVIVHYGCASFIYLRPTANYVSNKDRLVTVTYTIVTPLLNPMVYSLRNKDVQLAIRKVLGKKGSLKLYN

SEQ ID NO: 20777 - DNA, 1008 bp, Artificial Sequence
  derived and/or modified sequence
atgccccagatcctgatcttcacctacctgaacatgttctacttcttcccccccctgcagatcctggccgagaacctgaccatggtgaccgagttcctgctgctgggcttcagcagcctgggcgagatccagctggccctgttcgtggtgttcctgttcctgtacctggtgatcctgagcggcaacgtgaccatcatcagcgtgatccacctggacaagagcctgcacacccccatgtacttcttcctgggcatcctgagcaccagcgagaccttctacaccttcgtgatcctgcccaagatgctgatcaacctgctgagcgtggccagaaccatcagcttcaactgctgcgccctgcagatgttcttcttcctgggcttcgccatcaccaactgcctgctgctgggcgtgatgggctacgacagatacgccgccatctgccaccccctgcactaccccaccctgatgagctggcaggtgtgcggcaagctggccgccgcctgcgccatcggcggcttcctggccagcctgaccgtggtgaacctggtgttcagcctgcccttctgcagcgccaacaaggtgaaccactacttctgcgacatcagcgccgtgatcctgctggcctgcaccaacaccgacgtgaacgagttcgtgatcttcatctgcggcgtgctggtgctggtggtgcccttcctgttcatctgcgtgagctacctgtgcatcctgagaaccatcctgaagatccccagcgccgagggcagaagaaaggccttcagcacctgcgccagccacctgagcgtggtgatcgtgcactacggctgcgccagcttcatctacctgagacccaccgccaactacgtgagcaacaaggacagactggtgaccgtgacctacaccatcgtgacccccctgctgaaccccatggtgtacagcctgagaaacaaggacgtgcagctggccatcagaaaggtgctgggcaagaagggcagcctgaagctgtacaactag

SEQ ID NO: 20778 - DNA, 1008 bp, Artificial Sequence
  derived and/or modified sequence
atgccacaaatccttatatttacctacttaaacatgttctacttctttccccccctccagatcctcgccgagaacttaacgatggtcacagaattcctcctgcttggtttttcgtctctcggggagatacagctcgccctgttcgtggtgtttttatttctttatttggtgattctctcgggtaatgtgacgattatcagtgtcattcatctggataaaagcctacatacccccatgtatttcttcctggggattctcagcacgagcgaaacgttctacaccttcgtcatcttacctaagatgctgataaacctcctttcggttgcccgaacgatatctttcaattgttgcgccctgcaaatgtttttttttctaggtttcgctatcacaaactgcctgctgctgggtgtcatgggctacgaccggtatgccgcaatctgccaccctctccactaccctaccttgatgtcctggcaggtttgtggcaaactagccgcagcgtgtgctatcggcggatttctggcatcattgactgtggtcaacctcgtgttttccctgccattttgttctgcaaataaagtgaaccactacttctgtgacataagcgcagtgattctactggcctgcacgaatactgatgtcaatgagttcgtaatcttcatttgcggcgttctggtgcttgtcgtgccattcctttttatatgcgtatcttacttgtgcatcttaagaaccatactcaagatcccaagcgcagaaggccgcagaaaggccttcagtacctgcgcttcccacctgagcgtggtgatcgtccactatggttgcgctagctttatatatctccggcccactgcgaattacgtgtcgaataaggacagactagtgacagtcacatacaccattgtcactcccttgttgaatcctatggtgtattctctgagaaataaagatgtacagcttgcgatccggaaggtgctggggaagaaggggagcctcaaactgtataattag

SEQ ID NO: 20779 - DNA, 1008 bp, Artificial Sequence
  derived and/or modified sequence
atgccccagatcctgatcttcacctacctgaacatgttctacttcttcccccccctgcagatcctggccgagaacctgaccatggtgacagagttcctgctgctgggcttcagcagcctgggggagatccagctggccctgtttgtggtgttcctgttcctgtacctggtgatcctgtctggaaatgtgaccatcatcagcgtcatccacctggacaagagcctgcacacccccatgtacttcttcctgggcatcctgagcaccagcgagaccttctacacctttgtgatcctgcccaagatgctgatcaacctgctgtctgtggcccggaccatctccttcaactgctgtgccctgcagatgttcttcttcctgggctttgccatcaccaactgcctgctgctgggcgtgatgggctatgacagatatgctgccatctgccaccccctgcactaccccaccctgatgtcctggcaggtgtgtgggaagctggccgccgcctgtgccatcggcggcttcctggccagcctgactgtggtgaacctggtgttcagcctgcccttctgcagcgccaacaaggtgaaccactacttctgtgacatctctgctgtgatcctgctggcctgcaccaacacagatgtgaatgaatttgtgatcttcatctgtggggtgctggtgctggtggtgcccttcctgttcatctgtgtgtcctacctgtgcatcctgcggaccatcctgaagatccccagcgctgagggccgcaggaaggccttcagcacctgtgccagccacctgtctgtggtgattgtgcactacggctgtgccagcttcatctacctgcggcccacagccaactacgtgagcaacaaggaccggctggtgacagtgacctacaccatcgtgacccccctgctgaaccccatggtgtacagcctgaggaacaaggatgtgcagctggccatcaggaaggtgctgggcaagaagggcagcctgaagctgtacaactag

SEQ ID NO: 20780 - DNA, 1008 bp, Artificial Sequence
  derived and/or modified sequence
atgccccaaattcttatattcacatacctgaatatgttttacttctttccccctttgcagatcttggcagaaaacctcaccatggtcaccgaattcctgttgctgggtttttccagccttggtgaaattcagctggccctctttgtagtttttctttttctgtatctagtcattcttagtggcaatgtcaccattatcagtgtcatccacctggataaaagcctccacacaccaatgtacttcttccttggcattctctcaacatctgagaccttctacacctttgtcattctacccaagatgctcatcaatctactttctgtggccaggacaatctccttcaactgttgtgctcttcaaatgttcttcttccttggttttgccattaccaactgcctgctattgggtgtgatgggttatgatcgctatgctgccatttgtcaccctctgcattaccccactcttatgagctggcaggtgtgtggaaaactggcagctgcctgtgcaattggtggcttcttggcctctcttacagtagtaaatttagttttcagcctccctttttgtagcgccaacaaagtcaatcattacttctgtgacatctcagcagtcattcttctggcttgtaccaacacagatgttaacgaatttgtgatattcatttgtggagttcttgtacttgtggttccctttctgtttatctgtgtttcttatctctgcattctgaggactatcctgaagattccctcagctgagggcagacggaaagcgttttccacctgcgcctctcacctcagtgttgttattgttcattatggctgtgcttccttcatctacctgaggcctacagcaaactatgtgtccaacaaagacaggctggtgacggtgacatacacgattgtcactccattactaaaccccatggtttatagcctcagaaacaaggatgtccaacttgctatcagaaaagtgttgggcaagaaaggttctctaaaactatataattga

SEQ ID NO: 20781 - DNA, 1008 bp, Artificial Sequence
  derived and/or modified sequence
atgccccagatcctgatcttcacctacctgaacatgttctacttctttcctcccctgcaaatcctcgccgagaacctgacaatggtcacggagtttcttctgttgggctttagttctctgggcgagattcaactggccctatttgtagtgttccttttcctctacctcgtaattttgtccggcaacgtgactattattagtgtcatccacttggacaagtcgcttcacacaccaatgtactttttcttagggatcttaagcacttccgaaacattctatacctttgtcatccttcctaagatgcttattaatcttctgagcgtggctcggacgattagctttaactgctgtgccctacagatgttcttcttcttaggtttcgctatcactaattgcctgctgttgggagtcatggggtatgaccgctatgccgcgatttgtcaccctctccattatccaaccctgatgtcctggcaggtatgcggcaagttagctgctgcgtgtgctatcggcggtttcctagcaagccttaccgtggtgaacctggtcttttcacttcccttctgcagtgccaacaaggtgaatcactatttttgtgatatcagcgccgttatcctgctggcctgtactaacaccgacgtaaacgaattcgtcatcttcatctgtggagtactggtattagtggtgccttttctgttcatatgtgtttcttacctgtgcattctccgcaccatacttaaaattccctccgctgagggaagacgaaaagccttctccacatgcgcctcacatttgtcagtggtgattgtacactatgggtgcgcatctttcatctatctgcggcctacggcaaattatgtgagcaacaaagaccggttagtaacggtcacttatacaattgtgactccgttactgaatccgatggtttattcactcagaaataaggatgtgcaactggccatccggaaagttttgggcaagaaaggtagtctcaaattatacaattag

SEQ ID NO: 20782 - DNA, 1008 bp, Artificial Sequence
  derived and/or modified sequence
atgccccagatcctaatattcacctacctaaatatgttttattttttcccgcctctacagattctggcagagaatctgactatggtgaccgagttcctgctgctcggctttagtagtcttggagagattcaactcgccctgttcgtcgtgtttttgttcctgtacctcgtgatcctttcaggcaacgtgactattatttccgtcatccacctcgacaaatccttgcatacaccaatgtacttcttcttaggaatcctcagcaccagcgaaaccttttatacctttgtgattcttcctaagatgttgataaatctgttgtccgttgccaggaccatcagtttcaactgttgcgcgctgcagatgttcttttttttaggcttcgcgataactaactgtctgcttttgggggtaatggggtatgatagatacgccgcaatctgtcatccactacactatcccacgctcatgtcatggcaagtgtgtggaaagctggccgctgcctgcgccatcgggggtttcctggcttccttgactgtggtgaacttggtgtttagcttgccgttctgctcagccaacaaggttaatcactatttctgcgatatctcagccgttatacttctggcatgcacaaacaccgacgtaaatgagttcgtcattttcatttgtggagtgctggtactggtcgttccctttctctttatctgtgtgtcatatctgtgcattctccggacaattcttaagataccatctgccgaggggagacggaaggccttcagcacatgcgccagtcacctcagcgttgttattgttcattatggctgtgcatctttcatttacctgagacccacagccaattatgtgtctaacaaagaccggctggtgacagtcacctataccatcgtgacaccgctcctgaatccaatggtgtacagtctgaggaataaggacgtccagctggcgatcaggaaagtactgggcaagaaaggcagtttgaagttgtacaattag

SEQ ID NO: 20783 - protein, 313 aa, Artificial Sequence
  derived and/or modified sequence
MEQVNKTVVREFVVLGFSSLARLQQLLFVIFLLLYLFTLGTNAIIISTIVLDRALHTPMYFFLAILSCSEICYTFVIVPKMLVDLLSQKKTISFLGCAIQMFSFLFFGSSHSFLLAAMGYDRYMAICNPLRYSVLMGHGVCMGLMAAACACGFTVSLVTTSLVFHLPFHSSNQLHHFFCDISPVLKLASQHSGFSQLVIFMLGVFALVIPLLLILVSYIRIISAILKIPSSVGRYKTFSTCASHLIVVTVHYSCASFIYLRPKTNYTSSQDTLISVSYTILTPLFNPMIYSLRNKEFKSALRRTIGQTFYPLS

SEQ ID NO: 20784 - DNA, 942 bp, Artificial Sequence
  derived and/or modified sequence
atggagcaggtgaacaagaccgtggtgagagagttcgtggtgctgggcttcagcagcctggccagactgcagcagctgctgttcgtgatcttcctgctgctgtacctgttcaccctgggcaccaacgccatcatcatcagcaccatcgtgctggacagagccctgcacacccccatgtacttcttcctggccatcctgagctgcagcgagatctgctacaccttcgtgatcgtgcccaagatgctggtggacctgctgagccagaagaagaccatcagcttcctgggctgcgccatccagatgttcagcttcctgttcttcggcagcagccacagcttcctgctggccgccatgggctacgacagatacatggccatctgcaaccccctgagatacagcgtgctgatgggccacggcgtgtgcatgggcctgatggccgccgcctgcgcctgcggcttcaccgtgagcctggtgaccaccagcctggtgttccacctgcccttccacagcagcaaccagctgcaccacttcttctgcgacatcagccccgtgctgaagctggccagccagcacagcggcttcagccagctggtgatcttcatgctgggcgtgttcgccctggtgatccccctgctgctgatcctggtgagctacatcagaatcatcagcgccatcctgaagatccccagcagcgtgggcagatacaagaccttcagcacctgcgccagccacctgatcgtggtgaccgtgcactacagctgcgccagcttcatctacctgagacccaagaccaactacaccagcagccaggacaccctgatcagcgtgagctacaccatcctgacccccctgttcaaccccatgatctacagcctgagaaacaaggagttcaagagcgccctgagaagaaccatcggccagaccttctaccccctgagctag

SEQ ID NO: 20785 - DNA, 942 bp, Artificial Sequence
  derived and/or modified sequence
atggaacaggttaacaagacagtagtgcgggaatttgtggtgctcgggtttagctccctcgctcggctgcagcaattactgttcgtgatcttcctgcttctgtacctgttcacactgggtaccaatgccataatcatatccaccatcgtgctggacagggcactgcacaccccaatgtactttttcctggcgatactcagctgcagcgagatctgctacacatttgtcatcgtgccaaagatgttagtggacctgctgtcccagaagaaaacaatcagttttctgggctgcgcaattcagatgttcagctttctattctttggatcctctcactcatttctgctcgccgctatgggctatgataggtacatggctatctgcaacccactccgctactcagtcctgatgggccacggcgtgtgtatgggtttgatggccgcggcctgcgcttgtggttttacagtgagcctggtcacaacgtcattagtcttccaccttcccttccattcctctaaccagctccaccactttttttgtgacatcagcccagttctgaaactggcaagccaacactctggattcagccaactggtaatcttcatgcttggcgtctttgcattggttatacctttgctactgattcttgtaagctatatcagaattatttccgcgatcttaaaaatcccatcttccgttgggcgatacaaaaccttctctacatgtgcatcacaccttattgtggtcaccgtgcactactcctgtgcaagctttatctatctgcgcccgaagaccaactatacctcatctcaggatacactgatcagcgtctcctacaccatcctgactcccttgttcaatccaatgatctactctttgagaaataaggagtttaagtccgccttgcgtaggaccattggtcagactttctatcctctgtcgtag

SEQ ID NO: 20786 - DNA, 942 bp, Artificial Sequence
  derived and/or modified sequence
atggagcaggtgaacaagacagtggtgcgggagtttgtggtgctgggcttcagcagcctggcccggctgcagcagctgctcttcgtcatcttcctgctgctgtacctgttcaccctgggcaccaatgccatcatcatcagcaccatcgtgctggaccgggccctgcacacccccatgtacttcttcctggccatcctgagctgcagcgagatctgctacacctttgtgattgtgcccaagatgctggtggacctgctgagccagaagaagaccatctccttcctgggctgtgccatccagatgttctccttcctgttcttcggcagcagccacagcttcctgctggccgccatgggctatgaccgctacatggccatctgcaaccccctgcgctacagcgtgctgatgggccacggcgtgtgcatgggcctgatggctgctgcctgtgcctgtggcttcaccgtgtccctggtgaccaccagcctggtgttccacctgcccttccacagcagcaaccagctgcaccacttcttctgtgacatcagccctgtgctgaagctggccagccagcacagcggcttcagccagctggtgatcttcatgctgggcgtgtttgccctggtgatccccctgctgctgatcctggtgtcctacatccgcatcatcagcgccatcctgaagatccccagctctgtgggccgctacaagaccttcagcacctgtgccagccacctgattgtggtgacagtgcactacagctgtgccagcttcatctacctgcggcccaagaccaactacaccagcagccaggacaccctcatctctgtgtcctacaccatcctgacccccctcttcaaccccatgatctacagcctgaggaacaaggagttcaagagcgccctgcggaggaccatcggccagaccttctaccccctgtcctag

SEQ ID NO: 20787 - DNA, 1073 bp, Artificial Sequence
  derived and/or modified sequence
tttcccgtacatttccactctcctttctggatcctggtttctacctctgtccctgactctcctttatagaagtgctctccatggagcaagtcaataagactgtggtgagagagttcgtcgtcctcggcttctcatccctggccaggctgcagcagctgctctttgttatcttcctgctcctctacctgttcactctgggcaccaatgcaatcatcatttccaccattgtgctggacagagcccttcatactcccatgtacttcttccttgccatcctttcttgctctgagatttgctatacctttgtcattgtacccaagatgctggttgacctgctgtcccagaagaagaccatttctttcctgggctgtgccatccaaatgttttccttcctcttctttggctcctctcactccttcctgctggcagccatgggctatgatcgctatatggccatctgtaacccactgcgctactcagtgctcatgggacatggggtgtgtatgggactaatggctgctgcctgtgcctgtggcttcactgtctccctggtcaccacctccctagtatttcatctgcccttccactcctccaaccagctccatcacttcttctgtgacatctcccctgtccttaaactggcatctcagcactccggcttcagtcagctggtcatattcatgcttggtgtatttgccttggtcattcctctgctacttatcctagtctcctacatccgcatcatctctgccattctaaaaatcccttcctccgttggaagatacaagaccttctccacctgtgcctcccatctcattgtggtaactgttcactacagttgtgcctctttcatctacttaaggcccaagactaattacacttcaagccaagacaccctaatatctgtgtcatacaccatccttaccccattgttcaatccaatgatttatagtctgagaaataaggaattcaaatcagccctacgaagaacaatcggccaaactttctatcctcttagttaaagagctattttttaaactactaatgcctagtacatgccaggcagaacgtgt

SEQ ID NO: 20788 - DNA, 942 bp, Artificial Sequence
  derived and/or modified sequence
atggagcaggtgaacaagaccgtggtgcgggagttcgtggtgctgggattttcgtcactcgccaggctgcagcagctgttgtttgtgattttccttctactgtacttatttacactcggaacaaacgctatcatcattagtactattgtgctggacagagcattgcataccccaatgtactttttcctggcaatactgtcctgtagcgaaatttgctatacattcgtaattgtgccgaagatgttggtcgatctgctgagtcagaaaaaaaccattagctttctggggtgtgccatccagatgttttctttcctattttttgggagtagccattcattcctccttgcggccatgggttatgatcgttacatggcaatttgcaatccgctgagatacagtgtgttgatgggacacggggtttgcatgggtttaatggctgcagcttgtgcttgtggcttcacagtgtcactggtgaccacaagcctggtattccacctcccattccattcttctaaccagcttcaccattttttctgcgatatctcgcctgttctgaaactcgcgtcgcagcacagtggcttcagtcagcttgtcattttcatgttgggcgtttttgcactggtcattccattactccttatactggtgtcatacattaggatcatctctgctattctgaaaataccatcaagcgttggtcgctataagacattcagtacttgcgcctcacatttgatcgtggtgactgtccactactcgtgtgccagctttatctacctgagacctaaaaccaactacacttcctcgcaggatactttgattagtgtgtcttatacaattttgacgcccttatttaatccaatgatctacagcctccgtaacaaagaatttaaatcagccctgaggaggaccattggacagaccttctatcccctgagttag

SEQ ID NO: 20789 - DNA, 942 bp, Artificial Sequence
  derived and/or modified sequence
atggaacaggtaaacaagaccgtggtgcgggagttcgtcgtgctcggcttttcatcactggccaggctccagcaattattgttcgttatctttctgctcttatatctgttcaccctgggaacaaatgccataatcatcagcaccatcgtgctggacagagcgctacacacacccatgtatttcttcctcgctatactcagctgttccgagatttgctacaccttcgtcattgtcccgaagatgctggttgacttgctgtcacagaaaaagaccatcagcttcctggggtgcgcgatccagatgttcagttttctgtttttcgggagctcacactcttttctgctggcagctatgggatacgaccggtatatggcgatatgtaatcccctcaggtatagcgtcctgatggggcacggggtctgtatgggcctcatggcagctgcctgtgcctgcggattcacagtttcactggtgacaacttcccttgtctttcatctgccgtttcattcaagtaatcagctgcaccacttcttttgcgatatctcccccgtgctgaagttagcctcccagcattcagggtttagccagctcgtgatatttatgctgggcgtctttgccctcgtgatcccattattactgatcttggtctcctatatccgaataatctctgctattttgaagatcccaagctcggtgggcagatacaaaacgttcagtacatgcgcaagccacctcatagtggttaccgtgcattactcatgcgcgagcttcatctaccttaggccaaagacaaattataccagttctcaggacaccttgatttccgtctcttacacgattctcacgccactgttcaatccgatgatttattctctgaggaacaaagaattcaagagcgcactgcggagaacgattgggcaaaccttttatcctctctcttag

SEQ ID NO: 20790 - protein, 339 aa, Artificial Sequence
  derived and/or modified sequence
MEKREINSAFGVKSRYRYLGPLYVIYTYYHIRIILLFTQAPDLDLFPAANVSIMGAIKLSHNLHTPMYFFLCGLSFSETCTTVVVIPRMLVDFLSESKTISLPECATQMFFFLGFASNNCFIMAAMSYDRYTAIHNPLQYHTLMTRKICLQMMMASWMVGFLFSLCIIVTVFNLSLCDLNTIQHYFCDISPVVSLACNYTFYHEMAIFVLSAFVLVGSCILIMISYVFIVFIVIKMPSAKGRSKAFSTCSSHLTVVSIHYGFACFVYLRPKNSNSFDEDMLTAMIYTILMPLLNPIVYSLRNKEMQIALRKTLGSVFGVFPQKTKKEPEHLKKLHSIDK

SEQ ID NO: 20791 - protein, 314 aa, Artificial Sequence
  derived and/or modified sequence
MRGFNKTTVVTQFILVGFSSLGELQLLLFVIFLLLYLTILVANVTIMAVIRFSWTLHTPMYGFLFILSFSESCYTFVIIPQLLVHLLSDTKTISFMACATQLFFFLGFACTNCLLIAVMGYDRYVAICHPLRYTLIINKRLGLELISLSGATGFFIALVATNLICDMRFCGPNRVNHYFCDMAPVIKLACTDTHVKELALFSLSILVIMVPFLLILISYGFIVNTILKIPSAEGKKAFVTCASHLTVVFVHYGCASIIYLRPKSKSASDKDQLVAVTYTVVTPLLNPLVYSLRNKEVKTALKRVLGMPVATKMS

SEQ ID NO: 20792 - DNA, 1020 bp, Artificial Sequence
  derived and/or modified sequence
atggagaagagagagatcaacagcgccttcggcgtgaagagcagatacagatacctgggccccctgtacgtgatctacacctactaccacatcagaatcatcctgctgttcacccaggcccccgacctggacctgttccccgccgccaacgtgagcatcatgggcgccatcaagctgagccacaacctgcacacccccatgtacttcttcctgtgcggcctgagcttcagcgagacctgcaccaccgtggtggtgatccccagaatgctggtggacttcctgagcgagagcaagaccatcagcctgcccgagtgcgccacccagatgttcttcttcctgggcttcgccagcaacaactgcttcatcatggccgccatgagctacgacagatacaccgccatccacaaccccctgcagtaccacaccctgatgaccagaaagatctgcctgcagatgatgatggccagctggatggtgggcttcctgttcagcctgtgcatcatcgtgaccgtgttcaacctgagcctgtgcgacctgaacaccatccagcactacttctgcgacatcagccccgtggtgagcctggcctgcaactacaccttctaccacgagatggccatcttcgtgctgagcgccttcgtgctggtgggcagctgcatcctgatcatgatcagctacgtgttcatcgtgttcatcgtgatcaagatgcccagcgccaagggcagaagcaaggccttcagcacctgcagcagccacctgaccgtggtgagcatccactacggcttcgcctgcttcgtgtacctgagacccaagaacagcaacagcttcgacgaggacatgctgaccgccatgatctacaccatcctgatgcccctgctgaaccccatcgtgtacagcctgagaaacaaggagatgcagatcgccctgagaaagaccctgggcagcgtgttcggcgtgttcccccagaagaccaagaaggagcccgagcacctgaagaagctgcacagcatcgacaagtag

SEQ ID NO: 20793 - DNA, 945 bp, Artificial Sequence
  derived and/or modified sequence
atgagaggcttcaacaagaccaccgtggtgacccagttcatcctggtgggcttcagcagcctgggcgagctgcagctgctgctgttcgtgatcttcctgctgctgtacctgaccatcctggtggccaacgtgaccatcatggccgtgatcagattcagctggaccctgcacacccccatgtacggcttcctgttcatcctgagcttcagcgagagctgctacaccttcgtgatcatcccccagctgctggtgcacctgctgagcgacaccaagaccatcagcttcatggcctgcgccacccagctgttcttcttcctgggcttcgcctgcaccaactgcctgctgatcgccgtgatgggctacgacagatacgtggccatctgccaccccctgagatacaccctgatcatcaacaagagactgggcctggagctgatcagcctgagcggcgccaccggcttcttcatcgccctggtggccaccaacctgatctgcgacatgagattctgcggccccaacagagtgaaccactacttctgcgacatggcccccgtgatcaagctggcctgcaccgacacccacgtgaaggagctggccctgttcagcctgagcatcctggtgatcatggtgcccttcctgctgatcctgatcagctacggcttcatcgtgaacaccatcctgaagatccccagcgccgagggcaagaaggccttcgtgacctgcgccagccacctgaccgtggtgttcgtgcactacggctgcgccagcatcatctacctgagacccaagagcaagagcgccagcgacaaggaccagctggtggccgtgacctacaccgtggtgacccccctgctgaaccccctggtgtacagcctgagaaacaaggaggtgaagaccgccctgaagagagtgctgggcatgcccgtggccaccaagatgagctag

SEQ ID NO: 20794 - DNA, 1020 bp, Artificial Sequence
  derived and/or modified sequence
atggaaaagcgcgagattaattcagctttcggagtgaaaagtcggtacagatatctgggcccactgtatgtcatttatacctattaccatattagaatcatactgttgtttacacaggcgccagatctagatttgtttccagcggccaatgtgagcatcatgggggctatcaagttgagccacaaccttcacacaccaatgtatttttttctgtgcggactgagcttttctgagacctgcacaacagttgtggtgatcccccgaatgctggtcgacttcttgagcgagagcaagactatatctcttccggagtgcgcaacccagatgttctttttcctcggcttcgcatccaacaactgcttcattatggccgcgatgagctatgatcgctatacggctattcataaccccctgcagtatcatacgctgatgacccggaagatctgccttcagatgatgatggctagctggatggtgggttttctcttttccctgtgcataatcgttactgtttttaatctgtctctctgtgacctgaatacgatccagcattacttttgcgacattagtcccgtagtgagcctggcatgcaactacacattctatcacgagatggccattttcgtgctcagcgcttttgtgcttgttggctcttgcatccttattatgatttcttacgtattcattgtgttcattgtgatcaagatgccttcagctaagggccgaagcaaggcattttccacttgtagctctcacctgactgtggtgtcgatacattatggcttcgcttgttttgtgtatttgcgccccaaaaactctaactctttcgatgaagacatgttgaccgccatgatctatacaatcctgatgccgctcctaaacccaattgtgtattctcttaggaataaagaaatgcagatcgcgctgagaaagactctcgggagcgtttttggagtgttcccgcagaagaccaaaaaggaaccagagcacctgaaaaagcttcatagcatcgataaatag

SEQ ID NO: 20795 - DNA, 945 bp, Artificial Sequence
  derived and/or modified sequence
atgcgcggattcaacaagacaaccgtggtgacccagtttattcttgttgggttctcgtcactgggtgaactacaactgttactgttcgtgatatttctgctcttgtatctgacaatactggtagcaaacgtgacaattatggccgtgattcgattttcctggacgctgcacacccccatgtatggctttctgtttattctaagcttctctgaatcttgttataccttcgtcattatcccacagctcctggtgcatctcctgtcggataccaaaactatatcatttatggcctgcgccacccagctctttttctttctcgggtttgcctgtacaaactgtctgctcatagcagtgatggggtatgaccggtacgtcgccatatgtcaccccctgagatacacactcattattaacaagcggttgggcctggagctgatttctctttcaggcgctacagggttcttcatcgctctggtcgctaccaaccttatttgtgatatgcgcttctgcggccccaatagggtcaatcactacttctgtgatatggctcctgtgatcaagctcgcctgcactgacacccacgttaaagaattagcccttttttcactaagcatcttggttattatggtcccattcctgctgatcctcattagttacggctttatcgtgaacaccattctcaagatccctagtgctgaagggaagaaggcattcgtgacatgtgcttcacacttaactgtagtcttcgtgcactacgggtgtgcctctattatttatcttaggcccaagtccaaatcagcaagcgacaaggatcagctcgtcgccgtgacttacactgtcgtgacccccttactcaatcctctagtgtactcattgcgcaataaggaggtgaagaccgccctcaaacgggtgctgggcatgcctgtagctaccaaaatgtcttag

SEQ ID NO: 20796 - DNA, 1020 bp, Artificial Sequence
  derived and/or modified sequence
atggagaagcgggagatcaacagcgccttcggcgtgaagagccgctaccgctacctgggccccctgtatgtgatctacacctactaccacatccgcatcatcctgctcttcacccaggccccagacctggacctcttccctgctgccaacgtgtccatcatgggcgccatcaagctgagccacaacctgcacacccccatgtacttcttcctgtgtggcctgtccttcagcgagacctgcaccaccgtggtggtgatccccaggatgctggtggacttcctgtctgagagcaagaccatcagcctgcctgaatgtgccacccagatgttcttcttcctgggctttgccagcaacaactgcttcatcatggccgccatgtcctatgaccgctacacagccatccacaaccccctgcagtaccacaccctgatgaccaggaagatctgcctgcagatgatgatggcctcctggatggtgggcttcctgttcagcctgtgcatcatcgtgaccgtcttcaacctgagcctgtgtgacctgaacaccatccagcactacttctgtgacatcagccctgtggtgtccctggcctgcaactacaccttctaccacgagatggccatctttgtgctgagcgcctttgtgctggtgggcagctgcatcctgatcatgatctcctatgtgttcatcgtgttcatcgtcatcaagatgcccagcgccaagggccgcagcaaggccttcagcacctgcagcagccacctgactgtggtgtccatccactacggctttgcctgctttgtgtacctgcggcccaagaacagcaacagctttgatgaggacatgctgacagccatgatctacaccatcctgatgcccctgctgaaccccatcgtgtacagcctgaggaacaaggagatgcagatcgccctgaggaagaccctgggctctgtgtttggagtcttcccccagaagaccaagaaggagcctgagcacctgaagaagctgcacagcattgacaagtag

SEQ ID NO: 20797 - DNA, 945 bp, Artificial Sequence
  derived and/or modified sequence
atgaggggcttcaacaagaccaccgtggtgacccagttcatcctggtgggcttcagcagcctgggggagctgcagctgctgctgtttgtgatcttcctgctgctgtacctgaccatcctggtggccaacgtgaccatcatggccgtcatccgcttctcctggaccctgcacacccccatgtatggcttcctgttcatcctgtccttcagcgagagctgctacaccttcgtcatcatcccccagctgctggtgcacctgctgagtgacaccaagaccatctccttcatggcctgtgccacccagctgttcttcttcctgggctttgcctgcaccaactgcctgctgattgctgtgatgggctatgaccgctacgtggccatctgccaccccctgcgctacaccctcatcatcaacaagaggctgggcctggagctgatcagcctgagcggggccaccggcttcttcatcgccctggtggccaccaacctgatctgtgacatgaggttctgtggccccaacagagtgaaccactacttctgtgacatggcccctgtgatcaagctggcctgcacagacacccacgtgaaggagctggccctcttcagcctgagcatcctggtgatcatggtgcccttcctgctgatcctgatctcctatggcttcatcgtgaacaccatcctgaagatccccagcgctgagggcaagaaggcctttgtgacctgtgccagccacctgactgtggtgtttgtgcactacggctgtgccagcatcatctacctgcggcccaagagcaagagcgccagtgacaaggaccagctggtggccgtgacctacacagtggtgacccccctgctgaaccccctggtgtacagcctgaggaacaaggaggtgaagacagccctgaagagggtgctgggcatgcctgtggccaccaagatgtcctag

SEQ ID NO: 20798 - DNA, 1020 bp, Artificial Sequence
  derived and/or modified sequence
atggagaaaagagagataaacagtgcttttggggtaaaatccaggtataggtatttgggcccactctatgtcatctatacatattatcatattagaatcattcttctcttcactcaggctcctgaccttgacctctttccagctgcaaacgtgtccataatgggggccatcaagctcagccacaaccttcacactcctatgtactttttcctctgtggcctgtccttttcagaaacttgtaccactgtggtagtaatccctcgcatgttggtggactttctatcagagagcaagaccatttctcttcctgagtgtgccacacagatgtttttctttctgggctttgcatccaacaactgtttcatcatggccgctatgtcctacgaccgctacacggccatccacaacccactgcagtaccacacccttatgacaagaaagatctgcttgcagatgatgatggcttcttggatggttgggttcctgttttctctgtgcatcatcgtcactgtattcaacttgtctctttgcgacttgaacactatccagcactatttctgtgatatctcaccagtggtctcccttgcttgtaattacactttctatcatgaaatggctatttttgtgctctctgcctttgtgttggtgggcagctgtattttaattatgatttcctatgtcttcattgtgttcatagtcataaagatgccctctgcaaaggggaggtctaaggccttctcaacttgctcctcccacctcactgttgtgtccatacactatggatttgcttgctttgtctatttgaggcccaagaacagcaactccttcgatgaagacatgctgacggccatgatatatacaatactgatgcctctgcttaaccccatcgtgtacagtctgagaaacaaagaaatgcagatagccctaagaaaaacactaggcagtgtatttggggttttccctcagaagacaaaaaaagagcctgaacatttaaaaaaattacacagcattgataaataa
